United States Patent Application Publication US 2018/0126003 A1 - sequence listing, part 8

SEQ ID NO: 9637 - DNA, 780 bp, Artificial Sequence
  derived and/or modified sequence
atgtactctaatgttataggcaccgtgacttctgggaagaggaaggtgtatctcttgtccttgctgctcatcggattctgggactgcgtaacttgtcacggatctccagtggacatttgcacagctaaaccaagagatatccccatgaaccctatgtgtatttacagatccccagaaaaaaaagccacagaagacgagggaagcgagcagaagatccccgaggcaactaatagacgcgtgtgggaactctccaaggctaactctagattcgccaccactttctaccagcatttagcagacagtaaaaatgacaacgataacatcttcctatcccctctgagcatctcaacagcattcgctatgaccaaactcggagcttgtaatgatacccttcaacagctaatggaggtttttaaattcgataccattagtgagaaaacttccgatcagatacacttcttcttcgctaagttgaactgcagactgtaccgtaaagcgaataagtcttctaaattagtttctgctaaccgactgtttggtgacaaatctttaacgtttaacgacctgtatgtgagtgacgccttccataaagccttcctggaagtgaatgaagaggggagcgaagcagcggcaagtacagctgtcgttattgccgggagatccctcaacccgaacagagtgaccttcaaagccaaccgcccttttctagtttttatcagggaagtaccattgaacaccattatcttcatggggagagtggctaatccgtgcgttaagtag

SEQ ID NO: 9638 - DNA, 1395 bp, Artificial Sequence
  derived and/or modified sequence
atgtattccaacgttatcggcactgtgacatcagggaagcgaaaggtctacctgctttcccttcttttgattgggttttgggattgtgtgacgtgtcacgggtccccagtggacatctgcacagccaaacctagagatattccaatgaacccgatgtgcatttaccgaagtcctgaaaagaaggccaccgaagacgaaggttcagaacaaaagatacccgaagccacaaatagaagagtctgggagttatcaaaagctaatagcagattcgcaaccactttttaccagcatcttgcagacagcaagaacgataatgacaacatcttccttagcccactgtccatttctactgctttcgctatgacaaagcttggagcctgcaacgacaccctgcagcaactcatggaagtatttaagttcgacacgatcagtgagaaaaccagcgaccaaattcattttttctttgctaaactcaactgcagactgtatcgaaaagccaacaaatcctcgaagttagtgagcgccaaccgactctttggggataaatccctgaccttcaacgaaacatatcaagacatcagtgagctggtatacggagcgaagcttcaaccgctggacttcaaggaaaatgcagagcaatcaagagctgccataaataagtgggtatcgaataaaacagaaggaagaatcacagacgtaatccccagcgaggcaatcaatgaattgactgtacttgttctcgttaacacaatatacttcaagggcttatggaagagtaagttctcaccagaaaatacgcgaaaagagctgttttacaaggctgatggcgagtcctgttcagcttccatgatgtatcaggagggcaagtttcggtatagacgagttgcagaggggacacaggtcctcgaattgcccttcaagggcgacgacattactatggtcctcatactgccaaagcccgagaaatctctcgccaaagtggagaaagaacttacccctgaagtgttacaagaatggctcgacgagctggaggaaatgatgttggtggtgcacatgcctcgtttcagaattgaagacggttttagcttaaaagagcaactccaggacatgggcctggttgatttgtttagtccagaaaagtctaagttacctggcattgtcgctgaaggaagagacgatctttatgtctccgatgctttccacaaggcctttctcgaggttaatgaagaaggttctgaagccgctgcctctaccgcagtggtgatagctggccgaagcctgaatcctaaccgcgtcacattcaaagccaacaggccctttcttgtcttcatcagagaagtcccactgaataccatcattttcatgggtagagtcgccaatccttgcgtcaagtag

SEQ ID NO: 9639 - DNA, 958 bp, Artificial Sequence
  derived and/or modified sequence
ggaacctctgcgagatttagaggaaagaaccagttttcaggcggattgcctcagatcacactatctccacttgcccagccctgtggaagattagcggccatgtattccaatgtgataggaactgtaacctctggaaaaaggaaggtttatcttttgtccttgctgctcattggcttctgggactgcgtgacctgtcacgggagccctgtggacatctgcacagccaagccgcgggacattcccatgaatcccatgtgcatttaccgctccccggagaagaaggcaactgaggatgagggctcagaacagaagatcccggaggccaccaaccggcgtgtctgggaactgtccaaggccaattcccgctttgctaccactttctatcagcacctggcagattccaagaatgacaatgataacattttcctgtcacccctgagtatctccacggcttttgctatgaccaagctgggtgcctgtaatgacaccctccagcaactgatggaggtatttaagtttgacaccatatctgagaaaacatctgatcagatccacttcttctttgccaaactgaactgccgactctatcgaaaagccaacaaatcctccaagttagtatcagccaatcgcctttttggagacaaatcccttaccttcaatgacctctatgtctcagatgcattccataaggcatttcttgaggtaaatgaagaaggcagtgaagcagctgcaagtaccgctgttgtgattgctggccgttcgctaaaccccaacagggtgactttcaaggccaacaggcctttcctggtttttataagagaagttcctctgaacactattatcttcatgggcagagtagccaacccttgtgttaagtaaaatgttcttattctttgcacctcttcctatttttggtttgtgaacagaagtaaaaataaatacaaactacttccatctc

SEQ ID NO: 9640 - DNA, 1594 bp, Artificial Sequence
  derived and/or modified sequence
tctgccccaccctgtcctctggaacctctgcgagatttagaggaaagaaccagttttcaggcggattgcctcagatcacactatctccacttgcccagccctgtggaagattagcggccatgtattccaatgtgataggaactgtaacctctggaaaaaggaaggtttatcttttgtccttgctgctcattggcttctgggactgcgtgacctgtcacgggagccctgtggacatctgcacagccaagccgcgggacattcccatgaatcccatgtgcatttaccgctccccggagaagaaggcaactgaggatgagggctcagaacagaagatcccggaggccaccaaccggcgtgtctgggaactgtccaaggccaattcccgctttgctaccactttctatcagcacctggcagattccaagaatgacaatgataacattttcctgtcacccctgagtatctccacggcttttgctatgaccaagctgggtgcctgtaatgacaccctccagcaactgatggaggtatttaagtttgacaccatatctgagaaaacatctgatcagatccacttcttctttgccaaactgaactgccgactctatcgaaaagccaacaaatcctccaagttagtatcagccaatcgcctttttggagacaaatcccttaccttcaatgagacctaccaggacatcagtgagttggtatatggagccaagctccagcccctggacttcaaggaaaatgcagagcaatccagagcggccatcaacaaatgggtgtccaataagaccgaaggccgaatcaccgatgtcattccctcggaagccatcaatgagctcactgttctggtgctggttaacaccatttacttcaagggcctgtggaagtcaaagttcagccctgagaacacaaggaaggaactgttctacaaggctgatggagagtcgtgttcagcatctatgatgtaccaggaaggcaagttccgttatcggcgcgtggctgaaggcacccaggtgcttgagttgcccttcaaaggtgatgacatcaccatggtcctcatcttgcccaagcctgagaagagcctggccaaggtagagaaggaactcaccccagaggtgctgcaagagtggctggatgaattggaggagatgatgctggtggtccacatgccccgcttccgcattgaggacggcttcagtttgaaggagcagctgcaagacatgggccttgtcgatctgttcagccctgaaaagtccaaactcccaggtattgttgcagaaggccgagatgacctctatgtctcagatgcattccataaggcatttcttgaggtaaatgaagaaggcagtgaagcagctgcaagtaccgctgttgtgattgctggccgttcgctaaaccccaacagggtgactttcaaggccaacaggcctttcctggtttttataagagaagttcctctgaacactattatcttcatgggcagagtagccaacccttgtgttaagtaaaatgttcttattctttgcacctcttcctatttttggtttgtgaacagaagtaaaaataaatacaaactacttccatctca

SEQ ID NO: 9641 - RNA, 780 nt, Artificial Sequence
  derived and/or modified sequence
auguacaguaacguuaucggaaccguaacaaguggaaagaggaaagucuaucugcuaagccuccugcuaaucggauucugggauugcguuacuugccacggcagccccgucgauauuugcaccgcaaagccacgcgacauacccaugaacccaauguguauauaccggaguccagaaaagaaagcgacagaggacgagggguccgaacaaaaaauaccugaagccacuaaccgcagagucugggagcugaguaaggcaaacucucgauucgccacaaccuucuaucaacaucuggccgacaguaaaaacgauaaugauaacauauuccuguccccacuuuccaucucaacagcuuuugccaugaccaaacugggagcauguaaugacacccuucaacaauugauggaaguguucaaguuugacaccauuagugaaaaaaccuccgaucagauucacuucuuuuuugccaagcugaacugccgcuuauauagaaaggccaacaagaguuccaaacuaguaagcgccaaucgccuguuuggugauaaaagccugacauucaacgaccuauacguguccgacgccuuccauaaggccuuucucgaaguaaacgaggaagggucugaagcugccgccuccacggccguagugauugcuggccggagucuuaauccuaaccgcgucacuuuuaaagcaaaccggccauuccucgucuucauucgggaggugccccuaaauacaauuauuuucaugggcagaguagcuaaccccugugucaaauag

SEQ ID NO: 9642 - RNA, 1395 nt, Artificial Sequence
  derived and/or modified sequence
auguauagcaacguuauugguaccgugacauccggcaaaaggaaagucuaccugcugucucuguuauugauaggguuuugggacugcguaaccugccacggaagcccaguagauaucuguaccgcaaaaccucgcgacaucccuaugaaccccaugugcaucuaucggaguccugagaaaaaagcaacagaggacgaggguuccgagcagaagauucccgaagcuacaaaccggcgaguaugggagcuguccaaggcuaacucaagauuugcuacgacauucuaccaacaccucgccgacuccaagaacgauaaugauaacauuuuucucucuccuuugagcauaucaacagccuuugccaugaccaaguugggugccugcaacgauacucuucaacagcugauggagguguuuaaauucgacaccauauccgagaagaccagcgaucagauucauuucuuuuucgcuaaacucaacuguagauuguaccgcaaggccaauaaauccucuaagcucgugucagcgaaucgauuguuuggcgauaaaagccucaccuuuaacgagacauaucaggacauuucugaacuagucuauggugcgaagcuccagccccuagacuucaaggagaacgcugagcagucuagggccgcuaucaacaaauggguuaguaauaagacagaaggcagaaucaccgauguuauaccgucagaggccaucaacgaauuaaccguuuuagugcuggugaauaccaucuacuuuaaaggacuguggaagagcaaguuuucacccgaaaacacccggaaagaacucuuuuauaaagcugauggagagagcuguucagcuucgaugauguaucaggagggaaaauuccgcuaucgucgagucgcugaggguacucaaguacuggaauugccuuuuaaaggcgaugauaucacaauggugcucauacucccaaagccugagaagucacuggccaaggucgagaaggaguuaaccccagaaguguugcaagaguggcuggaugaacucgaagaaaugaugcugguggugcacaugccccguuuccgcauugaggacggguuuucacuuaaagagcaauuacaggacaugggccuaguagaccucuucagccccgagaagucaaagcugccuggcauaguggcugaaggcagggacgacuuguacgucucggacgccuuucacaaagcauuccucgaagugaaugaagaagguuccgaagcggcagccagcaccgcuguggugaucgcuggacggagccugaauccgaaucgugugaccuucaaagcuaauaggccuuuccucguuuucaucagggaggucccucugaacaccauuaucuuuauggggagggucgcuaaucccugcgucaaauag

SEQ ID NO: 9643 - RNA, 780 nt, Artificial Sequence
  derived and/or modified sequence
auguacucuaauguuauaggcaccgugacuucugggaagaggaagguguaucucuuguccuugcugcucaucggauucugggacugcguaacuugucacggaucuccaguggacauuugcacagcuaaaccaagagauauccccaugaacccuauguguauuuacagauccccagaaaaaaaagccacagaagacgagggaagcgagcagaagauccccgaggcaacuaauagacgcgugugggaacucuccaaggcuaacucuagauucgccaccacuuucuaccagcauuuagcagacaguaaaaaugacaacgauaacaucuuccuauccccucugagcaucucaacagcauucgcuaugaccaaacucggagcuuguaaugauacccuucaacagcuaauggagguuuuuaaauucgauaccauuagugagaaaacuuccgaucagauacacuucuucuucgcuaaguugaacugcagacuguaccguaaagcgaauaagucuucuaaauuaguuucugcuaaccgacuguuuggugacaaaucuuuaacguuuaacgaccuguaugugagugacgccuuccauaaagccuuccuggaagugaaugaagaggggagcgaagcagcggcaaguacagcugucguuauugccgggagaucccucaacccgaacagagugaccuucaaagccaaccgcccuuuucuaguuuuuaucagggaaguaccauugaacaccauuaucuucauggggagaguggcuaauccgugcguuaaguag

SEQ ID NO: 9644 - RNA, 1395 nt, Artificial Sequence
  derived and/or modified sequence
auguauuccaacguuaucggcacugugacaucagggaagcgaaaggucuaccugcuuucccuucuuuugauuggguuuugggauugugugacgugucacggguccccaguggacaucugcacagccaaaccuagagauauuccaaugaacccgaugugcauuuaccgaaguccugaaaagaaggccaccgaagacgaagguucagaacaaaagauacccgaagccacaaauagaagagucugggaguuaucaaaagcuaauagcagauucgcaaccacuuuuuaccagcaucuugcagacagcaagaacgauaaugacaacaucuuccuuagcccacuguccauuucuacugcuuucgcuaugacaaagcuuggagccugcaacgacacccugcagcaacucauggaaguauuuaaguucgacacgaucagugagaaaaccagcgaccaaauucauuuuuucuuugcuaaacucaacugcagacuguaucgaaaagccaacaaauccucgaaguuagugagcgccaaccgacucuuuggggauaaaucccugaccuucaacgaaacauaucaagacaucagugagcugguauacggagcgaagcuucaaccgcuggacuucaaggaaaaugcagagcaaucaagagcugccauaaauaaguggguaucgaauaaaacagaaggaagaaucacagacguaauccccagcgaggcaaucaaugaauugacuguacuuguucucguuaacacaauauacuucaagggcuuauggaagaguaaguucucaccagaaaauacgcgaaaagagcuguuuuacaaggcugauggcgaguccuguucagcuuccaugauguaucaggagggcaaguuucgguauagacgaguugcagaggggacacagguccucgaauugcccuucaagggcgacgacauuacuaugguccucauacugccaaagcccgagaaaucucucgccaaaguggagaaagaacuuaccccugaaguguuacaagaauggcucgacgagcuggaggaaaugauguugguggugcacaugccucguuucagaauugaagacgguuuuagcuuaaaagagcaacuccaggacaugggccugguugauuuguuuaguccagaaaagucuaaguuaccuggcauugucgcugaaggaagagacgaucuuuaugucuccgaugcuuuccacaaggccuuucucgagguuaaugaagaagguucugaagccgcugccucuaccgcaguggugauagcuggccgaagccugaauccuaaccgcgucacauucaaagccaacaggcccuuucuugucuucaucagagaagucccacugaauaccaucauuuucauggguagagucgccaauccuugcgucaaguag

SEQ ID NO: 9645 - protein, 2492 aa, Artificial Sequence
  derived and/or modified sequence
MTAEPMSESKLNTLVQKLHDFLAHSSEESEETSSPPRLAMNQNTDKISGSGSNSDMMENSKEEGTSSSEKSKSSGSSRSKRKPSIVTKYVESDDEKPLDDETVNEDASNENSENDITMQSLPKGTVIVQPEPVLNEDKDDFKGPEFRSRSKMKTENLKKRGEDGLHGIVSCTACGQQVNHFQKDSIYRHPSLQVLICKNCFKYYMSDDISRDSDGMDEQCRWCAEGGNLICCDFCHNAFCKKCILRNLGRKELSTIMDENNQWYCYICHPEPLLDLVTACNSVFENLEQLLQQNKKKIKVDSEKSNKVYEHTSRFSPKKTSSNCNGEEKKLDDSCSGSVTYSYSALIVPKEMIKKAKKLIETTANMNSSYVKFLKQATDNSEISSATKLRQLKAFKSVLADIKKAHLALEEDLNSEFRAMDAVNKEKNTKEHKVIDAKFETKARKGEKPCALEKKDISKSEAKLSRKQVDSEHMHQNVPTEEQRTNKSTGGEHKKSDRKEEPQYEPANTSEDLDMDIVSVPSSVPEDIFENLETAMEVQSSVDHQGDGSSGTEQEVESSSVKLNISSKDNRGGIKSKTTAKVTKELYVKLTPVSLSNSPIKGADCQEVPQDKDGYKSCGLNPKLEKCGLGQENSDNEHLVENEVSLLLEESDLRRSPRVKTTPLRRPTETNPVTSNSDEECNETVKEKQKLSVPVRKKDKRNSSDSAIDNPKPNKLPKSKQSETVDQNSDSDEMLAILKEVSRMSHSSSSDTDINEIHTNHKTLYDLKTQAGKDDKGKRKRKSSTSGSDFDTKKGKSAKSSIISKKKRQTQSESSNYDSELEKEIKSMSKIGAARTTKKRIPNTKDFDSSEDEKHSKKGMDNQGHKNLKTSQEGSSDDAERKQERETFSSAEGTVDKDTTIMELRDRLPKKQQASASTDGVDKLSGKEQSFTSLEVRKVAETKEKSKHLKTKTCKKVQDGLSDIAEKFLKKDQSDETSEDDKKQSKKGTEEKKKPSDFKKKVIKMEQQYESSSDGTEKLPEREEICHFPKGIKQIKNGTTDGEKKSKKIRDKTSKKKDELSDYAEKSTGKGDSCDSSEDKKSKNGAYGREKKRCKLLGKSSRKRQDCSSSDTEKYSMKEDGCNSSDKRLKRIELRERRNLSSKRNTKEIQSGSSSSDAEESSEDNKKKKQRTSSKKKAVIVKEKKRNSLRTSTKRKQADITSSSSSDIEDDDQNSIGEGSSDEQKIKPVTENLVLSSHTGFCQSSGDEALSKSVPVTVDDDDDDNDPENRIAKKMLLEEIKANLSSDEDGSSDDEPEEGKKRTGKQNEENPGDEEAKNQVNSESDSDSEESKKPRYRHRLLRHKLTVSDGESGEEKKTKPKEHKEVKGRNRRKVSSEDSEDSDFQESGVSEEVSESEDEQRPRTRSAKKAELEENQRSYKQKKKRRRIKVQEDSSSENKSNSEEEEEEKEEEEEEEEEEEEEEEDENDDSKSPGKGRKKIRKILKDDKLRTETQNALKEEEERRKRIAEREREREKLREVIEIEDASPTKCPITTKLVLDEDEETKEPLVQVHRNMVIKLKPHQVDGVQFMWDCCCESVKKTKKSPGSGCILAHCMGLGKTLQVVSFLHTVLLCDKLDFSTALVVCPLNTALNWMNEFEKWQEGLKDDEKLEVSELATVKRPQERSYMLQRWQEDGGVMIIGYEMYRNLAQGRNVKSRKLKEIFNKALVDPGPDFVVCDEGHILKNEASAVSKAMNSIRSRRRIILTGTPLQNNLIEYHCMVNFIKENLLGSIKEFRNRFINPIQNGQCADSTMVDVRVMKKRAHILYEMLAGCVQRKDYTALTKFLPPKHEYVLAVRMTSIQCKLYQYYLDHLTGVGNNSEGGRGKAGAKLFQDFQMLSRIWTHPWCLQLDYISKENKGYFDEDSMDEFIASDSDETSMSLSSDDYTKKKKKGKKGKKDSSSSGSGSDNDVEVIKVWNSRSRGGGEGNVDETGNNPSVSLKLEESKATSSSNPSSPAPDWYKDFVTDADAEVLEHSGKMVLLFEILRMAEEIGDKVLVFSQSLISLDLIEDFLELASREKTEDKDKPLIYKGEGKWLRNIDYYRLDGSTTAQSRKKWAEEFNDETNVRGRLFIISTKAGSLGINLVAANRVIIFDASWNPSYDIQSIFRVYRFGQTKPVYVYRFLAQGTMEDKIYDRQVTKQSLSFRVVDQQQVERHFTMNELTELYTFEPDLLDDPNSEKKKKRDTPMLPKDTILAELLQIHKEHIVGYHEHDSLLDHKEEEELTEEERKAAWAEYEAEKKGLTMRFNIPTGTNLPPVSFNSQTPYIPFNLGALSAMSNQQLEDLINQGREKVVEATNSVTAVRIQPLEDIISAVWKENMNLSEAQVQALALSRQASQELDVKRREAIYNDVLTKQQMLISCVQRILMNRRLQQQYNQQQQQQMTYQQATLGHLMMPKPPNLIMNPSNYQQIDMRGMYQPVAGGMQPPPLQRAPPPMRSKNPGPSQGKSM

SEQ ID NO: 9646 - DNA, 75 bp, Artificial Sequence
  derived and/or modified sequence
atgtcggacctgctactactgggcctgattgggggcctgactctcttactgctgctgacgctgctagcctttgcc

SEQ ID NO: 9647 - DNA, 7479 bp, Artificial Sequence
  derived and/or modified sequence
atgacagccgaaccgatgtctgaatcaaaattgaatacgttggtgcaaaagttacacgactttcttgcccacagttctgaagagtctgaggagacttccagcccaccaagactcgcaatgaatcaaaacaccgataagataagtggaagtgggagcaattcagatatgatggagaactcgaaggaggagggtaccagtagctccgagaaatctaagtcctcaggctccagtcggtcaaaacgaaaaccctccatagtgacaaagtatgtcgaaagtgatgacgagaaacccctggacgatgagacagttaacgaagacgctagtaatgagaactccgagaacgacataacaatgcagtccttaccaaaaggaaccgtcatcgttcagcctgagcccgttctgaatgaggataaggatgactttaagggaccagaattccggagcaggtcaaaaatgaaaacagaaaatctcaaaaagaggggtgaagacggtcttcacgggatcgtgtcgtgtaccgcatgtggccaacaggtcaatcacttccagaaggactctatttatcgccacccaagccttcaggttctgatctgtaagaactgctttaagtactacatgtctgacgatatctctcgcgacagtgacggaatggatgagcaatgccgctggtgcgcagagggtggaaacctgatttgctgtgacttctgccacaacgccttttgcaagaagtgtatcctgcgcaatctgggcaggaaagaactttcaacaatcatggacgagaataatcagtggtattgttacatatgtcacccagagccactgttggatttggtgactgcctgtaactccgtgtttgaaaacctggaacagctgctccagcaaaataagaaaaaaattaaagtggacagcgagaaatccaacaaggtgtacgagcacacaagtagattttcccctaagaaaaccagttcaaactgtaacggggaagaaaaaaagctggatgactcctgcagcggctcagtcacgtattcctactccgcgctgattgttcccaaggagatgattaagaaagccaagaagctcatagaaacaacagccaacatgaactccagctacgtaaaatttctaaagcaagccaccgacaattcagagatatccagcgccacaaaattgcgccagttaaaggccttcaagtcggtgctggcagacatcaaaaaagcacacctggctctggaagaggatctgaattcggaattcagggccatggacgccgtgaacaaggaaaaaaacaccaaagagcataaagtcatagatgccaaattcgagacaaaggcacgcaaaggcgagaaaccatgcgctcttgaaaagaaagatatcagcaagtccgaagccaagctgtcacgtaaacaggtcgacagtgagcacatgcaccaaaacgtccctactgaggagcaacggacaaacaaatccaccggaggggaacacaagaagtcagaccggaaggaggagccacagtacgaacctgcgaacaccagtgaagacctggacatggacatcgtgtccgtgccatctagcgtgccagaggacatatttgaaaatcttgagacagccatggaggtgcagagctctgtagatcatcagggggacgggtcttccggaactgagcaggaggtggagtcgtcatccgtgaagttaaatatctcatcaaaggacaaccggggaggcattaaaagtaagacgaccgctaaggtaaccaaggaactgtacgttaagctgacacccgtaagcctgtcaaattcccctatcaagggggctgactgccaagaagtgccgcaggataaggacggatataagtcctgcgggttaaaccctaagttagagaaatgcggcctcgggcaggaaaatagtgacaacgaacatcttgtcgaaaatgaggtgagtttacttctggaggagagtgacctgaggcggtctccccgtgtcaagactacccctctcagacggccaacagagactaatcccgttacatcaaactcagatgaggagtgtaatgaaaccgtaaaggaaaagcaaaaactctccgtgcctgtgcgaaaaaaagacaaaagaaatagttccgatagcgctattgataatcctaagcccaataaattgcccaaatctaaacaaagcgagacggtggaccaaaacagcgatagcgatgaaatgctggccatacttaaggaggttagtagaatgtcccactctagcagcagtgatactgatatcaatgagatccataccaatcacaagactctgtatgacctaaaaacacaggccggcaaagatgacaagggtaaaagaaaacggaaatcaagcacttcaggctctgactttgacactaaaaaagggaaaagtgctaaatcctctattatttcaaaaaaaaaaaggcagacccagtctgagtccagcaactacgacagtgaattggagaaggagataaagtctatgtcaaagatcggagcggctaggactactaagaagaggatccccaacacaaaagatttcgacagcagcgaggacgaaaagcacagtaagaagggaatggacaaccagggtcacaaaaatttgaagaccagtcaggaggggagttccgatgacgcagagaggaagcaggagagagagaccttcagtagtgcggaaggaaccgtggacaaagacacgaccattatggagctgcgcgatcggcttccaaaaaagcagcaggcatctgcttctacagacggtgtcgataaactgagcgggaaagagcagtcatttacttccctggaggtccggaaagtggcggagaccaaggagaagagcaaacacttgaagacaaagacatgcaagaaagtgcaggacggattgtctgatatcgcagaaaaatttctgaaaaaggatcagtccgatgagacatccgaagacgacaaaaagcagtcaaagaaagggactgaagagaagaaaaaaccatctgattttaagaaaaaagttatcaagatggaacagcaatacgagagttcatccgacgggaccgaaaagctccccgaaagagaggaaatctgccactttccaaagggcatcaaacagattaagaatggtacaaccgacggcgagaaaaagtcgaagaaaatccgcgacaagacatctaaaaagaaagacgaattgagtgactatgcggaaaaaagcacaggcaagggagatagctgtgattcgtctgaggacaaaaagtcaaaaaatggagcatacggtcgcgaaaagaagcggtgcaaattactgggtaagagttctcgaaaacggcaggactgctcaagcagtgatacagaaaagtacagtatgaaagaggatggatgcaactccagtgacaagaggcttaagagaattgagctgcgggaacgccgaaacctatcatctaagagaaacactaaagagatacagagtgggtctagtagttcggacgccgaggaaagtagtgaagataataaaaagaaaaagcagcggacttccagcaagaagaaagcagtgattgtaaaggagaagaagagaaacagtttacgcacttccactaaacggaagcaggccgacattacttcaagttcctcatcggacatcgaggatgacgaccaaaatagcattggtgagggcagtagcgacgaacagaaaatcaaacctgtaaccgaaaacctagtcctgtcctcgcataccgggttctgccaatccagcggcgacgaggccttgtccaaatccgtacccgtcacagttgacgacgacgatgatgacaacgatccggaaaaccgcatcgccaaaaagatgctgctggaggagatcaaggcaaacctgagtagtgacgaggacggttccagtgacgacgagcctgaagagggaaagaagagaactggcaagcagaacgaggagaatccaggggacgaggaggcaaagaaccaggtgaattcagagagtgactccgatagcgaggagtctaagaagccgcgatacaggcatagactgttacggcataagctgaccgtgtccgacggcgagagcggggaggagaagaagaccaagcccaaagaacacaaggaggtgaaggggaggaaccgccgcaaggtaagcagtgaggactctgaagactccgacttccaggagagcggagtatccgaggaagtgtccgagtctgaggacgagcagcggccccggacccggagcgctaagaaggcagaactagaggagaatcagaggagctataagcagaaaaagaagcggcgccgcatcaaagtgcaggaggattcaagctcggagaacaagtcaaatagcgaagaagaagaggaggaaaaagaagaagaagaagaggaggaagaggaggaggaggaagaagaggaggatgagaatgatgacagcaagagtcctgggaagggcaggaagaaaataaggaaaattctcaaggacgacaagcttcgtacggagacacagaacgcactgaaagaggaggaggagcggaggaaacggatcgccgaaagggaaagggagcgcgaaaaactacgcgaagtcattgagatcgaagacgcaagccctactaagtgtcctattactaccaagctggtactggatgaggacgaggagactaaagagccacttgtgcaggtccaccggaacatggtgatcaagctcaaaccacaccaggtggatggcgtgcagttcatgtgggattgctgctgcgagtctgtaaaaaaaacaaaaaagtcaccaggatccgggtgcattttggctcactgcatggggttgggaaagacgctccaagtggtcagcttcctccacaccgtgctgctgtgcgacaaacttgacttttccaccgcgcttgttgtctgcccactgaacacagccctgaactggatgaacgagtttgaaaagtggcaagagggcctcaaggacgacgagaaactggaagtctctgagctggccaccgtaaagagaccacaggaaaggagctacatgctgcagcggtggcaagaggatgggggggtgatgatcattgggtacgagatgtatcggaatttagcccagggaaggaacgtgaaaagccggaagctgaaggagatttttaataaagccctggtggatccggggcccgacttcgtggtatgcgatgagggccacattctaaaaaatgaggctagcgcagtgtcgaaggcaatgaacagcattcgaagtcgccggcggatcattctcacaggaacaccccttcagaacaatttgatcgagtaccattgtatggttaactttattaaggagaacttgctcgggagtatcaaggaatttcgaaaccgatttataaacccaatacaaaatggtcagtgtgcagacagcaccatggtggatgttcgcgtcatgaagaagcgtgctcacatactgtatgagatgttggccggctgcgtgcaaaggaaggattatacagcgctcacaaaatttctcccccccaagcacgaatacgtgctggccgtgcggatgaccagcattcaatgtaaactgtaccaatattacctggatcaccttacaggtgtggggaataacagcgaggggggcaggggcaaggctggagccaagctgtttcaggactttcagatgttatccagaatttggacccatccctggtgcctgcaactcgattatatctcaaaagagaacaagggatactttgacgaagacagcatggatgagttcattgcttcggattcagacgagacttctatgagccttagctctgacgactacacaaaaaaaaaaaagaaaggtaaaaaagggaagaaagactcctcctctagtggatcaggatccgacaatgatgtggaggtaatcaaggtttggaacagccggagcaggggaggaggtgaagggaacgtggacgagacgggcaataacccttccgtctcactaaaattggaggaatctaaggctactagtagctctaacccttcgtctcctgcgccagactggtacaaagatttcgtgactgatgccgacgcagaagttctggagcacagtggcaagatggtgttgctttttgaaatcctgaggatggcagaagaaatcggcgacaaggtgctggtcttttctcagagtctgattagcctcgacttgatcgaggactttcttgagctggccagcagggagaaaaccgaagataaagacaaacctctgatctataagggagagggaaagtggctcagaaacatcgactactatcggctagatggatccacaactgcacaatctagaaagaaatgggcagaagagttcaacgacgagaccaacgtgagaggcagactgtttatcatcagtaccaaagccggctcgctcggcattaacctagtcgcagctaaccgcgtgatcattttcgacgcatcatggaacccctcgtacgatatccagagcatcttccgcgtctatcgattcggccagaccaagccagtctacgtgtacaggtttcttgcccaggggaccatggaagataagatttatgaccgccaggtcaccaagcagtcattgtctttccgagtggttgaccagcagcaagtcgaacggcatttcacaatgaacgaacttactgaattatacaccttcgagcccgatctgctcgatgacccaaattctgagaaaaagaagaagcgggataccccaatgttgcccaaagacaccatactagcagagctgctgcaaatccataaggaacatatcgtgggctatcacgaacatgactctctgcttgaccacaaggaagaagaagaattaaccgaagaggagcgtaaggccgcctgggctgaatatgaggcagagaaaaaaggactgactatgagattcaatattccgacagggacaaatctccctccggtctcttttaacagccagactccgtatattccattcaatctgggagccctgtccgccatgagtaatcagcagttggaggacttgataaaccagggccgcgaaaaggtggtggaagcaaccaattccgtgaccgcagtgaggatacagccgctggaggatatcatatccgcagtttggaaggagaatatgaatctgtccgaggcacaagtgcaggccttagccctaagccgtcaggcatcacaggagctcgacgtgaagcgccgtgaggcgatctataacgatgtgctgacaaagcagcagatgttaatatcatgcgtacaaaggattctgatgaataggcggttacagcagcagtataaccagcagcagcagcagcaaatgacttatcagcaggccactttggggcatttgatgatgcccaagccgcctaatctcattatgaatccttcaaactaccaacagatcgacatgcgtgggatgtatcagcccgtggctggcggaatgcagcccccacccttgcagcgagcgccacctccgatgcgatcgaagaaccccggaccgtctcaaggcaaatctatgtag

SEQ ID NO: 9648 - DNA, 7479 bp, Artificial Sequence
  derived and/or modified sequence
atgacagctgagcccatgtctgagagcaagctgaacaccctggtgcagaagctgcatgacttcctggcccacagcagcgaggagagcgaggagaccagcagccccccccggctggccatgaaccagaacacagacaagatcagcggcagcggcagcaacagcgacatgatggagaacagcaaggaggagggcaccagcagcagcgagaagagcaagagcagcggcagcagccgcagcaagaggaagcccagcatcgtgaccaagtatgtggagagtgatgatgagaagcccctggatgatgagaccgtgaatgaagatgccagcaatgaaaattctgaaaatgacatcaccatgcagagcctgcccaagggcaccgtgattgtgcagcctgagcctgtgctgaatgaagacaaggatgacttcaagggccctgagttccgcagccgcagcaagatgaagacagagaacctgaagaagagaggagaagatggcctgcacggcatcgtgtcctgcacagcctgtggccagcaggtgaaccacttccagaaggacagcatctaccgccaccccagcctgcaggtgctgatctgcaagaactgcttcaagtactacatgtctgatgacatcagccgggacagtgatggcatggatgagcagtgccgctggtgtgccgagggcggcaacctgatctgctgtgacttctgccacaatgccttctgcaagaagtgcatcctgaggaacctgggcaggaaggagctgagcaccatcatggatgagaacaaccagtggtactgctacatctgccaccctgagcccctgctggacctggtgacagcctgcaacagcgtgtttgagaacctggagcagctgctgcagcagaacaagaagaagatcaaggtggacagcgagaagagcaacaaggtgtatgagcacaccagccgcttcagccccaagaagaccagcagcaactgcaatggagaggagaagaagctggatgacagctgcagcggctctgtgacctacagctacagcgccctgattgtgcccaaggagatgatcaagaaggccaagaagctgattgagaccacagccaacatgaacagcagctatgtgaagttcctgaagcaggccacagacaacagcgagatcagcagcgccaccaagctgcggcagctgaaggccttcaagtctgtgctggccgacatcaagaaggcccacctggccctggaggaggacctgaacagcgagttccgggccatggatgctgtgaacaaggagaagaacaccaaggagcacaaggtgattgatgccaagtttgagaccaaggccaggaaaggagagaagccctgtgccctggagaagaaggacatcagcaagtctgaggccaagctgagcaggaagcaggtggacagcgagcacatgcaccagaatgtgcccacagaggagcagaggaccaacaagagcactggaggagagcacaagaagagtgacaggaaggaggagccccagtatgagcccgccaacaccagcgaggacctggacatggacatcgtgtctgtgcccagctctgtgcctgaggacatctttgagaacctggagacagccatggaggtgcagagctctgtggaccaccagggagatggcagcagcggcacagagcaggaggtggagagcagctctgtgaagctgaacatcagcagcaaggacaacagaggaggcatcaagagcaagaccacagccaaggtgaccaaggagctgtatgtgaagctgacccctgtgtccctgagcaacagccccatcaagggagctgactgccaggaggtgccccaggacaaggatggctacaagagctgtggcctgaaccccaagctggagaagtgtggcctgggccaggagaacagcgacaatgagcacctggtggagaatgaggtgtccctgctgctggaggagagtgacctgcggcgcagcccccgggtgaagaccacccccctgcggcggcccacagagaccaaccctgtgaccagcaacagtgatgaggagtgcaatgagaccgtgaaggagaagcagaagctgtctgtgcctgtgaggaagaaggacaagaggaacagcagtgacagcgccatcgacaaccccaagcccaacaagctgcccaagagcaagcagagcgagaccgtggaccagaacagcgacagtgatgagatgctggccatcctgaaggaggtgtccaggatgagccacagcagcagcagtgacacagacatcaatgagatccacaccaaccacaagaccctgtatgacctgaagacccaggccggcaaggatgacaagggcaagaggaagaggaagagcagcaccagcggcagtgactttgacaccaagaagggcaagagcgccaagagcagcatcatcagcaagaagaagaggcagacccagagcgagagcagcaactatgattctgagctggagaaggagatcaagtccatgagcaagattggagctgcccggaccaccaagaagaggatccccaacaccaaggactttgacagcagtgaagatgagaagcacagcaagaagggcatggacaaccagggccacaagaacctgaagaccagccaggagggcagcagtgatgatgctgagaggaagcaggagcgggagaccttcagcagcgctgagggcaccgtggacaaggacaccaccatcatggagctgcgggaccggctgcccaagaagcagcaggccagcgccagcacagatggagtggacaagctgagcggcaaggagcagagcttcaccagcctggaggtgaggaaggtggccgagaccaaggagaagagcaagcacctgaagaccaagacctgcaagaaggtgcaggacggcctgagtgacattgctgagaagttcctgaagaaggaccagagtgatgagaccagtgaagatgacaagaagcagagcaagaagggcacagaggagaagaagaagcccagcgacttcaagaagaaggtgatcaagatggagcagcagtatgagagcagcagtgatggaacagagaagctgcctgagcgggaggagatctgccacttccccaagggcatcaagcagatcaagaatggcaccacagatggagagaagaagagcaagaagatccgggacaagaccagcaagaagaaggatgagctgagtgactatgcagagaagagcacaggcaagggggacagctgtgacagcagcgaggacaagaagagcaagaatggagcctacggccgggagaagaagcgctgcaagctgctgggcaagagcagcaggaagaggcaggactgcagcagcagtgacacagagaagtacagcatgaaggaggatggctgcaacagcagtgacaagaggctgaagagaattgagctgcgggagaggaggaacctgagcagcaagaggaacaccaaggagatccagagcggcagcagcagcagtgatgctgaggagagcagcgaggacaacaagaagaagaagcagaggaccagcagcaagaagaaggccgtcatcgtgaaggagaagaagaggaacagcctgcggaccagcaccaagaggaagcaggccgacatcaccagcagcagcagcagtgacattgaagatgatgaccagaacagcatcggggagggcagcagtgatgagcagaagatcaagcctgtgacagagaacctggtgctgagcagccacacaggcttctgccagagcagtggagatgaggccctgagcaagtctgtgcctgtgacagtggatgatgatgatgatgacaatgaccctgagaacagaattgccaagaagatgctgctggaggagatcaaggccaacctgagcagtgatgaagatggcagcagtgatgatgagcctgaggagggcaagaagaggacaggcaagcagaatgaagaaaatcctggagatgaggaggccaagaaccaggtgaacagcgagagtgacagcgacagcgaggagagcaagaagccccgctaccgccaccggctgctgcggcacaagctgactgtgtctgatggagagagcggggaggagaagaagaccaagcccaaggagcacaaggaggtgaagggcaggaacagaaggaaggtgtccagtgaagattctgaggacagcgacttccaggagagcggcgtgtctgaggaggtgtctgagagtgaagatgagcagaggcccaggaccaggtctgccaagaaggccgagctggaggagaaccagaggagctacaagcagaagaagaagagaagacgcatcaaggtgcaggaggacagcagcagcgagaacaagagcaacagcgaggaggaggaggaggagaaggaggaggaggaggaggaggaggaggaggaggaggaggaggaggaggatgaaaatgatgacagcaagagccctggaaaaggaaggaagaagatcaggaagatcctgaaggatgacaagctgaggacagagacccagaatgccctgaaggaggaggaggagaggaggaagagaattgctgagcgggagcgggagcgggagaagctgcgggaggtgattgaaattgaagatgccagccccaccaagtgccccatcaccaccaagctggtgctggatgaagatgaggagaccaaggagcccctggtgcaggtgcacaggaacatggtgatcaagctgaagccccaccaggtggatggagtgcagttcatgtgggactgctgctgtgagagcgtgaagaagaccaagaagagccctggcagcggctgcatcctggcccactgcatgggcctgggcaagaccctgcaggtggtgtccttcctgcacacagtgctgctgtgtgacaagctggacttcagcacagccctggtggtgtgccccctgaacacagccctgaactggatgaatgaatttgagaagtggcaggagggcctgaaggatgatgagaagctggaggtgtctgagctggccaccgtgaagaggccccaggagaggagctacatgctgcagcgctggcaggaggatggaggagtgatgatcatcggctatgagatgtacagaaacctggcccagggcagaaatgtgaagagcaggaagctgaaggagatcttcaacaaggccctggtggaccccggccctgactttgtggtgtgtgatgagggccacatcctgaagaatgaggccagcgctgtgtccaaggccatgaacagcatccgcagcagaagacgcatcatcctgaccggcacccccctgcagaacaacctgattgagtaccactgcatggtgaacttcatcaaggagaacctgctgggcagcatcaaggagttcaggaaccgcttcatcaaccccatccagaatggccagtgtgccgacagcaccatggtggatgtgcgggtgatgaagaagagggcccacatcctgtatgagatgctggccggctgtgtgcagaggaaggactacacagccctgaccaagttcctgccccccaagcatgaatatgtgctggccgtgaggatgaccagcatccagtgcaagctgtaccagtactacctggaccacctgactggagtgggcaacaacagcgagggcggccggggcaaggccggggccaagctgttccaggacttccagatgctgagccgcatctggacccacccctggtgcctgcagctggactacatcagcaaagaaaataaaggctactttgatgaggacagcatggatgagttcatcgccagtgacagtgatgagacctccatgagcctgagcagtgatgactacaccaagaagaagaagaagggcaagaagggcaagaaggacagcagcagcagcggcagcggcagtgacaatgatgtggaggtgatcaaggtgtggaacagccgcagccggggcggcggggagggcaatgtggatgaaacaggcaacaaccccagcgtgtccctgaagctggaggagagcaaggccaccagcagcagcaaccccagcagccctgccccagactggtacaaggactttgtgacagatgctgatgctgaggtgctggagcacagcggcaagatggtgctgctgtttgagatcctgaggatggccgaggagattggagacaaggtgctggtgttcagccagagcctcatcagcctggacctgattgaggacttcctggagctggccagccgggagaagacagaggacaaggacaagcccctcatctacaagggggagggcaagtggctgagaaatattgactactaccgcctggatggcagcaccacagcccagagcaggaagaagtgggccgaggagttcaatgatgagaccaacgtgcggggccgcctcttcatcatcagcaccaaggccggcagcctgggcatcaacctggtggccgccaacagagtcatcatctttgatgcctcctggaaccccagctatgacatccagagcatcttccgggtgtaccgcttcggccagaccaagcctgtgtatgtgtaccgcttcctggcccagggcaccatggaggacaagatctatgaccggcaggtgaccaagcagagcctgtccttccgggtggtggaccagcagcaggtggagcggcacttcaccatgaatgagctgacagagctgtacacctttgagccagacctgctggatgaccccaacagcgagaagaagaagaagagggacacccccatgctgcccaaggacaccatcctggccgagctgctgcagatccacaaggagcacatcgtgggctaccacgagcatgacagcctgctggaccacaaggaggaggaggagctgacagaggaggagaggaaggccgcctgggccgagtatgaggccgagaagaagggcctgaccatgaggttcaacatccccaccggcaccaacctgccccctgtgtccttcaacagccagaccccctacatccccttcaacctgggcgccctgagcgccatgagcaaccagcagctggaggacctgatcaaccagggccgggagaaggtggtggaggccaccaacagcgtgacagctgtgcgcatccagcccctggaggacatcatctctgctgtgtggaaggagaacatgaacctgtctgaggcccaggtgcaggccctggccctgagccggcaggccagccaggagctggatgtgaagaggcgggaggccatctacaatgatgtgctgaccaagcagcagatgctgatcagctgtgtgcagaggatcctgatgaacagaaggctgcagcagcagtacaaccagcagcagcagcagcagatgacctaccagcaggccaccctgggccacctgatgatgcccaagccacccaacctgatcatgaaccccagcaactaccagcagattgacatgaggggcatgtaccagcctgtggccggcggcatgcagcccccacccctgcagagggcccccccacccatgaggagcaagaaccctggccccagccagggcaagtccatgtag

SEQ ID NO: 9649 - DNA, 7479 bp, Artificial Sequence
  derived and/or modified sequence
atgaccgccgagcccatgagcgagagcaagctgaacaccctggtgcagaagctgcatgattttctagcgcactctagcgaagaaagcgaggaaacaagcagccctcctcgcctcgcaatgaaccagaacaccgataaaatttcagggtctggaagtaactccgacatgatggagaattctaaggaggaggggaccagctcatcagaaaaaagcaagtcttccgggtcctctcgctctaagcggaaacccagcatcgtgaccaaatatgtcgagtcagacgatgagaagcccctggatgacgagacagtgaacgaggacgccagcaatgagaactccgaaaatgatatcacaatgcagtcactgccaaaaggaactgtgatcgtccagccagaacctgtcctgaacgaagataaagatgatttcaaaggacctgaattccgttcccggagcaaaatgaagaccgagaaccttaaaaagcgcggcgaggatggtcttcatggtatagtgtcctgtactgcatgcggccaacaagtcaatcacttccagaaagattccatttatcggcacccaagcttacaagtccttatttgcaagaattgctttaaatactatatgagcgacgatataagtcgtgattctgatggtatggacgaacaatgccgctggtgtgccgaaggaggtaacctcatatgctgtgacttctgccacaatgccttctgcaaaaagtgcatcttgagaaatctggggagaaaagagctgtccaccattatggacgagaataaccagtggtattgctatatctgccaccccgaacctcttctggatctcgttactgcttgtaactccgtctttgaaaacctggagcaactcttgcagcagaacaagaagaagatcaaggtggactctgagaaatcgaataaagtgtacgagcacacatcgagattcagcccaaagaaaacctcaagcaattgtaatggggaggagaagaaacttgacgacagttgctcgggaagcgttacctatagctatagtgcgctgattgtccctaaagagatgattaagaaagctaagaagctgatcgagacgaccgccaacatgaactctagttacgtaaagtttttaaagcaggctaccgataactctgagatctcctcggcaacaaaactgagacagctgaaggcctttaagtcagtactggcagacataaagaaggcccatctggccttagaggaagatttaaactccgagttccgagccatggacgccgttaataaggaaaaaaatactaaagagcacaaagtgatagatgccaagttcgaaacaaaagccagaaagggggagaagccttgcgccctggagaaaaaggacatcagcaaatccgaggctaagctgtccaggaaacaagtggactccgagcacatgcaccagaacgtcccgaccgaggaacagcgtacaaacaagtcgacaggcggcgagcacaaaaagtccgacagaaaggaggaacctcaatatgagcctgcaaacacatccgaagatctggatatggacatcgtgtccgtcccgagcagtgtgccagaagatatctttgagaatctggaaactgccatggaagtccagtcctctgtggatcaccagggcgatggcagctccggtaccgagcaggaagttgagtcaagttctgtcaagttgaatatttcaagcaaggacaaccgggggggaatcaagtctaaaacgaccgctaaagttactaaggagctttatgtaaaactgacccctgtctccctgtcgaattcgccaattaaaggagctgactgccaggaagtgccccaggataaagacggctacaaatcttgcgggctgaaccctaagctggagaagtgcggcctgggccaggaaaattccgacaacgaacatctcgttgagaacgaggtgagtctactgctggaggagagcgaccttcgacgatccccccgggtgaagactacccccctgagacgaccaactgagaccaatcctgtaaccagcaattcagacgaggagtgcaacgaaactgtcaaggagaagcagaagctttctgtgcccgttcgcaaaaaggacaagaggaactcctccgatagcgccattgataaccctaagcctaataagctgccgaaaagcaagcagagtgagaccgtggatcagaacagcgactccgacgaaatgcttgccatcctgaaggaggtgtcccggatgagccactcaagtagctccgacactgacatcaatgaaattcataccaaccacaaaacactatatgacctcaagacccaagcggggaaagatgacaagggcaaaaggaagagaaaaagctctaccagtggctccgacttcgatacaaaaaaggggaagagcgccaaatccagcataatcagtaaaaagaagagacaaacacagtctgaaagttctaattatgactcggaactcgaaaaggagatcaaatcaatgagtaaaattggggcagcccggaccacaaagaaaaggattccaaacaccaaggacttcgactcctccgaagacgagaaacatagcaaaaaggggatggataatcaagggcataagaacctcaagactagccaagaaggatctagcgacgatgccgagagaaagcaggagcgggaaacctttagctcagccgaggggactgtcgacaaagatacgacaatcatggagttacgagatcgcctccctaaaaagcagcaagcctcagcttctacagatggcgttgacaaactctctggaaaggaacagtcatttaccagtcttgaggttcgtaaggtcgcagaaactaaagagaaatctaaacacctgaagacaaagacttgcaaaaaggttcaagacggtttgtctgacatagccgagaagtttctcaaaaaggatcaaagcgacgagacgagcgaggacgacaaaaaacagagcaagaagggcactgaggaaaagaagaagccttctgacttcaagaaaaaggttatcaagatggagcaacaatatgagagcagcagtgacggcaccgagaagctccctgagagagaagaaatatgccactttcccaaagggatcaagcagatcaaaaatggcactaccgatggggaaaagaaatccaagaagatacgtgataaaacttcaaaaaagaaagatgaactgtcggattacgccgagaagtccacaggcaaaggggacagttgcgactcttctgaggataagaaatctaagaacggcgcgtatggcagggagaaaaagagatgtaaattgcttggaaaatcctcacggaagcgccaggactgttcatccagtgataccgaaaagtacagcatgaaagaagacggatgcaacagcagcgataagagactgaaaagaattgaactgagggaacgtcgcaacctgtcctcgaagcgcaataccaaagaaattcaatcaggctcttctagctcggatgccgaggagtcgtcagaggacaataaaaaaaaaaaacagaggacttcctccaagaaaaaggctgtgattgtcaaggagaagaagaggaattcactgaggacatcaactaagagaaagcaggccgatattacatcctccagctcttctgacattgaggacgatgaccaaaactctatcggagagggaagcagcgacgaacagaagataaagcctgtgacggaaaacctcgtgctcagcagccacacagggttttgccagagcagtggcgatgaagctctgagcaagtccgtgccggtcacagtcgacgacgatgatgatgacaatgacccagaaaatagaatcgccaagaaaatgctgttagaggagatcaaggccaacctctcatccgacgaggatggttcttcagatgacgaacccgaggaaggcaagaagaggaccgggaaacagaatgaggagaatcccggtgatgaggaggcgaaaaaccaagtgaactctgagtctgattctgattcagaagaatccaagaaaccacggtataggcaccgtcttctgagacataagcttacagtgtcagacggcgaatcaggagaagagaaaaaaactaaacctaaagagcacaaggaagtaaagggtaggaataggcggaaggtctcctctgaggacagtgaagactcggactttcaggagtctggcgtctcggaggaggtgtctgagagtgaagatgagcagaggccccgaacgagatcagccaaaaaagcagaactggaggagaatcagcgatcctacaaacaaaaaaagaagagaaggcgcatcaaggttcaggaagattcttcgagtgaaaacaaatccaactctgaggaggaagaggaagagaaggaggaagaggaggaggaggaggaggaggaggaggaggaagaagaagacgaaaatgatgacagcaagtcaccggggaaaggacgtaagaagataaggaagatcctgaaggacgacaagctgcggaccgaaactcaaaacgctctaaaggaggaagaagagcgtcggaagcgcatcgctgaacgggaacgggagagggagaaactccgtgaggtgatcgagatagaggatgccagccccaccaagtgcccgattactacgaagctggtgctggacgaggatgaagaaacaaaggagccgcttgtgcaagtgcataggaacatggtgattaagctcaagccccaccaggttgatggtgtgcagtttatgtgggactgttgctgtgaaagcgttaagaagacgaagaagagccctggtagcggctgtatcttagcccactgtatgggcctgggcaagacactccaggtggtatcgtttctgcatactgtgctgttgtgcgataagctggacttctctaccgccctcgttgtgtgccctctaaacacagccttgaactggatgaacgaatttgaaaagtggcaggaggggttgaaagacgacgagaagctcgaggtatctgaactagccaccgtgaagaggcctcaggaaaggtcatatatgctgcagcgctggcaagaggatggaggtgtcatgattatcggctatgagatgtaccgcaatttggcgcagggccggaatgtcaagagccgtaaactcaaagaaatcttcaacaaggccttggtcgatcctggtcctgactttgtggtctgcgacgagggccatattctgaagaatgaggcaagcgccgtcagcaaagcaatgaatagcataagatcgcggcgccgcattattctgacgggtacgccacttcaaaacaacctgatagagtaccattgcatggtgaatttcatcaaggagaatcttctgggtagtattaaagaattcagaaatagattcatcaacccaattcagaatggtcagtgcgctgattctacaatggtagacgtcagggtcatgaagaagagggctcatatactgtacgaaatgttagcaggttgtgttcagcgcaaagattatacagccctgaccaagttcctcccgccaaagcacgagtatgtactggcagtgaggatgaccagtatccagtgcaagttgtaccaatactacctcgatcacttgacgggggtgggcaataactcagaaggtgggaggggtaaggcaggcgctaagctgtttcaagattttcagatgctcagtaggatatggacccatccctggtgtctccaactggactatatctccaaagagaataaagggtatttcgatgaggattctatggatgagttcatcgccagtgatagcgatgaaacaagcatgagcttgtcatccgatgactacaccaaaaagaaaaagaagggcaagaaaggtaagaaagattctagtagtagcggtagcgggagtgacaatgatgttgaggtgatcaaagtatggaacagcagatcaagagggggcggcgaagggaacgttgacgagactggcaacaaccctagtgtgtcactaaaactcgaggagtctaaggccacctcctcctccaacccaagttcgcccgcgccagactggtataaggattttgtgaccgatgcagatgcagaagtgctcgagcacagtggcaaaatggtgttactcttcgaaattctgcgcatggcagaagagattggcgataaggtgctggtgttcagccagtccttaatcagtctggacctcatagaagacttcctcgagctcgcgtcgagagagaaaaccgaggataaggacaaacctctgatttacaaaggcgagggcaagtggttacgaaacattgactattaccgtctcgacggaagcactacagcccagagccggaagaagtgggccgaggagttcaacgacgaaaccaatgtcaggggccggctgttcattatttcaacaaaagcaggatcgctgggaatcaatctggtcgcagcaaaccgcgtcatcatatttgacgcatcttggaacccttcatacgatattcagtccatcttccgggtctaccgctttgggcaaactaagccagtgtatgtctaccggttcctggctcagggaaccatggaagacaagatttacgaccgccaggtgactaaacagagcctttcctttcgagtggtggatcagcagcaggtggaaaggcatttcactatgaacgaactgaccgagctgtataccttcgagccggacttactcgatgaccccaattcagagaagaagaagaagagagacactcctatgctccctaaagatacaatcctcgctgaattgctgcagatccataaagagcacatcgtggggtatcacgaacacgatagtcttctcgatcacaaagaagaagaggagttgaccgaggaagaaaggaaggctgcctgggcagagtacgaagcggaaaagaaaggcctgactatgcgatttaacattcctacagggacaaacctgccacctgtttccttcaatagccagaccccatacattccttttaatcttggcgccctgtccgctatgtcgaatcagcagctggaggatttgatcaaccaaggcagagaaaaggtcgtagaggccactaactctgtcactgcagtccgtatacagcctttggaggacatcatttcagcagtgtggaaagaaaacatgaacctgtccgaggctcaggtgcaggccctcgcgctgagtcggcaggcctctcaggagttggacgtaaagcggcgggaggctatatataatgatgtcttaactaaacagcaaatgcttataagctgcgtccagcgaatcctaatgaacaggcgcctccaacagcagtacaatcaacagcagcaacagcagatgacctaccagcaagcaactctggggcacctgatgatgcccaagcccccaaacctgattatgaacccctcaaattatcagcaaatcgacatgcggggtatgtatcagccggtggccgggggtatgcagcccccaccattacaaagagctccacctccaatgcggtctaagaacccaggccccagccagggcaagagcatgtag

SEQ ID NO: 9650 - DNA, 7478 bp, Artificial Sequence
  derived and/or modified sequence
atgacagccgagccgatgtctgaaagcaaacttaacaccctggtccaaaagctccatgattttctggcccacagctccgaggaatctgaggagacatcctctccccctcgccttgcgatgaatcagaacacagacaagatcagcggcagcggcagtaactccgacatgatggaaaacagtaaagaagagggcacgtcaagttccgaaaagtctaagtcctccggatcttcccgttctaaacggaagccctctatagtgaccaagtacgtcgaaagtgatgacgagaaacctttggatgacgagacggtcaatgaggacgccagcaacgaaaacagcgagaatgacattacaatgcagagcctgcctaaagggactgtgatagtgcaacccgagccggtcctaaacgaagacaaagacgatttcaagggcccagaattccggtctagatcaaagatgaagacagagaatctgaagaaacgcggtgaggatggcctgcacgggatcgttagttgtaccgcctgcggccagcaggttaaccacttccaaaaggattccatataccgacaccctagcctgcaagtgcttatctgtaaaaactgttttaaatattatatgagcgatgatatctctcgcgactctgacggcatggacgagcagtgccgctggtgtgcagagggcggaaatctgatctgctgcgacttctgccacaacgctttctgcaaaaaatgtatccttcgaaatttgggcagaaaggaattgagtactatcatggacgagaataaccagtggtactgctatatatgccatcccgaacctttgctagacctcgtgaccgcatgtaacagcgtgttcgaaaaccttgagcagctgctgcagcagaataaaaagaaaattaaagtggattccgaaaagtccaataaggtgtatgagcacacctctaggtttagcccaaagaagaccagcagcaactgtaatggggaagagaaaaaactggacgacagttgttctggttccgtgacgtactcatactccgcactgattgtgcccaaggagatgattaagaaggctaaaaaactgatcgagaccacggctaatatgaacagcagttacgttaagtttctgaaacaggccacggataattccgaaatcagttccgctactaagcttaggcaactgaaggctttcaagagcgtcttagcagacatcaagaaggcccacttggccctcgaggaggatctgaatagcgagttcagggcgatggatgctgtgaacaaagagaagaacaccaaggagcacaaggtgattgatgccaagtttgaaaccaaggctagaaagggggaaaaaccttgcgcattggagaaaaaggatatcagtaaatccgaagccaaactgtctaggaagcaggttgacagtgagcacatgcaccagaatgtcccaacagaagagcaaaggactaacaagtccaccggtggggaacacaagaaaagcgacaggaaggaggagccccaatacgaaccggctaatacaagcgaggacctcgacatggatattgtgagcgtgccctcgagcgtgccagaggacatttttgagaatctggaaaccgctatggaggtgcagagcagtgtggaccatcagggggacggctcatctggcaccgagcaggaggtggaatcctcatcggtgaaactcaacatatccagcaaagataacaggggcggaattaaatcaaagaccacggctaaggttaccaaggaactctatgtgaaacttactcccgtcagtttgtctaattctccaatcaagggtgcagattgtcaggaagtcccccaggataaggacggatataagagttgcggtctgaaccccaagctggaaaaatgcggactgggtcaggagaattcagacaatgagcacctggtggagaatgaagtctcacttctcttggaggagagcgatctccgcagatccccaagagtgaaaaccacaccactgcgaaggccgacagagaccaacccggttaccagtaatagtgacgaagagtgtaatgagactgtgaaagaaaagcagaagctctcagtgcctgttcgaaaaaaagacaaacgcaactctagtgattccgctatagacaacccaaagccgaacaagttaccaaagtccaaacagagtgagactgtggaccagaatagcgactctgacgaaatgcttgctatactcaaggaagttagtcgaatgtctcatagcagctcttcagacaccgacattaatgaaattcataccaatcacaagaccctgtatgatttgaaaacacaggctggtaaagacgataagggcaagagaaagcgaaagagctccactagtggaagcgacttcgacaccaagaagggtaagtctgccaagagcagtataatatcaaaaaagaaacgtcaaacgcagtccgaatcatccaattatgactctgagctggagaaggagatcaagtcaatgagtaagatcggagccgctaggaccacgaagaagagaataccaaataccaaagattttgatagcagcgaagacgagaagcactcgaagaaggggatggataatcagggacacaaaaatctcaagacatcccaggagggttcgtccgatgacgcggagcgtaagcaggaacgcgagacattttcatctgcggaggggacggttgacaaagacacaactataatggagctccgggatcgcttgcccaaaaaacagcaggccagtgcatcaactgacggagtagataagctgtcaggaaaggagcaaagcttcactagtcttgaagtcagaaaagtggctgaaacaaaggagaaatccaagcacctaaagaccaaaacgtgcaaaaaagtgcaggacggactgagcgacattgcagaaaagttcctcaagaaagaccagtctgatgagactagtgaggatgacaaaaagcagtccaagaaggggactgaagagaaaaagaagcctagtgatttcaaaaagaaggtaatcaaaatggagcagcaatacgaatctagctcagatgggaccgaaaaactacccgagagagaggagatctgtcactttccaaagggaatcaaacagatcaagaacggcaccaccgacggggagaagaagtccaaaaagattagggataaaacatctaagaagaaggatgagctgagcgactatgcagaaaagtccacgggtaaaggggattcttgcgatagtagtgaagataaaaagtctaaaaatggcgcttacgggagggaaaaaaagaggtgcaagctgctgggaaaatcatctagaaagcgccaagactgctcctcttctgacaccgagaaatattctatgaaagaagacggctgtaattccagcgacaaaagacttaaaagaattgaactccgggaaagacgcaacctttcatctaaacggaacactaaagaaatacaatcaggctcctcaagttcggacgccgaggaaagttctgaggacaacaagaaaaagaagcagcggacaagttctaaaaaaaaagccgttatcgtgaaggaaaagaaaagaaacagtttgcggacgtcaaccaaacggaaacaggctgatatcacctcctcatccagctccgatattgaagacgatgaccagaattcgatcggcgaagggagttctgatgagcagaaaatcaagccggtcacagaaaacctggtcctgagttctcataccggtttttgtcagtcgtctggtgacgaggccttgtctaagagtgttccggtcaccgtcgatgatgacgacgatgacaacgatcccgaaaaccggatcgccaaaaagatgctgcttgaagagatcaaagctaatctctcaagtgatgaagatggctcttcagatgatgagccagaggagggaaaaaagcggactggcaagcagaacgaagagaatccgggagacgaggaggcaaaaaatcaggtgaactctgagtcagactctgacagcgaggaaagcaagaaacccagatatcggcatcgcctcctccgccataagctgaccgttagtgacggagagtcaggtgaggagaagaagaccaagcccaaggagcacaaggaggtgaagggtcgcaacaggaggaaagttagtagtgaagactccgaggattcagactttcaggaatccggcgtgagtgaggaagtcagtgaatcggaggatgaacagcgtcctcggactcgttccgctaaaaaggctgagttagaggagaaccagaggtcctataagcaaaaaaagaagagacgacgcattaaggtccaggaggattcttcgagtgaaaataaaagcaattcagaggaggaagaagaagagaaggaagaagaggaagaggaggaggaagaggaggaggaggaggaggaggacgagaatgatgactcaaagagccctgggaaaggacgcaaaaagatcagaaagattttgaaagacgataagctacgcacagaaacacagaatgccctcaaggaagaagaggaacggagaaagaggatagcggagagggaaagggagcgtgagaaactccgagaggtgatagaaatcgaagacgcatcccccacaaagtgtcctattacaaccaaactagtgctcgatgaagatgaagagacaaaagagcctctagtccaggtgcaccggaacatggtcattaagttaaagcctcatcaagtggatggggtccagttcatgtgggactgttgttgcgaatcagtaaagaaaacgaaaaagagcccagggtctggctgcattctcgcccactgtatggggcttggaaagacacttcaggtggttagctttttacacaccgtgctgctgtgcgacaagctggactttagcacagcactggtggtctgtcctctcaatacagctttgaactggatgaatgagttcgagaaatggcaagaggggttgaaggacgacgagaaactagaagtgagtgagctggccaccgtaaaacggccacaggagcgtagctacatgctgcaacgctggcaggaagacggcggtgtcatgatcattggatatgaaatgtatcgcaaccttgctcaggggagaaatgtaaaatcgaggaagctaaaggaaatttttaacaaagctttggtagaccctggaccagactttgttgtgtgcgacgagggccacatcctcaaaaacgaagcctcagctgtgtctaaagctatgaattcaatccgctccaggaggagaataatcctcactgggacacctttgcagaacaatctgatcgaatatcattgcatggttaacttcatcaaagagaatctgttgggatccataaaggagtttagaaatagatttataaatccaatccagaatggccagtgcgctgactccacaatggtcgatgttagggtcatgaagaagagggcacatattctttatgaaatgctagccggatgtgtccagcgcaaagactataccgctttgaccaagtttctgcctcctaagcacgagtacgtgctggctgttcggatgacgagcatccagtgtaagctctaccaatattacctggaccatttgaccggcgtgggaaacaattccgaggggggaagagggaaggccggtgctaagttatttcaggacttccagatgcttagtcgaatctggacgcatccatggtgcctgcagctggattacatctctaaggagaacaagggatacttcgacgaggattccatggacgagttcatagcctcagacagcgatgaaacctcaatgtccctctcatcagatgactataccaaaaagaagaagaagggtaagaagggcaagaaagattccagcagtagcggcagcggatctgataacgacgtagaggttatcaaggtctggaatagtaggagccggggaggcggagaaggcaatgtggatgagaccgggaacaatccatctgtttctcttaaattggaagaatcaaaggccaccagcagctcaaacccatcttcacctgcaccagattggtataaagattttgtgactgacgccgatgccgaggtgctggagcatagtggcaagatggtcttacttttcgaaattctgaggatggccgaggaaatcggggacaaggtactggtgttctcccaaagtctgattagtctggacctgatcgaggactttctggagttggcttcgagggagaaaaccgaggacaaagataaacccctgatctataaaggggaagggaagtggctgagaaatatcgactactatcgtctggatggctctacaacggcacagtcacgcaagaagtgggctgaagagttcaatgatgaaactaatgtacggggacggctgtttattataagcactaaagccggttctctgggtatcaacctggtggctgcgaaccgagtgattatcttcgatgctagttggaatccctcgtacgacatccagagcatcttccgcgtataccggttcgggcagacaaaaccagtctatgtgtatcgcttcctggctcagggcacaatggaggacaagatatacgacagacaagtgaccaagcagagcctgtctttcagagtggtggaccagcagcaggtggaacggcactttacgatgaacgagcttactgaactctatacctttgagccagacttgctggacgatccgaatagtgaaaaaaaaaagaagcgcgatactcctatgcttccaaaagacactatcctcgcggaactgctccagatccacaaggaacacattgtcgggtaccacgaacacgatagtttactagaccataaagaggaggaagagctgactgaggaggaacggaaagctgcttgggcagaatatgaggccgaaaaaaaggggttaacgatgagattcaatattccaacaggaactaacttgccgcctgtctctttcaattctcaaacaccttatatccctttcaatctgggcgctctgtccgcaatgtccaatcagcaactggaagatctgattaaccagggtcgcgagaaggtggttgaggcaacaaatagtgtcactgccgtccgtattcagcctttggaggatatcatttctgccgtctggaaagaaaacatgaacttgagcgaggcccaggttcaagcccttgccctttcccgccaggcctcccaggaactggacgtgaagcgtcgggaggcgatctataatgacgtgctgactaaacaacagatgctgatttcttgcgttcagaggattctgatgaaccggcgattacagcaacagtacaatcaacaacaacagcagcagatgacttatcagcaggccacattgggtcatctgatgatgcccaagcctcctaatctcattatgaaccccagcaattatcagcagatagacatgcggggtatgtaccagccagtggccggtggcatgcagcccccacccctgcagcgggctccacctcccatgaggtccaagaacccaggtccgagccagggaaaaagcatgta

SEQ ID NO: 9651 - DNA, 11145 bp, Artificial Sequence
  derived and/or modified sequence
ctcggcccaacaaaatggcggcggcagcggtgtcgctttgtttccgcggctcctgcggcggtggcagtggtagcggcctttgagctgtggggaggttccagcagcagctacagtgacgactaagactccagtgcatttctatcgtaaccgggcgcgggggagcgcagatcggcgcccagcaatcacagaagccgacaaggcgttcaagcgaaaacatgaccgctgagcccatgagtgaaagcaagttgaatacattggtgcagaagcttcatgacttccttgcacactcatcagaagaatctgaagaaacaagttctcctccacgacttgcaatgaatcaaaacacagataaaatcagtggttctggaagtaactctgatatgatggaaaacagcaaggaagagggaactagctcttcagaaaaatccaagtcttcaggatcgtcacgatcaaagaggaaaccttcaattgtaacaaagtatgtagaatcagatgatgaaaaacctttggatgatgaaactgtaaatgaagatgcgtctaatgaaaattcagaaaatgatattactatgcagagcttgccaaaaggtacagtgattgtacagccagagccagtgctgaatgaagacaaagatgattttaaagggcctgaatttagaagcagaagtaaaatgaaaactgaaaatctcaaaaaacgcggagaagatgggcttcatgggattgtgagctgcactgcttgtggacaacaggtcaatcattttcaaaaagattccatttatagacacccttcattgcaagttcttatttgtaagaattgctttaagtattacatgagtgatgatattagccgtgactcagatggaatggatgaacaatgtaggtggtgtgcggaaggtggaaacttgatttgttgtgacttttgccataatgctttctgcaagaaatgcattctacgcaaccttggtcgaaaggagttgtccacaataatggatgaaaacaaccaatggtattgctacatttgtcacccagagcctttgttggacttggtcactgcatgtaacagcgtatttgagaatttagaacagttgttgcagcaaaataagaagaagataaaagttgacagtgaaaagagtaataaagtatatgaacatacatccagattttctccaaagaagactagttcaaattgtaatggagaagaaaagaaattagatgattcctgttctggctctgtaacctactcttattccgcactaattgtgcccaaagagatgattaagaaggcaaaaaaactgattgagaccacagccaacatgaactccagttatgttaaatttttaaagcaggcaacagataattcagaaatcagttctgctacaaaattacgtcagcttaaggcttttaagtctgtgttggctgatattaagaaggctcatcttgcattggaagaagacttaaattccgagtttcgagcgatggatgctgtaaacaaagagaaaaataccaaagagcataaagtcatagatgctaagtttgaaacaaaagcacgaaaaggagaaaaaccttgtgctttggaaaagaaggatatttcaaagtcagaagctaaactttcaagaaaacaggtagatagtgagcacatgcatcagaatgttccaacagaggaacaaagaacaaataaaagtaccggtggtgaacataagaaatctgatagaaaagaagaacctcaatatgaacctgccaacacttctgaagatttagacatggatattgtgtctgttccttcctcagttccagaagacatttttgagaatcttgagactgctatggaagttcagagttcagttgatcatcaaggggatggcagcagtggaactgaacaagaagtggagagttcatctgtaaaattaaatatttcttcaaaagacaacagaggaggtattaaatcaaaaactacagctaaagtaacaaaagaattatatgttaaactcactcctgtttccctttctaattccccaattaaaggtgctgattgtcaggaagttccacaagataaagatggctataaaagttgtggtctgaaccccaagttagagaaatgtggacttggacaggaaaacagtgataatgagcatttggttgaaaatgaagtttcattacttttagaggaatctgatcttcgaagatccccacgtgtaaagactacacccttgaggcgaccgacagaaactaaccctgtaacatctaattcagatgaagaatgtaatgaaacagttaaggagaaacaaaaactatcagttccagtgagaaaaaaggataagcgtaattcttctgacagtgctatagataatcctaagcctaataaattgccaaaatctaagcaatcagagactgtggatcaaaattcagattctgatgaaatgctagcaatcctcaaagaggtgagcaggatgagtcacagttcttcttcagatactgatattaatgaaattcatacaaaccataagactttgtatgatttaaagactcaggcggggaaagatgataaaggaaaaaggaaacgaaaaagttctacatctggctcagattttgatactaaaaagggcaaatcagctaagagctctataatttctaaaaagaaacgacaaacccagtctgagtcttctaattatgactcagaattagaaaaagagataaagagcatgagtaaaattggtgctgccagaaccaccaaaaaaagaattccaaatacaaaagattttgactcttctgaagatgagaaacacagcaaaaaaggaatggataatcaagggcacaaaaatttgaagacctcacaagaaggatcatctgatgatgctgaaagaaaacaagagagagagactttctcttcagcagaaggcacagttgataaagacacgaccatcatggaattaagagatcgacttcctaagaagcagcaagcaagtgcttccactgatggtgtcgataagctttctgggaaagagcagagttttacttctttggaagttagaaaagttgctgaaactaaagaaaagagcaagcatctcaaaaccaaaacatgtaaaaaagtacaggatggcttatctgatattgcagagaaattcctaaagaaagaccagagcgatgaaacttctgaagatgataaaaagcagagcaaaaagggaactgaagaaaaaaagaaaccttcagactttaagaaaaaagtaattaaaatggaacaacagtatgaatcttcatctgatggcactgaaaagttacctgagcgagaagaaatttgtcattttcctaagggcataaaacaaattaagaatggaacaactgatggagaaaagaaaagtaaaaaaataagagataaaacttctaaaaagaaggatgaattatctgattatgctgagaagtcaacagggaaaggagatagttgtgactcttcagaggataaaaagagtaagaatggagcatatggtagagagaagaaaaggtgcaagttgcttggaaagagttcaaggaagagacaagattgttcatcatctgatactgagaaatattccatgaaagaagatggttgtaactcttctgataagagactgaaaagaatagaattgagggaaagaagaaatttaagttcaaagagaaatactaaggaaatacaaagtggctcatcatcatctgatgctgaggaaagttctgaagataataaaaagaagaagcaaagaacttcatctaaaaagaaggcagtcattgtcaaggagaaaaagagaaactccctaagaacaagcactaaaaggaagcaagctgacattacatcctcatcttcttctgatatagaagatgatgatcagaattctataggtgagggaagcagcgatgaacagaaaattaagcctgtgactgaaaatttagtgctgtcttcacatactggattttgccaatcttcaggagatgaagccttatctaaatcagtgcctgtcacagtggatgatgatgatgacgacaatgatcctgagaatagaattgccaagaagatgcttttagaagaaattaaagccaatctttcctctgatgaggatggatcttcagatgatgagccagaagaagggaaaaaaagaactggaaaacaaaatgaagaaaacccaggagatgaggaagcaaaaaatcaagtcaattctgaatcagattcagattctgaagaatctaagaagccaagatacagacataggcttttgcggcacaaattgactgtgagtgacggagaatctggagaagaaaaaaagacaaagcctaaagagcataaagaagtcaaaggcagaaacagaagaaaggtgagcagtgaagattcagaagattctgattttcaggaatcaggagttagtgaagaagttagtgaatccgaagatgaacagcggcccagaacaaggtctgcaaagaaagcagagttggaagaaaatcagcggagctataaacagaaaaagaaaaggcgacgtattaaggttcaagaagattcatccagtgaaaacaagagtaattctgaggaagaagaggaggaaaaagaagaggaggaggaagaggaggaggaggaggaagaggaggaggaagatgaaaatgatgattccaagtctcctggaaaaggcagaaagaaaattcggaagattcttaaagatgataaactgagaacagaaacacaaaatgctcttaaggaagaggaagagagacgaaaacgtattgctgagagggagcgtgagcgagaaaaattgagagaggtgatagaaattgaagatgcttcacccaccaagtgtccaataacaaccaagttggttttagatgaagatgaagaaaccaaagaacctttagtgcaggttcatagaaatatggttatcaaattgaaaccccatcaagtagatggtgttcagtttatgtgggattgctgctgtgagtctgtgaaaaaaacaaagaaatctccaggttcaggatgcattcttgcccactgtatgggccttggtaagactttacaggtggtaagttttcttcatacagttcttttgtgtgacaaactggatttcagcacggcgttagtggtttgtcctcttaatactgctttgaattggatgaatgaatttgagaagtggcaagagggattaaaagatgatgagaagcttgaggtttctgaattagcaactgtgaaacgtcctcaggagagaagctacatgctgcagaggtggcaagaagatggtggtgttatgatcataggctatgagatgtatagaaatcttgctcaaggaaggaatgtgaagagtcggaaacttaaagaaatatttaacaaagctttggttgatccaggccctgattttgttgtttgtgatgaaggccatattctaaaaaatgaagcatctgctgtttctaaagctatgaattctatacgatcaaggaggaggattattttaacaggaacaccacttcaaaataacctaattgagtatcattgtatggttaattttatcaaggaaaatttacttggatccattaaggagttcaggaatagatttataaatccaattcaaaatggtcagtgtgcagattctaccatggtagatgtcagagtgatgaaaaaacgtgctcacattctctatgagatgttagctggatgtgttcagaggaaagattatacagcattaacaaaattcttgcctccaaaacacgaatatgtgttagctgtgagaatgacttctattcagtgcaagctctatcagtactacttagatcacttaacaggtgtgggcaataatagtgaaggtggaagaggaaaggcaggtgcaaagcttttccaagattttcagatgttaagtagaatatggactcatccttggtgtttgcagctagactacattagcaaagaaaataagggttattttgatgaagacagtatggatgaatttatagcctcagattctgatgaaacctccatgagtttaagctccgatgattatacaaaaaagaagaaaaaagggaaaaaggggaaaaaagatagtagctcaagtggaagtggcagtgacaatgatgttgaagtgattaaggtctggaattcaagatctcggggaggtggtgaaggaaatgtggatgaaacaggaaacaatccttctgtttctttaaaactggaagaaagtaaagctacttcttcttctaatccaagcagcccagctccagactggtacaaagattttgttacagatgctgatgctgaggttttagagcattctgggaaaatggtacttctctttgaaattcttcgaatggcagaggaaattggggataaagtccttgttttcagccagtccctcatatctctggacttgattgaagattttcttgaattagctagtagggagaagacagaagataaagataaaccccttatttataaaggtgaggggaagtggcttcgaaacattgactattaccgtttagatggttccactactgcacagtcaaggaagaagtgggctgaagaatttaatgatgaaactaatgtgagaggacgattatttatcatttctactaaagcaggatctctaggaattaatctggtagctgctaatcgagtaattatattcgacgcttcttggaatccatcttatgacatccagagtatattcagagtttatcgctttggacaaactaagcctgtttatgtatataggttcttagctcagggaaccatggaagataagatttatgatcggcaagtaactaagcagtcactgtcttttcgagttgttgatcagcagcaggtggagcgtcattttactatgaatgagcttactgaactttatacttttgagccagacttattagatgaccctaattcagaaaagaagaagaagagggatactcccatgctgccaaaggataccatacttgcagagctccttcagatacataaagaacacattgtaggataccatgaacatgattctcttttggaccacaaagaagaagaagagttgactgaagaagaaagaaaagcagcttgggctgagtatgaagcagagaagaagggactgaccatgcgtttcaacataccaactgggaccaatttaccccctgtcagtttcaactctcaaactccttatattcctttcaatttgggagccctgtcagcaatgagtaatcaacagctggaggacctcattaatcaaggaagagaaaaagttgtagaagcaacaaacagtgtgacagcagtgaggattcaacctcttgaggatataatttcagctgtatggaaggagaacatgaatctctcagaggcccaagtacaggcgttagcattaagtagacaagccagccaggagcttgatgttaaacgaagagaagcaatctacaatgatgtattgacaaaacaacagatgttaatcagctgtgttcagcgaatacttatgaacagaaggctccagcagcagtacaatcagcagcaacagcaacaaatgacttatcaacaagcaacactgggtcacctcatgatgccaaagcccccaaatttgatcatgaatccttctaactaccagcagattgatatgagaggaatgtatcagccagtggctggtggtatgcagccaccaccattacagcgtgcaccacccccaatgagaagcaaaaatccaggaccttcccaagggaaatcaatgtgattttgcactaaaagcttaatggattgttaaaatcatagaaagatcttttatttttttaggaatcaatgacttaacagaactcaactgtataaatagtttggtccccttaaatgccaatcttccatattagttttactttttttttttttaaatagggcataccatttcttcctgacatttgtcagtgatgttgcctagaatcttcttacacacgctgagtacagaagatatttcaaattgttttcagtgaaaacaagtccttccataatagtaacaactccacagatttcctctctaaatttttatgcctgcttttagcaaccataaaattgtcataaaattaataaatttaggaaagaataaagatttatatattcattctttacatataaaaacacacagctgagttcttagagttgattcctcaagttatgaaatacttttgtacttaatccatttcttgattaaagtgattgaaatggttttaatgttcttttgactgaagtctgaaactgggctcctgctttattgtctctgtgactgaaagttagaaactgagggttatctttgacacagaattgtgtgcaatattcttaaatactactgctctaaaagttggagaagtcttgcagttatcttagcattgtataaacagccttaagtatagcctaagaagagaattcctttttcttctttagtccttctgccattttttattttcagttatatgtgctgaaataattactggtaaaatttcagggttgtggattatcttccacacatgaattttctctctcctggcacgaatataaagcacatctcttaactgcatggtgccagtgctaatgcttcatcctgttgctggcagtgggatgtggacttagaaaatcaagttctagcattttagtaggttaacactgaagttgtggttgttaggttcacaccctgttttataaacaacatcaaaatggcagaaccattgctgactttaggttcacatgaggaatgtacttttaacaattcccagtactatcagtattgtgaaataattcctctgaaagataagaatcactggcttctatgcgcttcttttctctcatcatcatgttcttttaccccagtttccttacatttttttaaattgtttcagagtttgttttttttttagtttagattgtgaggcaattattaaatcaaaattaattcatccaatacccctttactagaagttttactagaaaatgtattacattttattttttcttaatccagttctgcaaaaatgacctataaatttattcatgtacaattttggttacttgaattgttaaagaaaacattgtttttgactatgggagtcaactcaacatggcagaaccatttttgagatgatgatacaacaggtagtgaaacagcttaagaattccaaaaaaaaaaaaaaaaaaaaaaaaaagaaaactgggtttgggctttgctttaggtatcactggattagaatgagtttaacattagctaaaactgctttgagttgtttggatgattaagagattgccatttttatcttggaagaactagtggtaaaacatccaagagcactaggattgtgatacagaatttgtgaggtttggtggatccacgcccctctcccccactttcccatgatgaaatatcactaataaatcctgtatatttagatattatgctagccatgtaatcagatttatttaattgggtggggcaggtgtgtatttactttagaaaaaatgaaaaagacaagatttatgagaaatatttgaaggcagtacactctggccaactgttaccagttggtatttctacaagttcagaatattttaaacctgatttactagacctgggaattttcaacatggtctaattatttactcaaagacatagatgtgaaaattttaggcaaccttctaaatctttttcaccatggatgaaactataacttaaagaataatacttagaagggttaattggaaatcagagtttgaaataaaacttggaccactttgtatacactcttctcacttgacattttagctatataatatgtactttgagtataacatcaagctttaacaaatatttaaagacaaaaaaatcacgtcagtaaaatactaaaaggctcatttttatatttgttttagatgttttaaatagttgcaatggattaaaaatgatgatttaaaatgttgcttgtaatacagttttgcctgctaaattctccacattttgtaacctgttttatttctttgggtgtaaagcgtttttgcttagtattgtgatattgtatatgttttgtcccagttgtatagtaatgtttcagtccatcatccagctttggctgctgaaatcatacagctgtgaagacttgcctttgtttctgttagactgcttttcagttctgtattgagtatcttaagtactgtagaaaagatgtcacttcttcctttaaggctgttttgtaatatatataaggactggaattgtgtttttaaagaaaagcattcaagtatgacaatatactatctgtgttttcaccattcaaagtgctgtttagtagttgaaacttaaactatttaatgtcatttaataaagtgaccaaaatgtgttgtgctctttattgtattttcacagctttgaaaatctgtgcacatactgtttcatagaaaatgtatagcttttgttgtcctatataatggtggttcttttgcacatttagttatttaatattgagaggtcacgaagtttggttattgaatctgttatatactaaattctgtaaagggagatctctcatctcaaaaagaatttacataccaggaagtccatgtgtgtttgtgttagttttggatgtctttgtgtaatccagccccatttcctgtttcccaacagctgtaacactcattttaagtcaagcagggctaccaacccacacttgatagaaaagctgcttaccattcagaagcttccttattacctggcctccaaatgagctgaatattttgtagccttcccttagctatgttcattttccctccattatcataaaatcagatcgatatttatgtgccccaaacaaaactttaagagcagttacattctgtcccagtagcccttgtttcctttgagagtagcatgttgtgaggctatagagacttattctaccagtaaaacaggtcaatccttttacatgtttattatactaaaaattatgttcagggtatttactactttatttcaccagactcagtctcaagtgacttggctatctccaaatcagatctacccttagagaataaacatttttctaccgttattttttttcaagtctataatctgagccagtcccaaaggagtgatcaagtttcagaaatgctttcatcttcacaacattttatatatactattatatggggtgaat

SEQ ID NO: 9652 - DNA, 7479 bp, Artificial Sequence
  derived and/or modified sequence
atgaccgccgagcccatgagcgagagcaagctgaacaccctggtgcagaagctgcacgacttcctggcccacagcagcgaggagagcgaggagaccagcagcccccccagactggccatgaaccagaacaccgacaagatcagcggcagcggcagcaacagcgacatgatggagaacagcaaggaggagggcaccagcagcagcgagaagagcaagagcagcggcagcagcagaagcaagagaaagcccagcatcgtgaccaagtacgtggagagcgacgacgagaagcccctggacgacgagaccgtgaacgaggacgccagcaacgagaacagcgagaacgacatcaccatgcagagcctgcccaagggcaccgtgatcgtgcagcccgagcccgtgctgaacgaggacaaggacgacttcaagggccccgagttcagaagcagaagcaagatgaagaccgagaacctgaagaagagaggcgaggacggcctgcacggcatcgtgagctgcaccgcctgcggccagcaggtgaaccacttccagaaggacagcatctacagacaccccagcctgcaggtgctgatctgcaagaactgcttcaagtactacatgagcgacgacatcagcagagacagcgacggcatggacgagcagtgcagatggtgcgccgagggcggcaacctgatctgctgcgacttctgccacaacgccttctgcaagaagtgcatcctgagaaacctgggcagaaaggagctgagcaccatcatggacgagaacaaccagtggtactgctacatctgccaccccgagcccctgctggacctggtgaccgcctgcaacagcgtgttcgagaacctggagcagctgctgcagcagaacaagaagaagatcaaggtggacagcgagaagagcaacaaggtgtacgagcacaccagcagattcagccccaagaagaccagcagcaactgcaacggcgaggagaagaagctggacgacagctgcagcggcagcgtgacctacagctacagcgccctgatcgtgcccaaggagatgatcaagaaggccaagaagctgatcgagaccaccgccaacatgaacagcagctacgtgaagttcctgaagcaggccaccgacaacagcgagatcagcagcgccaccaagctgagacagctgaaggccttcaagagcgtgctggccgacatcaagaaggcccacctggccctggaggaggacctgaacagcgagttcagagccatggacgccgtgaacaaggagaagaacaccaaggagcacaaggtgatcgacgccaagttcgagaccaaggccagaaagggcgagaagccctgcgccctggagaagaaggacatcagcaagagcgaggccaagctgagcagaaagcaggtggacagcgagcacatgcaccagaacgtgcccaccgaggagcagagaaccaacaagagcaccggcggcgagcacaagaagagcgacagaaaggaggagccccagtacgagcccgccaacaccagcgaggacctggacatggacatcgtgagcgtgcccagcagcgtgcccgaggacatcttcgagaacctggagaccgccatggaggtgcagagcagcgtggaccaccagggcgacggcagcagcggcaccgagcaggaggtggagagcagcagcgtgaagctgaacatcagcagcaaggacaacagaggcggcatcaagagcaagaccaccgccaaggtgaccaaggagctgtacgtgaagctgacccccgtgagcctgagcaacagccccatcaagggcgccgactgccaggaggtgccccaggacaaggacggctacaagagctgcggcctgaaccccaagctggagaagtgcggcctgggccaggagaacagcgacaacgagcacctggtggagaacgaggtgagcctgctgctggaggagagcgacctgagaagaagccccagagtgaagaccacccccctgagaagacccaccgagaccaaccccgtgaccagcaacagcgacgaggagtgcaacgagaccgtgaaggagaagcagaagctgagcgtgcccgtgagaaagaaggacaagagaaacagcagcgacagcgccatcgacaaccccaagcccaacaagctgcccaagagcaagcagagcgagaccgtggaccagaacagcgacagcgacgagatgctggccatcctgaaggaggtgagcagaatgagccacagcagcagcagcgacaccgacatcaacgagatccacaccaaccacaagaccctgtacgacctgaagacccaggccggcaaggacgacaagggcaagagaaagagaaagagcagcaccagcggcagcgacttcgacaccaagaagggcaagagcgccaagagcagcatcatcagcaagaagaagagacagacccagagcgagagcagcaactacgacagcgagctggagaaggagatcaagagcatgagcaagatcggcgccgccagaaccaccaagaagagaatccccaacaccaaggacttcgacagcagcgaggacgagaagcacagcaagaagggcatggacaaccagggccacaagaacctgaagaccagccaggagggcagcagcgacgacgccgagagaaagcaggagagagagaccttcagcagcgccgagggcaccgtggacaaggacaccaccatcatggagctgagagacagactgcccaagaagcagcaggccagcgccagcaccgacggcgtggacaagctgagcggcaaggagcagagcttcaccagcctggaggtgagaaaggtggccgagaccaaggagaagagcaagcacctgaagaccaagacctgcaagaaggtgcaggacggcctgagcgacatcgccgagaagttcctgaagaaggaccagagcgacgagaccagcgaggacgacaagaagcagagcaagaagggcaccgaggagaagaagaagcccagcgacttcaagaagaaggtgatcaagatggagcagcagtacgagagcagcagcgacggcaccgagaagctgcccgagagagaggagatctgccacttccccaagggcatcaagcagatcaagaacggcaccaccgacggcgagaagaagagcaagaagatcagagacaagaccagcaagaagaaggacgagctgagcgactacgccgagaagagcaccggcaagggcgacagctgcgacagcagcgaggacaagaagagcaagaacggcgcctacggcagagagaagaagagatgcaagctgctgggcaagagcagcagaaagagacaggactgcagcagcagcgacaccgagaagtacagcatgaaggaggacggctgcaacagcagcgacaagagactgaagagaatcgagctgagagagagaagaaacctgagcagcaagagaaacaccaaggagatccagagcggcagcagcagcagcgacgccgaggagagcagcgaggacaacaagaagaagaagcagagaaccagcagcaagaagaaggccgtgatcgtgaaggagaagaagagaaacagcctgagaaccagcaccaagagaaagcaggccgacatcaccagcagcagcagcagcgacatcgaggacgacgaccagaacagcatcggcgagggcagcagcgacgagcagaagatcaagcccgtgaccgagaacctggtgctgagcagccacaccggcttctgccagagcagcggcgacgaggccctgagcaagagcgtgcccgtgaccgtggacgacgacgacgacgacaacgaccccgagaacagaatcgccaagaagatgctgctggaggagatcaaggccaacctgagcagcgacgaggacggcagcagcgacgacgagcccgaggagggcaagaagagaaccggcaagcagaacgaggagaaccccggcgacgaggaggccaagaaccaggtgaacagcgagagcgacagcgacagcgaggagagcaagaagcccagatacagacacagactgctgagacacaagctgaccgtgagcgacggcgagagcggcgaggagaagaagaccaagcccaaggagcacaaggaggtgaagggcagaaacagaagaaaggtgagcagcgaggacagcgaggacagcgacttccaggagagcggcgtgagcgaggaggtgagcgagagcgaggacgagcagagacccagaaccagaagcgccaagaaggccgagctggaggagaaccagagaagctacaagcagaagaagaagagaagaagaatcaaggtgcaggaggacagcagcagcgagaacaagagcaacagcgaggaggaggaggaggagaaggaggaggaggaggaggaggaggaggaggaggaggaggaggaggaggacgagaacgacgacagcaagagccccggcaagggcagaaagaagatcagaaagatcctgaaggacgacaagctgagaaccgagacccagaacgccctgaaggaggaggaggagagaagaaagagaatcgccgagagagagagagagagagagaagctgagagaggtgatcgagatcgaggacgccagccccaccaagtgccccatcaccaccaagctggtgctggacgaggacgaggagaccaaggagcccctggtgcaggtgcacagaaacatggtgatcaagctgaagccccaccaggtggacggcgtgcagttcatgtgggactgctgctgcgagagcgtgaagaagaccaagaagagccccggcagcggctgcatcctggcccactgcatgggcctgggcaagaccctgcaggtggtgagcttcctgcacaccgtgctgctgtgcgacaagctggacttcagcaccgccctggtggtgtgccccctgaacaccgccctgaactggatgaacgagttcgagaagtggcaggagggcctgaaggacgacgagaagctggaggtgagcgagctggccaccgtgaagagaccccaggagagaagctacatgctgcagagatggcaggaggacggcggcgtgatgatcatcggctacgagatgtacagaaacctggcccagggcagaaacgtgaagagcagaaagctgaaggagatcttcaacaaggccctggtggaccccggccccgacttcgtggtgtgcgacgagggccacatcctgaagaacgaggccagcgccgtgagcaaggccatgaacagcatcagaagcagaagaagaatcatcctgaccggcacccccctgcagaacaacctgatcgagtaccactgcatggtgaacttcatcaaggagaacctgctgggcagcatcaaggagttcagaaacagattcatcaaccccatccagaacggccagtgcgccgacagcaccatggtggacgtgagagtgatgaagaagagagcccacatcctgtacgagatgctggccggctgcgtgcagagaaaggactacaccgccctgaccaagttcctgccccccaagcacgagtacgtgctggccgtgagaatgaccagcatccagtgcaagctgtaccagtactacctggaccacctgaccggcgtgggcaacaacagcgagggcggcagaggcaaggccggcgccaagctgttccaggacttccagatgctgagcagaatctggacccacccctggtgcctgcagctggactacatcagcaaggagaacaagggctacttcgacgaggacagcatggacgagttcatcgccagcgacagcgacgagaccagcatgagcctgagcagcgacgactacaccaagaagaagaagaagggcaagaagggcaagaaggacagcagcagcagcggcagcggcagcgacaacgacgtggaggtgatcaaggtgtggaacagcagaagcagaggcggcggcgagggcaacgtggacgagaccggcaacaaccccagcgtgagcctgaagctggaggagagcaaggccaccagcagcagcaaccccagcagccccgcccccgactggtacaaggacttcgtgaccgacgccgacgccgaggtgctggagcacagcggcaagatggtgctgctgttcgagatcctgagaatggccgaggagatcggcgacaaggtgctggtgttcagccagagcctgatcagcctggacctgatcgaggacttcctggagctggccagcagagagaagaccgaggacaaggacaagcccctgatctacaagggcgagggcaagtggctgagaaacatcgactactacagactggacggcagcaccaccgcccagagcagaaagaagtgggccgaggagttcaacgacgagaccaacgtgagaggcagactgttcatcatcagcaccaaggccggcagcctgggcatcaacctggtggccgccaacagagtgatcatcttcgacgccagctggaaccccagctacgacatccagagcatcttcagagtgtacagattcggccagaccaagcccgtgtacgtgtacagattcctggcccagggcaccatggaggacaagatctacgacagacaggtgaccaagcagagcctgagcttcagagtggtggaccagcagcaggtggagagacacttcaccatgaacgagctgaccgagctgtacaccttcgagcccgacctgctggacgaccccaacagcgagaagaagaagaagagagacacccccatgctgcccaaggacaccatcctggccgagctgctgcagatccacaaggagcacatcgtgggctaccacgagcacgacagcctgctggaccacaaggaggaggaggagctgaccgaggaggagagaaaggccgcctgggccgagtacgaggccgagaagaagggcctgaccatgagattcaacatccccaccggcaccaacctgccccccgtgagcttcaacagccagaccccctacatccccttcaacctgggcgccctgagcgccatgagcaaccagcagctggaggacctgatcaaccagggcagagagaaggtggtggaggccaccaacagcgtgaccgccgtgagaatccagcccctggaggacatcatcagcgccgtgtggaaggagaacatgaacctgagcgaggcccaggtgcaggccctggccctgagcagacaggccagccaggagctggacgtgaagagaagagaggccatctacaacgacgtgctgaccaagcagcagatgctgatcagctgcgtgcagagaatcctgatgaacagaagactgcagcagcagtacaaccagcagcagcagcagcagatgacctaccagcaggccaccctgggccacctgatgatgcccaagccccccaacctgatcatgaaccccagcaactaccagcagatcgacatgagaggcatgtaccagcccgtggccggcggcatgcagcccccccccctgcagagagcccccccccccatgagaagcaagaaccccggccccagccagggcaagagcatgtag

SEQ ID NO: 9653 - protein, 164 aa, Artificial Sequence
  derived and/or modified sequence
MPDTMLPACFLGLLAFSSACYFQNCPRGGKRAMSDLELRQCLPCGPGGKGRCFGPSICCADELGCFVGTAEALRCQEENYLPSPCQSGQKACGSGGRCAAFGVCCNDESCVTEPECREGFHRRARASDRSNATQLDGPAGALLLRLVQLAGAPEPFEPAQPDAY

SEQ ID NO: 9654 - DNA, 495 bp, Artificial Sequence
  derived and/or modified sequence
atgcctgatactatgctcccagcctgtttcctcggcctgttagccttttctagcgcttgctactttcagaattgtccacgtggggggaaaagagctatgtctgacttggaactgcggcagtgcctgccatgcggcccaggaggtaaggggagatgctttggaccaagcatctgctgcgctgatgagcttggatgctttgtggggaccgccgaggccctgaggtgccaggaagagaattacttgcccagcccctgccagtctgggcagaaggcatgtggatccggaggaagatgcgcagcctttggcgtatgttgcaacgatgagagctgcgtcactgagcctgagtgtcgcgagggctttcaccgaagagccagggcttctgataggtctaacgctacgcagctggacggaccggctggagcgctccttcttcgcttggtacaacttgctggtgcgccagagccattcgaacctgcccagcccgatgcatactag

SEQ ID NO: 9655 - DNA, 495 bp, Artificial Sequence
  derived and/or modified sequence
atgccagacaccatgctgcctgcctgcttcctgggcctgctggccttcagcagcgcctgctacttccagaactgcccccggggcggcaagagggccatgtctgacctggagctgcggcagtgcctgccctgtggccctgggggcaagggccgctgcttcggccccagcatctgctgtgctgatgagctgggctgctttgtgggcacagctgaggccctgcgctgccaggaggagaactacctgcccagcccctgccagagcggccagaaggcctgtggcagcggcggccgctgtgccgcctttggagtgtgctgcaatgatgagagctgtgtgacagagccagaatgtcgggagggcttccaccggcgggcccgggccagtgacaggagcaatgccacccagctggatggccctgctggggccctgctgctgcggctggtgcagctggccggggcccctgagccctttgagcccgcccagccagatgcctactag

SEQ ID NO: 9656 - DNA, 495 bp, Artificial Sequence
  derived and/or modified sequence
atgcccgacaccatgctgcccgcctgcttcctgggcctgctggccttctcttccgcatgctacttccagaattgccccagaggcggcaagcgcgcaatgtcagatctggagctgcgacaatgtctcccatgtggccccggcggcaaggggaggtgttttggacctagtatatgctgcgcggacgagctgggatgctttgtcggaacggcagaagcgctgaggtgccaagaagagaactacctgccaagtccctgccagtctggtcaaaaggcctgcggatctggcggtagatgcgctgccttcggtgtctgctgcaacgacgagagctgcgtgacagaacccgagtgtagagagggcttccaccgcagagcccgcgctagcgacagaagcaatgctacccagctcgatggtcccgctggagcactgctactgcgtctggtgcagctggccggagcccctgagcccttcgagccggcacagcccgatgcatactag

SEQ ID NO: 9657 - DNA, 495 bp, Artificial Sequence
  derived and/or modified sequence
atgccggacactatgctgccggcttgctttttagggctgctggctttctcaagcgcctgttactttcagaactgtcctcgaggaggtaagcgggctatgtccgatcttgagttaagacagtgtctcccttgtggcccaggaggcaagggaagatgctttggaccctctatctgctgcgccgacgagcttggctgctttgtcggcacagcggaagcattgagatgtcaggaggaaaactatcttccatccccgtgtcagagtggccagaaggcgtgtggcagcggcggaaggtgcgctgcattcggggtgtgctgcaatgacgagagctgtgtgacagaacctgagtgcagggagggctttcaccgcagggctcgagcctcagaccggtcaaatgccacacaactggacggtccggcaggggcattgctgttgcgattagtgcagttggctggggctccggaaccgttcgagccagcccaaccagacgcttattag

SEQ ID NO: 9658 - DNA, 619 bp, Artificial Sequence
  derived and/or modified sequence
acagagccaccaagcagtgctgcatacggggtccacctgtgtgcaccaggatgcctgacaccatgctgcccgcctgcttcctcggcctactggccttctcctccgcgtgctacttccagaactgcccgaggggcggcaagagggccatgtccgacctggagctgagacagtgcctcccctgcggccccgggggcaaaggccgctgcttcgggcccagcatctgctgcgcggacgagctgggctgcttcgtgggcacggctgaggcgctgcgctgccaggaggagaactacctgccgtcgccctgccagtccggccagaaggcgtgcgggagcgggggccgctgcgccgccttcggcgtttgctgcaacgacgagagctgcgtgaccgagcccgagtgccgcgagggctttcaccgccgcgcccgcgccagcgaccggagcaacgccacgcagctggacgggccggccggggccttgctgctgcggctggtgcagctggccggggcgcccgagcccttcgagcccgcccagcccgacgcctactgagccccgcgctcgccccaccggcgcgctcttcgcgcccgcccctgcagcacggacaataaacctccgccaatgca

SEQ ID NO: 9659 - DNA, 495 bp, Artificial Sequence
  derived and/or modified sequence
atgcccgacaccatgctgcccgcctgcttcctgggcctgctggccttcagcagcgcctgctacttccagaactgccccagaggcggcaagagagccatgagcgacctggagctgagacagtgcctgccctgcggccccggcggcaagggcagatgcttcggccccagcatctgctgcgccgacgagctgggctgcttcgtgggcaccgccgaggccctgagatgccaggaggagaactacctgcccagcccctgccagagcggccagaaggcctgcggcagcggcggcagatgcgccgccttcggcgtgtgctgcaacgacgagagctgcgtgaccgagcccgagtgcagagagggcttccacagaagagccagagccagcgacagaagcaacgccacccagctggacggccccgccggcgccctgctgctgagactggtgcagctggccggcgcccccgagcccttcgagcccgcccagcccgacgcctactag

SEQ ID NO: 9660 - protein, 1480 aa, Artificial Sequence
  derived and/or modified sequence
MQRSPLEKASVVSKLFFSWTRPILRKGYRQRLELSDIYQIPSVDSADNLSEKLEREWDRELASKKNPKLINALRRCFFWRFMFYGIFLYLGEVTKAVQPLLLGRIIASYDPDNKEERSIAIYLGIGLCLLFIVRTLLLHPAIFGLHHIGMQMRIAMFSLIYKKTLKLSSRVLDKISIGQLVSLLSNNLNKFDEGLALAHFVWIAPLQVALLMGLIWELLQASAFCGLGFLIVLALFQAGLGRMMMKYRDQRAGKISERLVITSEMIENIQSVKAYCWEEAMEKMIENLRQTELKLTRKAAYVRYFNSSAFFFSGFFVVFLSVLPYALIKGIILRKIFTTISFCIVLRMAVTRQFPWAVQTWYDSLGAINKIQDFLQKQEYKTLEYNLTTTEVVMENVTAFWEEGFGELFEKAKQNNNNRKTSNGDDSLFFSNFSLLGTPVLKDINFKIERGQLLAVAGSTGAGKTSLLMVIMGELEPSEGKIKHSGRISFCSQFSWIMPGTIKENIIFGVSYDEYRYRSVIKACQLEEDISKFAEKDNIVLGEGGITLSGGQRARISLARAVYKDADLYLLDSPFGYLDVLTEKEIFESCVCKLMANKTRILVTSKMEHLKKADKILILHEGSSYFYGTFSELQNLQPDFSSKLMGCDSFDQFSAERRNSILTETLHRFSLEGDAPVSWTETKKQSFKQTGEFGEKRKNSILNPINSIRKFSIVQKTPLQMNGIEEDSDEPLERRLSLVPDSEQGEAILPRISVISTGPTLQARRRQSVLNLMTHSVNQGQNIHRKTTASTRKVSLAPQANLTELDIYSRRLSQETGLEISEEINEEDLKECFFDDMESIPAVTTWNTYLRYITVHKSLIFVLIWCLVIFLAEVAASLVVLWLLGNTPLQDKGNSTHSRNNSYAVIITSTSSYYVFYIYVGVADTLLAMGFFRGLPLVHTLITVSKILHHKMLHSVLQAPMSTLNTLKAGGILNRFSKDIAILDDLLPLTIFDFIQLLLIVIGAIAVVAVLQPYIFVATVPVIVAFIMLRAYFLQTSQQLKQLESEGRSPIFTHLVTSLKGLWTLRAFGRQPYFETLFHKALNLHTANWFLYLSTLRWFQMRIEMIFVIFFIAVTFISILTTGEGEGRVGIILTLAMNIMSTLQWAVNSSIDVDSLMRSVSRVFKFIDMPTEGKPTKSTKPYKNGQLSKVMIIENSHVKKDDIWPSGGQMTVKDLTAKYTEGGNAILENISFSISPGQRVGLLGRTGSGKSTLLSAFLRLLNTEGEIQIDGVSWDSITLQQWRKAFGVIPQKVFIFSGTFRKNLDPYEQWSDQEIWKVADEVGLRSVIEQFPGKLDFVLVDGGCVLSHGHKQLMCLARSVLSKAKILLLDEPSAHLDPVTYQIIRRTLKQAFADCTVILCEHRIEAMLECQQFLVIEENKVRQYDSIQKLLNERSLFRQAISPSDRVKLFPHRNSSKCKSKPQIAALKEETEEEVQDTRL

SEQ ID NO: 9661 - protein, 1438 aa, Artificial Sequence
  derived and/or modified sequence
MQRSPLEKASVVSKLFFSWTRPILRKGYRQRLELSDIYQIPSVDSADNLSEKLEREWDRELASKKNPKLINALRRCFFWRFMFYGIFLYLGEVTKAVQPLLLGRIIASYDPDNKEERSIAIYLGIGLCLLFIVRTLLLHPAIFGLHHIGMQMRIAMFSLIYKKGLALAHFVWIAPLQVALLMGLIWELLQASAFCGLGFLIVLALFQAGLGRMMMKYRDQRAGKISERLVITSEMIENIQSVKAYCWEEAMEKMIENLRQTELKLTRKAAYVRYFNSSAFFFSGFFVVFLSVLPYALIKGIILRKIFTTISFCIVLRMAVTRQFPWAVQTWYDSLGAINKIQDFLQKQEYKTLEYNLTTTEVVMENVTAFWEEGFGELFEKAKQNNNNRKTSNGDDSLFFSNFSLLGTPVLKDINFKIERGQLLAVAGSTGAGKTSLLMVIMGELEPSEGKIKHSGRISFCSQFSWIMPGTIKENIIFGVSYDEYRYRSVIKACQLEEDISKFAEKDNIVLGEGGITLSGGQRARISLARAVYKDADLYLLDSPFGYLDVLTEKEIFESCVCKLMANKTRILVTSKMEHLKKADKILILHEGSSYFYGTFSELQNLQPDFSSKLMGCDSFDQFSAERRNSILTETLHRFSLEGDAPVSWTETKKQSFKQTGEFGEKRKNSILNPINSIRKFSIVQKTPLQMNGIEEDSDEPLERRLSLVPDSEQGEAILPRISVISTGPTLQARRRQSVLNLMTHSVNQGQNIHRKTTASTRKVSLAPQANLTELDIYSRRLSQETGLEISEEINEEDLKECFFDDMESIPAVTTWNTYLRYITVHKSLIFVLIWCLVIFLAEVAASLVVLWLLGNTPLQDKGNSTHSRNNSYAVIITSTSSYYVFYIYVGVADTLLAMGFFRGLPLVHTLITVSKILHHKMLHSVLQAPMSTLNTLKAGGILNRFSKDIAILDDLLPLTIFDFIQLLLIVIGAIAVVAVLQPYIFVATVPVIVAFIMLRAYFLQTSQQLKQLESEGRSPIFTHLVTSLKGLWTLRAFGRQPYFETLFHKALNLHTANWFLYLSTLRWFQMRIEMIFVIFFIAVTFISILTTGEGEGRVGIILTLAMNIMSTLQWAVNSSIDVDSLMRSVSRVFKFIDMPTEGKPTKSTKPYKNGQLSKVMIIENSHVKKDDIWPSGGQMTVKDLTAKYTEGGNAILENISFSISPGQRVGLLGRTGSGKSTLLSAFLRLLNTEGEIQIDGVSWDSITLQQWRKAFGVIPQKVFIFSGTFRKNLDPYEQWSDQEIWKVADEVGLRSVIEQFPGKLDFVLVDGGCVLSHGHKQLMCLARSVLSKAKILLLDEPSAHLDPVTYQIIRRTLKQAFADCTVILCEHRIEAMLECQQFLVIEENKVRQYDSIQKLLNERSLFRQAISPSDRVKLFPHRNSSKCKSKPQIAALK

SEQ ID NO: 9662 - DNA, 6132 bp, Artificial Sequence
  derived and/or modified sequence
aattggaagcaaatgacatcacagcaggtcagagaaaaagggttgagcggcaggcacccagagtagtaggtctttggcattaggagcttgagcccagacggccctagcagggaccccagcgcccgagagaccatgcagaggtcgcctctggaaaaggccagcgttgtctccaaactttttttcagctggaccagaccaattttgaggaaaggatacagacagcgcctggaattgtcagacatataccaaatcccttctgttgattctgctgacaatctatctgaaaaattggaaagagaatgggatagagagctggcttcaaagaaaaatcctaaactcattaatgcccttcggcgatgttttttctggagatttatgttctatggaatctttttatatttaggggaagtcaccaaagcagtacagcctctcttactgggaagaatcatagcttcctatgacccggataacaaggaggaacgctctatcgcgatttatctaggcataggcttatgccttctctttattgtgaggacactgctcctacacccagccatttttggccttcatcacattggaatgcagatgagaatagctatgtttagtttgatttataagaagactttaaagctgtcaagccgtgttctagataaaataagtattggacaacttgttagtctcctttccaacaacctgaacaaatttgatgaaggacttgcattggcacatttcgtgtggatcgctcctttgcaagtggcactcctcatggggctaatctgggagttgttacaggcgtctgccttctgtggacttggtttcctgatagtccttgccctttttcaggctgggctagggagaatgatgatgaagtacagagatcagagagctgggaagatcagtgaaagacttgtgattacctcagaaatgattgaaaatatccaatctgttaaggcatactgctgggaagaagcaatggaaaaaatgattgaaaacttaagacaaacagaactgaaactgactcggaaggcagcctatgtgagatacttcaatagctcagccttcttcttctcagggttctttgtggtgtttttatctgtgcttccctatgcactaatcaaaggaatcatcctccggaaaatattcaccaccatctcattctgcattgttctgcgcatggcggtcactcggcaatttccctgggctgtacaaacatggtatgactctcttggagcaataaacaaaatacaggatttcttacaaaagcaagaatataagacattggaatataacttaacgactacagaagtagtgatggagaatgtaacagccttctgggaggagggatttggggaattatttgagaaagcaaaacaaaacaataacaatagaaaaacttctaatggtgatgacagcctcttcttcagtaatttctcacttcttggtactcctgtcctgaaagatattaatttcaagatagaaagaggacagttgttggcggttgctggatccactggagcaggcaagacttcacttctaatggtgattatgggagaactggagccttcagagggtaaaattaagcacagtggaagaatttcattctgttctcagttttcctggattatgcctggcaccattaaagaaaatatcatctttggtgtttcctatgatgaatatagatacagaagcgtcatcaaagcatgccaactagaagaggacatctccaagtttgcagagaaagacaatatagttcttggagaaggtggaatcacactgagtggaggtcaacgagcaagaatttctttagcaagagcagtatacaaagatgctgatttgtatttattagactctccttttggatacctagatgttttaacagaaaaagaaatatttgaaagctgtgtctgtaaactgatggctaacaaaactaggattttggtcacttctaaaatggaacatttaaagaaagctgacaaaatattaattttgcatgaaggtagcagctatttttatgggacattttcagaactccaaaatctacagccagactttagctcaaaactcatgggatgtgattctttcgaccaatttagtgcagaaagaagaaattcaatcctaactgagaccttacaccgtttctcattagaaggagatgctcctgtctcctggacagaaacaaaaaaacaatcttttaaacagactggagagtttggggaaaaaaggaagaattctattctcaatccaatcaactctatacgaaaattttccattgtgcaaaagactcccttacaaatgaatggcatcgaagaggattctgatgagcctttagagagaaggctgtccttagtaccagattctgagcagggagaggcgatactgcctcgcatcagcgtgatcagcactggccccacgcttcaggcacgaaggaggcagtctgtcctgaacctgatgacacactcagttaaccaaggtcagaacattcaccgaaagacaacagcatccacacgaaaagtgtcactggcccctcaggcaaacttgactgaactggatatatattcaagaaggttatctcaagaaactggcttggaaataagtgaagaaattaacgaagaagacttaaaggagtgcttttttgatgatatggagagcataccagcagtgactacatggaacacataccttcgatatattactgtccacaagagcttaatttttgtgctaatttggtgcttagtaatttttctggcagaggtggctgcttctttggttgtgctgtggctccttggaaacactcctcttcaagacaaagggaatagtactcatagtagaaataacagctatgcagtgattatcaccagcaccagttcgtattatgtgttttacatttacgtgggagtagccgacactttgcttgctatgggattcttcagaggtctaccactggtgcatactctaatcacagtgtcgaaaattttacaccacaaaatgttacattctgttcttcaagcacctatgtcaaccctcaacacgttgaaagcaggtgggattcttaatagattctccaaagatatagcaattttggatgaccttctgcctcttaccatatttgacttcatccagttgttattaattgtgattggagctatagcagttgtcgcagttttacaaccctacatctttgttgcaacagtgccagtgatagtggcttttattatgttgagagcatatttcctccaaacctcacagcaactcaaacaactggaatctgaaggcaggagtccaattttcactcatcttgttacaagcttaaaaggactatggacacttcgtgccttcggacggcagccttactttgaaactctgttccacaaagctctgaatttacatactgccaactggttcttgtacctgtcaacactgcgctggttccaaatgagaatagaaatgatttttgtcatcttcttcattgctgttaccttcatttccattttaacaacaggagaaggagaaggaagagttggtattatcctgactttagccatgaatatcatgagtacattgcagtgggctgtaaactccagcatagatgtggatagcttgatgcgatctgtgagccgagtctttaagttcattgacatgccaacagaaggtaaacctaccaagtcaaccaaaccatacaagaatggccaactctcgaaagttatgattattgagaattcacacgtgaagaaagatgacatctggccctcagggggccaaatgactgtcaaagatctcacagcaaaatacacagaaggtggaaatgccatattagagaacatttccttctcaataagtcctggccagagggtgggcctcttgggaagaactggatcagggaagagtactttgttatcagcttttttgagactactgaacactgaaggagaaatccagatcgatggtgtgtcttgggattcaataactttgcaacagtggaggaaagcctttggagtgataccacagaaagtatttattttttctggaacatttagaaaaaacttggatccctatgaacagtggagtgatcaagaaatatggaaagttgcagatgaggttgggctcagatctgtgatagaacagtttcctgggaagcttgactttgtccttgtggatgggggctgtgtcctaagccatggccacaagcagttgatgtgcttggctagatctgttctcagtaaggcgaagatcttgctgcttgatgaacccagtgctcatttggatccagtaacataccaaataattagaagaactctaaaacaagcatttgctgattgcacagtaattctctgtgaacacaggatagaagcaatgctggaatgccaacaatttttggtcatagaagagaacaaagtgcggcagtacgattccatccagaaactgctgaacgagaggagcctcttccggcaagccatcagcccctccgacagggtgaagctctttccccaccggaactcaagcaagtgcaagtctaagccccagattgctgctctgaaagaggagacagaagaagaggtgcaagatacaaggctttagagagcagcataaatgttgacatgggacatttgctcatggaattggagctcgtgggacagtcacctcatggaattggagctcgtggaacagttacctctgcctcagaaaacaaggatgaattaagtttttttttaaaaaagaaacatttggtaaggggaattgaggacactgatatgggtcttgataaatggcttcctggcaatagtcaaattgtgtgaaaggtacttcaaatccttgaagatttaccacttgtgttttgcaagccagattttcctgaaaacccttgccatgtgctagtaattggaaaggcagctctaaatgtcaatcagcctagttgatcagcttattgtctagtgaaactcgttaatttgtagtgttggagaagaactgaaatcatacttcttagggttatgattaagtaatgataactggaaacttcagcggtttatataagcttgtattcctttttctctcctctccccatgatgtttagaaacacaactatattgtttgctaagcattccaactatctcatttccaagcaagtattagaataccacaggaaccacaagactgcacatcaaaatatgccccattcaacatctagtgagcagtcaggaaagagaacttccagatcctggaaatcagggttagtattgtccaggtctaccaaaaatctcaatatttcagataatcacaatacatcccttacctgggaaagggctgttataatctttcacaggggacaggatggttcccttgatgaagaagttgatatgccttttcccaactccagaaagtgacaagctcacagacctttgaactagagtttagctggaaaagtatgttagtgcaaattgtcacaggacagcccttctttccacagaagctccaggtagagggtgtgtaagtagataggccatgggcactgtgggtagacacacatgaagtccaagcatttagatgtataggttgatggtggtatgttttcaggctagatgtatgtacttcatgctgtctacactaagagagaatgagagacacactgaagaagcaccaatcatgaattagttttatatgcttctgttttataattttgtgaagcaaaattttttctctaggaaatatttattttaataatgtttcaaacatatataacaatgctgtattttaaaagaatgattatgaattacatttgtataaaataatttttatatttgaaatattgactttttatggcactagtatttctatgaaatattatgttaaaactgggacaggggagaacctagggtgatattaaccaggggccatgaatcaccttttggtctggagggaagccttggggctgatgcagttgttgcccacagctgtatgattcccagccagcacagcctcttagatgcagttctgaagaagatggtaccaccagtctgactgtttccatcaagggtacactgccttctcaactccaaactgactcttaagaagactgcattatatttattactgtaagaaaatatcacttgtcaataaaatccatacatttgtgtgaaa

SEQ ID NO: 9663 - DNA, 4440 bp, Artificial Sequence
  derived and/or modified sequence
atgcaaagatcccctttggagaaagcatcagtcgtaagcaagctcttcttttcctggactcggcccatcctgagaaagggctaccggcaacgtctagagctgagcgacatatatcagatcccttccgtggattctgcagacaacctctcggagaagcttgaaagagaatgggaccgggagttagcgtccaaaaaaaaccctaaattgattaacgccctccgcaggtgtttcttttggaggttcatgttttacggaatcttcctgtacctgggtgaggtgactaaagcagttcagcctttgctgctcggacgaattatcgctagttacgacccggataataaggaagagcggtctatcgctatttatttaggcatcgggctgtgcttgctgttcatagtgcggacattgctcctgcacccagccatcttcgggttgcaccacatcggaatgcagatgcgcatcgccatgttctcactaatctacaagaaaacactaaaactctcttctcgagtcctcgacaagataagcatagggcagctggttagcttactgagtaacaatctcaataagttcgatgagggattggccttggcccacttcgtttggatcgcccccctgcaagtggccctgctgatgggtctgatttgggagctcctccaggccagcgccttctgcgggctcgggtttctaatcgtgctggcactgtttcaggccggtttgggccgtatgatgatgaaatatcgagaccagcgagctgggaagatctcggagcgattggtcattactagcgaaatgatcgagaacattcagtcagtcaaagcctattgctgggaagaagccatggagaagatgatcgaaaacctacgacagacggagcttaagctcacacgaaaagctgcctacgtgcgttatttcaactcttccgctttctttttctccgggttcttcgtagtcttcctgtccgtgctaccttatgctttaataaagggaataatcctacgaaagatttttactacgataagcttctgtatcgtgctccggatggccgtcaccaggcagttcccctgggccgtgcaaacctggtatgactctctgggtgctataaacaagattcaggacttcctgcaaaagcaggagtataaaaccctcgaatataatttgaccaccaccgaagtggtgatggaaaacgtcacggccttctgggaagagggcttcggagagctgtttgaaaaggctaagcaaaataacaataatcggaaaaccagcaacggcgatgattctctatttttctccaatttctctctgctggggactccggtccttaaagacatcaatttcaagatagagaggggccagctgctggccgtggccggaagcaccggggcaggaaagacaagcttgctcatggtcatcatgggggaattagagccgtctgagggcaagatcaaacatagtggacggatctctttctgttcacagttctcttggatcatgcctggcaccataaaggaaaatattatctttggagtttcatatgacgagtatagatacaggagcgttatcaaagcatgtcagctggaggaggatatctccaagttcgcggagaaggacaatatcgtgttgggcgagggggggataacattgtcaggtggccagcgggctcggatcagcctggctcgggctgtgtataaagatgccgacttgtatctactagactccccctttggctatcttgacgtgctgactgagaaggaaatatttgaaagttgcgtttgtaagctgatggcaaataagacaagaatcctggtcacaagtaagatggaacatctgaagaaagccgacaagatcttgatacttcacgagggaagttcatacttttacggaacattttctgagctccagaacttgcaaccggacttctcctctaaattaatgggctgtgactcttttgaccagttttcagcggaacgacggaatagcattctgactgaaactctccacaggttcagtcttgaaggagacgctcccgtttcctggacagagacgaaaaaacagtcattcaagcaaactggagagttcggcgagaaaagaaagaactccattctgaatccaatcaatagcataagaaaattcagcatcgtgcagaaaaccccgctgcagatgaatggaattgaggaagactccgatgagccactcgagcgccgtctgtcactggtgcctgatagtgaacaaggcgaggccattcttccgagaatctccgttatttcaactggaccgaccctgcaggcacgcaggcggcagtccgtgttgaacctaatgacacactctgtaaatcagggccagaatatccaccgaaaaactacagcatcgacacgaaaggtgtccctagctccccaggcaaatctcacagagcttgatatctatagcaggcggctgagccaggagacaggcttggagatcagtgaggagatcaacgaggaagatttaaaagaatgttttttcgatgatatggaaagcataccagccgttaccacatggaatacatacctgagatacataaccgtacataaatcattaattttcgtgctaatatggtgtctggtgatattccttgctgaagtcgctgcctctttggtggtcctatggctcctgggcaacacccccctgcaagataaggggaatagcacccacagccgcaacaactcctatgcagtgatcatcacttccacctcatcctactatgtgttttatatctacgtgggtgtcgcagacactttgctcgcaatggggttctttcgggggctcccactagtgcataccctgattaccgtcagtaaaattctgcaccacaagatgctccactcagtactgcaggctccaatgagcactctgaatacactcaaagccggcggcatcctgaatcggttctcgaaggacatcgctatcctggatgacctcctgcccctgactatcttcgacttcatacaactgttgctcattgtcattggcgccatagccgtggtggccgtcctacaaccctacatatttgttgccactgtacctgtgattgtcgcttttatcatgctaagagcatattttctccaaacatcacagcagctgaagcagctcgagagtgaagggagatcgcctatttttacccaccttgtgacttctctgaaagggttgtggaccctacgcgctttcggccgtcagccctactttgagacactgttccataaagcccttaatttgcacacagcaaattggtttttgtatctgtcaacattgagatggttccaaatgcgcatagagatgatttttgtcatcttctttattgctgttacttttatctcgatcctgacaaccggagagggtgaagggcgtgttggcatcattctgaccctggctatgaatattatgtcaacacttcagtgggccgtgaactccagcatcgacgtagatagtctaatgcgatccgtgagcagagtatttaagttcatcgatatgccaactgagggtaaacccaccaaatccacaaaaccctataaaaacggacagctcagcaaggtgatgatcattgagaattcccatgtgaaaaaggacgacatctggccgtcaggtggtcagatgacagtcaaggaccttacagccaaatacaccgagggcggcaacgctattctggagaacatttcgttttccatctcacccggccagagggtggggctacttggtcgcaccgggtctggaaagagcacgctgctctccgccttcttacgcctattaaatacggagggtgaaatacagatagatggggtaagctgggacagcattactctgcagcaatggaggaaggcgttcggggtgatcccacagaaagtttttatattcagtggtacctttaggaagaacttggatccctatgagcagtggtcagaccaggagatctggaaggtggccgacgaggttggactgagaagcgtcattgagcagttccctggcaagctagattttgtgctggtggacggaggctgcgtgctcagtcacggccacaaacaactcatgtgtctggcaaggtccgtgctttctaaagccaaaatactcctattggacgagcctagcgcacacctagaccccgtaacttaccagattataagacggactctcaagcaggcttttgcagactgcacagtgattctctgcgagcaccggattgaggcaatgctggaatgtcagcagtttttggttattgaggaaaacaaggtgcgtcaatacgatagcattcagaagctgttgaatgaacgaagcctcttccggcaagcgatctcaccctctgatcgcgttaagttgttcccacaccgcaattcctctaagtgcaagtccaagccccagatagctgccttgaaagaagaaactgaggaagaggttcaggacactaggctt

SEQ ID NO: 9664 - DNA, 4440 bp, Artificial Sequence
  derived and/or modified sequence
atgcagcgctcgccgctggagaaggcttcggtcgtgtcgaagctgtttttctcctggacccggcctatccttcgcaaggggtaccggcaaagactggagctcagcgacatctaccagatccctagcgtggattcagctgataacctgtcggagaaattggaacgcgagtgggatcgcgagctggcatccaagaaaaacccaaagctcatcaatgcgctccggcgctgctttttctggcgcttcatgttctacggaatcttcttgtacttgggagaggtcaccaaggccgtccaaccgctgctgctcggaagaatcattgcaagttatgacccagacaacaaggaagagcgtagcatcgccatttacctcggtataggactctgcctcctcttcatcgtgaggactctcctgctgcaccccgcaatctttggtttgcaccatatcggtatgcagatgagaatcgccatgttttcgttgatctacaaaaagactctgaaactctcaagccgtgtgctcgataagatctccatcggacagctggtgtccctgctgagcaacaatttgaacaagttcgacgagggcctggccctggcccacttcgtctggattgcccccctccaagtcgctctgctgatggggctcatctgggaattgttgcaggctagcgctttctgcggtcttggcttcctgatcgtcttggcgctgtttcaggcaggactcggccgcatgatgatgaagtaccgggatcaacgtgctggaaagatctcggaacggcttgtgataactagcgaaatgattgagaatattcaatcggtgaaggcctactgctgggaagaagccatggaaaagatgattgaaaacctgagacagacggagctgaagctgacgcgcaaagccgcatacgttcgctacttcaacagctcggcatttttcttctccggattctttgtggtgttcctgtccgtcctgccatacgcgctcatcaaagggatcatcctgagaaagattttcaccactatcagcttctgcatcgtcctgcgcatggctgtcactagacagttcccgtgggcggtgcagacctggtacgactcgctcggcgcgattaacaaaattcaagactttcttcagaagcaggaatacaagaccctggaatacaatctcaccactaccgaggtggtgatggagaatgtgactgcgttctgggaggaaggattcggcgaattgtttgagaaggccaagcagaataacaacaataggaaaacgagcaacggtgatgatagcctgttcttctctaacttttcgctgttgggcactccggtgcttaaggatatcaatttcaagatcgaacggggacagctcctcgcagtggctggcagcaccggagcgggaaagacctcccttctcatggtgatcatgggagaattggaaccgtcagagggcaagataaagcacagcggaagaatctcgttctgttctcaattcagctggatcatgccagggactatcaaggaaaacatcatctttggagtgtcctacgacgagtacaggtaccggtctgtcatcaaagcctgtcagctggaagaggacatctccaagtttgcggagaaagacaacatcgtgctgggagaaggcggcattaccttgagcggtggacagcgagcaaggatctccctcgccagagccgtgtacaaagatgcagatctgtatctgttggactccccgttcggatatctcgatgtcctgaccgaaaaagaaatctttgagtcgtgtgtctgcaagctgatggcgaacaagacccgtatccttgtcacgtccaaaatggaacacctcaaaaaggcggacaagatcttgatcctgcacgaaggctcctcctacttctacgggaccttctcggaactgcagaatctccagcctgatttctcctcaaagctgatgggatgcgattctttcgaccagttcagcgccgagcgcagaaactccatcctcactgaaaccttgcatcgcttttcactggaaggagacgcgccggtgtcatggactgaaactaagaaacaatcctttaagcagactggagagttcggcgagaagcggaagaacagcattctgaatccgataaactccattaggaagttctcaatcgtccaaaaaacgccactgcagatgaacggaatcgaagaggattcggacgagcctttggaacggcggctgagccttgttccagattcggaacagggcgaggccattctcccaagaataagcgtcatcagcaccggtcctactctgcaagccagaagaaggcaatcggtcctcaatttgatgacccattccgtcaatcagggacaaaacatccaccggaaaaccaccgccagcacccgcaaggtttcgctggcgccgcaggccaatcttaccgagcttgacatctactcgcgccggctgagccaggagacggggctggagattagcgaggaaatcaacgaggaggacctgaaggagtgcttctttgatgacatggaaagcatcccagcggtcaccacttggaacacgtaccttcggtatatcaccgtgcataagtctttgatcttcgttctgatctggtgtctcgtcatcttcctggccgaagtggccgccagcctcgtggtgctgtggctgctgggtaacactcccctccaagacaagggcaactccactcactcgcgcaacaactcgtacgcggtgattatcacctccacttcttcatactatgttttctacatctacgtaggagtggccgacactctgttggcgatgggatttttccgcgggctcccgctcgttcataccctgatcaccgtctccaagatactgcatcataagatgctgcactccgtgctgcaggccccaatgtccacgctgaatacgttgaaagccggaggaatcctgaatagattctcgaaggacatcgcgatcctggacgacctgttgccactcacgatctttgacttcatccagctcctgctgatcgtgatcggagcaatcgcggtcgtcgcggtgctgcagccgtacatcttcgtcgcaactgtccccgtgattgttgccttcatcatgctgcgggcgtacttccttcaaacgtctcagcagctgaagcagctggagtcagaaggccgttcgcctatctttacccacctggtgacttcactgaagggactgtggactctgcgcgccttcggccgccaaccatactttgaaactctgttccataaggcgctgaatctgcatacggcaaactggttcctgtacctgagcaccctgaggtggtttcaaatgagaattgaaatgatcttcgtgatcttcttcatcgctgtgacctttatctcgatcctcactacgggagaaggggaagggagagtgggaatcatccttacccttgccatgaacatcatgtccaccctgcaatgggccgtcaactcctccatcgacgtggactcactgatgcggagtgtgtcacgcgtgttcaagttcattgacatgccgactgagggcaaaccgaccaagtccactaagccttacaagaatggacaactcagcaaagtgatgatcatcgaaaatagccacgtgaagaaagatgacatctggccaagcgggggacagatgactgtgaaagacttgacggcaaaatacaccgaagggggcaacgcaatcctggaaaacattagcttctcaatttcaccgggacagagagttgggttgctcgggcggaccggttcgggcaagtcaaccctcctttcagcattccttcgcctgcttaacactgaaggtgaaatccaaatcgatggtgtgagctgggatagcattactctgcagcagtggcgtaaggcgtttggcgtgatccctcagaaggtgttcattttcagcggaacttttaggaagaatctggatccgtacgagcagtggtcggatcaggaaatctggaaggtggcggacgaagtgggattgcggtcggtgatcgaacagtttccggggaagttggattttgtgctggtcgacggcggctgcgtgttgtcgcacggacacaaacaactcatgtgcttggcgcggagtgtcctgtcgaaggctaaaatccttctgctggatgagccctccgcacacctcgacccggtgacctaccagatcatcaggcgcaccctgaagcaggctttcgctgattgtacggtgatcctctgcgaacatcggattgaggccatgctggaatgccaacaattccttgtcatcgaagagaataaggtgcggcagtacgattcaatccaaaaactccttaacgagcggtccctctttcgccaggctatcagtccgtccgaccgggtgaaacttttcccgcaccgcaactcgtcgaaatgcaaatcgaaaccccagattgccgcactgaaagaggaaaccgaggaagaggtgcaagacacgcgcctg

SEQ ID NO: 9665 - DNA, 4440 bp, Artificial Sequence
  derived and/or modified sequence
atgcaaaggtctcctctggagaaggccagcgtcgtctcaaaattgttcttctcatggacccgccccatcctgcggaagggatatcgacagaggctggagctcagcgacatctaccaaataccgtcggtggatagcgcggataacttgagtgaaaaactggagcgcgagtgggacagagagctggcgtctaagaagaaccctaagctgatcaacgccctccgccgatgcttcttctggcgattcatgttttacggcattttcctgtacctgggggaagtgactaaagcagtgcagcccctcttgctgggacgcattatcgcctcgtatgaccccgacaacaaagaggagaggagtatcgctatatacctcggcatcggactttgtctgctctttatcgtgcggactctcctcttacaccccgcaatttttggactgcaccatatcggaatgcagatgagaattgccatgttcagcttaatttataagaagactctaaagctatcttctcgcgtgctggataaaattagcatcgggcagctggtgtccttgctgagcaataatctgaacaagttcgacgagggtctggctctggctcattttgtttggattgcccccttgcaggtcgctctactcatgggccttatttgggagctgctgcaggcctcagccttttgtggcctgggatttttgatcgtgcttgcgctgttccaggccggactggggcggatgatgatgaagtacagggatcagcgcgctgggaaaatctccgaaagactggtgatcactagtgagatgattgaaaacatccaatcagtgaaggcttactgttgggaagaggccatggaaaagatgatcgagaatctacggcagactgaactgaagctgacgcgcaaggccgcgtacgtgcggtattttaactcctccgcattcttcttctccgggttcttcgtcgtgtttctttccgtgctgccgtacgccctcatcaaaggaataattctgcgaaagatcttcaccacaatcagcttctgcatagtgcttcggatggctgtaactcgtcagttcccctgggctgtgcaaacctggtatgactccttaggtgcaatcaataaaatccaggatttcctgcagaaacaggagtacaagaccctggagtataaccttactacgactgaggtggtgatggaaaacgtgaccgcgttttgggaggagggatttggggagttgttcgaaaaggcaaaacagaacaacaataaccgaaaaacatctaacggagatgattccttgtttttctctaactttagtctgctggggactcctgtgctgaaggacattaacttcaagatagaacgcggacaattactggccgtggcgggttccaccggtgcaggaaagacctctctcctcatggttattatgggggagctggagcctagtgagggcaagatcaaacatagcggccggatctccttctgcagtcagtttagctggataatgcccgggaccattaaggagaatatcatattcggtgtgtcttacgacgaataccgctacagatctgtgattaaagcgtgccagctggaagaagacatttcaaagttcgcggagaaagacaacatcgtactgggagaagggggtatcactttgtcaggcggtcaaagggcgcgcatcagtctggccagggcagtttacaaagatgccgatctgtacctcctggatagtccattcggatacctcgacgtcctcacagaaaaggaaatctttgagagctgtgtctgtaagttgatggcgaataagacccgtatcctcgtgacctctaaaatggagcatctgaagaaggcagacaaaatcctgatcctgcacgaggggtccagctatttctacggaacttttagcgagcttcaaaacctccagcctgacttttcctccaaactgatgggatgcgactcttttgatcaattctcagcagagcggagaaactccattctgacagaaacccttcaccgcttctccttggaaggcgatgcgcccgttagctggacagaaacaaagaagcagagcttcaagcagactggagaatttggcgagaagcggaaaaactcgattctgaatcccatcaacagcatacggaagttctcaattgtccaaaagacaccgctccaaatgaatggtatcgaggaggatagtgacgaacctctggaacgacgactctctttggtgcctgattcagagcagggcgaggcaatcctgccaagaatttcggtgataagcaccggtcccacactgcaggctagaagaagacagtccgtcctgaatctcatgacccactcagtgaaccaggggcagaatatccaccgcaagactacggcatccacccggaaggtgagcttggcgccgcaggccaacctgacagagttggacatttacagtaggcggctctctcaggagacagggctagagatttcagaggagataaacgaagaagacctaaaggagtgcttcttcgacgatatggaaagtatccccgcagtcactacatggaatacttacctccggtatattactgtacataagagcctcatctttgtgttgatctggtgcctggtgatctttctggctgaggtggccgcctccctggtggtgctgtggcttctgggcaatacgccactgcaagataagggcaactctactcatagtcgcaataatagctatgccgtgatcattacaagcacatcttcctattacgttttctacatatatgtgggagtggccgatactctcctcgccatgggcttctttcgagggctccctttggtgcacacactgattacggtcagcaagatcttgcaccacaaaatgttacactcagttctgcaggcccctatgagtactttgaatacactcaaagctggcggtatactcaaccggttctccaaggacatagcaatcctggatgatttgctccccctaaccatctttgactttatccagctgctgctgatcgtgattggtgcgattgccgtagttgcggtcctccaaccctatattttcgttgctacagtccccgtgattgtggcatttatcatgctgcgagcctacttccttcagacctcccagcagctgaaacaattagaaagtgagggcagatcccccatctttactcacctggtgaccagcctgaaggggctctggactttgagagcctttggccgccagccttacttcgaaactttgttccataaggccctcaaccttcatactgcaaactggtttctctacctaagcaccttacgctggtttcaaatgcgcatcgaaatgatttttgtgatatttttcattgctgtaaccttcatctccatactgaccacaggcgagggtgaagggcgggttggtatcatactgacccttgccatgaacatcatgtcgacgctgcagtgggcagttaattcatctatcgatgtcgactctctcatgcgctcagtatcccgggtgtttaagttcatcgatatgcctacagagggaaagcccaccaagagtactaagccctacaagaatgggcaactatccaaggtgatgatcatagagaatagtcacgtgaaaaaggatgatatctggccctccgggggacagatgactgtgaaagacctcacagccaaatataccgagggtggaaacgctatcctggagaatatctctttctccatttctcctggccagcgggtgggtttgctgggacgtaccgggagcggaaaatccaccttgctctctgccttcctgcgcttgctaaatacagaaggggagatccagatcgatggggtgagctgggacagcatcacactgcagcaatggcggaaggctttcggcgttatcccccaaaaagtgtttatcttttccggaacttttagaaaaaacctggatccttacgagcagtggagcgaccaggagatttggaaagtggccgacgaagtggggctccgtagcgtgattgaacagttccctggtaaactggatttcgtgctggtggacggggggtgcgtgttgtcccacgggcataagcagctgatgtgtcttgcccgtagcgtcctgagtaaggcaaagatcctactccttgatgaaccttcagcacatctggacccagtgacataccagatcatccgccgcacactaaaacaggccttcgccgattgtaccgtgatactttgtgaacataggatcgaggctatgctcgaatgccagcagtttctggtgatcgaagagaacaaagtccggcaatacgactccatccagaaactgcttaatgagaggtcacttttccgccaggccatctctccaagcgatagggtcaagctttttccccatcgcaatagctccaagtgtaagagcaagccccagatcgccgcccttaaggaggagactgaggaagaagtccaggacacccggttg

SEQ ID NO: 9666 - DNA, 4440 bp, Artificial Sequence
  derived and/or modified sequence
atgcagcgcagcccactggaaaaagccagcgtggtatccaagctcttctttagctggacacggcctattcttcgcaagggatacagacaacgacttgagctctcagatatctaccagattccatccgttgactccgccgacaacctctcagaaaaactggaaagagagtgggatagggagttggctagcaagaagaaccccaagctcatcaacgccttgcgacgatgttttttctggcggttcatgttttacgggatctttctgtatttgggcgaggtcacgaaggcagtccagccgcttctcctcgggcggatcatcgcatcttacgaccccgataataaagaggaacgctccatcgctatttatctgggaatcggcctgtgtctgttgtttatcgttcggacgttgctgctgcaccctgcaattttcggtctgcatcacataggtatgcaaatgcgcattgctatgttctccctcatctacaaaaaaacactgaaactgtccagcagagttctggataaaatctctatcgggcagctggtgtcactgctgagcaacaacctcaacaaattcgatgagggactggcactggcacacttcgtgtggatcgctccactgcaggtcgctctcctgatggggctcatctgggaactgctccaagcttcagccttctgcgggcttggatttctgatcgtgctcgctctgttccaggccggactcggtagaatgatgatgaaataccgagatcagagggctggtaagattagcgagcgcctggtaattacaagcgagatgatcgagaacatccagtctgtgaaagcatactgttgggaagaagctatggagaagatgatagagaatctgcgccagaccgagctgaagctgacaaggaaagcagcctacgtgcgatatttcaacagttctgcattcttcttcagcggcttctttgttgtgttcttgagtgtgctgccctatgctttgattaaggggattatcctgcggaaaatttttacaacaatcagtttctgcattgtccttagaatggctgtgactaggcagtttccctgggccgtgcagacttggtatgactccctgggagccataaacaagatccaggatttcctgcagaagcaggagtacaagaccctggaatataatcttacaacgacagaagtggttatggagaacgttacagccttttgggaggagggcttcggtgaattgtttgagaaggccaagcagaataataacaatagaaaaacaagcaacggagatgacagtctttttttctctaacttctctctgctggggactcctgtgcttaaagatatcaatttcaagatcgaaagaggtcagctgcttgcggtcgctggctcaacaggggcaggcaagactagcctgctgatggtcataatgggagagctggagccatcagaagggaaaattaagcactcaggaagaatttctttctgttctcagttcagttggatcatgcctggcactattaaggaaaatataatcttcggggtgagctacgatgagtaccggtaccgatcagttatcaaagcttgtcagctcgaagaggatatttccaagttcgctgaaaaagataatatagtactgggggagggcggtatcacacttagcggcggccagagagcccggatatcactggccagggccgtatataaggacgctgatctctacctgctggattccccctttggatatcttgatgtactgacagaaaaggagattttcgagagttgcgtctgtaagctcatggccaacaagacccggattctcgtgacaagcaagatggagcatctgaaaaaggcagataaaatcctgattctgcacgaggggtcatcatatttttatggcaccttctccgaactccaaaatctccagcctgatttttcttccaaattgatgggatgtgacagcttcgaccagttcagcgcggagaggaggaacagcatcctgacggaaaccctccatcgattctccctcgagggcgatgcccctgtcagctggaccgagactaaaaagcagtccttcaaacagacaggtgaatttggagagaaacggaagaactccatcttgaaccccatcaactcaattcgaaaattttctatagtgcagaaaacacctcttcagatgaatgggatcgaagaggattctgatgagcctctcgagaggagacttagcctggtgcccgattctgagcagggggaggccatcctgcccagaatctctgtgatctctaccggccctaccctgcaagcccgacggcgccaatccgttctcaacctgatgacacacagcgtgaatcagggacagaacattcatcggaagactaccgcatctaccaggaaggtgagcctcgctccacaggccaatctgacagaattggacatctattcccgacggttgtctcaagaaaccggcttggagattagcgaagaaattaacgaggaagaccttaaagagtgttttttcgacgatatggagagcatccccgctgtaaccacctggaacacttatctgcgatatatcaccgtgcacaaaagcctgatttttgtacttatctggtgtcttgtcatattcctcgctgaggtggcggcgtccctcgtcgtgctgtggttgttgggtaacactcccctgcaggacaagggaaatagcacacactcacgcaacaatagttacgccgttataataacctccacatcaagctattacgtgttctatatctatgtgggagtggctgataccctcctcgctatggggttcttccggggcttgcccctggtgcatacgctgatcaccgtgagcaagatcttgcatcacaagatgctgcactccgtattgcaagctcccatgtctactctgaataccctgaaagcaggtggcatactgaataggttctccaaggatatcgccatactcgacgatctgcttcccctgaccatttttgacttcatccaactcctgcttatcgtaatcggcgctatcgccgttgtggccgtactgcagccatacatatttgtcgcaaccgtgcccgtgatcgttgcttttatcatgctccgcgcttactttctccagacatctcaacagctcaagcagctggagagcgagggacggtctcccatcttcacacatcttgtgacatctctgaagggtctttggaccctcagagccttcggtagacagccctacttcgaaactctgttccacaaggctctcaatctccatacagcaaactggtttctgtacctctctacgttgcgatggttccagatgaggatcgagatgatctttgttatcttttttatcgcagttacttttatttctattctgacaactggtgagggggaaggcagggttgggattattctgacgctcgcaatgaacatcatgtctacactgcagtgggcagtcaattcttcaatcgatgtagacagccttatgaggtccgtgagtcgggtgttcaaattcattgacatgcctactgagggaaagcccacaaaatctaccaagccttataagaatgggcagctgtccaaagtgatgataatagaaaactctcatgtgaaaaaagacgatatatggccctctggggggcaaatgacagtaaaagatcttactgccaaatacacagagggaggaaatgctatcctggagaatatctccttctctatttctcctggccagagagtgggcttgcttggacggactggaagcgggaaatccaccctgctgagcgcgtttctgagactgctgaacacagaaggagagatccagatcgatggcgtgtcttgggatagcataacactgcagcagtggcgaaaggcctttggtgtcatcccccagaaggtctttattttctcagggacattcaggaagaatctcgacccttatgagcagtggagtgaccaagaaatctggaaggtggctgacgaggtagggctgcgaagtgtgatagagcagtttcctggaaagctcgattttgtgctggtagacggcgggtgcgttctttcacacggacacaaacaactcatgtgcctggcacgcagtgtgctgagtaaggccaaaattctcctgctggatgagccttcagctcaccttgatcctgtcacttatcagattattcgccggacccttaaacaggcattcgccgactgtactgtgatcctgtgcgagcatcgaattgaggccatgctggaatgccagcaattcttggtcattgaagaaaacaaagtgcggcagtatgatagtatccagaagcttcttaacgagcggtcactgtttcgccaggccatcagtccctccgatcgcgtaaagctgtttccacacagaaattccagcaaatgcaaatcaaagccgcaaatcgcggctctgaaggaagagactgaagaggaggttcaggacactcgcctt

SEQ ID NO: 9667 - DNA, 4440 bp, Artificial Sequence
  derived and/or modified sequence
atgcagagatctcctctcgagaaggcttccgtggtcagtaagctctttttcagctggacaaggcctatcctcaggaagggataccgacaaaggttggagctctctgacatttatcagattcctagcgttgactccgccgacaatttgtccgagaaactcgaacgcgagtgggatcgggagctcgccagtaaaaaaaatccaaaactgatcaatgcgctgcggaggtgctttttctggagatttatgttctacggcatatttctttacctcggggaagtgactaaggccgtacagccactgcttttaggccgtattattgcttcctacgatcccgataataaagaagagaggtccatcgcaatttacttgggcatcggtctgtgtctgctcttcatcgttcggacgctccttcttcaccccgctatttttggcctgcaccacatcggcatgcagatgaggattgccatgttctcccttatttacaagaaaacattgaagctgagtagtcgcgtcctagacaaaattagtatcggccaactcgtcagtcttctctccaacaatctgaataagttcgacgaggggttggcacttgcccactttgtatggattgccccacttcaggtggcactgttgatgggcctgatctgggagctcctgcaggcaagcgcgttctgtggtctgggttttctcatcgtgctcgctttatttcaggcaggactaggccggatgatgatgaaatatcgggatcagagggccggcaaaatctccgagcggcttgtcattacatctgagatgattgaaaacatccaatccgtgaaggcttattgctgggaggaggccatggagaagatgattgagaacttgagacagacggagctcaagctgactcggaaggcagcatacgtccgttatttcaacagtagtgcttttttcttttcagggttcttcgtggtgttcctgagtgtgctgccgtacgccctgataaagggcattattctcagaaaaatctttaccacaattagcttttgtatcgtcctgaggatggctgtgacgcggcagttcccctgggcggttcagacttggtatgatagcctaggcgccattaataagatccaggattttctccaaaagcaagagtacaaaactctcgagtataaccttacaactaccgaggttgtcatggaaaacgtcacagcgttctgggaggagggctttggagaactctttgagaaggccaaacagaataacaacaacaggaaaacaagcaacggtgacgactctctgttcttctctaacttcagtttgctgggcactcccgtcctaaaggacataaatttcaagatcgagagggggcaacttctcgcagtggctggttcaacaggtgccgggaaaacctcgttgctcatggttatcatgggcgagttggaaccttccgagggcaagatcaagcacagcggccgcataagcttttgttcgcagttctcctggataatgccaggcactataaaggaaaatattattttcggagtctcttatgacgaatacaggtacaggtccgtcataaaggcatgtcagctggaggaagacattagcaaatttgcagagaaggataacatcgtgctgggtgagggggggatcacgctctcaggcggacagcgcgcgcgtattagcctcgcaagggctgtttataaagatgctgatctctacctgctggactctcctttcggatatctggacgtgctgaccgaaaaagaaattttcgagtcttgcgtgtgtaagttaatggctaacaaaacgcggattctagtcacttccaagatggagcatttaaaaaaggcggacaaaatcctgatcctgcacgaggggtctagctatttctacggcacattctcagagcttcaaaacctgcagcccgatttctcctctaagcttatgggttgtgacagctttgaccaattttccgctgagagacgtaactcgatcctcactgagaccctgcaccgtttcagcctggagggggacgcccccgtgtcttggacggagacgaaaaaacagagctttaaacagactggagagttcggcgagaagcgcaagaatagtatccttaatcccatcaactccattcggaaattcagcattgtccagaaaacccctcttcaaatgaacgggatcgaagaagattctgatgagccactggaaaggaggctctccctggtgccagacagtgagcagggagaagccattttgcctaggatcagtgtaatatccacgggccccacactgcaggctcgaaggcggcagtccgttctgaacctgatgacccacagcgttaaccagggtcaaaacatccaccggaaaacgacagctagtacgagaaaggtgtctctcgccccccaggctaatttgaccgaactggatatttattcaaggcgactctctcaggagacgggattagagatcagcgaggagattaacgaagaagatctgaaggagtgtttctttgacgatatggagtcaatacctgccgtgacaacctggaatacttatttgcggtacatcacggtgcataagtcacttatttttgttctgatctggtgtctggtgatttttttggctgaagttgcggccagcctagtcgtgctgtggctactcggcaacaccccactgcaagacaaaggcaacagcactcatagtcggaacaacagctacgccgtcattatcacaagcacttcatcctactacgtgttttatatctatgtgggagtggcggatactctcttagctatggggttcttccgcggcttgccgctggtacatactctcattaccgtgtctaagatcctgcaccataagatgctacacagtgtcctacaggccccaatgagcactctcaacaccctaaaggcaggcggaattctaaataggttcagcaaggatatagccattctggacgaccttcttcctctaacaatatttgactttatccagctccttctgatagtgattggagcgatcgcagtggtggctgtactccagccttacatctttgtggcaactgtccccgtgattgtagcattcataatgctccgggcctattttctccagacttctcagcagctaaagcagctagagagcgaaggtagatcccctatcttcacccatcttgtaactagtctgaaaggtctgtggaccctgcgtgccttcggacgccaaccctactttgagactctgtttcataaggcactgaacctccacactgccaattggttcctttacctttcaactctgagatggttccagatgcgaattgaaatgatcttcgtgattttcttcattgccgttacctttatatccatccttacgactggcgaaggggaggggagggtaggaatcattctgactctggcgatgaatatcatgtctacccttcagtgggcggttaatagttcaatcgacgttgattccttaatgcgatccgtgagccgcgtctttaaattcatagacatgcccacagagggcaagcccacaaagagcactaaaccgtacaaaaatggccaactcagtaaggtaatgataatcgagaacagtcacgtgaagaaagacgacatctggccgtccggtgggcagatgactgtgaaggacctgaccgccaaatacaccgaagggggtaatgcaatcctggagaatatcagcttcagtatatcacccggccaacgcgtaggactgctcggccgcactggaagcggaaagtcaacacttctatcagcattcctgcgcctgttgaacactgaaggcgagattcagattgacggcgtaagttgggattccattacattgcaacagtggcgcaaagcattcggagtgatcccacagaaggtctttattttcagcggcacttttcggaaaaatctggatccgtacgagcagtggagtgatcaggaaatatggaaagtcgctgacgaggtggggctgaggtctgttatcgagcagtttcccggaaagctggacttcgtgctagtagatggaggttgcgtgctatctcacggacacaagcagctgatgtgtctggccaggtcagtgctatccaaagctaaaatcctgctgctggacgagccgagtgctcacctcgacccagtgacttaccagattatccggaggacattaaagcaggccttcgctgactgcaccgtcattctgtgtgaacatagaattgaagcgatgctggagtgccagcagtttctggttatcgaagaaaataaggtccgccaatacgatagcatccagaagttactcaacgaacgcagtctctttagacaggctatttcgccaagcgatagggtgaaactgtttccgcacagaaattcctccaaatgtaagtccaagccccagattgcagcactcaaggaagaaaccgaagaagaggtgcaggacacccggctt

SEQ ID NO: 9668 - DNA, 4440 bp, Artificial Sequence
  derived and/or modified sequence
atgcagcggtcgcctctcgaaaaggcatcggtggtcagcaagctgttcttttcctggactcgcccaattctcagaaagggatacagacagagactcgagctgagcgacatctaccagatcccgtccgtggattcggccgacaacctctcggaaaaactcgagcgggaatgggatcgggagctcgccagcaagaaaaacccgaaacttatcaacgcgctccgccggtgctttttctggcgcttcatgttctacggcatcttcctgtacctgggagaagtcaccaaggccgtgcaacctctgctcctcggacgcatcattgcgtcatacgacccagataacaaggaagagagatccattgctatctacctcggaatcggcctctgcctcctgtttatagtgagaactctcctcttgcacccggcgatctttggactgcaccacatcggaatgcaaatgcggatcgccatgttttcgctgatctacaagaaaaccctgaagttgagctcaagagtgctggataagatcagcattggacaattggtgtcgctcctgtccaataatctgaataagttcgacgaagggttggctctggcccacttcgtgtggatcgcgccactgcaggtggctctgctgatgggactcatctgggaactcctgcaagcgtcggctttctgcggactgggattcctgattgtgctggccctctttcaagcaggactgggaagaatgatgatgaaatacagggaccaacgtgcggggaagatttccgagagactcgtcatcacgagtgagatgattgagaatatccaatcggttaaagcgtactgttgggaagaagcgatggagaaaatgatcgaaaacctgcgccaaacggaactgaaactcactcgcaaggctgcgtacgtgcgctactttaacagctccgcatttttcttctccggctttttcgtcgtgtttctgtcagtgctcccttacgccctcattaaggggatcattctgaggaagatctttactaccatctccttctgcatcgtgttgcggatggcagtcaccagacagttcccatgggcagtgcagacctggtatgactcgcttggagcaatcaacaaaattcaagacttcctccagaagcaggaatacaagaccctggaatacaaccttacgacgaccgaagtcgtcatggaaaatgtgacggccttctgggaagagggcttcggcgaactgttcgagaaggcaaaacagaacaataacaacagaaagacctcgaacggtgatgactccctgttcttctccaacttcagccttctcggtacgccggtgttgaaggatatcaacttcaagatcgaacgcggccagctgttggctgtggccgggtcgaccggagctggaaaaacttcccttctgatggtcatcatgggggagctggagccgtcggaagggaagatcaagcactccggacgaatcagcttctgtagccaattcagttggatcatgcctggaaccatcaaggagaatatcatttttggagtgtcatatgatgagtatcgctaccgctccgtcattaaagcctgtcaactggaggaggatatcagcaaattcgccgaaaaggataacatagtccttggagaaggcggaatcaccctctcaggaggacaaagggctcggattagcctggcacgcgctgtgtataaggatgcggacctctacctgctcgactccccgttcggttacctggacgtgctcactgaaaaggagatcttcgagtcgtgcgtgtgtaagctcatggcaaacaagacccgcattctggtgacctcgaagatggaacacctgaagaaggcagataagatcctcatcctgcatgaaggtagctcttacttttacggaaccttctccgagctgcagaatctgcagccggacttcagctcgaaactgatgggatgcgactcattcgaccagttttccgcagagcggcggaattcaatcctgactgaaacgctccacagattctcactggaaggcgacgcgcccgtgtcatggaccgaaaccaaaaaacagagttttaagcagaccggagagttcggcgaaaaacgtaagaactccatcctcaacccgatcaactcaatccgcaagttctcgatcgtgcaaaagacgccgctgcaaatgaatggaattgaggaggattcggatgagccgctggagcgaaggctttccctcgtccccgatagcgaacaaggtgaagctattctgccgcgcatctccgtgatctcaaccgggcccaccctccaggcccggaggcgccaatcagtcctcaaccttatgacccacagcgtcaaccagggccagaacattcacaggaaaaccactgcttcaactcgcaaagtgtccctggcgccccaagcaaatttgactgagctcgacatatactcgcggcggctgtcacaggaaactggacttgagatctcggaagagattaatgaggaggacctcaaggagtgttttttcgacgatatggaatccataccggccgtgaccacctggaatacctaccttcgctacatcaccgtgcacaagtccctcatcttcgtgttgatctggtgcttggtgatctttctcgcagaagtggcggcctccctcgtggtcctgtggctgctgggcaacacgcccctgcaggataaaggaaactccacccactctcgaaacaacagctacgccgtcatcatcacctctaccagctcgtattatgtgttctatatctacgtgggagtcgcagacactctcctcgcaatgggattcttccgcgggctgccgttggtccatacgctgatcactgtgtcgaagatactccaccacaaaatgctgcactccgttctgcaagccccaatgtctactctgaacaccctgaaagccgggggaatccttaatagattttctaaggacatcgcaattctggacgatctgctgccacttactatctttgacttcatccaacttctgctgatcgtgatcggagcaatcgcggtcgtggccgtgctccaaccctacattttcgtcgccactgttcctgtgatcgtggcgttcatcatgctgcgggcctactttctgcagacctcacagcaactcaagcaactggagtcggagggcaggtcaccgatcttcactcacctcgtgacttcgctcaagggcctgtggaccctgagagcattcggacgccagccttacttcgagactctgttccacaaggcgctgaatctgcacacggcaaattggttcctctacttgagcacgctgcgctggttccagatgcggatcgaaatgatcttcgtgattttcttcattgcggtgactttcatctcgatcctgaccaccggcgaaggtgaaggcagagtgggaatcatcctgaccttggccatgaatatcatgtcgaccttgcaatgggccgtgaattcgtccatcgatgtcgactcactcatgcgctcggtgtcccgcgtctttaagttcattgacatgcccaccgaaggaaagccgactaagtcgactaaaccatacaaaaacggtcaactgtccaaggtgatgatcatcgaaaactcgcatgtgaagaaggacgacatctggccaagcggcggtcaaatgactgtgaaagatctgactgcgaagtacaccgagggaggtaacgctatcctggagaacattagcttctccatttcccctggtcaaagggtgggactgctgggtcgcaccggatcaggaaagtccaccctgctgtccgctttcttgagattgctgaacaccgaaggcgagattcaaatcgacggagtgagttgggatagcatcacccttcaacagtggcggaaggcatttggcgtgatcccgcagaaagtgttcatcttctccgggactttccgtaaaaacctggacccgtacgaacagtggtcagaccaagagatttggaaggtggcggacgaggtcggcttgcggagcgtgattgagcagttcccgggaaagctggacttcgtcctcgtggacggtggctgcgtcctgtcacatggccataagcagttgatgtgtctcgcgcggagcgtgctgagcaaggctaagatccttctgctggacgaaccgtccgcacatcttgacccagtgacctaccaaatcatccgccggacgctgaaacaagcattcgccgactgcactgtgatcctctgcgaacacaggatcgaagcgatgctcgaatgtcagcaatttctggtgatcgaggaaaacaaggttcgccaatatgatagcatccagaagttgctgaacgaacggtcgctctttcgccaagcaatctcgccatcggatcgcgtgaaactgtttccacacagaaactcgtcaaagtgcaaatccaagccacagattgccgcgctgaaggaggaaactgaggaggaagtccaggacactcgtctg

SEQ ID NO: 9669 - DNA, 4440 bp, Artificial Sequence
  derived and/or modified sequence
atgcagcggagtcccctggagaaagccagtgtagtctccaaactgttcttttcctggactcggccaatcctccgcaagggctatcgccaaagactcgaacttagcgacatctaccagattcccagcgtggatagcgccgataacctctccgagaagctggagagggagtgggatcgagaactggccagcaaaaagaatcctaagctcatcaacgcactgagaagatgctttttctggcgattcatgttctacggtatcttcctgtacctcggtgaagtcacaaaggccgtgcagccactcctgctggggcggatcatcgctagctacgatcccgacaacaaggaggagaggagtatagccatttatctgggaatcggcctgtgtctgctgttcatcgtgcgcacactgctgctgcacccggctattttcggcctgcaccatataggaatgcagatgagaattgccatgttttctctgatctataagaaaacgctgaaacttagcagcagagttcttgacaaaattagcattggccagcttgtctccctcttgagcaacaatcttaacaaattcgacgaagggctggctcttgcccacttcgtatggattgcgccgctccaggtagcactgcttatgggcttgatctgggagctgctccaggcgtccgcgttctgtggacttgggttcttgattgttctggcccttttccaggcagggcttggcagaatgatgatgaagtatcgagatcaaagggccgggaagatttccgaaaggcttgttataacctccgagatgatcgagaacatccagtccgtgaaggcatactgttgggaagaagccatggagaagatgatcgaaaatttgaggcagaccgagctgaaattgacaagaaaggcagcctacgtgagatatttcaacagttccgccttcttcttttcaggcttttttgtggtgtttctcagcgtgcttccctacgctctgatcaaaggcatcattctgcgaaagatctttacgaccatcagcttctgcatcgtgttgcgaatggccgtgacccggcaatttccttgggcagtccagacgtggtatgattcacttggtgcaatcaacaagatccaggatttcttgcagaagcaggagtacaagaccctggaatacaacctcaccaccaccgaagttgtgatggaaaacgtaaccgccttctgggaggagggtttcggagagctgttcgagaaggccaagcaaaataataacaacaggaaaacctcaaacggagacgattcactgtttttttctaacttctccctgctcgggactcctgttctgaaagatatcaactttaaaatagaacggggacagctgctggccgttgccggttccactggggctggcaagacctctctgctgatggtcattatgggcgagctggagccaagcgagggcaagatcaagcactccggacgaatctccttctgctcacagttctcatggataatgcctggcaccattaaagagaacatcatcttcggagtatcatacgacgaataccggtaccgcagcgtgattaaggcctgccagctggaggaggacatctccaaattcgccgagaaggacaatattgtgctgggagagggggggataaccttgtctggtggtcagagggcgcggatctctctggccagagcagtgtataaagacgctgatctctatctgttggactctccatttggttacttggatgtattgacagaaaaggagattttcgagtcttgtgtgtgtaaacttatggctaataagacacggatcctggtgacatcaaaaatggagcatttgaagaaggcggataaaatcctgatcctgcacgaaggaagctcttatttctatgggacattttctgagctgcaaaatcttcagcctgacttttcctctaagctcatgggatgtgatagtttcgaccagttcagcgctgaacgccgcaactctatccttaccgaaacacttcaccggtttagcctggagggcgacgcgcctgtctcatggactgagaccaagaagcagagcttcaagcagactggcgagtttggagaaaagaggaagaacagtattttgaatccaatcaactccataagaaagttcagcatagtccagaaaactcctctccagatgaacggtatagaggaggattccgacgagccactggaaagacgattgagcctcgtgccggatagcgagcaaggagaagctattcttcccaggatcagtgtcatctccactggtcctaccctgcaggcccgccggaggcagtctgtgctcaacttgatgactcattccgtgaatcaggggcagaatattcaccgaaagactacggcctccacacggaaggtcagtctcgctccccaggctaacctcacagagcttgacatatactctagacggctcagtcaggaaacggggctggaaatctcagaggagattaacgaagaagacctgaaggaatgcttcttcgacgacatggagtctatccccgcggtgacaacttggaacacctatcttcgctacattactgtccataaaagtctgatttttgtactgatctggtgcttggtcatctttctcgcggaggtcgcagccagcttggtggtcctgtggctgctcggaaatacaccactgcaggataaaggcaatagcacacattctcggaacaacagttacgcagttataattacatccacctccagttactacgtcttctacatctacgttggcgtggccgatacgcttctggcaatgggattttttagaggcctgcccctggttcacacgttgatcacagtctctaaaattctgcaccacaaaatgcttcattccgtgttgcaagcaccgatgagcaccctcaatacgttgaaagccggcgggatcttgaacagattcagcaaggacatagcaattttggatgacctcctgccactgactatctttgactttatccagctgctgctcatcgtgatcggggcgatcgcagtggtggccgtcctccagccatacatctttgtggcgacagtgcctgtgatcgtagcttttatcatgctgcgagcttatttccttcaaaccagccaacagctcaaacagctcgaaagcgaggggcgctcacctatcttcacgcacctggtgacatccctgaaagggctttggaccctcagggcatttggcagacagccatactttgaaacgctgtttcacaaagcgctgaacctgcatacagctaactggttcctctatcttagtacccttcgatggttccagatgcggatagaaatgatctttgttattttctttattgccgtgacatttatcagcatactgaccacaggggaaggggagggcagggtcggaatcattttgacactggccatgaatattatgtcaaccctgcagtgggctgtcaattcctctatcgacgtggactctttgatgcgatctgttagtagggtattcaagttcattgacatgcctacagagggcaaaccaactaaatccacaaagccctataagaacgggcagctgtctaaggtgatgattatcgaaaattcacacgtgaagaaggatgacatctggccaagcggaggccagatgactgtgaaggacctcactgccaagtacacagaggggggcaacgcaatcctggaaaatatctccttctccatcagcccagggcagagggtgggcttgctgggcagaaccggctcaggaaagtccaccctcctgagcgctttcctgaggttgttgaatacggagggggagatacagatcgatggcgtctcttgggactcaattactctccagcagtggagaaaggccttcggtgtgattcctcagaaggtattcatcttctcagggacctttcgcaaaaacctggatccatatgagcagtggtcagaccaggagatctggaaggtggccgacgaggtgggtctcagaagtgttatcgaacagttcccaggcaagttggatttcgtgttggttgacggcgggtgcgtgctcagtcatggacacaagcaactgatgtgcctggctagatcagtactgtctaaagccaagatccttcttctcgacgaaccctctgcgcacctcgatcctgttacataccagataattcgcaggactctgaaacaggcattcgccgactgcacagtgatcctctgtgagcatcgcatcgaagctatgctggaatgtcaacagttcctggtgattgaagagaataaggttaggcagtatgattcaatccaaaaactgctgaatgaacggagcctgtttaggcaggctatctcccccagtgaccgggtgaaacttttcccccatcggaattcaagtaagtgtaaatctaagccccagatcgctgccctgaaagaagagactgaggaagaggtccaggatacccggttg

SEQ ID NO: 9670 - DNA, 4440 bp, Artificial Sequence
  derived and/or modified sequence
atgcagagatccccgttggaaaaggcgtctgtcgtctctaagctgttcttcagttggactaggcccatattgagaaaaggttataggcaaaggctcgagttaagcgacatatatcagatcccctctgtcgatagtgccgacaatctgtctgagaagctagagcgcgaatgggacagggaactggcaagcaagaagaatccaaagctgatcaacgctctgcgaaggtgtttcttctggcgctttatgttttacggtatatttctgtaccttggcgaagtcaccaaggccgtgcaacccctgctcttagggcggataatagcttcttatgaccccgataacaaggaggagcgcagtatcgccatctacctgggtatcgggctatgcttactgttcatcgttcggactctgctgcttcatcccgccatattcggactccaccatatcggtatgcagatgaggatagccatgttcagcttgatatataagaaaacactgaagctgagctcacgagtcctcgataagatctctataggccagctagtaagtttgctgagtaataatctaaataaattcgacgagggattggcattagcacactttgtgtggattgcccctcttcaggtcgcactgttgatgggtttgatttgggagttgttgcaggctagcgccttctgcggcttaggcttcctcatcgttctcgccctatttcaggccggactcggacggatgatgatgaaatatcgtgaccagcgcgctggcaagatctccgaacgcttggttataacgtcggagatgatcgagaacatccaatcagtaaaggcttactgctgggaagaagccatggaaaagatgattgagaatctccgccagaccgagctgaagctgacaagaaaagctgcctatgttaggtacttcaatagttctgcatttttcttttccggattttttgtggtattcttgagcgtgctgccgtacgctctgatcaaaggaataatcctgcggaagatttttaccactattagcttttgtatagtgttgaggatggccgtgacccgacaatttccatgggcggtgcaaacctggtacgactcattaggcgccatcaacaaaatccaggactttctgcagaagcaggaatataagaccctggaatacaatctaactaccaccgaggtcgtgatggagaatgttaccgcattctgggaggagggtttcggcgagctgttcgagaaagcaaagcagaataataacaacagaaagacttccaacggtgacgattcacttttcttttctaacttttcactcctgggcacaccagttctgaaggatataaattttaagatagagagaggtcagttgttggccgtggccggcagcacaggggccggtaagaccagcctacttatggtgattatgggtgagttggagccttccgaggggaagatcaaacacagcggtcgcattagcttctgctcacaattttcatggatcatgcctggcacaatcaaagagaatatcatcttcggcgtgagctacgacgaataccggtatcgcagcgtgatcaaagcatgtcaactggaggaggacatttctaagttcgctgaaaaagataacatcgtgctgggagagggcggaattacattaagtggaggccagcgcgctaggatctcattggcgagggctgtttataaggatgcagacttgtacctgttagactcccccttcggctacctggacgttctgacagaaaaggagatattcgagtcctgtgtctgcaagttgatggcaaataagaccaggatcctagtgacctcgaagatggagcaccttaagaaagccgacaaaatcctcattctccacgaggggtcctcatatttctatggcactttctcagagctgcagaatctccaacctgacttctctagcaagcttatgggttgtgattctttcgaccagttctccgcagagcggagaaactcgatccttaccgagactcttcaccggttcagcttagagggagatgctcctgttagttggacagaaactaaaaagcaatccttcaaacagaccggcgagttcggggagaagagaaagaactcaatactgaaccctatcaattctatccgcaaatttagcattgttcagaagactccactccaaatgaacggtattgaagaagattcggatgaaccattggaaagacgcttaagtctggttccagatagtgagcagggtgaggcgattttgcccagaatcagtgttatctccacaggccccacattacaggctcgcaggcggcaatcagttttgaatctcatgacccatagcgtgaaccagggacagaatattcaccggaagacaacggcttctacaagaaaggttagtctcgcgccccaggccaacctgacggagcttgatatttatagtcgtagactcagtcaggagacaggcttagaaatctctgaagaaatcaacgaagaagatctgaaagaatgcttttttgatgacatggaaagtatccccgctgtgacaacgtggaacacctacctgcgttatattactgtacataaatcattgatctttgtgctgatctggtgcctcgtaatattcttagcggaggtggccgcttcattggttgtcctgtggctgctgggaaacacccctctacaagacaaggggaattcaacacacagcaggaacaattcttacgcagtcattatcacttcaacgtcttcctactacgtcttttacatatatgttggggttgcagatacccttctggccatgggctttttcagagggttaccactggtccatacattgattacagtgtcaaaaatccttcatcacaaaatgctccactccgtgttacaagcccctatgtcgacactcaacactctcaaagcgggcgggatactgaatagattctcaaaagatattgcaatccttgacgatctgcttcccctcacaatctttgactttatccagcttctgttgatcgtgattggggctatagccgtggtcgcagtcctccagccatacattttcgttgctaccgtgcctgtcatcgtcgctttcattatgctgagagcgtacttcttgcaaacgagtcagcagctaaagcagctggaatcagagggccgttctcctatttttactcatttggtcacctcacttaagggactttggactctgagggcgttcggacgtcagccatattttgagactctattccataaagccctgaacctacatacagcaaattggttcctttacctgtcgacactgcgttggttccaaatgaggatcgagatgatattcgtgatatttttcatagctgttacatttattagtatactgaccactggcgagggcgaggggcgcgtggggataattcttaccctggccatgaacattatgagtaccttacagtgggccgttaactctagcattgatgtcgatagcctgatgcgatcagtaagccgggtttttaagttcattgatatgccaactgagggaaagcccactaagtccactaaaccctacaaaaacggacagcttagtaaggtcatgattatagaaaattctcacgtgaagaaggacgatatatggccgtctggagggcagatgaccgtcaaggaccttactgcaaaatacaccgagggcgggaacgctatccttgagaatatttcattttctatttctccagggcagagggtggggctgctggggagaacaggctctggcaaatcgacactgctctccgccttcctcaggttactaaacactgagggagagatccagatcgacggagtgtcctgggacagcatcacactgcagcaatggcgcaaggcttttggggtgataccccagaaagtctttatcttttctgggactttcagaaagaatctagatccttatgaacagtggtctgaccaggagatatggaaggtggcagacgaggttggcttgcggtccgtcatagagcaatttccaggtaagctcgatttcgttctggtggacggcggttgcgtgttaagccacggccataagcagctgatgtgcctggctagatcagtgctctctaaggcaaagatactgctgctggatgagccatccgcacacctggacccagtgacttaccagataatccgaagaaccctcaagcaagcctttgctgactgtaccgtgattctgtgcgaacaccgtatcgaggcgatgctggaatgccaacagttcctggtcattgaagaaaacaaggtgaggcagtacgattctatccaaaaactactgaatgagcgaagtcttttccgccaggcgatcagtcctagcgatcgggtgaaactgtttccgcaccgaaattcgagtaagtgtaagtctaagccgcagattgctgccctgaaggaggaaactgaggaagaggtgcaggacacccgcctg

SEQ ID NO: 9671 - DNA, 4440 bp, Artificial Sequence
  derived and/or modified sequence
atgcagagatccccactggaaaaggcaagtgtggtgtctaagctgttcttttcttggacgagaccaatcctccgaaaagggtaccgccagaggttggagctttcagacatatatcagatacctagcgtagatagcgccgacaatctcagcgaaaaattggagcgcgagtgggacagagaactggcctctaagaagaatccaaaattgattaatgctctgagaaggtgttttttttggcgctttatgttctacgggatctttctgtacctcggcgaggtgactaaagcagtacagcctctccttcttggtcgcattatagcatcttatgatcccgataacaaggaggagcggagtattgccatctatctcgggattggactgtgtctgctgttcattgtgagaacactgctgcttcatcctgctatcttcgggctgcaccatattgggatgcaaatgagaatcgcgatgttctccctgatttacaagaagacactcaagctgtcttctcgcgtgctggataaaatctctattggccagctcgtgagcctcctcagcaacaacctcaacaaattcgatgagggcctggcactcgcacattttgtgtggattgcacctctgcaggtggctttgctcatgggcctgatttgggagctgttgcaagcgtccgccttctgcgggttgggttttctgattgtcctcgcactcttccaagccggtctcggtcgcatgatgatgaagtatagggatcagcgcgccggaaaaatctcagagagactggtcatcactagtgagatgattgaaaacatccagtcagtgaaggcctactgctgggaggaagccatggagaagatgatcgagaacctcaggcagacagaactgaaactgactcggaaggccgcttacgtgaggtacttcaacagttccgctttctttttttccggcttcttcgtcgtgttcttgtccgtgctcccatacgcacttatcaagggcatcattctccggaagatcttcaccaccatctccttttgtattgtactccgcatggctgttacaaggcagtttccttgggctgtgcagacttggtatgatagtctgggcgcaataaataaaattcaggacttccttcaaaagcaggaatataagaccttggaatacaacctgaccactactgaggtggtgatggaaaatgtgactgccttttgggaagagggattcggagagctgttcgagaaagctaaacagaataataataaccgaaaaacctctaacggggacgattctttgttttttagtaatttcagcctgttgggcaccccagtgctgaaggatattaacttcaaaattgaaagagggcaactgctggcggtggctggatctaccggcgcgggaaaaactagcctgctgatggtgatcatgggcgagcttgaacctagtgaaggtaagataaagcacagtggcagaatctcattctgttctcagttcagctggattatgccagggactatcaaggagaacataattttcggcgtgtcttatgatgaataccgatatcggagcgtgataaaggcctgtcagcttgaggaggatatcagcaaatttgcagaaaaggacaacattgtcttgggcgaggggggcattacactcagcgggggacagcgagcccggatttccctggcgagggctgtctacaaagacgcagatctgtacctcttggacagcccattcggatacctggatgtcctcactgaaaaggagatatttgagtcctgtgtgtgcaaactgatggcgaacaaaacccggattcttgtcaccagtaagatggagcacttgaagaaagcggataagatcctcatcctccatgaagggtctagctacttttatggcacgttttctgagctgcagaatctccagcctgatttttcaagcaaactcatggggtgcgactcttttgaccagttttctgctgagagacgcaattcaatattgactgagacactgcaccgcttctccctggaaggtgacgcccccgtctcatggaccgaaaccaaaaagcaatctttcaagcagactggcgaattcggcgagaagcgcaagaatagcatcttgaaccctattaacagcattcgcaagttcagcatagtgcaaaagacacctctgcagatgaatggtatagaagaggactccgatgagcccctggagagaagacttagccttgtgcccgattccgagcagggggaagcgattctgcctcggatttccgtgatctctacgggcccaacactccaggccagaaggagacaatctgtgctgaacctgatgacacattccgtgaaccaggggcagaatatccaccgcaagaccaccgcctccacccgcaaagtttctctggcaccccaggcgaatctgaccgagctggatatctactctcgcagactctcacaggagaccggcctggagatttctgaagaaatcaatgaggaagatctgaaagaatgtttcttcgacgatatggaaagcatacccgccgtcacgacctggaacacatatctccgatacatcacggtgcacaagtctctcatcttcgtactgatatggtgcctggtcatttttctggcagaagttgcagccagccttgtcgtcctttggcttctgggaaacaccccactccaggataagggaaattccacacattccagaaacaactcttacgctgtgatcatcacctccacctcttcttactacgtgttttatatatacgttggggtggccgataccctgctggccatgggattcttcaggggtctgcccctcgtccatacgcttatcactgtgagtaagatcctgcaccataaaatgctgcacagcgtgcttcaagcacccatgagcactctcaatacactgaaagcgggcggcatcctgaaccgattctccaaagatattgcaatactggacgacctgcttccccttacaattttcgattttattcagctcctgcttatcgtgatcggagccatagctgtggtggccgttctgcagccgtatatctttgtggctacggtccccgttattgtcgctttcattatgttgcgggcgtatttccttcaaacatctcaacagctcaaacagttggagtcagagggtagatcaccaattttcacccatctggttacctcactcaaggggctgtggacacttcgcgcctttggtagacagccatactttgaaacgcttttccataaagctctgaatttgcacacggcaaattggtttctgtacctgtcaaccctgaggtggtttcagatgcggatcgagatgatctttgtaatcttctttattgccgtaacctttattagcatcctgacaactggcgagggcgagggcagggtcggaataatcctgactctcgccatgaatatcatgtcaacactgcagtgggctgtcaatagcagcattgacgtggatagcctgatgcggagcgtgagcagggtcttcaagtttattgatatgccgacggagggtaagccgactaaatccaccaaaccatataagaatggccagctgtctaaggttatgattattgagaacagtcatgtcaagaaggacgacatttggcctagcgggggacagatgaccgttaaggacctgacagctaagtacaccgaaggagggaacgcaatcctcgagaacattagtttcagcattagtccaggccagcgggtgggcctgctgggcaggaccgggagtggaaaatcaactctcctctcagcattcctgcgcctgctcaacaccgaaggagagatccagatcgatggagtttcttgggattctatcacacttcagcagtggcgcaaggccttcggagtcattccccagaaagtgtttatcttctccggtacattccgaaagaacctggatccctacgaacagtggtctgaccaggaaatctggaaagtggcagacgaggtgggcctccgaagtgtcatagagcagtttccaggtaagctcgattttgtacttgtagatggtgggtgtgtgctgtctcacggtcataagcagcttatgtgcttggctcgctcagtgttgtcaaaagccaaaatcctgctgctggatgaaccctctgcgcatttggatcctgtgacctaccagatcatcaggcggacattgaaacaggcgttcgccgattgtaccgtgatactttgcgagcatcggatcgaggctatgctggagtgccagcaattcctggtgatcgaagaaaataaagtgcggcagtatgactctatccagaagctgctgaatgaaagaagtcttttcaggcaagccatcagtccaagcgaccgggtgaaactctttcctcatcggaacagcagtaagtgtaaatcaaaacctcagattgctgctttgaaagaggagacagaagaagaggtgcaggatacacgcctc

SEQ ID NO: 9672 - DNA, 4440 bp, Artificial Sequence
  derived and/or modified sequence
atgcaaaggtcccccctggagaaggcaagcgtggtcagtaagctatttttctcttggactagacccatccttaggaagggatatcgccaacggttggagttgagcgacatataccagataccgagcgtggattccgctgataatctgtccgagaagctagaacgggagtgggacagggagcttgcttcaaagaagaaccctaagctgatcaacgctctacggcgttgcttcttctggagatttatgttctatggaatatttctctatctgggcgaagtgaccaaagccgtccagcctctacttctcggccggataatagcatcctatgacccggacaataaggaagagagaagcattgcaatttatttaggtatcggactgtgtctcctgttcatcgtgcggaccttactcctgcatcctgcaatctttggcctgcatcacattgggatgcagatgaggatagccatgttctctctgatctataagaagacactcaagctcagctccagagtgctcgacaagatctcaataggtcagctggtgtccctcctgtcgaacaacctgaacaaattcgatgaggggctggctctcgctcattttgtatggatagctccactgcaagtggctctactcatgggattgatctgggaactgctacaggcaagcgccttttgtgggcttgggttcttaatagtcttggccctgttccaggcaggcttgggacgaatgatgatgaaataccgggaccaaagggcgggaaagatctcagagcggctggtcatcacaagcgagatgatcgagaatattcagtctgtgaaggcatactgttgggaagaggctatggaaaaaatgattgaaaatctcaggcagacagagctgaagctcaccagaaaagcagcatacgtgagatacttcaatagcagcgctttcttctttagtggatttttcgttgtgtttttgtcagtgctaccatatgctctcataaaaggaatcatcctgcgaaagattttcacgacgatatctttttgcattgtgctccgcatggcagtgacccgtcagtttccctgggccgtccagacctggtacgacagcctcggggctattaacaaaatacaagattttctgcaaaaacaagagtacaaaacactggagtacaatttaacaaccactgaggtggtgatggaaaacgtgacagccttttgggaggagggctttggtgaattgttcgagaaggcaaagcagaacaataataatagaaagacatcaaacggagatgattctctgtttttctctaacttcagtctactcggcacaccagtcctgaaagatatcaactttaagattgagcgcgggcagctgctagccgtcgctggtagtacaggcgcagggaaaaccagtctgctgatggtgattatgggagagctagaacctagcgagggcaaaatcaagcatagcgggcggatctcattctgctcccagttctcttggattatgccaggtaccattaaagagaatatcatattcggggttagttacgacgaatacagataccgttcggtcattaaggcctgccaattggaggaagacatttccaagttcgcagagaaagacaacatagtcttaggagaaggggggattacactgtccggaggacaacgtgctcgtatatctctggctagagccgtctacaaagacgccgatctgtatcttcttgacagtccctttggctacctcgatgttttgaccgagaaggagattttcgagtcttgtgtgtgtaaattgatggcgaacaagaccaggattctcgttacttctaagatggaacacctgaagaaagccgataagattctgattttgcacgaaggctcatcttacttctacggaacctttagcgaactgcagaacctccagccggacttcagtagcaagctaatggggtgtgacagcttcgatcagttctcagctgagcgccgcaacagcatactgactgagacattacatagatttagcctggaaggcgatgctcccgtctcctggaccgagactaaaaagcagtcctttaaacagacaggtgagttcggcgagaagcggaagaactccatcctaaaccctattaacagtatacgcaaatttagcatcgtgcaaaagactccacttcaaatgaatggcattgaggaagattccgacgagcccctggaacgtagactgagtctggtgccagatagcgagcagggcgaggcaattctcccaagaatatctgtcataagcaccggacctacattgcaagccagacgtcgccagagcgtgctcaacctgatgacccactccgtcaatcagggccagaacatccaccggaagaccacagcatccacccgaaaagtttccctggcaccccaggccaatctcaccgagctcgacatatacagcagacggctctcccaggagaccggacttgagatatcagaagagataaacgaagaagacctcaaagagtgtttcttcgacgatatggaaagcatacccgcagttaccacgtggaacacgtacctacggtacatcacggtacacaagagccttatctttgtactgatctggtgtctggtgattttcctggctgaggtcgctgcttccctcgtggtcctgtggctacttggcaatactcctctacaagataaaggtaattccacccactctcgaaataactcctatgcagttatcataacctcaaccagcagttactatgtgttttacatatatgtgggtgttgccgatacgctgctggctatgggcttttttagaggactccctctggtgcatacactcatcacagtttccaagatactgcatcacaaaatgttgcattccgtcctgcaggcccctatgtccaccctgaatacacttaaggccgggggtatccttaatagattctcgaaagacatcgccatattggacgatctgttacctctgacgattttcgacttcatccagctgctgctaatcgtgattggtgcaatcgctgtggtggccgtcctccagccatacatctttgtggccactgtgccggtcatcgtagcgtttattatgctcagggcctatttcttgcaaacctcccagcagctgaagcagttggaatcagaagggaggtcccccatattcacgcatctggtaacaagtctcaaagggctttggacccttcgagcattcggccgacagccctacttcgagacgttattccacaaggcactgaacctgcatacagccaattggtttctgtatctgagtaccttgagatggtttcagatgcgaatcgagatgatattcgtcatcttctttatagccgtcaccttcatctccatactcaccaccggagagggtgaaggccgcgtaggaatcattctgacgctggccatgaacattatgagcactctgcagtgggctgtaaacagttcaatcgacgtggattccctgatgcggtctgtgtcgcgggtgtttaaattcattgacatgcccactgaggggaagcctacaaaaagcacaaagccctacaagaacggacagctgtccaaagtcatgataatcgagaatagtcacgtgaagaaggacgatatttggccatcaggaggacaaatgacagtgaaagatctcactgcgaagtatactgaaggaggtaatgcgatcttagagaacatatcattctcaatttcaccagggcaacgcgtgggactgctggggcggactggctctgggaaatcaacgcttctatccgcttttctgaggcttctgaacactgagggggaaatacaaatagatggagtgtcttgggactctattacactccagcagtggcgtaaggcatttggagttattcctcaaaaagtcttcatcttttccgggacattcagaaagaaccttgatccatacgaacagtggagcgaccaggaaatttggaaagtcgctgacgaagtcggactgcgctccgtgatcgaacaatttcccggcaagttagattttgtcctggtcgacggcggttgcgttctgtcccacgggcacaagcagctgatgtgcctggctcgctctgtgctatccaaagctaagatcttgttgcttgatgagccctccgcccaccttgatccagtgacttaccagattatcagacgcacgctgaaacaggcgttcgctgattgcacagtaattttgtgcgagcatcggatagaggccatgctggagtgccagcagttcttagtgatcgaggaaaataaggtgaggcagtatgactctatacagaagttactgaacgagcgctctctatttcgacaggctatcagtccttccgaccgcgttaagctttttccccatcgcaactcttctaaatgcaaatccaagccacaaattgcggccctcaaggaggagacagaggaggaggtgcaagacacacggctc

SEQ ID NO: 9673 - DNA, 4440 bp, Artificial Sequence
  derived and/or modified sequence
atgcagagatcaccactggaaaaagcatccgtggtatcaaaactcttcttcagttggacgaggcccatccttagaaaaggttacagacagcggttggagctctccgacatatatcagattcccagcgtagattccgcggacaacctctccgaaaagttggagagagaatgggaccgcgagctcgcatctaagaagaatccaaagctgattaacgccttgaggcgctgcttcttctggcgatttatgttttatggcattttcctgtacctgggagaggtgaccaaggccgtgcagccattactacttggtcggattattgcaagctatgacccggacaataaggaagagcgatcgatcgccatttacctgggcatcggactatgcctgctttttatcgtgcgaactctacttctgcacccagccattttcggactacatcatatcggaatgcagatgaggatagctatgttctcgttaatctacaaaaagacactcaagctcagctcccgggtcctggataagattagcataggccaattggtaagtctgttaagtaataacctcaacaaatttgatgagggtcttgctctcgcccacttcgtttggatcgctcctctccaggtggctctgttaatggggctgatctgggagcttttacaggcttctgccttttgcggattgggtttcctgatcgtgctggctttgttccaggccggcctgggtcggatgatgatgaagtatcgcgaccaaagagcaggcaagatctcggaacgtcttgtcataacgagtgagatgatcgaaaacatccagtcggtgaaagcctattgctgggaagaggctatggagaagatgatcgaaaacctacggcagaccgagctgaaactcactcggaaggctgcgtacgtgagatattttaactcatccgcattctttttcagcggattcttcgtggtatttctgagcgtcctgccctatgcattgattaagggaatcatcctgcggaaaatcttcaccaccatatcgttttgtattgtgttgcgtatggcagtgacccgtcaattcccctgggcagtccagacatggtatgattcacttggggcaatcaataagatccaagattttctgcaaaagcaagagtataagactctcgaatacaatttgactaccaccgaagtggtcatggaaaacgtgaccgctttctgggaagagggattcggtgaacttttcgagaaagccaaacagaacaataataatagaaagacatctaacggtgacgactctctcttcttttcaaatttctccctgttgggcacacccgtgctgaaagacataaactttaaaatcgaaaggggccagctgctggcggtagccgggtccacgggggctggtaaaacgagcctgctgatggtgatcatgggagaactggaacctagcgaaggaaaaattaaacattcagggcgcatatcattttgtagtcaattttcctggatcatgcccggaactattaaggagaatataatatttggggtctcttacgatgaatatcgctacaggagtgtcattaaggcctgtcaacttgaggaagacatttccaagttcgccgagaaggataacatcgtcctcggagaaggtggcataaccctgtctggcggtcaaagagccagaatctcactcgccagggccgtgtataaagacgccgacctttatcttttagatagccccttcgggtatctggacgtactaacagagaaggaaatttttgagtcctgcgtttgcaaactgatggcgaacaaaactcgaattctggtgaccagcaagatggagcacctgaaaaaggctgataagatcttgatcctccatgaaggttccagctacttctatggaacattctccgaactccagaacctccagcccgacttcagttcaaaactgatgggatgtgattcttttgatcagttttccgcagaacgcaggaattcaatcttaactgagacactgcacagattttcactggaaggcgatgcaccagttagctggaccgaaaccaagaaacagtctttcaaacagaccggggagtttggtgaaaagcgcaaaaattctatacttaatcccattaattctattcggaagtttagcatcgtgcagaagacgccactgcagatgaacgggatagaagaggatagcgatgagcctttggagcggaggctaagcctcgtccctgattctgagcagggagaagccatccttcctagaatctcagtgatatccacaggaccgaccctgcaggctcgtcgcaggcagagtgttctgaaccttatgactcattctgtgaatcaaggtcaaaatatacaccggaagaccactgcaagtactagaaaggtatccctagctcctcaggccaacctgacagaactagatatttattctcgtcgcctcagccaagaaaccggcctggaaattagtgaagaaataaacgaggaggatctcaaagagtgttttttcgatgatatggaatccatccccgcagttaccacctggaacacttacctgaggtacataaccgtccataagagtctgatcttcgtgttgatttggtgcctcgtgattttcctggctgaggtggccgcttccctagtcgttttgtggctcctgggcaacacgcccctgcaagataaaggcaactcgacgcactccaggaataactcctacgccgttattattacctcgacaagttcctattatgttttttatatttacgtgggggtcgccgacaccctgcttgccatgggattttttaggggtctgcccctcgtccatactctgataacggtgtcaaagatcctccaccacaaaatgctacactctgttcttcaggctccaatgtccacactcaacactctcaaagccggagggatactcaatcggttctcaaaggatattgcaattctggatgatctcctccctttgacaatctttgacttcatccagctcctactgatcgtgatcggagcgattgcagtagtcgccgtacttcagccatacatctttgtggctaccgtgcctgtgatagttgcatttatcatgctgagagcttactttctgcagactagccagcagttgaagcagctcgaatcagagggacgcagccccattttcacacacctcgtaacgtcactgaaaggcctgtggacccttcgggccttcggaaggcagccctacttcgagactctcttccataaagccctcaatctacataccgcaaattggttcctgtatttgagcactctccggtggtttcagatgaggatcgaaatgatcttcgtgatcttcttcatcgctgtgaccttcatttccatcctcaccaccggtgagggcgagggtagggtggggattatattgacgttggccatgaatataatgtctaccctccagtgggccgttaactcatccattgacgtggacagtctgatgcgttctgtgtcacgggttttcaagtttattgatatgcctacagaaggcaaacctaccaagtccacaaagccctataagaacgggcagctaagcaaagtgatgataattgagaacagtcacgtgaagaaggacgatatatggccctcaggcgggcagatgacagtaaaagatttgaccgccaaatacactgagggcggcaacgccatcctggaaaacatcagcttttctatatcgcctgggcagcgcgtggggttgctgggccgcactggctcaggcaaatctaccctgctatcagctttcctaaggcttctgaacaccgaaggggagattcagatcgacggagtgtcctgggactctattaccctgcaacagtggcggaaggctttcggcgtgatcccccagaaggtcttcatcttttccgggacattcagaaagaacttagacccttatgagcagtggtcggaccaggagatttggaaagtagctgatgaagttggactgagatcggtgatcgaacagtttccagggaagctggactttgttctggtagatggaggctgtgtgttgtcacacgggcacaaacagttaatgtgcttagccaggtccgtgctgtcaaaggccaagatactgttattggacgagccgagcgcacatctggatcctgttacataccagatcataaggagaacactgaaacaggcattcgccgattgcacagtgatcctgtgtgaacatcgaatcgaagccatgttggagtgtcagcagtttttggtgattgaagaaaacaaggtgcgtcagtatgacagtatccagaaactgctgaacgagcggtcacttttccggcaagccatatcgccttcagacagggtgaaattattcccacataggaacagctcgaagtgtaaatctaagccacagattgctgctctgaaagaagaaacagaggaagaagtgcaggacaccagactg

SEQ ID NO: 9674 - DNA, 4440 bp, Artificial Sequence
  derived and/or modified sequence
atgcagaggagccctctcgagaaggcgagtgtcgtgtctaaactcttcttcagctggacaagacctatattgcgaaagggctaccgtcaacggctggagctctccgatatataccagattcctagcgtggactctgccgacaacctcagcgaaaaactggagcgggagtgggatcgcgaactggccagtaagaaaaacccgaaactaattaacgctctgagaaggtgcttcttttggcgcttcatgttttatgggattttcttgtacttgggagaggttaccaaagctgttcaacccctgttactgggccggatcattgcatcctacgaccccgacaataaagaggagagatccattgccatctacctggggatcgggctctgtctgctgtttatcgtcaggacgttgcttctgcatcccgccattttcggcctgcaccatattgggatgcagatgcgaatcgcaatgttctctcttatctacaaaaaaacattaaagttgagctcccgcgtcttagacaagatctcgatagggcagctggtgtcattgctgagtaacaatttaaacaaattcgatgaaggcttggccctggcacattttgtgtggatcgctcctctgcaggtggcactgctcatgggcctgatctgggaactgctgcaggcgtctgcattttgtggtttgggtttcctgattgttctggctcttttccaggcaggattggggaggatgatgatgaaatacagggatcaacgcgctggcaagatttctgagcgtttggttattaccagtgagatgatcgagaacattcaaagtgtgaaggcctattgttgggaagaggctatggagaagatgatcgagaaccttaggcagactgagttaaaattgacgcggaaagctgcctacgttagatacttcaattcgtctgcattcttcttcagtggattttttgttgtcttcctctcagtgcttccatacgcactgattaaagggatcattctcaggaagattttcacaaccataagtttttgtatagtgctccgaatggccgtgactaggcaatttccatgggccgtgcaaacatggtacgattcccttggcgctatcaacaaaatccaggacttcctgcagaaacaggaatataagacattggaatacaacctgacgacgactgaggtggtcatggaaaacgtgaccgctttctgggaggaagggttcggcgagctgtttgagaaagccaagcagaataataacaatcggaaaacgtctaacggagacgattcacttttcttttccaattttagcttgttgggtacacccgtcctgaaggacattaacttcaaaatagagcggggacaactgctggccgtggcgggtagcacgggggccgggaagacaagtcttttgatggtgattatgggtgaactcgagccttccgaagggaagatcaagcattccgggcgaatttcattttgctctcagttcagctggatcatgcccgggacgatcaaggagaatatcatctttggcgtgtcatacgacgaatatagatacagatcggtaattaaggcctgtcagctggaggaagatatatctaagttcgccgagaaggataacattgttctgggcgagggcggaatcaccctgagcggggggcagagagcgcgaatttctttagccagagcagtttataaagatgcagacctgtacctcttagactctccatttggctatctggatgttcttacggagaaggagatcttcgaaagttgcgtttgtaagctgatggccaacaagacaaggatcctcgttactagtaaaatggaacatctgaaaaaggccgacaagatcctcatcctgcatgaaggatcctcgtacttttacggcaccttcagcgaacttcagaatctgcagcccgactttagcagcaagctgatgggctgcgattctttcgaccagttcagcgccgagcgtcggaactcaatcctcaccgagacacttcacagattttcactggagggcgacgcccctgtctcgtggaccgagacaaagaaacagtcctttaaacaaactggcgaattcggagagaagcgaaagaactcaatcttgaatccaattaacagtatccgaaagttcagcatagtccagaaaacccctctgcagatgaatggcatcgaagaggattccgatgaacctctggagcggaggctgtcactggtgcccgactccgaacagggcgaggccatcctgcccaggatcagtgtgatcagtacagggccaacccttcaggcgaggcggagacagtcagtgctcaatttgatgacccatagcgtgaatcaaggtcagaacatccacaggaaaaccaccgcaagtactaggaaggtgtccctcgcgccacaagctaatctgacagaattagatatttacagtaggcggttgtctcaggaaactgggcttgagatttctgaggagataaacgaggaagatcttaaagaatgcttttttgacgacatggagtccatcccggcagtgaccacttggaatacttatctgcgctacattaccgtccataagtccctgattttcgtacttatatggtgtttggtgatattcctggctgaggtagccgccagcctggtggttctttggctgctgggaaataccccactgcaggataaaggaaacagtacacactccaggaacaatagttacgcagttatcattacttccacgtcctcatactatgtgttttacatctatgtgggagtggcagacaccctgctggccatgggtttctttcgtggcctccccttggtacataccctgatcacggtgagtaaaatcctgcaccataagatgctccattccgtacttcaggcccccatgagtacacttaacaccctgaaggctgggggcatccttaaccgttttagcaaagacattgcgatcttggacgatttgttgcccttgacgattttcgacttcattcagttgctgctgatagtcataggggccatcgctgtggtcgcagtgctgcagccctacatctttgtggccactgtgcccgtgatcgtggcgttcattatgctgcgggcctacttcctgcaaaccagtcagcagctcaagcagctcgagtccgaaggcaggtcacccatctttactcatctggtgacttccctgaaaggactgtggacacttcgagcgtttggcaggcaaccctattttgagaccctgttccacaaagctcttaacctgcacaccgccaattggttcctgtacctgtcaacccttaggtggtttcaaatgcgcatcgaaatgatcttcgtcatattcttcatcgccgtgacattcataagcatcttgacaacgggagaaggggagggcagagttggcattatcctgactctggctatgaatattatgtctactttgcagtgggctgtgaacagttccattgatgtagattccttgatgaggtccgtctctcgggttttcaagtttattgatatgccaactgaagggaaaccgacaaaaagtacgaagccttataagaatggccaactgtccaaagtcatgatcatcgagaactcccatgtgaagaaagacgatatatggccatctgggggacagatgactgtgaaggatctgacagcaaagtatactgaaggcggaaatgcgatcctggagaatattagcttctctatatcccctggccagcgggtgggactgctcggccgcacaggcagtggcaagagcaccctcttatcagcgtttctgcgccttctgaacactgagggggagatccagattgacggcgtcagctgggatagtatcacactgcagcagtggcggaaggccttcggcgtgattccacagaaggtctttatcttctcgggtaccttccgcaaaaaccttgatccttatgagcagtggtctgaccaagagatatggaaagttgccgacgaggtgggcctcagaagcgtgatcgaacagttcccaggtaagctggattttgtgctggtcgatggtggatgtgtgctttcacatggccataaacaacttatgtgtttagctcgctccgtcctgtcaaaggctaagatcctgctgcttgatgagccttccgcccacttggatcccgtaacgtaccagattattcgccgcaccctaaagcaggcatttgccgactgcactgtgattctgtgtgagcataggattgaagccatgctcgaatgccagcagtttcttgttatcgaggagaataaggtccgccagtatgattccatccaaaaactccttaatgaaagatccctattcagacaagcgatttctccatctgatagagttaagttgtttccacatcggaactccagtaaatgcaaaagcaagccgcagattgccgctttgaaggaagagacagaggaggaagtacaagacaccagactt

SEQ ID NO: 9675 - DNA, 4440 bp, Artificial Sequence
  derived and/or modified sequence
atgcagcgttctccactggagaaggcctcggtagtgagtaagcttttcttttcttggaccagaccgatcctaagaaagggttatcgccagcgcctggagctgtcggatatctaccaaataccatcagtggatagcgctgataatttgagcgaaaaacttgagcgtgagtgggacagggagttggcgtctaagaagaacccgaaattgatcaacgccctccgtcggtgtttcttttggcgtttcatgttctatggcatttttctatacctgggagaagttacaaaggcagttcaaccgttgttgctcggccgaattatcgcttcgtacgatccggataataaggaggaacgatcgattgctatttacctggggataggcctttgtttgctgttcattgtgagaacccttctgctccacccagctatttttggcctgcatcatattggcatgcaaatgagaatcgccatgttctctctgatttacaagaaaacgcttaagttgagctctagagttttggataagatctccatcggccagctcgttagtcttttgtctaacaacttgaacaaattcgacgaaggcttggctctagcccactttgtctggattgctccgttgcaggttgctctgttgatgggccttatttgggaattgttgcaggcgagcgcgttctgtggactcggcttcctgattgttttagctctattccaggccggtttgggacgcatgatgatgaagtatcgggaccagagagcaggcaagattagcgagcgcctcgtgatcacgagtgaaatgatcgaaaatatccagtctgtaaaggcctattgttgggaggaggccatggaaaaaatgattgaaaatcttaggcagacggagttgaagctgactcgaaaggcggcgtacgtaagatacttcaatagttcagcgttctttttctcaggtttcttcgttgtgtttcttagcgtacttccctatgctcttataaagggaatcatcctacgcaaaattttcaccaccatatcgttctgtattgtgctacgtatggcagtgacgcgccagtttccttgggcggttcagacgtggtatgactctcttggtgcaattaataaaatccaggacttccttcagaaacaggaatataaaaccttggaatataatctgaccaccactgaggtagtgatggagaatgtaactgcattctgggaggagggattcggagagctcttcgagaaggcgaagcagaacaataataacagaaagacatcaaatggcgatgattctctgttcttcagcaatttttcgctcttgggtacgccggtactcaaagacatcaactttaagatcgaacgagggcaacttctcgcagtagccggatcaaccggtgccggcaaaacgtcgctgttaatggttatcatgggcgagctagagccctcggaggggaagatcaagcattctggtcggatcagcttctgctcccagttcagctggataatgcctgggacgataaaagaaaatattattttcggggtctcgtatgatgagtaccgataccgctcggttatcaaagcctgtcaactcgaagaagatatctcaaagttcgccgagaaagacaatattgtattgggggagggtggaattactctgagtggagggcaacgtgcacggatatctctcgctcgggcagtgtacaaagatgcggacctctatcttttggatagccccttcggctatctggatgttctaacggaaaaggagatattcgaatcttgcgtctgtaaactgatggctaacaagactcgtatcctggtcacaagcaagatggaacatctcaaaaaggcggataagattctcattttacatgagggctcttcatacttctatggtacgttctctgaactgcaaaatctgcagcccgacttctcaagcaaactgatgggctgcgactccttcgaccaattctccgcagagcggaggaattccatcctaaccgagacacttcatcggttttctctggaaggggatgccccggtctcctggacggagacaaaaaaacagagtttcaaacagacaggcgagttcggtgagaaaaggaagaatagcatcctcaatccaattaattcaatccgcaaattctcgatcgtccagaagacaccactccagatgaacggtatcgaagaggattccgacgaacccctcgaacgcaggctgtccctagtgccagacagcgaacaaggtgaagccatattgccccgaatttcggttatcagtacgggtccaaccttgcaagctcgacggagacagtcggtcctaaatttgatgacccactcagtcaatcagggacaaaacattcatcgcaagactacagctagtactcggaaggtttccctcgctccccaggccaatctaaccgagcttgatatctacagtaggcggttgtcccaagaaaccggcctggagatttctgaagagattaacgaagaggatctgaaagagtgcttctttgacgacatggagagtatccctgcagttaccacttggaacacataccttagatatatcacggtccataagagcttgatcttcgtcttgatttggtgcctagtgatcttcctggcggaagtggccgcctccctcgtggtcctgtggctcctcgggaatacacctctccaagacaaggggaattctacacactcacggaacaattcctacgccgtgatcatcacatccacgtcgtcctactatgtgttctacatctacgtaggagtcgcagatactctactggcaatgggtttctttcgcggtcttcctctggtccacacactgataacggtgtctaagattctccatcacaaaatgctgcactcagtcctccaagcgcccatgagcaccttgaacactcttaaggccggtggtatcctgaatcggttctcgaaagacattgccattttggatgacctactaccgcttactatcttcgattttattcagctcctgctgatcgtaatcggcgcaatcgccgtagttgctgtccttcaaccatatatcttcgtggcaacggtccctgttatcgtggcgttcatcatgctccgcgcctatttcctccagacaagtcaacagctgaaacagcttgaatccgaggggcgatctcccatcttcactcacctggtgacgtccttaaagggactgtggacattacgtgcgttcggccgacagccgtatttcgagaccctgttccataaggcacttaatctgcatacagcaaattggtttctctatctttccacgctgcgttggttccaaatgcggatcgaaatgatttttgtcatctttttcattgccgtgacattcatatctatacttaccacaggagagggggaggggcgtgtcggcattatcttgactttggcgatgaatataatgtcaacgctccagtgggctgtcaatagttcaatcgatgtcgactccctaatgcgctcagtgtctcgggtatttaagtttattgacatgcctactgaaggaaagcctactaaaagcacaaagccctacaaaaacggacaactgagcaaggtcatgatcattgagaactctcatgtgaagaaagatgatatttggcctagtggtggtcaaatgaccgttaaggacttaaccgctaagtatactgaaggcggaaacgccatcctagagaacatttcattctcaatcagcccaggtcagcgcgtcggcctcctagggcgcactggtagtggcaaatcgacacttttatccgcttttctcagactacttaacactgagggcgaaatccagatagacggcgtctcctgggatagcatcacgttgcaacagtggaggaaggccttcggtgtcatcccacaaaaggtcttcatattcagtggtacttttcgcaagaacctggatccatacgagcagtggtcggaccaggagatatggaaagttgccgatgaggtgggtctccgtagtgtaattgaacagtttcccggaaagcttgacttcgtgctcgtcgatggaggatgtgtgctgtcccacggccataaacaactcatgtgcctggctcgtagcgtcctgtcgaaagcaaaaatcctactgttggacgaacccagcgctcatttggatcccgtgacttaccaaattatcagacgaacccttaagcaagcttttgctgattgtaccgtcatactgtgcgaacaccgcatagaggccatgttagagtgccaacaatttctggtgatcgaggaaaataaggtgcgccagtacgattccattcagaaacttctgaacgaacggtccctcttccgacaagctatctctccatcagacagagtcaaactctttccgcaccgaaacagttctaagtgcaagtctaagccgcagatagcggccctgaaagaggagacagaggaggaagttcaagacacgagactc

SEQ ID NO: 9676 - DNA, 4440 bp, Artificial Sequence
  derived and/or modified sequence
atgcagcggtcaccgctggaaaaggctagcgtcgtgtccaaattgttcttttcgtggactcgtccgatactgcggaaggggtatcggcaacgcctcgagttgagtgacatctaccagatcccaagcgtcgattccgcagacaacctgtcagagaaactggaacgggaatgggatcgcgagctggcgtccaagaagaatcccaagctcatcaacgcattgcggcgctgctttttctggcggttcatgttctacggcatctttctctacctgggagaggtcaccaaagcagtccagccccttctgcttgggagaatcatcgcgtcgtacgacccggacaataaggaggaacggtcgattgcgatctacctggggatcggattgtgccttctcttcattgtgcgcaccctgttgctgcatccagccatctttggactgcatcatatcgggatgcagatgcggatcgcgatgttctccctgatctacaagaaaacgctcaaactgtcaagccgcgtcctggacaaaatctccatcggccaattggtgtcgttgctgtctaataacttgaataagtttgatgaaggactcgcactcgcccactttgtttggatcgccccacttcaggtggcgctgctgatgggattgatctgggagttgctccaagcctccgccttttgtggtctgggctttctgatcgtgctggcactgttccaagcgggacttggcagaatgatgatgaagtaccgggaccaaagggccgggaagatttcggagcggctcgtcatcacctcggagatgatcgaaaacatccagtcggtgaaggcctactgctgggaggaggccatggagaagatgatcgagaatctgaggcagaccgagctgaagctgaccaggaaggccgcatacgttagatacttcaactcatcagccttcttctttagcggttttttcgtggtgttcctgtcggtgctgccgtacgccctgattaagggtatcatactccgcaagatcttcaccaccatctcgttttgcatcgtgctgagaatggccgtgacccggcagttcccgtgggcggtccagacctggtacgacagcctcggagccattaacaaaatccaagatttcctgcagaagcaagaatacaagaccctggaatacaatctgaccaccactgaagtggtgatggagaatgttactgcgttttgggaagagggattcggcgagctgtttgagaaggcgaaacagaacaacaataatcgaaagacttctaacggcgacgattccctgttcttctccaactttagcctgctcggcaccccggtcctgaaggacatcaacttcaagattgaaaggggacaattgctcgctgtggctggcagcaccggcgccggaaagacttctctcctgatggtgattatgggagagctcgaaccgtccgaaggcaagatcaagcactcaggtcggatctccttctgttcccagttcagctggattatgccaggaactatcaaggaaaacatcatcttcggagtgtcctacgacgaatatagataccggtcagtgattaaggcctgccagcttgaggaggacatcagcaagttcgcggaaaaagacaacatagtgctgggggaagggggcatcaccctgtcgggaggacagcgcgcccgaattagcctggctcgcgcggtttacaaagatgccgatctgtacctgctggactcgcctttcggctaccttgacgtgctcaccgaaaaggagatatttgaatcctgcgtctgtaagctcatggccaacaaaactagaatccttgtcactagcaaaatggaacacctgaaaaaagcggacaagatcctgatcctgcatgagggtagctcctacttctacggaaccttctcggagttgcagaacctgcagccggacttctcgtcaaaacttatgggatgcgactcatttgaccagttctcggcagaacggagaaactcaattcttaccgaaactctgcaccggttcagcttggagggagacgcgccagtctcctggactgaaaccaagaagcaatccttcaaacagactggagaatttggggagaagagaaagaactccatcctgaatccgatcaactccattcggaagttcagcattgtgcaaaagactcccttgcagatgaatggaatagaagaggactcagacgaacccctggaaaggagactctcactcgtgcctgactcggaacaaggcgaggcgatcctgccacgcatttcagtcatctcaactggaccaaccctgcaggcacgccgccgtcagagcgtcctgaatctgatgacccactcagtgaatcaaggacaaaacatccatagaaagaccactgcctcgacgcgtaaagtctcgctggccccccaagccaatctgaccgagctggacatctactcgcgacggctttcccaggaaaccggattggagatcagcgaagaaatcaacgaagaggacctcaaggaatgttttttcgatgatatggagtccattcctgcagtgactacgtggaacacgtatctccgctacatcaccgtccacaagtctctcatcttcgtacttatctggtgccttgtgatcttcctggcagaagtggcggcgtccctcgttgtcctgtggctcctcggaaacactccgctccaagataagggcaactcgacccactcgcggaataacagctatgctgtgatcattacctcaacttcgtcatactacgtcttttacatatacgtcggcgtggctgataccctgctggcgatgggattcttccgcggcctgccattggtgcacacgctcattactgtgagtaagattttgcatcacaagatgttgcactcagtgctccaggcaccgatgtcaacgctgaatacgttgaaagccggcggaatcctgaacagattctcgaaggatatcgccattcttgacgatctcctgcctctcactatcttcgacttcatccagctgctcttgatcgtgatcggcgccatcgccgtggtggcggtgctccaaccatacatctttgtggcgactgtgcccgtgatcgtcgcgttcattatgctcagagcgtacttcctccaaacttcacagcagcttaagcaactggaatccgagggacggagcccgatcttcacccatctcgtaacgtccctcaaggggctgtggaccctgcgcgctttcggacggcaaccgtacttcgagactctcttccacaaagcactgaacttgcacaccgcaaattggttcctctatctctcgactctgcgctggttccagatgaggatcgaaatgatcttcgttatcttcttcatcgctgtgactttcatcagtatcctgactactggagaaggagagggacgggtgggaatcatcctcactctggcaatgaacattatgtcgactctccagtgggcagtaaacagcagcatagatgtggactcgcttatgcgctccgtgagccgtgtgttcaaattcattgacatgccgactgagggaaagccgaccaagtccaccaagccttacaagaatggacagttgagcaaagtgatgatcatcgagaactctcacgtgaagaaagatgatatctggccttccggcggtcagatgaccgtgaaagacctgaccgcgaagtacactgaagggggtaacgccatcctggagaacatttcattttccatctccccaggacaacgtgtcggcctgctcggtcggaccggctccggtaaatcgactctgctctcggcctttctgcgcctgctcaataccgaaggtgagatccagatcgacggtgtctcatgggattcgatcaccctgcaacagtggcggaaagccttcggggtgatcccgcagaaggtgttcatcttctcggggacgttcagaaagaacctggatccttacgaacaatggagcgaccaagaaatctggaaagtcgctgacgaagtggggctgcgctcggtcatcgagcaatttcctggaaagctggatttcgttctggtggacgggggatgcgtgctttctcatgggcataagcagctgatgtgccttgctcgctccgtgctttcgaaggctaaaatccttctcctcgacgaaccaagcgcccaccttgatccagtcacctaccagatcatccgcagaacgctgaaacaggctttcgcagattgcactgtgattctttgcgaacaccgaattgaggcgatgcttgaatgtcagcagttcctggtcatcgaagaaaacaaagttcgccaatacgattccatccagaagctcctgaatgaaaggtcgctgttccgccaggccataagtccgtccgatcgcgtgaaactctttccgcataggaactcgagtaagtgcaagtctaaacctcagatcgcagcccttaaggaggagactgaggaagaggtccaagacaccagactc

SEQ ID NO: 9677 - DNA, 4440 bp, Artificial Sequence
  derived and/or modified sequence
atgcagcgtagccccttggagaaggctagtgtggtcagcaagctctttttctcctggactaggccaattctacgtaagggttaccgccagcgcctcgaacttagtgatatttaccaaatccccagcgttgactccgccgacaacctctctgaaaaactagagagggagtgggatcgcgagttggcgtccaagaagaacccgaaactcataaacgcgctccgtcgttgcttcttttggcgtttcatgttctacggaatctttttgtacctgggggaagtgacgaaggcagttcagcctctgctgctcggccggatcatcgctagctacgatccagacaataaggaagaaaggtccatcgctatttacctaggtatcggtctgtgcttgctgttcattgttcgcaccctcttgctgcacccggcgattttcggcttgcaccatatcggaatgcagatgcggatcgctatgttctcccttatctacaaaaagaccttgaagctgtcctcccgtgtgttggacaagattagcatcggacagctcgtctctctgctcagtaataacttgaacaaatttgatgagggactagcactcgcccatttcgtctggatcgctccgctacaggttgccctgttaatgggtctaatctgggagttgttgcaggcttcggcattctgcggtctgggctttctgatcgtcctcgccctcttccaagctggcttgggacggatgatgatgaagtatcgcgaccagcgtgctggaaagatctctgaacgcctggtgattaccagcgagatgatcgagaacatccaatctgtaaaggcatactgctgggaagaggccatggagaagatgatcgagaacctccgtcagacggagctcaagctgaccaggaaggcggcttacgttcggtactttaactcgagcgcattcttcttcagcggcttcttcgtcgtcttcctgtcggtcctgccttatgcgttgatcaagggcattatcctcaggaagatctttactactatctccttctgcatcgtgctgcggatggctgtgactaggcaattcccctgggcggtccaaacctggtatgactcgctgggtgccatcaacaagatccaggatttcttgcagaagcaggagtacaagactttggagtacaacctgaccaccaccgaggtagtgatggagaacgttacagccttctgggaagagggcttcggggagctgttcgaaaaagctaagcaaaacaataacaaccgcaagacctccaacggcgacgatagcctgtttttttccaacttttcattattgggaacgccagtcctaaaggacatcaacttcaagatcgagcggggacaattgctggctgtagctggttctacgggtgccggcaagacatccctgctgatggtcatcatgggcgaacttgagccctctgaaggtaagatcaaacatagtggtcgcatctcgttttgctcccagttctcatggatcatgccgggtacaatcaaggaaaacatcatctttggagtctcctacgatgagtaccggtaccgtagtgttatcaaggcgtgtcagttggaggaagatatcagcaaatttgcggagaaggataacatcgttttgggagaaggtggcattaccctcagcggcggtcagcgtgctcgcatctcgctagcacgggcggtttataaagatgctgatctgtacctcctggactctcccttcggctacctcgacgtcctgaccgagaaggagatcttcgagagctgtgtttgtaaactcatggccaacaagacccggatcctagttacaagcaagatggagcatctcaaaaaagcagacaagatcctcatcttgcacgaaggttcctcttacttttacggcacattcagtgagctacaaaatctccagcctgacttcagttccaaactcatgggctgcgatagcttcgaccagttctcggctgagcgcaggaactcgatcctaactgagacgctccacagatttagccttgagggcgacgctccggtttcctggactgaaacaaaaaagcagagcttcaagcagaccggagagtttggcgagaagcgtaagaactccatactgaatcccatcaactccatccgcaagttctccatcgtgcagaagacccccttgcagatgaacggcatcgaggaggattcggacgaacctcttgaacgtcgcctttcgctcgttcctgacagcgagcaaggtgaggctattctcccccggatctccgtgatttccaccggccctaccctgcaggctcgtcgccgtcagtccgtcctgaacctgatgacccacagcgtcaaccagggacagaacatccatcggaagactactgcttccacccgtaaggtttccctggcaccccaggcaaacctcaccgaactcgacatctactcgcgccgcctttcccaagagaccggactcgaaatcagtgaggagataaacgaggaagacctgaaggaatgcttcttcgacgacatggaaagtatcccagcggtcactacctggaatacctatctccgctacatcaccgtccataagtctcttatctttgtcctgatttggtgccttgtaatcttcctggccgaggtcgctgcctcgttggtggttttgtggctgctgggaaatacaccattacaggacaagggcaactcgacccattctcgaaataactcttacgcagtcattatcaccagtaccagcagctactacgttttctacatatacgtcggtgtcgctgacactcttctggctatgggcttcttccggggtttgcccctcgttcacacgctcatcaccgtcagcaagatcctgcaccacaagatgttgcactccgtgcttcaagcccccatgtctaccctcaacactttgaaggctggcggaatacttaaccggttctccaaggatatagctatcctggatgacctccttcctttgaccatattcgacttcatccaactcttattgatcgtgatcggcgccattgctgtcgtcgccgtgctgcagccatacattttcgtagcaacggtgccagtgatcgtcgccttcatcatgcttcgcgcttatttcctccagaccagccagcaactcaagcagctggagtccgaagggcggtccccgatcttcacacacctcgttacgtcgctcaagggtctatggacgctaagggcctttggtcggcaaccttactttgaaactctgtttcacaaggctttgaacctgcatacggctaactggttcctatacctgtcgaccttgcgctggtttcagatgcgcatcgaaatgatcttcgttatctttttcatcgccgtcaccttcatctcgatcttgaccaccggagagggagagggcagggtcggtattatcctcaccctcgctatgaatattatgagcactctgcaatgggctgtcaactcgagcatcgacgtggactctctgatgcgttctgtcagtcgtgtatttaagttcattgatatgcccaccgagggcaagcccacgaagtctaccaagccctacaagaacggccagctcagcaaggtcatgatcatcgagaacagtcacgtgaagaaagatgacatctggccctcagggggtcagatgaccgtgaaagacctgaccgctaagtacaccgagggcggaaacgctattctggaaaacatttccttttccatctcccctggccaacgcgtgggtctgctaggccgcacgggtagcggcaagtctaccctgctgagtgctttcttgcgcctgctcaacactgaaggtgagattcagatcgatggtgttagctgggactcgatcacgctccagcagtggagaaaggcattcggtgttatcccccagaaggtgttcatcttttccggtaccttccgtaagaacctcgacccgtacgagcaatggtcggatcaagagatatggaaggtggctgacgaggtaggacttcgttccgtcatcgagcagttccctggcaagctcgactttgtcctggtcgacggaggttgcgtgctgtcccacggtcacaagcaacttatgtgccttgcccgtagcgttctcagcaaggctaagatcctcctcctggatgagccttcggcccatcttgaccctgttacctaccagatcattcgccgtaccctgaagcaagccttcgctgactgtaccgtgatcttgtgcgagcaccgcatcgaggccatgctcgagtgccagcagttcctggtgatcgaggaaaacaaagtgcgtcagtacgactccatacaaaagttgcttaatgagcggtctctcttccgtcaggccatctccccttccgatcgggttaagctattcccccaccggaactcgtcgaagtgcaagagcaaaccgcaaatcgctgccctgaaggaagagaccgaggaggaggtgcaggacactaggcta

SEQ ID NO: 9678 - DNA, 4440 bp, Artificial Sequence
  derived and/or modified sequence
atgcaacgaagccccctcgagaaggcttcggtggtgagcaagttgttcttctcctggactcggccgatcctgcgtaagggataccgccagcgccttgagctgtctgacatctaccaaatcccatccgtcgactcggcggacaatctgagcgaaaagctggagagagaatgggaccgcgagctcgccagcaagaagaacccgaaactcatcaatgcgctgcggcgctgctttttctggaggttcatgttttacggcatctttctctacctgggcgaagtgaccaaggcagtgcaaccactgctcctcggcagaattatcgcttcctacgacccggacaataaagaagaaaggagcatcgcaatctacttgggcatcggattgtgtctgcttttcatcgtccggactctgttgctccaccctgctatcttcgggcttcaccacattggaatgcagatgcggatcgcgatgttctcactgatctacaagaaaacgttgaaactgtcaagcagagtcctggataagatctcgatcggacagctggtcagcctcctctccaataacttgaataagttcgatgagggcttggccctggcccatttcgtgtggattgccccgcttcaggtcgctcttctgatgggcctgatctgggagcttctgcaggcctcggctttctgcggtttggggtttcttattgtgctcgcgctgttccaggccggactcggtcgcatgatgatgaaatacagagatcagagggcaggaaaaatctcagagcggcttgtcatcacttccgaaatgattgagaatatccagtcggtgaaggcctactgttgggaggaagcgatggagaagatgatcgaaaatctcaggcagaccgagctcaagctgactaggaaggcggcatacgtccgctacttcaactcatccgcgttcttcttctcggggttcttcgtcgtgttcctctcagtgcttccgtacgccctgatcaagggaatcattctcagaaagatattcacgactatttctttctgcatcgtcctcagaatggccgtcaccagacaatttccatgggctgtccaaacctggtacgattcattgggagcgatcaataagatccaggatttcctccagaaacaagaatacaaaactctcgaatacaatctgactactaccgaagtcgtgatggagaatgtcaccgctttttgggaggaaggcttcggcgagttgtttgagaaggcaaaacagaacaacaataaccgtaagacgagcaacggagacgactccctcttcttctcgaatttctcgctcctcggaactccagttttgaaagacattaacttcaagatcgaacgcggacaactcttggccgtggctggatcgactggggccggcaagaccagcctgctcatggtcattatgggtgaactcgaaccttcagagggaaaaatcaagcattcgggcaggatcagcttctgttcgcaattttcttggatcatgccgggaaccatcaaggaaaacatcatctttggcgtgagctacgacgaataccgttatcggtcggtgattaaggcgtgccagctggaggaagatattagcaagttcgccgagaaggacaacatcgtgctcggagaaggaggaatcacgctcagcgggggacagcgcgccagaatctcactggccagggctgtgtacaaggacgccgatctgtacctgttggactcgcctttcggatacctggatgtcctcactgaaaaagaaatcttcgagtcgtgcgtgtgtaagctgatggccaacaagacgagaatactcgttacctcaaaaatggagcatctcaagaaggctgacaaaatcctgatcctgcatgaaggatccagctacttttacgggaccttcagtgaactccagaacctgcaacccgacttttcgtccaagctgatggggtgcgactcgtttgatcagttttcggccgaacggagaaacagcatcttgactgaaaccctccacaggttttctctggaaggagacgcgcccgtgagttggaccgaaactaagaagcaatcgttcaagcagactggcgaattcggagaaaagcgcaagaattcaatcctcaaccccatcaattccatcagaaagttctcgatcgtgcaaaaaacccccttgcagatgaatggaatcgaggaggattcggatgaaccgctggaacggcgactttccctggtcccggactcggaacagggagaggccatcctgcctaggatctccgtgatctcaaccggaccaaccctccaggcacgccgaaggcaatccgtcctgaacctgatgacgcacagcgtgaaccagggccaaaacatccacagaaagaccaccgctagcactcgcaaggtcagccttgctccgcaggctaatcttactgaactcgacatttactcacgcagactgagccaggagacgggtctggaaatctctgaggagatcaatgaagaggatttgaaggagtgtttcttcgacgatatggagtcaatcccggccgtgaccacttggaacacctacctgagatatatcaccgtgcacaaatcgttgatttttgtgctcatttggtgcctggtcattttcctggctgaagtggccgctagcctggtggtgctgtggctcctgggaaacaccccgttgcaagataaagggaactccacccactcacggaacaatagctacgccgtcatcatcacctccactagctcgtactacgtgttctatatctacgtgggagtggccgataccctgctggcaatgggcttcttccggggactcccactggttcatactctcattaccgtgtccaagatccttcatcacaaaatgctccactctgtgctccaggcaccaatgagcacgctcaataccctgaaggccggcgggattctgaaccggttctcaaaggacatcgctatcctggacgatctcctcccgctcactatctttgactttattcaactgctccttatcgtcatcggagccatcgccgtcgtggcggtgcttcagccatacatctttgtggccactgttccggtgatagtggcattcatcatgttgcgagcctacttccttcagacttcacagcaactgaaacagctcgaatccgaaggacggtcgcctatcttcacccatctcgtgactagcctcaaaggactgtggactctgcgggctttcggcaggcagccatatttcgagactttgttccacaaggcccttaacctgcacactgcaaactggttcctctacctgtcgacccttcgctggttccagatgcgcatcgagatgatctttgtgattttcttcatcgctgtcaccttcatctcgatcttgaccaccggcgaaggtgagggtagagttggaatcatcttgactctcgcgatgaacattatgtccactcttcaatgggctgtgaactcctcgatcgatgtggattcactcatgcggtctgtgtcgagagtctttaagtttatcgacatgccaaccgaaggaaagccgactaagtcgaccaagccatacaagaacggacagctgtcaaaggtgatgatcatcgaaaactcacacgtcaaaaaggacgatatctggccaagtggaggccaaatgaccgtcaaagacctgactgcgaagtacaccgagggaggcaacgctattctggagaatatctccttctcaatctcacccgggcagagagtcggacttctgggacgcacgggatccggaaagtcgactctgctttcggcgttcctgcggctgctcaacactgagggggagatccagatcgatggtgtcagctgggactcaatcaccttgcaacagtggcggaaggcttttggagtaattccacagaaggtctttatcttctcgggcactttcagaaagaacctggacccgtacgaacagtggagcgatcaggaaatctggaaggtggccgatgaagtggggctccggtccgtcatcgaacagttccctggcaagctcgattttgtgctcgtggacggaggatgtgtgctgtcccacggccacaagcagctgatgtgcctggctcggagcgtgcttagcaaggcaaagatcctcctcctggatgagccgagcgcccatcttgacccggtgacttatcagatcatccggagaacgctcaagcaggcctttgcagactgcaccgtgatcttgtgcgagcatcgcatcgaagctatgctcgagtgtcaacagttcctggtcatagaagaaaacaaggtccggcagtacgacagcatccagaaactcctcaatgagcgcagcctgttcagacaggcaatttccccgtccgacagagtgaagctgttccctcacagaaacagcagcaagtgcaagtccaagccacagattgcggcattgaaggaagaaactgaagaagaggtgcaagacacccgcctc

SEQ ID NO: 9679 - DNA, 4440 bp, Artificial Sequence
  derived and/or modified sequence
atgcaaaggagtcctttggagaaagcatcagtggtttctaaattgtttttctcttggactcgtccaatcttgaggaagggctaccgtcagaggcttgaattaagtgatatttatcaaataccatccgtggattctgctgacaacctcagtgaaaaattagagcgagagtgggatcgggagttggcttccaagaagaatccaaagctcattaatgctttgcgaaggtgcttcttctggcggttcatgttctatgggatcttcttgtacttaggagaggtcactaaggctgttcaaccattattgctaggtagaattatagcttcctacgatccggacaataaggaagaaagatcaattgctatctacttgggtattggattgtgcttgcttttcattgtgcggactcttcttttgcatccggctatctttggtctccatcatatcgggatgcaaatgaggattgctatgttttctctcatttataaaaagacattaaaactgagttcgcgtgtgctagataagatttcaattggtcagcttgtatctcttttaagcaataacctcaacaagtttgatgaaggtctcgctcttgcgcatttcgtttggattgcccccctccaagtggcattgctgatgggacttatttgggaactccttcaagcatcagctttctgtgggcttgggttcctaatcgtgcttgcacttttccaagctggattggggagaatgatgatgaaataccgagatcagagggccggtaagattagcgagaggctagtgataaccagtgaaatgattgagaacattcaatctgtaaaagcatattgctgggaggaagcaatggagaagatgattgaaaaccttcggcagacggaattgaagcttactaggaaggcagcttacgtgagatatttcaatagctcagctttctttttttcgggtttttttgtcgtgtttcttagcgttctcccctatgccctcatcaaagggattatcctgcgtaagattttcacgacgatatcgttttgcatagtgcttagaatggcggtcacacggcaattcccttgggctgttcaaacttggtacgattccttgggagccattaataaaattcaagatttcctccaaaaacaagagtataaaactcttgagtataacttgacaaccacggaggttgtaatggaaaacgttacagctttctgggaggagggatttggtgaactttttgaaaaagctaagcagaataacaacaaccgaaaaacttcaaatggggatgatagtctcttcttcagcaatttttccctacttggtaccccggtacttaaagatattaacttcaagatcgaacgaggtcaattgctggcagtggccggttccacaggagctggcaaaacctccttgcttatggtgatcatgggcgaactcgaaccatcagagggaaagattaagcattctggaaggattagcttttgctcacagttcagctggatcatgcccggcactattaaggagaacattattttcggggtttcttatgacgagtatcgttacaggtctgtgataaaggcttgccaattagaagaagatatcagcaaatttgcggagaaggataatattgtgctcggtgaaggtggaattactcttagtggtggtcaaagagcgaggatcagtttggcgagggccgtctacaaggatgccgatctttatcttttggacagcccttttggttaccttgatgtgttaaccgaaaaagagatcttcgaaagctgtgtgtgtaaacttatggctaataagacacggatattggttacttccaaaatggaacatttgaagaaagctgataagatcctcattcttcatgaggggagctcatatttctatggcactttctctgaacttcaaaatctccaaccggatttctcttctaagctcatgggatgtgactctttcgaccaattctctgctgagcggcgaaattctattctgacagaaacccttcacaggttttcattggaaggtgatgcaccagtttcctggacggaaaccaagaagcaatcctttaagcaaactggagagtttggagaaaaaagaaagaattcaatcttgaatccaattaactccatacgtaagttttctattgttcagaagacacctcttcaaatgaacggcatagaagaggattctgatgagccactggaaagaagactgtctctagttcctgacagtgagcaaggggaagctatccttcctagaatttccgttattagcaccggaccaactttgcaagcaagacgtcgacaaagcgttcttaatttgatgacgcactcagtcaatcaaggacaaaatattcataggaagaccaccgcttctacaagaaaagtgagcctcgcgcctcaagcgaatctgaccgagctagatatttattctagacgtctttcccaggagactggacttgaaatttccgaagagattaacgaagaagatcttaaggagtgtttcttcgatgatatggagtcaatcccagctgtcactacttggaacacatatttgcgatacatcacagttcataagagtctcatattcgttttgatttggtgcttggttatctttcttgccgaggtcgccgctagccttgtggtcctttggctcctggggaacacaccactgcaagacaagggcaatagcacccattctaggaacaattcatatgctgttataataacttcaacctcttcttactacgtgttctatatatatgtaggtgttgcagatacacttttggccatgggtttttttcggggattaccacttgtgcatacactgattacggtctctaagattctccaccataagatgcttcatagcgtgctgcaggcacctatgagcactttaaacacgttgaaggctgggggtattctcaatcgtttttcgaaggatattgcgattttggacgatttgctccctctcacaatctttgacttcattcaattgctgctcatagtgataggagcaattgcggtggtggcggttttgcagccttatatatttgttgctacagttccggttattgttgcatttattatgttaagggcatatttcctacagacttcacaacaattaaaacaattagagtctgaaggtagaagcccaatttttacccatctggtaacctctcttaaaggattgtggactttaagggcattcggtagacagccctatttcgaaacacttttccacaaggcactcaatctacataccgctaattggtttttgtatcttagtactctccgctggtttcaaatgcggatagaaatgatcttcgttattttcttcattgcagttacttttatttcaatcctgaccactggcgagggcgagggaagggttggtattatactaactctggctatgaatataatgtctacgctccagtgggctgtcaacagcagtatcgatgttgattccttaatgcgttctgtcagtcgtgtgttcaaattcatcgatatgcctacagaggggaagcctaccaagtccacaaagccatacaagaacggacaactgtctaaggttatgattatcgaaaattcccacgttaagaaggatgatatttggccatcgggaggtcagatgaccgtgaaagatttaactgccaagtacaccgagggtggaaacgccattttagaaaatattagtttcagcattagtcccgggcagagagtaggacttctgggaagaaccggttcaggaaaatctacgttactgtctgcattcctccgacttcttaatacagagggtgaaatacaaatcgatggcgtctcgtgggattcaatcacattacaacagtggcgcaaagcgtttggcgtcattccacagaaggtctttattttttccgggacttttaggaagaatctggatccatatgagcaatggtccgaccaggaaatttggaaggtggctgacgaagtgggcctccgtagtgttatcgaacagttccctggaaagttagacttcgtcttggttgatggtggctgtgtgctttcgcacggacacaaacagctgatgtgcttggcaaggtcggttctaagcaaagctaagatcttgctattggacgaaccaagtgctcatttggatcccgtgacctatcaaattatccgccgaactcttaaacaggcatttgcagattgcactgtcatcctctgcgaacacagaatagaggcgatgttagagtgtcaacagtttctagttattgaagaaaataaggtgaggcagtacgactctattcagaaactcctaaacgaaaggagcttgtttagacaggccatttcaccatcagatagagtaaaattgtttccacatcgaaactcctcaaagtgcaaatctaagccgcaaattgcagccctaaaagaggaaacggaagaagaggtgcaggacaccaggctg

SEQ ID NO: 9680 - DNA, 4440 bp, Artificial Sequence
  derived and/or modified sequence
atgcagcgaagtcccctggagaaggcctcggtcgtgtcgaaactgttctttagctggacccgccctattctccggaaaggataccgacaaagacttgaactttcggacatttaccaaattccaagcgtggatagcgcggacaatctttccgaaaagctcgaacgtgagtgggatcgcgagcttgcatcaaagaagaacccaaagttgatcaatgcactccgccgctgtttcttttggcgctttatgttttacggaatctttctgtatctgggagaagtcactaaagcagttcaacctctccttctcggtcggattatcgcctcctacgatcctgacaataaagaagaaaggagcattgcaatctaccttggaattggcctgtgtctgctcttcatagtccgtactctcctgctgcacccggcaattttcggtctgcaccacattgggatgcagatgagaatcgcaatgttttcgttgatctacaaaaagacgctcaaacttagctcgagggtgctggataagatttcgatcggacaacttgtaagccttctgtccaacaacctgaacaagtttgatgagggccttgcccttgcgcattttgtgtggattgcgcctctccaagtggcccttctcatgggccttatctgggagttgctgcaggcatcggctttctgcggactgggattcctgatcgtgcttgccctgtttcaagcagggctgggacgcatgatgatgaagtaccgcgatcagagagcgggtaagatctcggaacgacttgtgattacttccgaaatgatcgaaaacatacaaagcgtcaaggcttactgctgggaagaagcgatggagaagatgattgaaaacctccggcagactgagcttaagttgactcggaaggccgcatacgtgcggtactttaactcgtccgcgtttttcttttcgggtttcttcgtggtgttcctgtcagtcttgccgtacgctttgataaagggaattatccttaggaagatattcaccaccatttcgttctgcatcgtgctgagaatggcagtgacccgacaatttccctgggcagtgcagacgtggtacgattcgctgggtgcaattaacaagatccaggacttcctccagaagcaagaatacaaaacgctggagtacaatctcactaccaccgaggtggtgatggaaaacgtgactgcattttgggaagaaggttttggagaactgtttgaaaaggcaaagcagaacaacaataaccgaaagacgagcaatggagatgattcgctgttcttttccaacttcagcctgctgggaaccccagtgcttaaggacattaacttcaaaattgaacgggggcagcttcttgcagtggcaggttcaactggagcggggaaaacctctctgcttatggtgatcatgggagagctggaaccctccgaaggtaagatcaagcattccggcaggatttccttctgttcccaattttcgtggatcatgcccggaaccataaaggaaaacatcatttttggagtgtcctacgacgaataccgatataggagcgtgatcaaagcatgtcagctcgaagaggatatctccaagttcgcagagaaggataacatcgtgctcggagaaggcgggattacgctgagcggaggacagcgggcaagaattagccttgcacgtgcggtgtacaaggatgccgacttgtaccttctggattccccatttggttaccttgatgtgctgaccgaaaaagagatattcgagtcgtgtgtgtgcaagctgatggccaataagacgagaatcctggtgacgtccaagatggagcaccttaagaaagcagataagatcctcatccttcacgaaggaagctcctacttctatgggaccttttctgagctgcaaaatctgcaacccgatttctcgtcgaagttgatgggatgtgatagctttgaccaattctcagcagaacgtaggaattcgattctgaccgagacgctgcatagatttagccttgagggtgacgcacctgtctcgtggactgaaaccaagaagcaatcctttaagcagacgggggaatttggggaaaagaggaaaaactctattcttaatcctatcaactccattaggaaattctcgattgtccaaaagacccctctgcagatgaacggcattgaagaagattcagacgaacctcttgaacggaggctgtcgctggtccctgattcggaacaaggagaggctatactcccaagaatttcggttatcagcactggtccaaccctccaggcaagacgcaggcagtccgttttgaatctcatgacccattcggtgaaccagggtcagaatatccatcgtaaaactaccgcctctactagaaaggtgtcgctggcaccacaagctaacttgaccgaacttgacatttacagccgcaggctgtcccaagagactggtcttgaaatttcggaggagataaacgaagaggacctgaaggagtgttttttcgatgatatggaatcgatcccagccgtgacgacgtggaacacttacctccgctacataaccgtccataaatcgcttatctttgttcttatttggtgtctggtgatcttccttgcagaggtcgccgcatccctggtggtgctgtggcttttgggaaacactcctctgcaggataagggaaactcgacgcactcgagaaacaacagctacgcagtgatcataacctcgactagcagctactacgtcttttacatttacgtgggagttgcagataccctgctcgctatgggcttcttccggggtctgcctctggtgcatacccttattaccgtctcgaagattcttcaccataagatgctccattccgtgcttcaggcccccatgtcgaccctcaacactcttaaggcaggagggatattgaaccgatttagcaaggatattgcaattctggatgatctgctgcctctcaccatcttcgacttcattcagctcctgctcattgtcattggagctatagcagtggtggctgtgctgcagccatacatttttgtggccactgtaccggtgattgtggcctttatcatgttgagagcatactttttgcagacctcgcagcaattgaaacaactggaatcggagggtagaagccccatctttacccaccttgttacctcgcttaaaggtctttggactctgcgggcattcggtagacaaccttactttgagactctttttcacaaagcactgaacctgcacactgcaaactggttcctttacctgtcaaccttgcgctggttccagatgcggatcgaaatgatattcgtcattttctttatagccgtcactttcatttccattcttacgactggtgaaggggagggaagagtgggaataatcctcaccctcgcaatgaatatcatgtcaacgctgcagtgggccgtgaatagcagcattgatgtggattcactgatgcggtcagtttcgcgagtgttcaaattcattgacatgcctactgaaggtaagccaaccaagagcaccaagccatacaagaacgggcaactgtcgaaggtgatgatcatcgaaaactcacatgtcaaaaaggacgacatctggccgtccggtggccaaatgactgtgaaggatctcactgcgaagtacactgagggtggaaacgccattcttgagaacatcagcttttccatttcgcctggtcaaagagtgggacttttgggcaggactggatctggaaaaagtacgcttctttccgcattcctccgcttgctcaataccgagggggagattcagattgatggagtgtcctgggactccattacccttcaacagtggcgcaaggctttcggggtgattccacaaaaggtgtttatcttctcaggcactttccgcaagaatctggatccttacgaacagtggtcggatcaggaaatctggaaggtcgcagatgaagtggggctgagatcggtgattgagcagtttcccggaaagctggacttcgtgcttgtcgacgggggatgcgtgctctcacatgggcataaacagcttatgtgtctggcaagatccgtgctctccaaggccaaaattcttcttctggatgaaccttcagcacatttggacccggttacctaccagatcattcgaagaacccttaagcaagcgtttgccgactgcaccgtcatcttgtgcgagcacaggattgaagccatgctggaatgtcagcagtttcttgtcatcgaagaaaacaaagtgagacaatacgactccatccagaaactgcttaatgaaagatccctctttcgccaggcaattagcccatcggacagagtgaaacttttcccccatcggaactcaagcaagtgtaagtcgaaaccgcaaatcgctgcccttaaggaggaaactgaggaagaggtgcaagataccagactt

SEQ ID NO: 9681 - DNA, 4440 bp, Artificial Sequence
  derived and/or modified sequence
atgcagcggagtcctttggaaaaagcctcagtggtatccaagctgtttttttcttggacacggcccatactccggaaaggatatagacagagactcgaactctccgatatttatcagattccctctgtggattctgcagataatctctctgaaaaattagagcgggaatgggatagggaactggcatcaaagaaaaatcctaaactaattaatgctctccgcagatgttttttttggcgctttatgttttacgggatctttctatatctaggggaagtgacaaaagcggtgcagcctctgctcttggggagaataatcgcctcatatgatccagataacaaagaagagcgatctattgccatctatctgggaatcggactgtgcctgctattcatagtgcgaacactgctattacatccagctatcttcggactgcatcatataggaatgcagatgcgaatagccatgttttctcttatctataagaaaactcttaaattaagttctagggtactcgataaaatctcaatcggacagctggtatctttgctatctaataacttgaataagtttgatgaagggctcgcactagcgcatttcgtctggattgcgcccctgcaggttgctttattgatgggactgatctgggaactgttacaagcctctgccttttgtgggctcgggtttcttattgtgcttgctttgtttcaggccggactcggacgcatgatgatgaaatacagagaccagcgagcaggaaaaatatctgaaaggctagtgatcacatcagaaatgatcgaaaatatccagtcagttaaagcttactgctgggaggaagcaatggaaaaaatgatcgaaaacctaaggcagactgaactaaaactcacaaggaaagcggcatatgttaggtacttcaatagttcagctttttttttctcaggattcttcgtcgtgtttctgtccgtcctgccttatgcactcatcaagggaatcatcttgagaaagatcttcacaactatttccttctgcattgttctacgaatggctgtaacacgacagtttccatgggctgtacagacttggtatgattctttgggggcaatcaacaaaatccaggatttcttgcagaaacaggaatataaaacacttgaatacaatcttactactacagaagtcgtgatggaaaacgttactgccttctgggaagaagggttcggagaactctttgaaaaagctaaacagaacaacaataatcgaaaaacttctaacggagatgattctctgtttttttccaatttctctctccttgggactccagttctgaaagatattaattttaagatcgaaagagggcagctgctcgccgtagctgggagtactggggcggggaaaacttctcttctaatggtgatcatgggagagctagagccctctgaagggaaaataaaacactccgggcgaatctctttctgttcacaattctcatggataatgcccgggacgataaaagaaaatatcatctttggggtgtcttatgatgaatatcgataccggtcagtaataaaggcttgccagttggaagaagacatatccaaattcgctgaaaaggataacattgtgttaggggaagggggaattactctctccggagggcagagagcaaggatctctttagctcgggccgtgtacaaagatgctgatctttatcttctggattcacccttcggatatctcgatgtattaactgaaaaggaaatcttcgaatcatgcgtgtgtaaactcatggcaaacaaaacgaggattttggtgacttctaaaatggaacatctcaaaaaagctgacaaaattctgatcctccacgaaggatcaagttatttctatgggacattttcggaactgcagaacctgcagccagatttcagtagtaaactgatggggtgtgatagtttcgatcagttctcagccgaacgacgaaatagtatacttacagaaacactccatcgctttagtcttgaaggagacgcacccgtgtcgtggactgaaacaaagaaacagtcattcaaacagactggggaatttggagagaaacggaaaaattctatcctgaatccaatcaattccattcggaaatttagtatagttcagaaaacgcccttacagatgaacggaatcgaggaagattctgacgaaccactagaaaggagactctcactcgtccctgactcagaacagggggaggcgatcttgccccggatctcggtgatatctacagggcctacgctgcaggcccggagaaggcagtcggttctcaacctcatgacacactcagttaaccagggacagaatatccatcggaaaacaacagcctctactcgcaaagtctctctcgccccacaggccaatctcactgaactggatatctactccagaaggttgtctcaggaaacaggactggaaatctctgaagaaatcaacgaagaagatctgaaagaatgcttctttgacgacatggaatctatacctgcggtaactacttggaacacatatcttcggtatatcactgtacacaaatcgctcatctttgtgcttatctggtgccttgtcatctttcttgccgaagtggctgcaagtttagtggtactatggctcctcggaaacactcctctccaggataaaggaaattccacacattcacggaataatagttatgctgttataattacttcgacttctagttactatgtcttttatatttatgtcggagtggccgatacattattggcaatggggtttttcagaggactccctctggtgcatactctcatcacagtgtccaaaatcctgcaccataaaatgttacattcagtgcttcaggcccctatgtcaactctcaacacacttaaagctggaggaatcctaaataggttctccaaggatatagccatcttagacgatttgctgcccctgactatattcgattttatccagctgctcctgatagtgataggggcaatcgccgtggtcgcagtgcttcagccttatatttttgtggctacagtgccagtaatcgttgcttttattatgctaagagcttattttttgcagacatctcagcaattaaaacaactggaatccgaaggaagatcacccatttttactcacctggttacttcacttaaaggattatggacactacgtgcttttggacgccaaccttactttgaaacactcttccacaaagccctaaatctgcacacggccaactggttcctgtacttatcgacacttcgatggttccagatgaggattgaaatgatatttgtaattttcttcattgccgttacattcatatcaatattaacaacaggggaaggagaaggaagggttggaatcatcctcactctggctatgaatattatgagtacactacagtgggctgtgaattcatctatcgatgtagattcccttatgcggtccgtgagtagagtgttcaaattcatcgatatgccaacagagggaaagcctacaaaatctacaaaaccctacaaaaatggacagctatctaaggtgatgatcatagagaactctcatgtcaagaaggacgacatttggccgagtggaggacagatgacagtaaaagatttaacagcgaagtacactgaagggggaaacgctatcctcgaaaacatctcgttttccataagtcctgggcagcgcgtagggctccttgggcgaacaggatcagggaaatcaactcttctaagtgcatttcttaggcttctcaatacagaaggagagatccagatagatggagtttcgtgggattctataactttacagcagtggcggaaggctttcggggtgattccgcagaaggtttttattttctctggaacatttcggaagaatctcgatccttacgaacagtggtctgatcaggagatttggaaagtggccgatgaagtgggacttaggtccgtgattgaacagttccctggaaagttagattttgtgctcgtggatggagggtgtgtgctttctcatggacataaacagctgatgtgtctagcccgctctgtcttatcaaaagctaaaatactgttgctcgatgaaccctcagcacacctggatcccgttacttatcagatcatcagacggacactgaaacaggctttcgctgattgcacagttatactatgcgagcaccgcatcgaggctatgctcgaatgccagcagtttctagttatagaagaaaacaaagtaaggcagtatgattctattcagaagttactgaatgaacggagtctcttcagacaggcgatatctcccagtgatcgcgtcaaactgttccctcacaggaatagttcaaaatgtaaatcaaagccacagattgctgccctgaaagaagaaacagaggaagaagtccaggatactcgactc

SEQ ID NO: 9682 - DNA, 4440 bp, Artificial Sequence
  derived and/or modified sequence
atgcaacggagcccacttgaaaaggcgtccgtagtgtccaaactcttcttttcgtggaccaggccgatcctccgcaagggatatagacagaggctggaactgtccgacatctaccaaatcccgtcagtcgactctgccgacaatctgtccgaaaagctggaaagagagtgggatcgcgagttggcctctaagaagaatccgaaactgatcaacgcactgcggcgctgcttcttctggagatttatgttttacggaatcttcctctacctcggagaagtgaccaaggcggtccaaccactgctgttgggtcgaatcatcgcatcatacgacccagacaataaggaagagcgtagcatcgctatctacctcgggatcggactgtgcctgctgttcatcgtgagaacgttgctgctgcatccggcaatctttggactgcaccacattggaatgcaaatgcggatcgccatgttcagccttatctacaaaaagactctgaaactgtcgtcgcgggtgctggacaagatcagcatcggacagctggtgtccctgctgagcaataatcttaacaagtttgacgaaggactggcgttggctcacttcgtgtggatcgccccactgcaggtcgccctcctgatgggcctcatttgggaactcctgcaggcctcggcattttgcggccttggttttcttatcgtcctggcgctgttccaggcgggactcggaagaatgatgatgaagtaccgcgatcagcgggcaggtaaaatctcagaacgcttggtcatcacttcagaaatgatcgaaaacattcaatcggtgaaagcctactgctgggaggaggccatggagaagatgatcgagaatctgagacagactgaattgaagctgactcgaaaagccgcctacgttcggtacttcaattcctcagctttcttctttagcggcttttttgtggttttcctctcggtgctgccttacgccttgataaaaggaattatcctgcggaagatcttcactactatcagtttctgtatcgtgctgcgcatggccgtgactcggcaattcccgtgggccgtgcaaacctggtacgattcgctgggagcaatcaacaagatccaggactttcttcaaaaacaggagtacaagactttggaatacaacctcactacgactgaggttgtcatggagaatgtcaccgcattctgggaggaaggcttcggagagctcttcgaaaaggctaaacagaataacaataacaggaaaacttcaaacggtgacgattcgctcttcttctccaatttcagcctgcttggaaccccggttttgaaggacatcaacttcaagatcgaacgcggccaactgctggcagtggccggatccaccggcgcaggaaagacctccctgctgatggtgatcatgggcgaactcgagccgtcagaaggaaaaatcaagcactcaggacgcatcagtttctgctcgcagttttcgtggattatgcccggaaccattaaggagaacatcatcttcggagtctcgtacgatgaatacaggtacaggtcggtgatcaaggcctgccagctcgaagaagatatcagcaagttcgccgaaaaggataacatcgtactgggagaggggggcattactctctcaggagggcagagagctcggattagcctggcccgtgccgtgtacaaggatgccgatctgtatctcctcgattctccatttggctaccttgatgtgctgaccgaaaaggaaatcttcgaatcgtgtgtgtgtaagctcatggcaaacaagactcgcatcctggtcacgtcaaagatggagcacctgaagaaggctgacaagatcctgatactgcacgaagggtcaagctatttctacgggaccttcagcgaactgcaaaaccttcagcccgacttctcatcgaaactcatgggatgtgattcgttcgaccagttctcagccgagcgccgtaacagtattctgaccgaaaccctgcaccggttctccctcgaaggtgacgcccctgtgagctggacggaaaccaagaagcagtccttcaagcaaaccggggaattcggggagaaacgcaagaacagcattctcaacccgattaactcgattcgcaagttttcgatcgtccaaaaaaccccgctccagatgaacggcatcgaagaggatagcgacgaaccactggaacgcagattgtcactggtgccggattccgaacagggagaggctatcctgcctcgcatctcggtgatctccacgggtccaactctgcaagcccgccgcagacagagcgtgctgaacctgatgacccactccgtgaatcaggggcagaatatccacaggaaaaccaccgcgagcacccgcaaggtgtcgttggctccacaagctaatctgactgaactcgacatatactcgcggagactctcccaagaaaccggactcgaaattagcgaggagataaatgaggaagatctgaaagaatgtttctttgacgacatggaatccatccccgccgtcactacctggaacacctaccttagatacatcactgttcacaagtcgctcatctttgtcctgatctggtgcctcgtgatcttcctcgcagaggtagccgcgtccctggtggtgctgtggttgctcggaaacactccgctgcaggacaagggaaactctacccattcccgcaataacagctacgcggtgatcatcacctccacctcatcctattacgtcttttacatctacgtgggcgttgcggataccctgcttgccatgggatttttccgcggcctcccgctcgtgcacactctcatcactgtgagcaaaatcctgcatcataagatgctccactctgtactgcaggctccaatgtccactcttaacaccttgaaagcaggcggcatccttaacagattctcaaaagatatcgcaatcctggacgacctgctccctctgacgatcttcgatttcattcagctccttctcatcgtcattggcgcgattgcggtggtggccgtactgcaaccgtacatctttgtggctactgtcccggtcatcgtggccttcatcatgctgcgggcgtacttcctgcaaacttcgcagcagttgaagcaactcgaatccgaaggcaggtcccctatcttcacgcatcttgtgacctccctgaagggactctggaccctgcgcgcgttcggaaggcagccttatttcgagacgctcttccataaggccctcaatctgcataccgcaaattggttcctgtacctgagcactctgcggtggtttcaaatgcgcatcgagatgatcttcgtgatcttcttcatagcggtgacctttatctcaatcctcacgaccggtgaaggagaggggcgggtcggtatcattctgaccctggccatgaatatcatgtcaaccttgcagtgggccgtcaactcgtccatcgacgtggactcgctcatgcggtcggtgtctcgggtgttcaagttcattgacatgccaactgagggaaagcccactaagtccaccaagccatacaagaacggtcagctttccaaggtcatgatcatcgagaacagccatgtgaagaaggacgacatctggcctagcggtggacagatgactgtgaaagatctcacggccaagtacacggagggagggaacgctatcctggagaacatttcgttttcgatctcgccgggacagcgcgtcggactcctcggccgcactggatcgggaaaaagcactctcttgtccgcgttcctgagactgctcaacactgagggggagattcagatcgacggtgtctcttgggattccattacccttcagcagtggcggaaggccttcggggtgatcccgcagaaggtgttcattttcagcggcactttccggaagaacctggacccgtacgaacaatggtccgaccaagaaatctggaaagtggcggacgaggtgggactgcgctccgtgatcgaacagtttcccgggaagctggacttcgtgctggtggacggaggctgcgtccttagccacggtcataagcaactgatgtgcctggcaagatcagtcctcagtaaagcgaagatcctgctcctggatgagccgagcgcgcacctcgatccggtgacttaccagatcatcaggcggactctgaaacaagcgttcgctgattgcaccgtcattctctgcgagcatcggatcgaggcaatgcttgagtgccaacagttcctggtgatcgaggagaataaagtacggcagtacgactcgatccagaagttgttgaatgaaaggtcgcttttccgtcaggctatctcccccagcgatcgcgtcaaattgtttccacaccgcaacagttctaaatgcaagagcaagcctcagatcgcagcactgaaagaggaaaccgaagaagaagtgcaagacacccggttg

SEQ ID NO: 9683 - DNA, 4440 bp, Artificial Sequence
  derived and/or modified sequence
atgcagaggagccctctggaaaaagcgtcggtcgtctcgaagctgtttttctcctggaccaggcccatcctccgcaaggggtacagacaacggctcgaacttagcgacatctaccagataccgtccgtcgactccgccgataacttgtcggagaagttggagagggaatgggaccgggaactggcatccaagaaaaacccgaagctcatcaatgccctgcgccgatgttttttctggagattcatgttttacgggatttttctctacctgggtgaagtaaccaaagcggtccaaccgctgctcctgggaaggatcatcgcgtcgtacgacccagacaacaaggaggaacgctccatcgcaatctacctcggaatcggtctgtgccttcttttcatcgtgcgcactctgctgctccatcctgctatcttcggactccatcatattggcatgcagatgcgcatcgccatgttttctctgatctacaagaaaaccttgaagctgtcaagccgcgtgctggataagatcagcattggtcaacttgtgtcacttctgtcgaataatctcaataagttcgacgaaggactggctcttgctcatttcgtgtggatcgcgccattgcaggtggccctcctgatgggactcatatgggaattgctccaggcctccgcgttctgcggactgggtttcctgattgtgctcgcactgtttcaggcgggattgggtagaatgatgatgaagtaccgggatcagagagccgggaaaatctccgagagactcgtcatcacttcagaaatgattgaaaacatccagtcggtcaaggcatattgctgggaggaagccatggagaaaatgatcgaaaacctgcgacagactgagctcaagctgaccagaaaagccgcgtacgtgcgctacttcaattcctcggcctttttcttctcgggattctttgtggtgttcctgagcgtcctgccttacgctctgatcaagggaattatcctgcgtaagatcttcactacgatatcattctgcatcgttcttaggatggccgtgacgcgccaattcccatgggcagtgcagacctggtacgactccctcggagccattaacaaaatccaggacttcttgcaaaaacaggaatacaaaaccttggaatacaatctgaccactacggaagtggtgatggagaatgtgaccgcgttctgggaggaaggattcggcgagttgttcgagaaggcgaagcagaacaacaacaatcggaaaacttctaatggagacgattcattgtttttctcgaacttcagcttgctcggaaccccggtcctgaaggacatcaacttcaaaatcgagcgcgggcaactcttggccgtggctggatcgaccggcgcgggaaagacctccctgcttatggtgattatgggggaactggagccgtcagagggaaaaatcaagcactcgggacgtatctcattctgctcgcagttttcgtggattatgccaggcaccattaaggagaacatcatctttggcgtgtcgtacgatgaataccgctaccgctcggtcatcaaggcatgccagctggaggaagatatcagcaagtttgcagagaaggataacatcgtcctgggtgagggcggaatcactttgtcgggaggacaacgggccaggatcagcctggccagagcagtttacaaggacgccgacctgtacttgctggactcgccgtttggctacctggatgtcctcaccgagaaggagatattcgaatcgtgtgtctgcaagctgatggctaataagacccgcatcctggtgacctctaagatggagcacctgaaaaaggctgacaagatcctcatcctgcacgaaggctcttcctacttctacgggaccttcagcgaactccagaacctgcagccggacttcagttcaaagctgatgggttgcgattcgttcgatcagttcagcgccgaaagacggaattcaatcctgactgaaactctccacagattcagtctcgagggtgacgcaccagtgagctggacggaaacgaaaaagcaatcgttcaagcaaactggggaattcggagagaaacgcaagaacagcatcctgaatcccatcaactcaattaggaagttttcgatcgtgcagaaaactccgctgcaaatgaacgggattgaagaggactcggacgagccgctcgagcgccgactctccttggtaccggattcggaacagggcgaagcaatcctgccgcgcatctcagtgatatcaaccggccctaccctgcaagcgcggcgcagacagtccgtgctcaacctgatgactcactcggtaaaccagggtcagaacatccaccgtaaaacgactgcatcgacgaggaaagtttcgctggctccgcaggctaacctcactgaactcgacatctacagccggcgcctcagccaggaaaccggactcgagatcagcgaggagattaacgaagaagatctgaaggagtgcttctttgatgatatggaatcgatccccgcagtgaccacttggaatacctatctcagatacatcacggttcacaagtcgctgatcttcgtcctgatctggtgtctggttatcttcttggccgaggtggccgcctcgctcgtggtgctttggctcttgggaaacaccccgctgcaggataagggaaactccactcactccaggaacaactcctacgcagtcatcattacctcgacttcctcctactacgtattctatatctacgtgggagtggcagatactcttcttgctatgggatttttcagaggcctgccgctggtgcatactctcatcaccgtgtctaagatcctgcaccacaagatgttgcattctgtgctgcaagctccaatgtcaactctgaacactctcaaggccggaggtattctgaaccggttttcaaaggatattgcaatcctcgacgacctcctcccgttgactatcttcgactttatccagctcctgctgatcgtcattggagccatagcagtcgtggccgtgttgcagccgtacatcttcgtggcaaccgtgccagtcatcgtggcgttcattatgctccgggcgtacttcctccaaacttcacaacagctgaaacaattggaatcagaaggacggtcgccgatctttactcatcttgtcaccagccttaagggcctgtggaccttgagggccttcggacgccagccatacttcgaaactcttttccacaaagccctcaatctgcacaccgccaactggttcctgtatctctccaccctccgctggtttcaaatgcggatcgaaatgatcttcgtgatcttcttcatcgctgtcacttttatcagcatcttgaccactggagaaggagaaggaagggtcgggattatcctgaccctggcaatgaatatcatgagcactctgcaatgggccgtgaactcgagcatcgatgtggactcactgatgcgctccgtctcgagagtgttcaaattcattgatatgccaaccgagggcaaaccaaccaagtcaactaagccgtacaagaatggccagctttccaaagtcatgatcatcgagaactcccatgtgaaaaaggacgacatctggccatccggaggacaaatgaccgtgaaggatctgactgctaagtacaccgaaggcggcaacgctattttggagaatatcagctttagcatatcaccaggtcagagggtcggactgctcggccgaacgggaagcggtaagtccacccttctcagcgccttcctgcggcttcttaataccgagggagagattcagattgacggggtgagctgggactccatcaccctccagcagtggcgcaaggctttcggcgtgatccctcaaaaggtgttcatcttctcaggcacgttccggaaaaacctggacccttacgaacaatggtcggaccaggaaatctggaaagttgcagacgaagtgggcctgaggagcgtgatcgagcagtttcctgggaagttggatttcgtgctcgttgacgggggttgcgttctttcacatgggcacaagcagctgatgtgcctggcgagaagcgttctgtcaaaggcgaagattctgctgctggacgaaccctccgcgcatctggatcccgtcacctaccaaatcatcagacggacgttgaagcaagcctttgcggactgtaccgtgatcttgtgcgaacaccggatcgaagctatgctggagtgtcagcagttcctggtcatcgaagagaataaagttcggcagtacgactcgatccagaagctcctgaatgaacgcagtctgttccgccaagccatcagtccgtccgatagagttaagctgtttccccaccggaactcgtcaaagtgcaaaagcaagcctcaaatcgcagctttgaaggaggagactgaagaagaggtgcaagatactagactg

SEQ ID NO: 9684 - DNA, 4440 bp, Artificial Sequence
  derived and/or modified sequence
atgcaaaggagccccctggagaaggcatcagtcgtgtctaagttgttcttttcctggactagaccaattctgagaaaaggctacagacaaagacttgagctttccgacatttaccaaatcccatcggtcgactcggctgacaacctgtctgaaaagttggaacgcgaatgggatcgtgagctcgcaagcaagaaaaatcccaagttgattaatgcactccgccggtgtttcttttggcgcttcatgttctacgggatatttctttacctgggagaggtgaccaaggccgtgcagcctctgcttcttggaagaatcattgcatcgtacgacccagacaataaagaggaaaggagcattgcgatttacctggggattggactgtgccttctctttattgtgagaactttgctgctgcatcctgcaatcttcggactgcatcatattggaatgcagatgagaattgcaatgttctccttgatttacaaaaagaccctgaagctgtcgtcccgcgtgctcgacaagattagcattggtcaactcgtgtcactcctgtccaacaatctgaacaagtttgatgaaggcttggcactcgcgcactttgtctggatagcacctctgcaggtcgcactgcttatgggccttatctgggaactgctgcaggctagcgccttctgtggactgggatttcttatcgtgctcgccctgtttcaagctgggctgggaagaatgatgatgaaataccgggatcagcgggcaggcaagataagcgagaggctggtcatcacctcggagatgatcgagaatattcaaagcgtgaaggcatactgttgggaggaagcaatggaaaagatgattgagaatttgcgccagaccgaacttaagctcactagaaaggcggcctacgtgcggtacttcaactcgtcagcatttttcttctcagggttttttgtggtgttcctgtcagtgttgccctatgcgctgatcaagggtatcattctgcggaagatctttactaccatctcgttttgcattgtcctgcgcatggcagtcactcgccagtttccttgggctgtgcagacctggtacgattcccttggtgcaatcaacaaaattcaagattttcttcagaaacaagaatacaagactttggaatacaatctgactacgaccgaggtcgtcatggaaaacgtcaccgcgttctgggaggaggggtttggcgaactgtttgaaaaagcaaagcaaaacaacaacaatagaaagacgtcaaacggagatgattcgcttttcttttcgaacttttcgcttttgggcactccagtgttgaaggacattaacttcaagatcgagaggggacaacttctggcagtggcaggatcgaccggagcaggaaagactagccttctgatggtgataatgggggaacttgagccttcggagggcaagatcaagcattcgggcaggataagtttttgttcgcaattctcatggataatgcctggcactatcaaggaaaacatcatctttggtgtgtcctacgatgagtaccggtacaggtcggtcatcaaggcctgccaactggaggaagatatatcgaagtttgcggaaaaggataacattgtgctgggagaaggtggaatcacgctgagtggtggccagcgcgcgcgtattagcttggcccgagcagtgtataaggatgcagacctgtacctgcttgattccccctttggctacctggatgtgcttaccgagaaggaaatcttcgagtcttgcgtgtgtaagttgatggcgaacaaaactagaattctcgttacttctaaaatggagcatctcaagaaagccgataagattcttatcctccatgaaggttccagctacttctacggtactttttcggagcttcagaatctgcaacccgacttttcgagcaagctcatgggatgtgatagttttgatcaattttctgccgaacgccgcaactcgattctgaccgaaactcttcatagatttagccttgaaggtgatgcccccgtcagctggacggagactaagaagcaatcatttaagcaaactggagaatttggagaaaagagaaaaaacagcattctgaatcctatcaattccattcgcaagttttccattgtgcaaaagaccccactgcagatgaacggaattgaagaagatagcgatgaaccgctggaaagacgcctttcacttgtgcctgattcagaacagggagaagctattttgccgagaatctcggtcatctcgactggacctactcttcaagcaaggcggcggcagtccgtgctgaaccttatgacgcactcagtgaaccaaggccagaatattcatcggaaaactactgcatcgactagaaaggtttcgctggcaccccaggcaaatctgaccgaattggacatttactcacggcggctgtcacaggaaaccggtctggagattagcgaagagattaacgaagaagatctgaaagaatgcttctttgatgatatggagagcatacctgcagtgaccacctggaatacttatctccggtacataaccgtgcacaagagcctgatctttgtgctgatttggtgtcttgtgatttttctggcggaagttgcagcgtcgctggtggtgctttggctgttgggtaatactcctctccaggataagggaaattcgactcattccagaaacaactcctacgcagtcatcatcacctccacgagctcctactacgtgttttacatttacgttggagtcgcagacaccctcctggcaatggggttctttcgcggattgcctctggtgcatactctgattaccgtatctaagattctccaccacaaaatgctgcactcagtgctgcaagctcccatgtccacccttaacacccttaaggcaggcggaattttgaaccgattctccaaagacatagcgattctggatgatctgcttcctttgaccatttttgatttcattcagctcctcctgattgtgattggagcaatcgcagtcgtggcggtgctccaaccatacattttcgttgcaactgtgcctgtcattgtggcattcatcatgttgagagcatactttcttcaaacttcacaacaactgaagcaactggagtcggaaggaagatcaccgattttcacccatcttgtcacttccctgaaaggactctggactttgcgtgcattcgggcgacagccgtactttgaaaccctgtttcataaggccctgaatctgcacactgctaattggttcctgtatctgtcaactcttcggtggttccaaatgcgtattgaaatgatttttgttatcttcttcattgcggtgaccttcatttccatactcaccacgggggaaggtgaaggacgcgtgggaatcatcctcaccctggcgatgaacattatgtccactctccagtgggccgtcaactcgtcgattgacgtcgatagccttatgcgtagcgtgtctagggtgttcaaattcattgacatgccgacggaaggcaagcctactaaatccacgaaaccatacaaaaacggtcaactttctaaagtcatgattatcgaaaactcgcacgtgaaaaaagatgacatctggccgtcaggtggacagatgactgtgaaagatctcactgcaaaatacaccgaaggcggtaatgcaatcctggaaaacatctccttttcaattagcccaggacaacgcgtgggtttgcttggcaggactgggtcagggaagtcgacgcttttgtccgccttcctgagactcctgaatacggagggcgaaattcagattgatggcgtgtcgtgggactcgataactcttcagcagtggcgcaaggcttttggggtcattcctcagaaggttttcatcttttcaggcacctttcggaagaatctcgatccttacgagcaatggtcggatcaagaaatatggaaagtggcagatgaggtcggactccggtccgtgattgagcaattcccaggcaagttggatttcgtgctcgtggacggaggatgtgtgctgtcacacggtcataagcaacttatgtgtcttgcccgttccgtgctctcaaaggcaaagatactgctcctcgacgaaccttcagctcacctggacccggttacttaccagattatcagacggaccctcaagcaggcatttgcggactgtacggtcatactgtgtgaacatcgcatcgaagcgatgcttgaatgtcagcaatttctggtgattgaggaaaacaaggtgcgtcaatacgattccatacaaaagctcctgaacgagagatcgctttttaggcaggcaatctcaccttcggatcgggtgaagctctttccccacagaaactcgtcgaagtgcaaatccaagccacagattgcggcactcaaggaggaaaccgaggaggaagtgcaagatactcgcctc

SEQ ID NO: 9685 - DNA, 4440 bp, Artificial Sequence
  derived and/or modified sequence
atgcagaggagtccactcgagaaggcttctgtggtgagcaagttgttcttttcatggacacgccctatcttgcgaaaggggtataggcagcgcctggagctgtcagacatttatcagatcccatcggtggattccgcagataacctgtccgagaagctggaacgggagtgggatcgcgaactggcgagcaagaaaaatccaaagctgattaatgcgctacgccggtgctttttttggcgatttatgttttacggaattttcttgtacctgggtgaagtaacgaaagcagtccaacctctcctgctggggcgcataattgcctcatatgacccagacaacaaggaagaacgtagcatcgcgatttatctgggcattggactgtgtcttctgttcatagttcgtacgttgctgcttcacccggccatcttcggtttacaccacatcggtatgcagatgcgcatagcaatgtttagcctaatctataaaaagacgctcaagctgagcagccgagtgctggacaagatcagcatcggtcaactggtgagcctgctctccaataaccttaataagtttgacgaaggtctggctctggctcatttcgtttggattgcgcctctccaggtggcgctactgatgggactgatttgggagctgctgcaggcgagcgcattttgcggactgggcttcctgatcgttttggcgctgtttcaggccggcctcggcagaatgatgatgaagtatcgcgaccagcgcgccggtaagatcagcgagagactggttatcaccagcgagatgattgagaacatccagagcgtcaaggcttactgctgggaagaggcaatggagaaaatgatagaaaatctgcgtcaaactgagctgaaactcacaaggaaggcggcctacgtcaggtatttcaactcaagcgcatttttctttagcggcttcttcgtcgtttttctgtcagttcttccttatgcgctgattaaaggtattattctgcgcaagatcttcaccacgatctcgttctgcattgtgttacgtatggccgtcactcgccagttcccctgggcggtccaaacttggtatgattccttgggcgccattaacaagattcaggatttcctccagaagcaggagtataagactttagagtataacctgacgactacggaggtcgtgatggagaatgtgactgcattttgggaggagggattcggcgaactctttgagaaggcaaagcagaacaacaacaatagaaaaacgagcaacggtgacgactccctgtttttctcgaactttagcctgctgggaacgccagttctgaaggatattaacttcaagatcgaacgcggccagcttctggcggtggcaggcagcacgggcgctgggaaaacttcgctgttaatggtgataatgggggaactggaaccgtcagaaggcaaaatcaagcacagcggtcgcattagcttctgtagccagttcagctggattatgcctggaaccatcaaagaaaatataattttcggagtgagttacgatgagtaccggtaccgctctgttattaaagcatgccagctggaggaagatatcagcaagttcgcagaaaaggacaacatagtcctgggcgagggaggcattacgcttagcgggggccagagagctcggatctcactggcgcgtgcagtctataaagatgcagatctttacctgttggattcaccgttcggttacctggatgtcctgacggaaaaggaaatttttgagagctgcgtttgcaagctgatggccaataagacgcgcatattggtgactagcaagatggaacatctgaaaaaggcggataagattctgattctgcacgaggggtcttcctatttctatggtacattttctgagctgcaaaacctgcaaccagatttttcaagcaaactgatgggctgcgatagcttcgatcagttctccgccgagagacgcaacagcatcctcacagagacgcttcaccgcttcagcttagaaggtgacgcgcccgtctcttggactgaaacaaaaaagcagtcctttaagcagactggcgaattcggcgagaagaggaagaattccattttgaacccaattaacagtattaggaagtttagcatcgtccaaaagaccccactgcaaatgaatggcattgaggaggattctgatgagccactggaacgtcgcctctcgctggtgccagacagcgagcaaggagaagcgatcctgccacgcatcagcgtgatcagcaccggcccgactctgcaggcgcgcaggcgtcagagcgtcctgaatctgatgactcattctgtgaaccagggtcagaacatccaccgtaaaacgactgcgagcacgagaaaagtatcgctggcgccacaggccaatctgaccgaactggatatttacagccgccggctgtctcaggagactggtctggaaatttcagaagagatcaacgaggaagacttgaaagagtgcttctttgacgacatggagtccattccagcggttaccacgtggaatacttatctccgctatattactgttcacaaaagcttaatcttcgttctgatctggtgtctggtgatcttcctcgcagaagttgcggcaagcctggttgtgctctggctgttgggcaacactccactccaggacaagggtaacagcacgcacagccgtaacaacagctacgctgtgattataacgagcacgagcagttactatgtcttctacatttacgtgggtgttgcggacaccctgcttgccatgggtttcttccggggcttaccactagtgcacacgctcatcacggtgtctaagatcttacaccacaagatgcttcatagcgtactgcaggcccctatgtcaaccttgaataccttgaaagccggtggaattctaaaccggttcagtaaagacatcgccatcctggatgatctgttgcctctcactatctttgattttatccagctgctgttaattgtaatcggggcaattgccgttgtggccgttctgcaaccgtatatattcgtcgctaccgtgccagttattgtggcgtttattatgctcagggcctattttctgcagacgtctcaacagctgaagcagctggaaagcgaaggtcgtagccctatcttcactcacctggttacgtccctcaagggtttgtggactctgcgcgccttcggccgccagccttactttgagaccctgttccacaaagctttaaatcttcacaccgcaaactggttcctgtatctgtctacactgcgatggtttcaaatgcgcattgagatgattttcgttatcttttttattgcagtgactttcatcagcatcctgactacgggagaaggtgagggtcgggtcggtataatcctgacgctggctatgaatattatgagtactctgcagtgggccgttaattccagcatcgacgttgatagcctgatgcgcagcgtttcccgcgtgtttaagtttattgacatgccgactgaaggtaaaccaacgaagagcaccaagccatataaaaacggccaactcagcaaagttatgatcattgagaattctcatgtcaaaaaggatgatatctggcctagcggtggccagatgactgtgaaagacttgacggccaagtacactgaggggggcaatgccatcctggaaaatattagcttcagcatctccccgggccaacgcgtcggcctgctggggcgcaccggtagcggtaagtccacactgctgagcgctttcttgcgcctgttgaatactgaaggggagattcaaatcgatggcgtgagctgggatagcatcacgctgcaacagtggcgaaaagccttcggggttattcctcaaaaggtgttcatcttcagcggaacattccgcaagaatctagacccgtacgagcagtggagcgaccaagaaatttggaaagttgctgacgaggttgggctacgcagcgtgattgagcagttcccaggcaagctggatttcgtcctcgtggacggcgggtgcgttcttagccatggtcataagcaacttatgtgcctggctcgcagcgtactaagcaaagcaaagattctcctgcttgacgagccttctgctcacctggacccagtcacgtatcaaataatccgtcgcaccctgaaacaggcatttgctgactgtacagttattctgtgcgaacatcgcatcgaggcaatgctagagtgccagcagttcctagtgatcgaggaaaataaagtacgtcagtacgattcaatccaaaaactgctgaacgaacgaagcctgtttcgccaagctatcagcccatcagacagggtgaaactgttcccacacaggaatagcagcaaatgtaagagcaagccgcaaattgccgccctgaaagaagagacggaagaagaagtgcaagatactcgcctt

SEQ ID NO: 9686 - DNA, 4440 bp, Artificial Sequence
  derived and/or modified sequence
atgcagagatccccgctcgaaaaagcatccgtggtgagcaaattgtttttcagctggactagacctattcttcgcaaggggtaccgccagcggctcgaactctcggatatctaccaaattccttcggttgatagcgctgacaatctctcagagaaactggagcgcgaatgggatcgcgaactggcatcgaaaaagaatcctaagctcataaacgcgctgcgtagatgcttcttttggcgctttatgttctatgggatatttctttacctgggtgaggtgactaaggccgtccaacctcttcttctcggaaggattatagcctcctacgatcctgataacaaggaggaacgatccatcgccatttacctggggatcggtctgtgtttgctctttatagtgcggacccttctccttcatccagcaattttcgggctccaccatatcggaatgcaaatgcggattgctatgttttcgctcatctacaagaaaacgctgaaactttcgtcaagagtgctcgacaagatctcgataggacaattggtgtcgcttctctcaaataaccttaacaaattcgatgaaggcctcgcactggcccattttgtctggatcgcaccactgcaagtggcacttcttatgggcttgatttgggaactcctgcaggcgtccgccttttgtggacttgggtttcttatcgtactcgcgctttttcaggctggccttggaagaatgatgatgaaataccgggaccaaagggcgggtaagatatccgaaagacttgtgattacctccgaaatgatcgagaatattcagtccgtcaaggcgtattgttgggaagaagccatggaaaagatgattgaaaacctgcggcagaccgaactcaaacttacccgaaaggcggcatacgtgcgctacttcaactcctcggcattctttttctccggcttcttcgtggtgtttctgtccgtgctgccttacgcactgataaagggaatcatactccgcaagattttcaccacgatatcgttttgcattgtgcttagaatggcagtcacccgacagttcccatgggccgtgcaaacctggtacgactcactcggagcaatcaacaagattcaagactttttgcaaaagcaagaatacaaaacccttgaatacaatctcaccaccaccgaagtggtcatggagaatgtgaccgcattttgggaagaaggattcggagagctcttcgaaaaggcaaaacagaacaacaataacagaaagacgtcaaatggggatgactccctctttttcagtaatttctcgctgcttggaacgcctgtgctgaaggacattaactttaagatcgaacgcggacaactcctggcagttgcaggtagcactggtgctggtaagacttcgctgctgatggtgattatgggtgaacttgaaccttctgagggtaagattaagcattcgggtcggatatcattctgtagccagttttcctggatcatgcccggtaccattaaagagaacattatctttggagtgtcatacgacgagtatcggtaccgttcggttatcaaggcatgtcaactggaagaggatatttctaagtttgcagaaaaggataacatcgtgcttggagaaggtggaattaccctgtcgggtggccaacgggcaagaatatctcttgctcgggcagtctacaaggacgcagatctgtacctgctcgactcaccctttggatacctggacgtccttactgagaaagagattttcgaatcatgcgtgtgtaagctcatggcgaacaagacgcgaatcctggtgacttctaagatggaacatcttaagaaggccgacaagatactgatcctgcatgaaggctccagctacttctacgggactttttctgaacttcagaatctgcaacctgatttttcatccaaacttatggggtgtgattcgtttgaccaatttagcgccgaaaggcggaactccattctcactgaaacgctgcatagattttcacttgagggggacgctccagtatcctggactgagactaaaaagcagagctttaagcaaacgggagaatttggagagaagcgaaagaacagcattctcaatcccatcaatagcattcgaaagttttcaatcgtccagaaaaccccactgcaaatgaacggaattgaggaagattcggatgagccccttgagagacgcctgtccctcgtgcctgattccgagcagggtgaagccattttgccaagaatatcagtgatctcgaccgggcccacccttcaagcacgtaggaggcagagcgtccttaacctgatgacccactcggtgaaccagggccaaaacattcatcgcaaaactactgctagcacccgcaaggtaagccttgcaccacaggcaaacttgactgaattggacatctactcccggagactgtcacaggaaacgggccttgagattagcgaagagattaacgaagaggaccttaaggagtgcttttttgatgacatggagagcataccagccgtgactacctggaacacctaccttcggtacatcactgtgcacaaatccctgatcttcgtgctcatttggtgtctggtgatattcctggcagaagtggctgcgtccctggtggtcctttggcttctgggcaacaccccgctccaagataaggggaattcgactcacagccgaaacaactcctacgccgtcatcatcacttccacctcctcttactacgtattctacatctacgtgggagttgcggacaccttgcttgcaatgggctttttccgaggcctgcctctcgtccacacgctcattaccgtgtcgaagattctccatcataagatgctgcattcagtgcttcaagcaccaatgtcgacgctcaacaccctcaaggcgggcggaattctgaataggttttccaaggatattgcaatcctggatgatctgttgcccctgaccatttttgacttcattcagctgcttttgatagtcatcggcgcgatcgcagtcgtggcggtcctgcaaccttacatcttcgtggcaaccgtgccagtgattgtggcatttatcatgctgcgggcatatttccttcagacctcgcagcaacttaagcaactggagtcagaagggagatcacccattttcacgcacctggtcacgtccctgaaaggactttggacccttagagcattcgggcgccagccatacttcgaaacccttttccacaaggcactgaaccttcacaccgccaattggtttctctacctgagcaccctgagatggtttcagatgaggatcgagatgatcttcgtgatctttttcatcgcagtgaccttcatttcaattctgactactggagaaggggaagggcgggtgggaatcattctcacgctggctatgaacataatgtcgacccttcaatgggcagtgaacagttcaatcgatgtggattccctgatgagatccgtgtcaagagtctttaagttcatcgacatgccgacggaagggaaacccactaagagcacgaagccatacaagaatgggcagctttcgaaggtcatgattattgagaattcccatgtgaagaaagatgacatctggccttcaggtggccagatgaccgtaaaggatctcactgccaagtataccgaaggcggaaacgctatcctggagaacatatcatttagcatatcgccgggtcaacgcgtcggtctgctgggtcgtacggggtcgggaaagtcaactctgctgtcagcgttcctccgccttttgaacactgaaggagagattcaaattgatggagtctcgtgggattccattaccctgcagcaatggcgtaaagcctttggtgttatcccacaaaaagtgttcatcttttcgggaacttttagaaagaaccttgatccatacgaacaatggtccgatcaggaaatttggaaggtggcagacgaagtgggacttcgctccgtgatcgaacaatttccaggtaaactggattttgtgctggtggacggtggatgcgtgcttagccacgggcataaacaattgatgtgcttggcaagatcggtcctgtccaaggcgaaaatacttttgcttgatgagccctcggcacatcttgatcccgttacgtatcagattatccgtagaaccctgaaacaggcctttgcagattgtactgtgattctttgtgagcataggattgaagcaatgctggagtgtcaacaatttctggtgattgaagagaacaaggtgcggcaatacgattcgatccaaaaacttcttaatgaacggtcactttttagacaggcaatttcccccagtgaccgtgtgaagttgtttcctcatcggaattcatccaaatgtaaatcaaaaccacagattgcagctcttaaggaagaaactgaggaggaggtgcaggatactcgtttg

SEQ ID NO: 9687 - DNA, 4440 bp, Artificial Sequence
  derived and/or modified sequence
atgcagaggagcccacttgagaaagctagcgtggtgagcaaactcttctttagctggacacggcccatcctgaggaaaggctatagacagcgcctggaacttagcgacatctatcagattccttctgtagactccgccgacaatttatctgagaagctggagcgggagtgggaccgtgagctggcctccaagaagaatcccaaactaataaatgccctcaggcgctgttttttctggcgctttatgttttacggaattttcctctatctgggggaagtaaccaaagccgtccaacccctgcttttagggcgtataatagcctcatatgatccagataataaagaggaacgcagtattgccatctatctgggcatcggcctgtgtcttctatttatcgttaggactctgctactacatccggctatttttggcctgcaccacatcggcatgcagatgcgtatcgccatgttttctttgatttataagaaaaccctcaagctgagttcaagagttctggataagatttcgatcggccagttagtctccttgctatcgaacaatctgaacaagtttgacgaaggccttgccctcgcccactttgtttggatcgctcccctccaggttgccctgcttatggggctgatctgggagctgcttcaggccagcgccttctgtggtttggggtttctcatcgtgctggctctcttccaagccggcctggggcggatgatgatgaagtatagagatcagcgggctggaaaaatcagcgaacgactcgtgattacctcagaaatgattgaaaatatccagtcagtgaaggcttattgctgggaagaggcaatggagaaaatgatcgagaatctcaggcaaactgagctcaaattgacgcgcaaagccgcatacgtgaggtactttaatagtagcgctttcttcttcagtggctttttcgtcgtgtttctgtccgtgttgccttatgctctgattaagggcatcatcctgcgaaagattttcactacgatctctttctgcatcgtgttgcggatggccgtgactcgacagtttccctgggctgttcagacttggtatgacagcctcggcgctatcaacaagatccaggatttcctgcagaagcaagagtacaagacattggagtacaacctgaccacaactgaggtagtgatggaaaacgtgaccgccttttgggaggaggggtttggtgagctgtttgagaaagcaaagcagaataacaacaataggaaaacatcgaatggagacgattcacttttctttagtaatttctctctattggggaccccagtccttaaggatataaatttcaagatcgagagaggacagctgctagccgtggccgggtccactggcgccgggaagaccagcctgttgatggttatcatgggcgaactagagccttccgaaggaaagatcaagcacagcggacgcatcagcttctgttcccagttttcgtggataatgcccggcacgatcaaggagaacattatcttcggcgtgagttacgatgagtacagatatcgaagcgtcatcaaggcctgtcagcttgaagaggatatcagcaagtttgcagaaaaagacaatatcgttctgggggagggtgggatcacgcttagcggtggacagcgtgccagaatctcactggcacgcgctgtgtataaggatgcggacctgtatctgctcgattccccttttggttatctcgatgtcctgacagaaaaggagatctttgaaagttgcgtatgtaagctgatggccaataagaccaggattctggtcactagcaagatggaacacctgaagaaggctgataagatcctaattcttcacgaaggcagctcatacttctacggaactttctctgagctccaaaacctacagcccgacttctcctctaagcttatgggttgtgacagctttgaccaattctcagcggagcgtagaaatagtattctgaccgagaccctccatcgattctctctcgagggtgacgccccggtgtcatggacagagactaagaagcagtcttttaaacaaacaggagagtttggcgagaaacggaagaatagcatcctgaaccccatcaatagcattcgtaaattttccatcgtacagaagaccccactgcagatgaacgggatcgaagaggattcagatgaacccttggagcggaggctgagcttagtccctgacagtgaacagggagaagcgattctgcctcgaatctctgttatatccaccggcccgaccctccaagcgagacggaggcaatcagtgcttaatctcatgactcactctgtcaatcagggacaaaacatccacagaaagacaactgcatccacacggaaagtgagtctggccccccaggcgaacctaaccgagctagatatctatagtcggcgtttgagccaagaaactgggcttgagatcagcgaagagatcaatgaagaggatcttaaggaatgtttcttcgacgatatggagtccatccccgctgtgaccacttggaacacttatctgcgatacatcacagtccataaatccttaatattcgttctgatttggtgtcttgtaatttttctcgcagaggtggccgcatccctcgttgtgttgtggctcctgggcaacacaccactccaagataagggcaacagtactcatagtaggaacaatagctatgctgttattattacctcaaccagttcttactacgttttctatatctacgtgggcgtggcagacaccttgctggcaatggggttcttcagagggctccccttggtgcacaccctgataacggtctccaagatcctacaccataagatgttgcatagtgtcttacaggcccctatgtctaccttgaatacactgaaagccggggggatactgaatagattctccaaagacatcgctatcctggatgacctgctgcccctgacaatctttgattttattcagctgcttctcattgtgatcggggcgatcgcagtcgtggcagtgttgcagccgtatatattcgtagctaccgtgcctgtgatcgtggcattcattatgctgcgagcttatttcctccagaccagccagcagttgaagcaactcgaaagcgaaggcaggtcacccatctttacacatctggtaactagtctcaaaggtttatggacattgagagccttcgggcgacagccatatttcgaaaccctgtttcacaaggccctgaacctccatacagccaactggttcctttacctatctactttaaggtggtttcagatgcgcatcgaaatgatcttcgtcattttcttcatagctgtgacatttataagcattctgaccaccggcgagggggaaggcagagtgggcattattctgacactggcaatgaacatcatgtcgaccttgcaatgggcagtcaattcgtccatcgacgtagactctttaatgaggtcagtgtctcgcgtgttcaaatttattgacatgcctacagagggtaaaccaacaaagtccaccaagccatacaagaacggccagctgagtaaggttatgattattgagaactcccacgtcaaaaaggacgacatatggccaagcggagggcagatgactgtgaaagatttaactgcaaaatatacagaaggtggcaacgcaatcctagagaacatcagcttctctatatcacctgggcagagggtgggactgttaggccggacagggtctgggaagagcacattgctgtcagcttttctccgtctcctgaacactgagggggagatacaaattgacggagtttcttgggatagcatcactctgcaacagtggaggaaggccttcggcgtcatcccccaaaaagtctttatcttctctggaacatttcgcaagaatttggatccttatgaacagtggtcggatcaggagatctggaaggtcgcagacgaggtagggttgcgcagtgttatcgagcagttccctgggaagctggacttcgtgctggtggatggtggctgcgtcctgtcacacgggcataagcagttgatgtgtctggcccgcagcgtcctgagcaaagccaaaattcttttgttggatgaaccttctgcccatcttgatcctgtgacctatcagatcatacgaaggaccttgaagcaagccttcgccgattgtaccgttatactgtgcgagcaccggatcgaggcaatgctggagtgtcagcagttcctggtgattgaggaaaacaaagtgcggcaatatgatagcattcagaagctgctgaacgaacggagtctgtttcggcaggcaatctccccatcagatcgggttaaactgttccctcatcgaaatagcagcaaatgtaagagcaagccccagattgctgccctgaaagaggaaacagaagaggaagttcaggacactcgactc

SEQ ID NO: 9688 - DNA, 4440 bp, Artificial Sequence
  derived and/or modified sequence
atgcagcggagtccactggaaaaggcctccgtggtgagcaaactgttcttttcgtggactcgaccgatcttgcggaaaggctaccgccaaagactggaactgtcggacatctaccaaatcccatcagtggactcggcagataacctgtccgagaagctcgagcgcgaatgggaccgcgagctcgcctccaagaagaacccaaaactgatcaatgctctgcgccgctgctttttctggcggttcatgttctacgggatcttcctgtacctgggcgaagtgactaaggctgtgcaaccgctgctgctgggacggatcatagcctcatacgacccagacaacaaggaagaacgctccatcgccatctacctgggaatcggactgtgcctcttgtttatcgtgagaactctgttgctgcacccagctatctttggtctgcaccacatcggaatgcagatgcgtatagcgatgttctccctcatctacaaaaagaccctgaaactgagctcaagagtgctggataagatctccatcggacagctggtgtcactcctctccaacaatctcaacaaatttgatgagggactggctctggcccatttcgtgtggatcgccccactccaggtggcactgttgatgggactgatctgggaactgctccaagctagcgctttctgcggcctcggcttcctgattgtgctggcgttgtttcaggccggtcttggacggatgatgatgaagtaccgggatcagagggccggcaagatttccgaaaggctcgtgatcacctctgagatgattgagaatatccagtcggtcaaggcatactgttgggaagaggcaatggaaaagatgatcgagaacttgagacagaccgagctgaagctgacgcggaaagctgcatacgtgagatacttcaattcatcagcgtttttctttagcggctttttcgtggtctttctgtcagtcctgccatacgctctgatcaagggaatcatcctccggaagatcttcactactatctccttttgcatcgtgctgaggatggcggtaacccgccagtttccatgggccgtgcaaacgtggtacgattcactgggagccatcaacaaaatccaagacttcctgcagaaacaagaatacaagaccctggagtacaacctgactaccactgaagtcgtgatggagaacgtcactgctttctgggaagagggattcggagaactgtttgaaaaggcgaagcagaataacaacaatagaaagaccagcaatggagatgactcgttgtttttctcaaacttctcactgcttggaacccccgtcctgaaggacatcaatttcaaaatcgaaagaggacagctgctcgccgtggcaggctcgactggagcgggcaaaacctcgctgctcatggtgatcatgggagagctggagccttccgagggaaagatcaaacactcaggtagaatctctttctgttcgcagttcagctggatcatgccagggaccatcaaggaaaacatcatcttcggagtgagctacgatgaataccgttaccggtcggtcataaaggcatgccagctggaggaagatatcagcaaattcgccgagaaggacaacatcgtgcttggagagggaggtatcacgctgagcgggggacaacgcgcccgaatctccctggcacgcgctgtctacaaagacgctgatctgtacctcctggactcaccgtttggctacctcgatgtgcttaccgagaaggaaatcttcgaatcgtgtgtgtgcaagctgatggctaacaaaactagaatcctggtgacctcgaagatggagcacctgaagaaggccgacaagatccttatcctgcatgagggcagcagctacttctatggaaccttctccgagctgcagaatttgcaaccggacttctcgtcgaaactgatgggctgtgactcctttgaccagttcagcgcagaacgccgcaattcaattctgactgaaacgctgcatagattctccttggagggagatgcgcctgtcagctggaccgagacgaaaaaacagtccttcaagcagaccggagaatttggcgaaaaacggaagaactcgatccttaatccgatcaactcgatccgcaagttcagcatcgtgcagaaaacgccactccaaatgaatggaattgaggaggacagcgacgagccgctggaacgtaggttgagcttggtgccggactcagaacagggcgaggccattctgccgcggatctcggtgatttcaactgggccgacgctccaggcgagacggcgccagagcgtcctgaacctgatgacgcattccgtcaatcaaggacaaaacattcatcgcaaaactactgcctcgacgcggaaggtgtcccttgccccgcaggctaatctgaccgaactggacatctattcccgccgcctcagccaagaaactggacttgaaatctcggaagaaatcaacgaagaggacctgaaggagtgctttttcgacgatatggagtcaattcccgcagtcaccacgtggaacacctacctgcggtacatcactgtgcataaatcgctcattttcgtgttgatctggtgtctcgttatcttcttggcggaagtcgcagcgagccttgtcgtgctgtggctccttggaaatacccctttgcaggacaagggaaactcgacgcactctcgcaacaatagctacgcagtcatcatcacgtcgacttcgagctactacgtgttttacatctacgttggggtggctgataccctgctcgcaatgggcttcttccggggtttgcccctggtccacaccctgattaccgtatccaagatcctgcatcacaagatgctgcactcggtgctgcaggcgcccatgtcaaccctgaacactctgaaggcgggcggcatcctgaatcggttttccaaggatatcgccattctggatgacctcctcccgttgactattttcgacttcatccaactgctgcttatcgtcataggtgcgattgcagtcgtagccgttctgcagccttacattttcgtggcaaccgtccctgtcattgtcgctttcatcatgcttagggcttacttccttcagacttcgcaacaactcaagcagctggaatcggaggggcggtcgccgatcttcacgcacctcgtcacctcgctcaaagggctgtggactctgagagccttcgggaggcagccgtacttcgagactttgttccataaggcactgaacctgcacaccgccaattggttcctctatttgagcactctgcggtggttccagatgcgcatcgaaatgattttcgtgattttctttattgcagtgaccttcatctccattctcacgaccggagaaggggagggacgagtgggtatcatcctcactctcgcaatgaatatcatgtccaccctccagtgggccgttaatagttccattgatgtggattcgctgatgcgatccgtgtcacgcgtgttcaaattcattgacatgcccactgagggcaagccgacgaagtcgaccaagccttacaaaaatggacagctctcgaaggtgatgattatcgaaaactcgcatgtgaaaaaggacgatatctggcccagcggcgggcagatgaccgtcaaagacctcacggctaagtacaccgaagggggaaacgcaatcctcgagaatatcagcttcagcatcagcccaggtcagagagtcggactcctcggaagaacgggatcgggcaaatccactcttttgtcggcgttcctgcgcttgctgaataccgagggggagatccagatcgacggtgtctcttgggattcaatcaccctgcagcagtggcggaaagccttcggggtgatcccgcaaaaggtgttcatcttttccggaactttcaggaagaacttggatccgtatgagcagtggagcgaccaggaaatttggaaagtcgcggacgaggtggggctgagaagcgtgatcgaacagttccccgggaagctggactttgtgctcgtggacggaggatgcgttctgagccacggccacaagcagctcatgtgtctggcccggagcgtcctttccaaggccaagatcctcctgctcgacgagccgtcggcacacctggaccctgttacttaccagatcatcaggagaactctgaagcaggcgtttgcggactgcaccgtgattctgtgtgaacatcgcattgaagctatgctggaatgccagcagtttctggtgatcgaggaaaacaaagtgaggcagtacgactccattcagaagctgctgaacgaacggtcactgtttagacaagcaatcagccccagcgaccgcgtcaagctgttcccccacaggaattcatcgaagtgcaagtcaaagccccaaatcgcagcactgaaagaagaaaccgaggaagaagtccaggacactaggctg

SEQ ID NO: 9689 - DNA, 4440 bp, Artificial Sequence
  derived and/or modified sequence
atgcagagatctccgttggaaaaagcttctgtggttagtaagctgttctttagctggacccggcctatactgcgtaaaggatatcgtcagcggcttgaattgtcggatatttatcagatacctagtgttgattcagccgacaacttgagcgaaaaacttgagcgtgagtgggacagagaactggcgagcaaaaagaatccgaaacttattaatgcacttcgcagatgctttttctggcgctttatgttttatggaatcttcttgtacttaggagaggtaactaaagctgttcaaccgcttctgctgggtagaatcattgcttcatacgatcctgataataaggaagagcgtagcattgccatctatttgggcattggcttatgtttattgtttatagtgcgtacgctattattacaccctgctatatttggcctacatcatataggaatgcaaatgcgaattgcgatgttttctctgatctataagaagacattgaaactgtcgtcacgtgtattagataaaatctccataggtcagctcgtatcattacttagtaataatttaaataaatttgatgagggattagcactggcccatttcgtatggatcgccccgttacaggtggccctgctaatgggcctgatctgggaattattacaggcttctgcattttgcggcttaggtttccttatcgtgcttgctctttttcaagctggcttaggccgaatgatgatgaagtatcgtgatcagcgcgcgggcaagatttccgagcgcctggtgattacgagcgaaatgatcgaaaacatccagagtgttaaagcgtattgctgggaggaggcaatggagaaaatgatagagaatctcaggcaaacggaattaaaacttacacgcaaagcagcgtatgttcgatattttaattcatccgcgttttttttttcaggattttttgtggtttttctgtcagtattaccgtatgcccttatcaaaggaatcattcttcgtaaaatttttacgacgatttcattttgtatcgttctgcgtatggcggtcacgcgacagtttccgtgggcagtgcagacatggtatgactcgctcggtgccatcaataaaatacaagacttcctgcaaaagcaggagtataagacattagaatacaatcttacaacaacagaagttgtcatggagaacgtgactgctttctgggaggaggggtttggcgagctttttgaaaaagcgaagcaaaataataataatcgtaaaacttctaacggggacgattctttgttcttttctaatttttcgttgctgggaacaccggttctaaaagatatcaattttaaaattgagcgtggccagttactggcagtcgcaggctctacaggcgccggtaaaaccagccttttaatggtcattatgggagaacttgaaccctctgagggaaagatcaagcatagcggccgaattagcttttgctcccagttttcatggataatgccaggaaccatcaaggaaaacatcatttttggagtgtcgtacgatgagtaccggtatcgttcagttatcaaagcttgccaacttgaggaagatatttcaaagtttgccgaaaaagacaatattgtcctgggtgaaggcggaattacactttcgggaggacagagggctcggatttcgttggcgcgcgcggtttataaagacgcagatctgtatttacttgattccccatttggttatttggatgttttaacggaaaaagaaattttcgaatcttgcgtgtgcaaactgatggctaacaagacgcgcattctggtcacttcgaaaatggaacacctgaaaaaagctgataaaatcctgatcctgcatgaaggaagttcctatttttatggcaccttttctgaattacagaacctgcaaccggactttagctctaaactcatgggatgtgatagcttcgaccagttctctgcagagaggcgcaattcgatcttgacagagacattgcatagatttagcctcgagggggatgcaccggtgtcttggacggaaacaaaaaaacaaagctttaaacagacaggggagttcggggagaaacggaagaattccatcctgaatcctattaacagcattcgcaagttttctattgttcaaaaaacacctttgcagatgaatggaatcgaggaagacagtgatgagcctttggaacggagattgtctcttgttccggattccgagcagggagaagccattcttcctcgtatctcagttatatcgactggtcctacactgcaagcaagacggagacagtcggttctaaacctgatgacacatagcgtgaaccaagggcagaacattcataggaaaacaaccgcatcaacccggaaggtttctttggcgccacaagcaaatttaacagagctggatatttatagtagacggctgtcacaagaaacaggtttggaaatttcagaagaaataaatgaggaagaccttaaagaatgcttttttgatgatatggagtctattccggctgtcacaacgtggaacacatatttacgttacattacagttcataaatcgcttatttttgtcttaatttggtgcctggtcatttttttggctgaagttgctgcgtcgcttgttgtcttatggttattaggtaatacacctttacaggacaagggcaacagtactcactcgcggaataattcttatgcagtgatcattacaagtacaagctcctattatgtattctatatctatgtgggagttgcagacacacttctggcgatggggtttttcagaggattaccgcttgtgcatacgctgattaccgttagcaaaatcctgcatcataaaatgctgcattcagtgttacaagccccgatgagtacgttaaataccttgaaagcgggcgggattcttaataggttttctaaagatattgcaatcctggatgatcttcttccgttgactatttttgattttatccaactactgctgatcgtgataggtgccatagccgtcgtcgcagtactgcagccttatatctttgttgccactgtgccagtgattgtagcattcattatgcttcgtgcttatttcctgcaaacatcacaacagttaaagcagctcgaatccgagggtagatctccgatttttacacatctggtcacatcgcttaaaggcctctggaccttacgagcctttggccgccaaccgtacttcgaaacgctctttcataaggcgttaaaccttcacacagccaattggtttttatacctgtccactcttcggtggtttcaaatgagaatcgagatgattttcgtgatcttttttattgccgttacatttatttctattttgacaacgggtgagggagaaggtagagttggcattatactaactctcgcaatgaatataatgtccacattacagtgggcagtgaacagttctattgacgtagactcacttatgcgcagcgtcagcagagtttttaagttcatcgacatgccgaccgaaggcaagccgacaaagtcgacaaaaccgtataaaaacggacagcttagcaaagttatgatcatagaaaattcccatgtaaaaaaagatgacatatggccatctggcggacaaatgacggttaaggatttaactgcaaaatacacagaaggaggcaatgcgatcttagagaatatctcgttctccatttcaccgggacagcgtgtaggcttattaggtcgcacaggctctggaaaatcaacacttctttcagcttttctgcgactgctcaacactgaaggagaaatccagatcgatggcgtctcttgggactctattacacttcagcagtggaggaaagcgtttggtgttattccacaaaaagtctttatttttagcggtacgtttagaaaaaatctggacccttacgaacaatggtcagatcaagaaatctggaaggtagcggatgaggtcggcctccggtcagtgatcgaacaatttccgggcaagttagattttgtgctggtagatggaggctgtgtacttagccatggccataaacaactgatgtgtcttgcgagaagcgtactttctaaggcgaaaatactgttacttgatgaaccgtcggcgcacctcgatccagttacctatcagattattcgacgcacacttaaacaggcatttgccgattgcacggtaatcctctgtgagcaccgtatcgaagctatgcttgaatgtcagcagtttcttgttattgaagagaacaaagtgagacaatatgactctatccagaaattattaaacgaaagatcgctttttagacaggcaatctctccaagtgacagagttaagctcttcccacatcggaactctagcaaatgtaagtctaagccgcagattgcagcccttaaagaagaaacagaggaagaggttcaggatacacgcctc

SEQ ID NO: 9690 - DNA, 4440 bp, Artificial Sequence
  derived and/or modified sequence
atgcagagatctcccctcgaaaaagcctctgtggtgtcaaaactgtttttttcctggacgcgtcccattctgcgtaagggttataggcagcggcttgagctcagtgatatataccagattcctagcgtggattcagccgataatctttctgaaaaactggagcgcgaatgggaccgagaattggcatccaaaaaaaatccaaaactgataaacgcactcaggagatgtttcttctggcgctttatgttctacgggatttttttataccttggcgaagtcacaaaagcagtgcaacccctcctactcgggcgcatcatagcctcttacgatccagataataaagaagaacgatccatagctatatatctcggaataggcctgtgcctgctgttcattgttcggaccctcttactgcatcccgctatcttcggattgcaccacataggcatgcagatgagaatcgcaatgtttagtttaatttataagaagactctgaagctttcatcacgcgtcctcgataagattagtatcgggcagctggtctccctcttgtcaaacaacctgaataagtttgatgaaggactggccttggctcatttcgtgtggattgcaccgcttcaggtcgcactgcttatgggtttgatttgggagctgctacaggctagtgccttctgcgggctcggtttccttatcgtgctagcacttttccaggccggtctggggagaatgatgatgaagtatcgggatcaaagagccgggaagatctcagagcgcctcgttataacttctgaaatgatagaaaacatccagtctgtgaaggcctactgttgggaagaggccatggaaaagatgatcgagaaccttcggcagacagagctgaaactgaccagaaaggccgcctatgtgagatactttaactcatcagcttttttcttcagcgggttcttcgtcgtcttcttgtctgtgctgccttatgcgctgattaaggggataatcctgagaaaaatctttactaccatctcattctgcatcgtcctccggatggctgtcaccaggcagttcccttgggccgtccagacgtggtacgacagccttggcgctatcaataagatccaggattttcttcagaagcaggaatacaagaccctggagtacaatctgaccaccactgaggttgttatggaaaacgttaccgccttttgggaggagggatttggagagctgttcgaaaaagctaagcagaacaataacaaccgaaaaacttccaacggagacgacagcttattcttttcaaatttctccctcctgggaacacccgtgctcaaggacattaacttcaagatagaacgagggcagctgctcgcagtggcagggtcaaccggcgccgggaaaacaagcttactgatggtcatcatgggggagttagagccctcagaaggaaagattaagcactccggccgaatttccttttgttctcagttctcatggatcatgcccgggaccataaaggagaatattattttcggtgtttcatacgatgagtaccgctatcggagtgtcatcaaggcatgtcagctggaagaggacatttctaagttcgccgagaaggacaatattgtcctcggagagggaggcatcacattgtccggaggtcaacgagcacggatcagtcttgctcgtgcagtgtataaagatgccgatctttacctgttggattctccattcgggtaccttgacgtcctcaccgagaaggagattttcgagtcctgcgtatgcaagttaatggctaacaagacccggatccttgttactagcaaaatggagcatctaaagaaggctgacaagattctgattctgcatgaagggtcctcctacttttatggtaccttttctgaactacaaaacctgcaacccgactttagctccaagcttatggggtgtgattcctttgaccagttctcagccgaaaggaggaactccatcctaactgaaacccttcatcgtttcagtctcgaaggcgacgccccagtctcatggacagagacaaagaagcagtcttttaaacagaccggcgagttcggggagaagagaaaaaacagtatcctgaacccaatcaattctattcgaaagttcagcatagtgcagaagacaccacttcagatgaacggaatagaggaagactccgacgagcctcttgaacgcagactctctctagtcccggactcggaacagggtgaagctattctgcctcgcatctcagtgattagtaccggacctaccctgcaagccagaaggagacagtcggtgctcaacctcatgacccattccgtgaatcagggccaaaacatccataggaaaacgacagcgtcgacacgcaaggtttccctcgccccccaggctaatctcactgaactcgacatatatagccggcgacttagtcaggaaactggtttagaaattagcgaagagattaacgaagaggatcttaaggagtgcttctttgacgacatggagtccattcctgccgttacaacatggaatacttacctgcgatacatcactgtgcacaagagtttgatcttcgtgctcatttggtgtctcgtgattttcctcgcagaggtggcggccagtctcgtggtgctctggctgcttggaaacaccccattacaggacaaggggaacagtacccactccaggaacaactcgtacgctgtgattatcacttcaaccagcagttactacgtattctatatttatgtcggcgtggcagatacactcctggcaatgggtttttttaggggcttgccgctggtgcacacactcataacagtttctaagatcctgcaccataagatgctgcactcagtgctccaggcacctatgtcgacactgaacactcttaaggcaggagggattctgaatagattctcaaaggacattgcaatcctggacgatttgctccccctgactatcttcgacttcattcagctcctgcttattgtgattggggccatagctgtggtggcggtgttgcagccatacattttcgtggctaccgtcccagtgattgtggcgtttatcatgctaagagcgtacttcctccagacttcccagcagcttaagcagctggaatccgaaggacggtcaccaatcttcacgcatctggttacctcactgaaggggctttggactctccgagccttcggccgtcagccctattttgagaccctgtttcataaagcactcaacctccacaccgccaattggttcctttatctgtctaccctcaggtggttccagatgcggatcgagatgatttttgtgattttctttattgccgtgacctttataagcatcctgaccacgggagagggggaaggacgggtgggcattattttgaccttggccatgaacattatgagtactcttcaatgggccgttaactcctcaatcgatgtcgactcactcatgcgctctgtgtcccgagtctttaaattcatcgatatgccaacggagggcaagccaacaaagtccacaaaaccttacaaaaacggccaactatcaaaagtaatgatcattgagaactctcacgtgaagaaagacgacatttggccctccggagggcagatgactgtgaaggacctgaccgctaaatacacagaagggggtaatgccattctggagaatatatctttctccatctctccgggacagcgcgtggggctcctgggcaggaccggctctggcaagagtacccttctgagcgcctttctgcggctgctgaataccgagggcgaaatacaaatagacggtgtgtcatgggactccattactcttcaacagtggcgcaaagctttcggagtgatccctcagaaggtgttcatcttttctgggacgttccgtaagaatttggacccctacgaacagtggagcgatcaggagatttggaaagttgcagacgaggtggggctgcgatccgtaatcgagcagttcccaggcaaacttgattttgtcctggtcgacggcgggtgcgtgttgagccatgggcacaaacagctgatgtgcctcgcccggtccgtcctaagtaaagccaagattctactattagacgagccttctgcgcatctcgaccctgtaacatatcagatcattcgcagaacgttgaagcaagcctttgccgactgtacagtgatattgtgcgagcaccggatcgaggcaatgcttgaatgtcaacagtttctcgttatcgaggaaaataaggtcagacaatatgattctattcaaaagctgctgaatgaacggtctctgtttcggcaggccatttctcctagtgatagagtgaagttgttcccccacaggaacagtagtaagtgcaagagcaaaccacagattgccgctctgaaggaggagactgaggaggaggtgcaagacacccgattg

SEQ ID NO: 9691 - DNA, 4440 bp, Artificial Sequence
  derived and/or modified sequence
atgcagagatccccgctggagaaagcatccgtggtgtccaaactcttcttttcctggaccagacctattttgcgaaagggatacaggcaaagacttgagctgtcggacatttaccaaatcccctctgtggatagcgccgataatctctccgaaaaacttgaaagggagtgggacagggaacttgccagcaaaaagaacccaaaactgatcaacgcgctgcggcggtgtttcttttggcgttttatgttttacggtatctttctttacctcggagaagtgactaaagcagtgcaacctttgctccttggccgcattatcgcctcatacgatcctgacaacaaggaagagaggtcgattgccatctacctcggtataggactttgcctcttgtttatcgttagaactctgcttctccaccctgcaatctttggactccaccatatcggcatgcaaatgaggatagcaatgttctcgttgatttacaagaaaaccctgaagctgtcgagccgcgttcttgataagatctccatcggacagctggtgtccctcctgagcaacaacctgaacaagtttgatgagggacttgcactggcccactttgtttggattgcgccactccaggtcgcactgttgatgggcttgatctgggaactcctccaagcgtctgccttttgcgggctgggttttctgattgtcctcgccctttttcaagccggacttgggcgcatgatgatgaagtacagggatcagagggcgggtaagattagcgagcgccttgtcataaccagcgaaatgattgagaacatccagagcgtcaaggcatactgctgggaagaggcaatggaaaagatgatcgaaaatctgcgtcaaactgaattgaagttgactagaaaagcagcgtacgtgagatacttcaattcgtcggcattcttcttttcgggcttttttgtcgtattcctttccgtgcttccctacgcactgatcaaggggattattctgcggaagattttcacgactatttctttttgtattgtattgagaatggcagtcacccgtcaattcccatgggctgtgcaaacctggtacgattcgctgggggcaataaacaagatccaggatttcttgcagaagcaagaatacaagacgcttgagtacaatctcaccactaccgaagtggtgatggagaacgtgacggcattttgggaagaaggcttcggagaactgttcgaaaaggcgaaacaaaacaataacaacaggaaaacgtcgaatggcgacgattccctgtttttcagcaacttctcactcctcggaacccctgtgcttaaggatatcaatttcaagatcgaacgcggacaacttctggcagtggcagggtccacgggtgcaggcaagacgtcactgctcatggtcataatgggagagcttgaaccttctgaaggaaagatcaagcacagcgggcgaattagcttttgttcccaattctcgtggattatgccaggtaccataaaggaaaacataatcttcggcgtgagctacgacgaatacagatataggagtgtgattaaggcatgtcagcttgaagaagatatctcgaagttcgcagagaaggataacatcgtccttggagaggggggaatcactctgtcaggaggtcagcgagcacggataagtttggcaagggccgtctacaaagatgcggatctctacctgcttgattccccttttggctacctggatgtgctgacggaaaaggaaatctttgagtcgtgcgtgtgtaaactgatggccaataagactagaattctggtaaccagcaagatggagcatctcaagaaggcggataagattcttattcttcacgagggatcgtcctacttttacgggacgtttagcgagttgcagaatctccagcctgatttctcctcaaagctcatggggtgtgactcatttgatcaattttcggcggaacggaggaacagcatacttactgaaactcttcataggttttcgctggagggtgacgcgcctgtctcttggactgaaactaagaagcagagctttaagcagacgggagaattcggtgaaaaaaggaaaaactcgattcttaacccgattaactcgatccggaaattctcaattgtgcaaaagacgcctcttcagatgaatggtatcgaagaagattcggatgaacctctggagcgcagactgagccttgtgcccgatagcgagcaaggagaagcgatactgcctcgcatcagcgtgatttccaccggaccaaccctccaggcacgccggagacagtcggtgcttaacctgatgactcactcggtcaatcaggggcagaacattcatcgaaaaacgactgcttcgacccggaaagtctcccttgcacctcaggccaatctgacggaactcgatatctactcgcggcgcctgtcgcaagaaaccggacttgagattagcgaagagattaacgaagaggaccttaaggagtgcttttttgacgacatggaatccatacccgcagtgaccacctggaatacctaccttcgatatatcaccgtacacaagtccctgatttttgtgcttatttggtgccttgtcatttttctggcagaagtcgcggcatccctggtggtcctgtggcttcttgggaatactccactccaagacaaaggcaactccactcattcacggaacaactcctatgcagtgatcattacctcgacctcgtcttactacgtgttttacatttacgtgggagttgcagataccctccttgcaatgggattcttcagaggactgccactggtgcataccctgatcaccgtctcgaaaatactgcatcacaagatgcttcattcagtgctccaagcaccaatgtccacccttaacactctgaaagctggtggaatcctcaatagatttagcaaggacattgccatactggacgaccttcttcccctgactatctttgactttattcagctccttcttatcgtcatcggagcaatagccgtggtggccgtgctgcagccctacatcttcgtggccaccgtcccagtgattgtggccttcattatgctcagggcttacttcctgcagacctcgcaacagcttaagcaactcgagagcgaagggcgtagccccattttcacccacctggtcacgtccctgaaaggtctgtggaccctgcgcgcctttggacggcaaccttactttgaaactctgtttcataaggcgttgaacctgcataccgcaaattggtttctttacctgtcgactctccggtggttccagatgcgtattgaaatgattttcgtgatattctttattgcagtgactttcatttccattcttactactggtgagggtgaaggacgcgtcggtattatcctgacccttgcgatgaacataatgagcaccctgcaatgggcggtcaattcgagtattgatgtcgactcgctgatgagatccgtgagccgggtgtttaagtttatagacatgccaacggaagggaaaccaaccaagtcaaccaaaccttataagaacggacagctcagcaaggttatgatcatcgaaaacagccacgtgaagaaagacgatatttggccttccggaggtcaaatgacggttaaggatctcaccgcaaagtacaccgagggaggcaatgcaatccttgaaaacatctccttctcaatatcacccggccagcgcgtgggtctgctgggtagaactggctcgggtaagtcgactcttctttcagcatttctccgccttctcaacaccgaaggggaaattcagattgatggggtttcctgggattcaattacgctccaacaatggcggaaggcttttggcgtgatccctcaaaaagtctttatcttttcggggacgttccgtaagaacctggatccatacgagcaatggtcagatcaagagatctggaaggtggccgatgaagtggggctgcgctcagtgatcgaacagtttccgggaaagctggatttcgtcctcgtggatggcggttgtgtgctgtcccacggacataagcagcttatgtgtcttgcaagaagcgtcctctctaaagcgaagatacttttgcttgatgaaccgtcggcacatcttgacccggtgacctatcaaatcatccgccggactcttaagcaagcgtttgcggactgtaccgtgatattgtgcgagcatcgcattgaggcaatgctggaatgtcaacaatttctggttatagaagagaataaggtgcgtcaatacgactcaatacagaaattgctcaacgagcgctccctctttaggcaagcaatttccccgagcgacagggtgaagctgttcccccatagaaattcatcaaaatgtaaatccaaaccacaaatcgctgccctcaaggaagaaaccgaagaggaagtccaggacactcgcctt

SEQ ID NO: 9692 - DNA, 4440 bp, Artificial Sequence
  derived and/or modified sequence
atgcagcgaagcccgctggaaaaagcgtcggtggtgtcgaaactgttcttctcgtggactcggccaatcttgaggaaaggttacagacagcgtctggaactcagcgacatctaccaaattccaagcgtggattccgcagacaatctctctgagaaactcgaacgcgagtgggatagagaactcgcttcaaagaagaaccctaaactcataaacgcgctgagacgatgctttttctggaggttcatgttctacggaatctttctgtacctgggtgaggttacgaaggccgtgcagccacttctcctcggacggatcatcgcgtcgtacgatccggacaacaaggaggaacgcagcatcgccatctatctggggattggactctgtctgctctttatcgtccgcacgctgctgctgcatccagccatcttcggcctccaccacatcggaatgcaaatgcgcatcgccatgttcagcttgatctacaaaaagactctgaagctcagctcccgcgtgctggacaagatttcgatcgggcagctggtgtcgctgctgtcaaataacctgaataagttcgacgagggactggcactggcccatttcgtctggatcgccccactgcaggtggcgctgctgatgggcctcatctgggagctgctccaggcgtcggctttctgcggtctgggtttcttgatagtcctggccctgttccaggcgggactcggccgcatgatgatgaagtaccgggaccagcgcgccggtaagatctcggaacggctcgtcatcacgagcgaaatgatcgagaacatccagtcagtgaaggcgtactgttgggaagaagctatggagaagatgattgagaacctgagacaaaccgagctgaaacttactcggaaggcagcttacgtgcgctatttcaactcctcagccttcttcttctccggattcttcgtggtgttcctctcggtcttgccgtacgccctcatcaagggaatcatcctgcgcaagatctttaccactatcagcttttgcatcgtgctgcggatggccgtgactagacagttcccgtgggccgtgcagacctggtacgactccttgggggccatcaacaaaatccaagacttccttcagaagcaggaatacaagaccctggagtacaacttgactactactgaagtcgtgatggaaaatgtcactgcgttttgggaagaaggattcggggagttgtttgagaaagctaaacaaaacaacaacaaccggaaaacctccaatggggatgactccctcttcttctccaatttctccctgctcggaactccagtgctgaaggatatcaactttaagatcgagcgcggacaactgctggccgtcgctggatcaactggagctggcaagacttccctgcttatggtgattatgggcgaactggaacctagcgagggaaaaatcaagcattcgggacgcatttccttctgcagccagttcagctggattatgcccgggaccatcaaagaaaacatcatctttggagtctcctacgacgaatacaggtaccgatcggtcatcaaggcctgccagctggaagaggacatctcaaagttcgcggaaaaagacaacatcgtccttggagaaggcggaatcactctgagcggaggtcagagagccagaatatccttggctcgggcagtgtataaggatgccgacctgtatcttcttgactcccctttcggttacctcgacgtgcttactgaaaaggagatcttcgaatcatgcgtctgcaagttgatggccaacaaaacccgcattctggttacttcgaagatggagcaccttaagaaagctgataagatccttatcctccacgaggggagctcctacttctacggcaccttctctgagctgcagaatttgcaaccagatttctcgtcgaagctgatggggtgcgactcgttcgaccagttctcggctgaacggaggaactcgatcctgacggaaaccctgcatagattctcgctggaaggggatgccccagtgagctggaccgagactaagaaacagtccttcaagcagactggggagtttggggagaaacgcaagaattccatcttgaacccgatcaactcaattaggaaattctccatcgtgcaaaaaactccgttgcagatgaatggaatagaagaggattccgacgagcctttggagcgcaggctctccctggttcccgactccgaacagggcgaagccatcctcccgcgcattagcgtgatctcgaccggcccaactctgcaagcccgccggcgccagtcagtcttgaacctgatgactcactcagtcaaccagggccaaaacattcaccggaaaaccaccgcatcgacgagaaaggtgagcctggcccctcaagccaacctgactgaactggatatctactcccggaggctttcacaagaaaccggactggaaatctccgaggaaatcaacgaagaagatctcaaagagtgcttcttcgacgatatggaatctatcccagccgtgaccacctggaatacgtatctgcgctacatcactgtccacaagtccctcatttttgtccttatttggtgcctcgtgatcttcctggcagaagtggccgcatcccttgtggtgctctggctcttgggaaataccccactccaagacaaggggaacagcacccactcgcggaataactcgtacgcggtcatcatcacctcgactagctcgtactacgtgttctacatctatgtgggagtggccgatacgctgttggctatgggtttctttaggggactgccgcttgtgcacactctcatcactgtctcgaagatcctccatcataagatgctgcactccgtccttcaagcccctatgagcactctgaataccctcaaagctggagggatcctgaacagattcagcaaagacattgcgatcctcgacgacctgctccccctcaccattttcgactttatccagttgttgcttatcgtgatcggagctattgcagtcgtcgccgtgctccagccatacatcttcgtggcaaccgttcccgtgatcgtggcgtttatcatgctccgcgcctacttcttgcaaacctcccaacaactcaaacagctggaatcggagggtcgctccccgatcttcactcatctcgtgacttccctcaagggactctggaccctgcgcgcctttggcagacaaccgtactttgaaacccttttccacaaggcgctcaatctgcataccgccaattggttcctgtacctctcaactttgcgatggttccagatgcgcatcgaaatgatcttcgtcatattctttatcgccgtgacctttatctcaatattgactactggtgaaggagaaggccgcgtcggaattatccttactctggctatgaacatcatgagcactctccagtgggcggtcaactccagcatcgatgtcgactcgctgatgcgcagcgtgtcgcgggtgttcaagttcatcgacatgccgaccgaaggaaagccgaccaagtctaccaagccctacaagaacggccagctttcgaaggtgatgatcatcgaaaacagccacgtgaagaaggatgacatttggcctagcggtggacagatgaccgttaaggacctgactgcgaaatacactgaaggagggaacgccatcctcgagaacatctcgttcagcatctctcctggacagcgggtggggctgcttggaaggaccggatcgggaaaatcgaccctgttgagcgcatttctccgactgcttaacaccgagggagagatccagatcgatggggtgtcgtgggactcgattaccctgcagcaatggcggaaagcattcggcgtgattccgcagaaggtgttcatcttttcgggaactttccgcaagaatctcgatccgtacgagcagtggtcagaccaagaaatctggaaggtggccgatgaagtgggcctgcgttcagtcatcgagcagttccctggcaagttggacttcgtgctggtcgacggaggctgcgttctgtctcacggccacaaacaactgatgtgcctcgcgcggtccgtgctgtccaaagcaaaaatcctgctccttgacgagccgtcggcgcacctggatccggtgacgtatcagatcatccggagaaccctgaagcaggccttcgcagattgtactgtgatcctttgcgaacatcgaatcgaggccatgctggagtgccaacagtttctggtcatcgaggagaacaaggtgagacagtacgactcaatccaaaagctgctgaacgaaaggtcactttttcgccaggccatctcaccatccgatcgagtcaaactcttcccacatcgcaactcctccaagtgcaagtcgaagccgcagatcgctgcactgaaggaagagactgaagaagaagtccaggacacccgcttg

SEQ ID NO: 9693 - DNA, 4440 bp, Artificial Sequence
  derived and/or modified sequence
atgcagaggtctcccctggagaaagcatctgttgttagtaagctgttctttagttggactcgccccatattacgtaaggggtaccggcaacggttggagctttcagacatttaccaaattccctcagttgactcagctgataatctgtccgaaaagctagagcgagaatgggacagggagctggctagcaaaaagaaccctaaactgattaacgcactacgtaggtgttttttttggcgattcatgttttacgggatttttctctatctgggggaggtgactaaggccgttcagcctctcctgctgggacggattatcgcaagttacgaccctgataacaaagaggaaagatccatcgctatatacttgggcattggtctatgcttactattcatcgtgaggaccctcctcctgcaccctgccatcttcggcttacatcacataggcatgcagatgaggatcgccatgttttctcttatatacaagaagaccctcaaactatccagcagggtgctcgataaaatctccatcggtcaattagtttccctgctgagtaacaatctaaacaaatttgacgagggtctagccctagcacactttgtttggattgcccctctgcaggtggcactgcttatgggacttatttgggagctgctgcaagcctctgcattttgtgggctgggcttccttattgtgctcgctttgtttcaagctggtcttggtcggatgatgatgaaatatagggaccagagagcaggtaaaatctccgaacgtctggtgataacctccgagatgatcgaaaatatccaaagcgtcaaagcctactgttgggaggaggcaatggagaagatgatagagaatctccgccagaccgaactaaagctaacaaggaaggccgcatacgtgagatatttcaattcttctgctttcttcttttcaggtttctttgtagtgttcctctctgtgctgccatatgcactgatcaaggggatcatactgcgcaagatctttactacaattagcttttgtatcgtgctgagaatggccgtcactaggcagtttccttgggctgtgcagacttggtacgactctctgggcgccataaacaagatccaggatttcttacagaagcaggagtataaaaccttagagtacaatctgaccaccactgaggttgttatggagaacgtcacagccttttgggaggaggggtttggagaactgttcgagaaggcaaagcaaaacaacaacaaccgtaagacctctaacggtgacgatagtctattcttcagtaattttagcctgctaggcacccccgtgctgaaggacatcaacttcaagatcgaacggggccagctattggctgtcgccggttcaaccggtgcaggaaagacttccctgctgatggtgataatgggggagctggagccatccgagggcaagataaaacattctgggaggatttccttctgcagccaatttagttggatcatgccaggcacaattaaggaaaacatcatctttggcgtttcttatgatgagtatcgctataggagcgttatcaaggcctgtcaattagaggaagatatctccaagtttgccgaaaaggacaatatcgtgctgggcgaggggggcattaccttaagcgggggccaacgagccagaatctctctcgcaagagctgtgtacaaggatgctgatctgtatctgctggactcccccttcgggtatctcgacgtgctgacagaaaaagagatcttcgagtcctgcgtgtgcaaactgatggctaacaagacacgtatcctagtcacaagtaaaatggagcaccttaagaaagctgacaagattctaatactgcacgagggctcatcctacttctatggcaccttttccgaattacagaacctgcaaccagacttcagcagcaagctcatgggttgcgatagtttcgatcagttctctgccgagcgacgaaactctatactaaccgagactctgcatcgcttctccctggagggagacgccccagtctcttggactgagacaaaaaaacagtcttttaaacagactggcgagtttggcgagaagagaaagaactctattctaaacccaataaacagtattcgcaagttttctattgttcagaaaactcctcttcagatgaacggcatcgaggaagatagcgatgaacctctggagcgtcggctctctctggtgccagattccgagcagggggaggctattcttcccaggatttccgtcatatccaccggccctacactgcaggcaagaagaaggcagtccgtgcttaacctaatgactcactccgtgaaccagggacagaacatccacagaaagactactgcttctacccgaaaagtgtcactggccccccaagctaatctgactgagctggacatttactctcgtagactttcccaggaaactggcttagagatcagtgaggaaattaatgaagaggacctgaaggagtgcttcttcgacgatatggagtcaattcccgccgtcaccacctggaatacatacctgcggtacatcactgtgcacaagtccctgatctttgtgctcatctggtgtctcgtgatattcttggccgaggtggctgcttctctcgttgtgctctggctgctcggtaatacacccctccaggacaaaggtaacagcacccactctcggaataatagctacgctgtgataataactagtaccagctcttattacgtgttttatatatatgttggggtcgctgacactctgttggctatggggttctttcggggtctaccactagttcacacattgattactgtctccaaaatcctgcaccacaagatgttacacagcgttctacaggcccccatgtccacactgaatacacttaaggccggcggaatcttgaataggttctccaaggatatcgccatcctggacgatctgctgccattgaccatctttgattttatacaattactattaatagtgattggggccatcgccgttgtggctgtgctgcaaccttacatttttgtggcaaccgttcccgttattgtcgcattcatcatgttgagggcttactttctgcagacctctcagcagttaaagcagttggagtcagagggcagatcccccatctttactcatcttgtgacctctctcaaggggttatggactctaagagcctttgggcgacagccatatttcgagaccctctttcacaaggcacttaacctccacacagctaattggttcctgtacctcagcactttgagatggttccaaatgcgcatagagatgatattcgtgatatttttcattgcagtgaccttcatctctatactgaccacaggcgagggcgagggcagagtcgggattatcctgactctggcaatgaatatcatgtctactctccagtgggctgtaaatagttccattgatgtcgatagcctgatgagatccgtgtctcgcgtttttaaatttatagacatgccaaccgagggcaagcctaccaagagcaccaagccttacaagaacggccagttgagtaaagtaatgattattgagaactcccatgtgaagaaagatgacatctggccctcaggtggccagatgaccgtgaaggatttgacagccaagtacactgaagggggcaacgcaattttggagaacatctcttttagcatcagcccaggccagcgcgttgggctcctgggcaggacaggctctgggaagtctacactgctgagtgctttcttgcggctcctgaataccgaaggagagatccagattgatggagtgagctgggattccatcacattacagcaatggcggaaggcctttggagtgatcccacaaaaggtcttcatcttcagtgggaccttcaggaagaatttagacccatacgagcagtggagtgaccaggagatctggaaggtggcagacgaagttggcctgcggtccgtgatagagcagttcccaggaaaactagatttcgtgcttgtggacggcggctgcgtgctgtcacacgggcacaagcagctgatgtgtctggctcgcagcgttctaagtaaagctaagattctgctattggatgagccctccgcacatctggaccctgttacctatcagataatccggcggaccctgaagcaagcatttgctgattgcacagtgattctgtgcgaacatcgcatcgaagcaatgctggagtgccaacagtttctggtcatcgaagaaaataaggtgcgacagtatgactctattcagaagctgttaaatgagaggtctttatttaggcaagccataagccccagcgatagagtcaaactgttccctcaccggaattcctccaaatgcaaaagcaagcctcaaatcgctgccctgaaagaggagaccgaggaggaggttcaggatactcgcctg

SEQ ID NO: 9694 - DNA, 4440 bp, Artificial Sequence
  derived and/or modified sequence
atgcagcgttcacctctggaaaaggcctccgttgtatcgaaactgttctttagctggacccgaccaattctcaggaaagggtaccggcagagactcgagctgagcgatatctaccagatcccctctgtggatagcgctgataacctgtcggagaaactagagcgcgaatgggaccgcgaactggcctcaaagaagaatcctaaattgatcaatgctcttcgccgctgcttcttttggcggtttatgttctacggtattttcctgtacctcggagaagtaacaaaggcggtgcaacctctcctgctgggcagaatcatcgcttcgtacgatcccgacaacaaggaggaacggtccatcgccatttacctgggaatcgggctgtgtctgttgttcatagtcaggaccctgcttttgcaccctgccatattcggcctgcaccatatcggcatgcagatgaggatcgctatgttctccttaatttataagaagaccctgaaactgtcatcaagggttctcgataagattagcattggccagctggtatctctgttaagcaacaaccttaacaaattcgacgagggcctggctctagcccactttgtgtggatcgcccctcttcaggtcgcgctcctcatgggtttgatctgggagctgctgcaggcaagcgccttctgcggcctcggttttcttatagtcctagctctgttccaagcaggcctgggccggatgatgatgaaatatagggaccagcgcgctggtaaaatctccgaacgcttggtcataacaagcgagatgatcgaaaatatccagagcgtcaaagcttactgttgggaagaagctatggagaagatgatcgaaaatctgaggcagactgaactgaaacttacacgtaaagccgcctacgtgcggtacttcaattcctcggcctttttcttcagtggtttctttgttgtgtttctatctgtgttgccttatgctttaatcaagggcataattctgagaaaaatcttcacgaccatctctttctgcatcgtgttacgcatggctgtgacaaggcagttcccatgggccgtccagacttggtatgacagtctgggggccatcaataagattcaggacttcctccaaaagcaagaatacaaaacactggaatacaatctgaccacaaccgaggtggtaatggagaatgtaacggccttctgggaggaaggattcggcgagctgtttgaaaaagcaaagcaaaataacaacaatagaaagacttctaatggcgatgactccttattcttttcaaactttagcctgctgggaactcccgttctgaaggacatcaactttaaaatcgagagagggcagttattggcggtggctgggagcaccggggccggaaaaacatcgctgctaatggtgattatgggagagctggaaccctctgaaggtaaaataaagcactccggccggatctccttttgctctcagttctcgtggataatgccggggacgatcaaggagaatatcatttttggagtctcgtatgacgagtaccgttatcggagcgtcatcaaggcgtgccagttagaggaggatatctccaagtttgccgaaaaagacaacattgtgttgggagaggggggcattacgttatccggagggcaaagggctaggatctcgctggctagggccgtgtataaggatgcagacctttacctgcttgactctccatttggttacctggacgtcttaactgagaaggagatatttgaatcatgcgtgtgcaagctcatggccaacaagacaaggatcctcgtgacgagtaagatggagcacttgaaaaaagctgataagatattgatactgcacgaaggcagctcctatttctatgggacgtttagcgagctgcaaaacctccaaccagatttcagctccaagctcatgggatgcgattcgtttgaccagttctcggccgaacggagaaatagcatcctgactgagacactacaccgcttttctcttgaaggtgatgcgccagtaagttggaccgagaccaagaaacaatcctttaaacagacgggtgaattcggggagaagaggaagaatagcatcctgaatccaataaactctattcggaagttttcaatcgtccagaagaccccactgcagatgaacggaattgaggaggattccgacgaaccactcgagagaaggctgtcgctggtccctgatagcgagcagggagaagcgatcctcccccggataagcgtaatcagcaccggacccacactgcaggcgaggcgtcggcaatcagtccttaatcttatgactcacagcgtcaaccaggggcagaacatccacaggaagaccaccgcctcaaccaggaaggtgtcgcttgcaccacaggccaatctgactgagctggacatctactccagacggctttcacaggagacgggccttgaaattagtgaggagattaatgaagaggacttgaaggagtgcttttttgacgatatggagtcaattcctgccgtgacaacctggaatacgtacctaaggtacattacagtccataaaagtctgattttcgtgctgatctggtgtcttgtgatttttttggccgaagtggcagcttctctcgtggttttgtggctgcttgggaacactccccttcaagacaaggggaatagtacccattccagaaacaatagctacgctgtgatcattactagcacttctagttactatgtcttttatatatacgtgggagtggcagatactttactcgcaatggggttcttccgtggcctgcccctcgtgcacaccctcatcacggtaagcaaaatcttgcatcacaaaatgctgcacagcgtgctgcaggcaccaatgagtactctgaatactttgaaagcaggagggatcttgaataggtttagtaaggatatagctattctcgatgacctgctgcctctgacaattttcgatttcatccagctcttattgattgtcataggagccattgcggttgtggcggtgctgcagccctacatcttcgttgccactgtgccagttatagtcgccttcatcatgctaagggcctattttctgcaaacatcgcaacagcttaagcagctagaaagtgagggccgctccccaatctttacccacctggtgacctccctgaaaggtctctggactctgcgcgcatttgggagacaaccgtactttgaaaccctcttccacaaagctttaaatcttcataccgctaactggtttctgtaccttagcaccttgcgctggtttcagatgaggatcgaaatgatctttgtgatcttcttcattgcggtgaccttcatctccatactgactaccggcgaaggagagggacgagtgggcatcattctcactctggccatgaatattatgagcacgctgcagtgggctgtcaatagttccattgacgtcgactccttgatgcgaagcgtgtcccgcgtcttcaagttcattgacatgcccaccgagggtaaaccaaccaagagcacgaaaccttacaaaaacggtcagttaagcaaggtcatgattatcgagaatagtcatgtgaaaaaggacgacatatggccatccggaggccagatgaccgtgaaagacctcactgccaaatacactgaaggagggaatgccatcctggagaacatcagcttctcgataagccctggacagagggtgggtctgctcggacgcacaggctctggcaagagcacgctgctaagcgcctttctccggctgttaaacaccgagggggagatacaaattgatggggtcagctgggactcaattacactgcagcagtggaggaaggccttcggagtcatccctcagaaggtttttattttctccggtacctttagaaaaaacctggacccttacgagcagtggagcgaccaggagatctggaaggtggccgacgaggttggtcttagatctgtgatcgaacaattcccagggaagttggacttcgttctggtcgatgggggttgtgttctgagccatggacataaacaactgatgtgcttagcaaggtctgtgctcagcaaggctaagatcctcttgctggacgaacccagcgctcacctggaccctgttacctaccagatcataagacgtaccctcaaacaggcttttgcagactgtaccgtaattttgtgcgaacacagaattgaggccatgttggaatgtcagcagttcctggtgatcgaagagaacaaagtgagacagtacgacagtatacagaaattattaaacgagcgcagcctctttcgtcaggccattagtcccagcgacagagtgaaactatttccacatcggaattcttcgaaatgtaagtctaaaccccagatagctgccctgaaagaagagacagaagaggaagtgcaggacactcgactg

SEQ ID NO: 9695 - DNA, 4440 bp, Artificial Sequence
  derived and/or modified sequence
atgcaaagatcaccattagaaaaagcatcagtagtatctaaattgtttttctcatggacaagaccaattttaagaaaaggttatagacaacgtttagaattaagtgatatttatcaaattccaagtgttgatagtgcagataacttaagtgaaaaacttgaaagagaatgggatagagaattagcttcaaaaaaaaatccaaagttaattaatgcacttagaagatgctttttttggagattcatgttctatggaatatttctttatctaggagaagttactaaagcagttcaaccacttttgttaggaagaattattgcttcatacgatccagataacaaggaggaaagaagtattgcaatttatttagggatcggattgtgccttttatttattgttagaacacttttattacatcctgctatatttggattacatcatattggaatgcaaatgcgtattgctatgttttctttaatttataaaaaaactttaaaattatctagtagagttttagataaaatatcaattgggcaattagttagtttattaagcaataatttaaataaatttgatgagggtcttgctcttgcacatttcgtttggattgctccattacaagttgctttgttaatgggacttatttgggaacttcttcaagcatcagccttttgcggattaggatttttaattgttttagcattgttccaagctggattaggaagaatgatgatgaagtatcgtgatcaaagagcaggaaaaatttctgagaggttagttattacttctgaaatgattgagaatattcaaagtgttaaggcttattgttgggaagaagctatggaaaaaatgattgaaaatcttagacagacagaacttaaacttacacgaaaagcagcatatgttagatattttaactctagtgctttttttttctcaggatttttcgtggtttttctttcagttttgccatatgcccttattaaaggtataattttgcgtaaaatttttacaacaatatcattttgtatagttttacgtatggctgttactagacagtttccttgggctgttcaaacatggtatgattcattgggagcaataaataaaattcaagattttttacaaaaacaagaatataaaactttagaatataaccttacaacaactgaagttgtaatggaaaatgtaacagcattttgggaagaaggatttggagaattgttcgaaaaggcaaaacaaaataataataatcgaaaaacttctaatggtgacgatagtctttttttctcaaatttctctttattaggaactccagttttaaaagatatcaattttaaaattgaaagaggtcaacttttagccgtagctggatcaactggagctggaaaaacttcgttgcttatggtgattatgggagaacttgaaccatctgaaggtaaaattaaacattcaggaagaattagtttctgttctcaattttcttggattatgccaggtacaattaaagaaaatattattttcggagtatcatatgatgaatatagatatagatcagttattaaagcttgtcaacttgaagaagatattagtaaatttgctgaaaaagacaatattgttttaggagaaggaggaattacactttcaggaggacaaagagcacgtatctcattggcaagagctgtttataaagatgctgatctttatttattagacagcccttttggatatttagatgttttgactgaaaaagaaatttttgaaagttgtgtttgtaaattaatggcaaataaaacaagaattttagttactagtaaaatggaacatttaaaaaaagctgataaaattttaatcttacatgaaggatcatcttatttttatggaactttctctgaacttcaaaatttacaaccagattttagttctaaattaatgggatgtgacagtttcgatcaattctcagcagaaagacgtaactctattttgactgaaacattacataggtttagtttagagggtgatgctccagtttcatggactgaaaccaaaaaacaatcattcaaacaaactggagaattcggagaaaaaagaaagaattctattttaaaccctattaactctattagaaaattttcaattgttcaaaaaactccattacaaatgaatggaattgaagaagattcagatgaaccacttgaaagaagactttctcttgtacctgattcagagcaaggtgaagcaattttaccacgaatttcagttatttctacaggaccaacacttcaagcaagaagacgacaatctgttcttaatttgatgactcattcagttaatcagggacaaaatattcatagaaagacaacagcttctacacgtaaagttagccttgcacctcaagctaatctaacagaacttgatatttattcaagacgtttatctcaagaaacaggtttagaaattagtgaagaaattaatgaagaagatcttaaagagtgtttttttgatgatatggaatctataccagctgtaacaacatggaatacttatttaagatatattactgtacataaatcattgatttttgttttaatttggtgtttagttatttttcttgcagaggttgcagcatcattagttgttctttggctccttggaaatactcctttacaagataaaggaaattctactcatagtagaaataattcatatgcagttattataacctcaacatctagttattatgttttttatatttacgttggagttgcagatactcttcttgcaatgggattcttcagaggattgcctttagttcatacattaattactgtttcaaaaattcttcatcataaaatgcttcatagtgttttacaagctccaatgagtactttaaatactcttaaggcaggaggaatattaaatagatttagcaaagatatagctattcttgacgacttattaccattaacaatattcgatttcattcaattattacttatcgtaattggagctattgcagttgtagcagttcttcaaccatatatttttgtcgctacagttccagttattgtagcttttattatgcttagagcatatttcttacaaacaagtcaacaattaaaacaattagaatcagagggaagatctccaatttttactcatcttgttacttctcttaaaggtttatggactcttcgtgcttttggaagacaaccatattttgaaactttgtttcataaagcattaaatcttcatactgctaattggtttctttaccttagtaccttaagatggtttcaaatgagaattgaaatgatatttgttatcttttttattgctgttacatttattagtattttaactactggagagggagaaggtagagttggtattattcttacacttgctatgaatattatgtcaactcttcaatgggcagttaattcatctattgatgtagatagtctaatgagatcagtttctcgtgtgttcaagtttattgatatgcctactgaaggaaaacctactaaatcaacaaaaccttacaaaaatggacaattatccaaagttatgataattgagaattcacatgttaaaaaagatgatatttggccatcaggaggacaaatgacggttaaagatttaactgcaaaatatacagaaggaggtaatgcaatattagaaaatatttcattttcaatatcacctggacaacgagtaggtttattaggaagaacaggatcaggaaagagtacattattatcggcattcttacgtttacttaatacagagggagaaattcaaattgatggagtaagctgggatagcatcactctacaacaatggagaaaagcatttggtgtaataccacagaaagttttcattttttctggaactttcagaaaaaatttagatccttatgaacaatggtcagaccaagaaatttggaaagttgcagacgaggttggattaaggtccgttattgaacaatttcctggaaaattagattttgtacttgttgatggaggatgtgtattatcacatggacataaacaattaatgtgtcttgcaaggagtgttctttcaaaggctaaaattttattattagatgaaccaagtgcacatcttgatcctgtaacttatcaaattattagaagaacattaaaacaagcatttgcagactgtacagttatattgtgtgaacacagaattgaagctatgttagaatgtcaacaatttcttgtaattgaagaaaataaggttagacaatatgattcaattcaaaaattacttaatgaacgtagtttatttcgacaagcaatttcaccatctgatcgtgttaaattatttccacatagaaattcaagtaagtgtaagtcaaaaccacaaatagctgctcttaaagaagaaactgaagaagaagtacaagatacaagactt

SEQ ID NO: 9696 - DNA, 4440 bp, Artificial Sequence
  derived and/or modified sequence
atgcagcgcagtcccctggagaaggcatcagtggtatccaagcttttcttttcttggacacgcccaattcttaggaagggctacaggcagaggctcgaactctctgacatttatcagatcccttcagtggactcagctgacaatctttctgagaagttggagagggagtgggacagggaacttgctagcaagaagaatcccaagttgatcaacgcgttgaggaggtgctttttctggagatttatgttctatggcatcttcctttacctgggcgaggtgacaaaggcagttcagcctttgcttttgggccgcatcatcgcctcctatgatcccgataacaaggaagaaaggagcatcgctatttacctgggcataggcctgtgtcttctgtttattgtgaggaccctgcttttgcaccctgcgattttcggcctgcatcatataggcatgcagatgagaatcgccatgttctcacttatttataagaaaaccctgaagctcagcagtagggttcttgacaagatttctattggtcaattggtatcactgttgtcaaacaacctgaacaagttcgacgaaggtctcgcacttgctcatttcgtgtggatcgcccctttgcaggtggccctgttgatgggtctcatatgggagctgcttcaagccagcgccttctgtggtcttggattcctcatcgtgctggcattgttccaggccggactgggcaggatgatgatgaagtaccgcgatcagagagccggtaagatctccgaacgcttggtgattactagcgagatgattgagaatatccagtctgtgaaggcttactgttgggaagaggccatggaaaagatgatagagaatctgaggcagaccgagttgaagcttactagaaaagcagcgtatgttcgctactttaactcctctgctttctttttcagcggattttttgtggtgttccttagcgtcctcccctacgctctcataaagggtatcatccttcgcaagatcttcactaccatttccttctgcattgttctgaggatggccgtgacaagacagtttccatgggcggtgcagacctggtacgactctcttggagccatcaacaagatccaggattttctccagaagcaggagtataaaaccttggaatacaaccttactactacagaagtcgtgatggagaacgtaaccgccttctgggaggaaggcttcggtgagttgtttgaaaaagccaagcagaacaacaacaaccgcaagacgtccaatggagacgacagcttgtttttctctaacttctcactgctcggcacaccagtcctgaaagacataaatttcaagatagagaggggccagctgctcgccgtggccggttccaccggagccggcaaaactagcctgctgatggttatcatgggcgagctcgaaccttccgaaggaaaaattaagcactccggtagaataagtttctgcagccagttcagctggattatgccgggcaccatcaaggagaacatcatatttggtgtcagttatgacgagtataggtaccgcagcgtgatcaaggcatgccagctggaagaggatataagtaagttcgccgagaaggataacatcgttctcggagagggcggtatcacgctcagcggtggccaaagagctaggatttctctggctagagctgtctacaaggatgccgacctttatctgctggactccccgtttggttatctcgacgtactgacagagaaggagatattcgagagctgtgtctgcaaactcatggcgaataagacacgcattctggtcacttccaagatggagcacctgaaaaaggcagacaaaattttgatccttcatgaaggttccagttacttctacggtacattttccgaattgcagaatttgcaaccagacttttcatcaaaattgatgggttgcgattcatttgaccagttttcagcagaaagaagaaatagcatcttgacagaaactttgcaccgcttttctctggaaggtgacgcgccggtgagttggacagaaactaagaaacagtcctttaaacagacaggtgaatttggagaaaagagaaagaattctattttgaatcccatcaactccattagaaaattctccattgtgcaaaaaacacctcttcagatgaacggaatagaagaagattccgatgaaccactggagaggagacttagcctggtgcctgatagcgagcaaggcgaggcaattctcccccgcatctccgtgatttccaccggccccacattgcaagccagacgccgccaatctgtcttgaatctcatgacgcactctgttaaccagggtcagaatatccacaggaagacgactgcctcaaccagaaaggttagcctggccccccaagcgaacctgacagaattggacatctactccagaaggctctcccaggagacgggtcttgagataagtgaagagatcaacgaggaagacttgaaagaatgcttcttcgatgatatggaaagtatcccagcggttacgacctggaatacatacttgcgctacattactgtccacaagtccctcatcttcgtgctgatttggtgcctcgtaatcttcctcgctgaggtcgcagcatcccttgtcgtgctgtggcttttgggcaacacacctctccaggataagggcaatagtacccactctaggaataactcttacgcagtcataattacaagcacatcctcctactatgtcttctacatttacgttggcgtggctgatacattgcttgcaatgggtttcttcagaggactccccctggttcacaccctcatcacagtgagtaagatcctgcaccacaaaatgttgcatagcgtgctccaagctccaatgtctacgttgaatactttgaaggcaggaggtattcttaacagattctcaaaagacatcgcgatccttgatgaccttcttcctctgacaatctttgacttcatccagcttctgctcatcgttatcggtgcgatcgccgtcgtggcagttctgcagccttatatcttcgtggctaccgtgccggtcattgtcgctttcataatgctgagagcctactttcttcagacatcccaacagcttaagcagctcgagtcagagggcaggtccccaatttttacacacctggtaaccagtctgaagggcctgtggacgctgcgcgcatttggaaggcagccctactttgaaactctgtttcataaagcccttaatctgcatactgctaactggttcctctacctgagtacactccgctggtttcaaatgaggatcgaaatgatttttgtcatcttcttcatcgccgtgactttcatcagcatactgactacaggcgaaggcgagggaagagtcggaatcattctgactcttgccatgaacattatgagcactctgcagtgggccgtcaattcctccatagatgtagactccttgatgcgctctgtttcccgcgtttttaagttcatcgatatgcccactgaaggtaaacccactaagagtaccaagccatacaaaaacggacagctctctaaggttatgattattgagaacagccatgttaaaaaagacgacatatggcctagcggaggtcaaatgacagtaaaggatctcaccgctaaatatactgagggcggaaatgctattctcgagaatatttcattcagtataagcccaggtcagagagtgggcttgctgggccgcacaggatccggaaaaagtactcttttgtctgccttcttgcgcctgctgaacactgagggtgagatacagatcgacggtgtctcatgggacagtatcacattgcagcagtggagaaaggctttcggtgttattcctcaaaaagtcttcattttcagcggaaccttcaggaagaacctggatccatatgaacagtggtcagatcaggagatctggaaggtggctgacgaggtgggtttgaggagcgttatcgagcaatttccaggcaaactggacttcgtgctcgtggacggcggctgtgtgctgtcccacggtcataagcagctcatgtgtttggccaggagtgtgctgagcaaggctaagatactgctgcttgacgagccgtccgctcacctggacccagtgacataccaaattattaggaggacccttaaacaggcgtttgctgactgcactgttattctctgcgaacacagaatcgaggccatgctggaatgtcagcagtttcttgtgattgaggaaaataaagtaaggcaatacgactcaattcagaaactcttgaacgaaagatccctgttccgccaagccatcagtcccagcgacagggtgaaactcttccctcacagaaattcctccaagtgcaaaagcaaaccacaaattgctgctctgaaggaggaaaccgaagaggaggtgcaggatacacgcctg

SEQ ID NO: 9697 - DNA, 4440 bp, Artificial Sequence
  derived and/or modified sequence
atgcagcgctcccctctggagaaggcgtcagtggtcagcaagctcttctttagttggacccgacccattttgcgcaaaggataccggcagcgacttgagctgtcggacatttaccagatcccttcagtcgattccgccgataatctttcggaaaagctggaaagggagtgggaccgagaacttgcatccaagaagaacccaaagctgatcaatgctctccgcagatgtttcttttggcgctttatgttttacggcatatttctttacttgggtgaagtgactaaggcagtgcaacctctgctgcttgggcgaattatcgctagctacgatccagacaataaggaggaacgttcgatcgccatttacttgggaatcggtctgtgccttttgtttattgtgagaactttgcttctgcacccagccatatttggattgcaccacataggtatgcaaatgagaattgcgatgttttcactgatatacaagaaaacgctcaagctctcatcgagagtgcttgacaagatctcgattggacaacttgtgtccttgctgtccaataacctgaacaagtttgacgagggccttgcacttgcccattttgtctggattgcacctcttcaagtcgcactcctgatgggacttatctgggaattgcttcaagcatccgcattctgtggcctgggttttctcattgtgttggccttgtttcaggcaggcctgggaagaatgatgatgaagtatcgcgatcagcgtgcgggcaagatttcagagagactggtgatcacctcagagatgatcgagaatatacagtcggtcaaggcatactgttgggaagaggccatggaaaagatgatagagaatttgaggcagaccgagctgaaacttacgcggaaggcagcatacgtgcgatactttaactcatctgccttctttttcagcggcttctttgtggtgtttctttccgtcctcccatacgcgctgattaagggcatcattctgcgtaagatctttactacgatttcgttttgcatcgtcctgcggatggcagtgactcgtcagtttccatgggccgtgcagacgtggtacgattcgctgggagcaattaacaaaatccaggattttcttcaaaagcaggaatacaagactttggaatacaacctgaccactactgaagtggtcatggaaaacgtgactgctttttgggaagaaggctttggagagctgtttgaaaaggcaaagcagaacaacaataaccgtaagacgtcaaacggcgatgattcgttgttcttttccaacttttccttgctcgggactccagtactgaaagatatcaacttcaaaatcgaacgaggccagctgctggccgtggcggggagcactggtgcaggaaaaacctccctgcttatggtaatcatgggcgagcttgaaccgtcagaagggaaaatcaaacattccggtagaatcagtttctgtagccaattctcatggatcatgcccggcactattaaggagaacattatcttcggggtgtcgtacgacgaataccgctacaggagcgtgatcaaggcctgccagctggaagaagatataagcaagttcgcagagaaggataacattgtgctgggtgaaggtggtataaccctgtcaggtggacaacgagcaaggatcagcctcgctagggcagtgtacaaagacgcagatttgtacctgctcgactccccctttggttacctggatgtgctcactgagaaggagattttcgaatcgtgtgtctgcaagctgatggctaataagactcgaatcctcgtgacctcgaagatggagcatctgaagaaggctgacaaaattcttatacttcacgaaggaagctcctacttctacggtaccttttccgagctgcaaaacctccaaccggatttctcatccaaactgatggggtgtgattcgttcgatcaattttcagcagaacgccgcaattctattctgaccgaaaccttgcacaggttcagcctcgaaggtgatgcacctgtctcgtggaccgaaactaagaagcaatcatttaagcagaccggtgaattcggagaaaaaagaaagaactccatccttaatccaataaactccattcgtaagttttccattgtgcaaaagacgcctctgcaaatgaacggaattgaagaagatagcgatgagccattggaacgtcgactgtctcttgtgcccgattctgaacaaggggaagcgattcttcctcgaatctccgtgattagcaccgggcctacccttcaggcccgccggagacagtccgtcctgaaccttatgactcactcggtcaaccaaggtcaaaacatccatagaaaaacgaccgcatcgacccggaaggtatcccttgcaccccaagcaaacctgactgagctcgacatttacagccggcgactctcccaggaaactggtctggaaatctcggaagagattaatgaggaagatctgaaggagtgttttttcgatgacatggaatcaattccggctgtcaccacctggaacacctacctgaggtatatcactgtccataagagcctgatctttgtgctcatttggtgcctcgtgatttttctcgccgaagtggcagcaagccttgtggtcctgtggttgttgggtaacactcctctgcaggacaagggaaatagcacccattcccgaaacaattcatatgcagtcattatcacttcaacttcatcctactacgtattctacatttacgtgggagtcgccgataccctgctggcaatgggatttttcaggggtctgcctctggtccataccctgattacggtttcgaaaattctgcaccataagatgcttcacagcgttctccaagcgccaatgagcaccctgaacactcttaaggcaggtggaattctgaataggttttcgaaggatatcgcgattctcgacgaccttcttcccctcaccatttttgacttcattcaactccttttgattgtgatcggagcaattgcagtggtcgcagtgctgcaaccatacatatttgtggccaccgtccccgtgattgtggcgtttatcatgctgcgcgcctatttccttcaaacctcgcaacagctgaaacagcttgaatccgaagggcgatcccctatcttcactcatctggtgacctcactgaaaggactctggactctgcgcgcatttggccggcagccatactttgaaaccctttttcataaggcactgaatttgcataccgcaaactggttcctttaccttagcactcttaggtggttccaaatgcgtatcgagatgatattcgttatcttctttattgcggtgactttcattagcatcctgacgactggtgaaggcgagggacgggtgggaataatccttacccttgcaatgaacattatgagcacccttcagtgggcagtgaattcatctattgatgtggactcacttatgcggtccgtttcgagagtctttaagttcatcgacatgcctaccgagggaaagcctacgaaaagcactaaaccttataagaatgggcaactgtccaaagtgatgatcatagaaaactcacatgtcaagaaggatgatatttggcctagcggaggccagatgactgtgaaggatcttactgcaaaatacactgagggtggcaatgcgattctggaaaacatatccttttccatttccccagggcagcgtgtcggtctgcttggtcggaccggatccggcaaatcgactcttctttcagcgttcctcagactgctcaatactgagggagaaattcaaatcgacggcgtgtcatgggacagcattacgcttcaacagtggcggaaggcctttggcgtgatccctcagaaagtgttcatcttttcgggaacctttcggaagaaccttgatccttatgagcaatggagcgatcaagaaatttggaaagtggccgatgaggtgggattgcgttcggttattgaacaattccccggaaagctggactttgtgctcgtcgacggagggtgtgtgcttagccacgggcataagcagcttatgtgtcttgcccgatctgtgctttccaaagcgaaaatactgttgctcgacgaaccttcggctcacctggacccagtcacgtaccaaatcatacggagaacccttaaacaagcatttgctgattgtaccgtgattttgtgtgaacatcgaattgaagccatgctggaatgccaacagttcctcgtgattgaggaaaacaaagtgagacaatacgatagcattcaaaaactgcttaatgaaaggagtctgttcagacaagctattagcccgtcagatagagtgaagctctttcctcataggaattcgtccaagtgtaagtcgaaaccgcagattgcagccctcaaggaagagactgaagaagaagtccaagacacccgactg

SEQ ID NO: 9698 - DNA, 4440 bp, Artificial Sequence
  derived and/or modified sequence
atgcaaagatccccgttggaaaaggcgtccgtggtgagcaagctcttcttttcgtggactcgcccgatcctgcggaagggatacagacaacgcttggagttgtccgatatctaccagattccgagtgtggacagcgctgataacctgtcagagaagctggagagggaatgggacagggaactggcatcaaagaagaaccctaaactcatcaatgccctccggaggtgttttttctggcgcttcatgttctacggaattttcctgtacctgggagaggtcactaaggccgtccagccactgctgctcgggcggattatcgcatcgtacgacccagacaacaaggaggaaagatccatcgccatctacctgggaattggcctttgccttcttttcatcgtgagaactctcctgctgcacccagccatctttggattgcaccatatcggcatgcaaatgcgcatcgctatgttctcactgatttacaagaaaaccctgaagctctcctcaagagtgctcgacaagatctccatcggccagctcgtgtccctgctgagcaacaacctgaacaagtttgacgagggacttgccctcgcgcacttcgtgtggatcgcgcctctgcaggtggctcttctcatgggactgatctgggagctgctccaggcttcggcgttttgcggactgggattcctgatcgtgctggccctcttccaggcaggactggggcggatgatgatgaagtaccgggatcaacgcgccggcaaaatctcagaaaggttggtgatcacgtcggaaatgatcgagaatattcaatccgtcaaagcatactgctgggaagaggcgatggaaaagatgatcgaaaacttgcgccagaccgaactgaagctcacccgcaaggctgcatacgtccggtacttcaattcgtccgcattcttcttctcaggattcttcgttgtgttcctgtcggtgctgccgtatgccctgatcaagggaatcatcctcaggaagatctttacgaccattagcttctgcatcgtgctgagaatggcagtgacccgccagttcccatgggctgtgcaaacttggtacgattcactgggcgcgatcaacaagatccaggacttccttcagaagcaagagtacaagaccctggaatacaatctgactaccaccgaagtggtgatggagaatgtgaccgcgttctgggaggaagggttcggggaactgtttgagaaggccaagcagaataacaataaccgaaagacttcgaacggcgacgattcgctgttcttctccaacttttccctcctcggtactccggtcctcaaggacatcaatttcaaaatcgaaagaggccagctcctggctgtcgccggaagcaccggcgccggcaagacctccctgctgatggtgatcatgggagaactggagccgtcagaagggaagatcaagcacagcgggagaatctccttctgtagccaattctcctggatcatgcccggaactatcaaagaaaacatcatttttggagtcagctacgacgaatacaggtaccgctccgtgatcaaggcgtgtcagttggaggaggatatcagcaagttcgccgaaaaggacaacatcgtgctgggagaggggggcattacgctgtcgggaggacagcgcgcgcggatttccctggctagagctgtgtacaaggacgcagacctgtacctgctggactctccgttcggctacctcgacgtgctgaccgagaaggagatattcgaatcgtgtgtctgcaaactgatggccaacaagacccgcatcctggtgacctcaaaaatggaacacctcaagaaggctgacaaaatcctgattctccatgaaggctcctcctacttctacggcacttttagcgaacttcagaacctccaacccgatttcagctcaaaactcatgggctgcgactccttcgaccagttcagcgccgagcggcgcaattcgatcctgaccgaaactctgcatcgctttagcctggagggagacgcccctgtcagctggaccgaaaccaagaagcagtctttcaagcagaccggggagtttggagaaaagaggaagaattccatcctcaacccaatcaacagcatccggaaattcagcatcgtgcaaaagaccccgcttcaaatgaatggcattgaagaggattcagatgaacctctcgagcggagactttcactggtccctgatagcgaacaaggcgaagcaattctgcctaggatcagcgtgattagcactggaccgactctgcaagccaggaggcgccaaagcgtcctgaacctgatgactcactcggtgaaccagggccagaacatccaccgcaaaacgaccgcgtcaacccgcaaggtgtcacttgccccacaagcaaacctgaccgaattggacatctactcccgccggctgtcccaggagactgggctggaaatctccgaagaaatcaatgaggaggatctgaaggaatgttttttcgacgatatggaaagcatcccggccgtgaccacctggaacacctacctcaggtacatcactgtgcataagagcctcattttcgtcttgatctggtgcctggtgatcttccttgccgaagtggcggcatcccttgtggttctgtggctcctgggcaatacccctctgcaggacaagggaaatagcactcattcacggaataactcctacgccgtgatcatcacctcaacgtcatcgtactacgtgttctacatctacgtcggggtggcggataccctgcttgcaatgggttttttccgcggacttccgttggtccatactctgatcactgtgtccaaaatcttgcatcataagatgctccacagcgtcctgcaagcaccgatgtcgactctcaacactctgaaggccggagggattctgaataggttctccaaggacattgccatcctggatgacctcctgccgctcacgatcttcgatttcatccagctgctcctgatcgtgattggcgctatcgccgtggtcgccgtcctccagccctacatctttgtcgccacggtgccggtgatagtggcgttcattatgttgcgggcatacttcctccagactagccagcagctgaagcaactggaatcagaggggcggagccccattttcactcatctggtgacctccctcaagggactctggaccctgagagccttcgggcggcaaccgtacttcgaaactttgtttcacaaggcccttaacttgcatacggctaactggttcctctacctttcaaccctcagatggtttcagatgcgcatagagatgatctttgtgatctttttcatcgccgtgactttcatctccatcctgaccaccggcgaaggagagggtcgcgtcggaatcattttgacccttgcgatgaatatcatgtcgacgctgcagtgggccgttaatagctcaatcgatgtggactcgctgatgcgctcggtgtcacgggtgttcaagttcatcgacatgccaactgaagggaaaccaactaagagcaccaaaccgtacaagaacggtcagctttcgaaggtgatgataattgaaaattcgcacgtgaaaaaagacgacatctggccatccggaggacaaatgaccgtgaaagacctcaccgcgaagtacaccgagggcggaaacgccatcctggaaaacatctccttcagcattagcccgggccagagagtcggactgctcggtcgcaccggatcagggaagtctactcttctctcagctttcctgcgtttgctcaatacggaaggggagatccagatcgacggagtgtcctgggattcaatcaccttgcagcagtggcgcaaggcctttggagtgatcccgcagaaggtgttcattttctcgggaactttcagaaagaacctggatccgtacgagcaatggtcagaccaggaaatctggaaagtggcggatgaagttggactgagatccgtgatcgaacagttcccaggcaagctggacttcgtgttggtcgatggcggatgtgtgctgtcccatggccacaaacagttgatgtgcctggccagaagcgtcctcagtaaggcaaagatcttgctgctggatgaaccgtccgcacatttggacccggtgacttaccagatcatacggaggactctgaagcaggccttcgctgactgtacggtgattttgtgcgagcacagaatcgaagctatgctggagtgtcagcagtttcttgtgatcgaagaaaacaaagtaagacaatacgactcgatccaaaagttgctcaacgaaagatcgctctttcggcaggccatctcaccgtccgatcgagtcaaactcttcccgcacaggaattcttccaagtgcaagtccaaaccgcaaattgctgcactgaaggaagaaaccgaggaagaagttcaagacacccggctg

SEQ ID NO: 9699 - DNA, 4440 bp, Artificial Sequence
  derived and/or modified sequence
atgcaacgctcccctctcgagaaggcctctgtggtaagtaaactgtttttcagctggacacgcccaattctgcgtaagggctatagacaaaggctcgaactgtcagacatttaccagatcccttctgtggactcagcagataatctgagcgagaagctggagagagaatgggatagagagctggcatcaaagaaaaacccaaagctgataaacgcactccggcgttgcttcttctggcgattcatgttctacggaattttcctctacttgggcgaggttaccaaggccgtgcagcctttgcttctcggtagaattatcgccagttatgacccagataataaggaagaaagatcaatcgccatctatctgggtataggactatgtctcctcttcattgtgaggactttgctgttacaccctgccatatttgggctacatcacattggcatgcagatgagaattgcgatgttcagcctcatctacaaaaaaacattgaagctcagctcacgagtgctcgacaaaatatccataggccagctggtcagcctgctgagcaataatctcaacaagtttgacgaggggcttgcactggctcacttcgtctggattgccccgttacaggttgcactgctgatgggactgatttgggagctgttacaggcgtctgccttttgcggcctggggttccttattgtcttagctctgtttcaggccgggctcggaaggatgatgatgaagtatcgagatcaacgggccggaaaaataagcgaaaggctagtcattacttcagaaatgattgaaaatattcagtcagtgaaagcctattgttgggaggaagctatggagaaaatgattgaaaatctgcggcaaaccgagctgaaactgacaaggaaggctgcctatgtgcgatacttcaatagtagcgcattttttttctcaggattctttgttgtcttcctgtccgttttgccatatgccctgatcaagggaataatcctacgtaagatctttacaacaatcagcttctgtatcgtgctgagaatggccgtgacccgacagtttccatgggcagtgcagacttggtacgatagcctcggtgccatcaataaaatacaggattttctacagaagcaggaatataagacacttgagtataatctgaccaccaccgaggtggtgatggaaaacgtcacagcgttctgggaagaagggtttggcgagttgtttgaaaaggccaagcaaaacaacaataatagaaaaacatctaacggcgacgattccttattcttttccaactttagcctgcttggcactcctgtgctgaaagatatcaacttcaagattgagcgaggccagctattggccgtggccggatcaactggagctggcaagacctcattgctgatggttattatgggagagctagaaccaagtgaaggaaaaatcaagcactccggccgcatctccttttgcagtcaattctcctggataatgcccggaaccattaaggaaaatatcatattcggcgtttcttacgacgaatatagataccgaagcgttatcaaggcttgtcagctcgaagaagacattagcaaattcgctgagaaggacaacattgtgctgggagaaggcggtatcacattaagcggaggccagcgggctaggatctccctggcccgggccgtgtacaaagatgcagacctgtacctgttagattccccctttggttacctggatgtgcttacagaaaaagaaatcttcgagagttgtgtttgtaaactaatggcaaacaagaccagaatactggtcacatctaagatggagcatctgaaaaaggccgacaagattctaattctccatgaagggtcctcatacttttacgggacatttagtgagcttcagaacctgcagccagatttctcctccaagctcatgggctgcgattcttttgatcagttctcagccgagaggagaaactctatcttgacagaaacactacatcgattctccctggaaggcgacgcccccgtgtcctggacagaaacaaagaaacagtccttcaagcagaccggagagttcggggagaaacgaaagaattcaatcttaaatcctatcaacagtatccggaagtttagtatcgtccagaagacgcccctccagatgaatgggatcgaggaggattctgacgaacctctcgagcggcggttgagcttggtgcccgatagcgaacagggagaggcgattctgcctcgcatcagcgtgatatctactggtcctactttgcaagctagaaggaggcagagcgtgttgaatctaatgacacactccgtgaaccaaggtcagaatattcaccgaaaaaccacggcatccactagaaaagtaagcctggcaccccaagccaacctgaccgaacttgatatttattccagacgtctctcccaggaaactgggctggagatttctgaagagataaatgaagaggacctgaaagaatgttttttcgatgatatggaatcgattcccgccgtcaccacttggaatacctacttgaggtatatcacagtgcataaatctttgatttttgtgcttatctggtgtctggtcatcttcttggcggaagttgccgcgtcgctcgtggtcctatggctgttaggaaacaccccactccaggacaagggcaactccacacacagtagaaataacagctacgccgtcataatcacctccacaagcagttactatgtattctatatttatgttggcgtcgccgacaccctgctagccatggggttctttagggggttgcctcttgtgcatacactgattacagtgtctaagatcctccatcataaaatgttgcacagtgttcttcaggcccctatgagcacccttaatacattgaaagcaggaggcatccttaaccgtttctcaaaggatatagccatcttagatgacctcctgccactgaccattttcgactttatccagctgctgcttattgtgattggggccatcgcagtggtagctgtgctacaaccttatattttcgtcgcaaccgtacccgtcatcgttgcttttattatgttgcgagcttattttctccaaacatcacaacagcttaagcagctcgaaagtgaaggtagaagtcctattttcactcaccttgtgacctccttaaaaggcctgtggaccctgagggcgtttgggaggcagccgtatttcgagaccctgttccacaaggccctcaatctacatacagcgaactggtttttgtatttgtcaaccctgaggtggttccaaatgagaatcgagatgattttcgtaattttcttcattgcagtgacattcatttcgatactcacaacgggcgaaggagagggacgcgtaggcataattctcacactggctatgaacattatgtctactctccagtgggcggtcaactcgagtatcgatgtggattcgctgatgagaagcgtcagcagggttttcaagttcatcgacatgcctactgaaggaaaacctaccaagagtaccaaaccgtataagaacggtcagctgtcgaaagtaatgatcattgaaaattcacatgtaaaaaaagatgatatttggccctccggcggtcaaatgacagtgaaggatctgacagctaaatataccgagggggggaatgccatcctagagaatatctccttcagcatctcacccgggcaacgagtgggcttattgggcagaaccggcagcggcaagagcaccctacttagtgcctttctgagattgctcaacacagagggggagattcaaatcgacggagtgagttgggactctatcaccctgcagcaatggcgcaaagctttcggggtcattccacagaaggtttttatctttagtgggacttttagaaagaatctggatccatacgaacaatggagcgatcaggagatctggaaagtggctgacgaagtgggcctacgtagcgtgattgaacagtttcccggaaagctggatttcgtcctggtggacggcggttgtgtgctatctcatgggcataagcagctcatgtgtctggccaggtccgtcctatcgaaggcaaaaattctgctcctggatgagccatccgcacacctggaccccgtgacttatcaaataatcagaaggacgctaaaacaggccttcgcggactgcacagtgatcctatgtgaacacagaatagaggctatgttagaatgtcagcagttcctggttattgaggaaaacaaagtgcgacagtacgattcaatacagaagcttctcaacgagcgttcactctttcggcaggcaatttcaccctccgacagggtcaaactcttccctcatagaaatagctcgaaatgcaagagcaaaccccagatcgctgcactgaaagaggagacggaggaagaagtccaagatacccgactt

SEQ ID NO: 9700 - DNA, 4440 bp, Artificial Sequence
  derived and/or modified sequence
atgcaacgctcgccgctggaaaaagcgtccgtagtctccaagctgttcttttcatggactcggccgatccttcggaagggctacagacaacggctggaattgtccgacatttaccagattccctccgtggactcagcggacaatctcagcgagaaactggaacgcgaatgggaccgggagctcgcgtcgaagaaaaacccgaaactgatcaacgccctccgcagatgcttcttttggcggtttatgttctatggaatcttcctgtacctgggtgaagtgaccaaagcggtgcagccactcctgctcggacggatcatcgcctcctacgatccggataacaaggaggagcggtcgatcgccatctacctggggattggtctgtgccttttgtttatcgtgcgcactctgcttctgcacccggcgatatttggattgcatcacatcggaatgcagatgcggattgcgatgttctccctcatctacaaaaagactctgaaactgtcctcacgcgtgctcgacaaaatctcgatcggacaactcgtctcactcctgtcgaataacctcaataagttcgacgagggactcgcactggcgcactttgtgtggatcgccccactccaggtggctctcctgatgggactcatctgggagctccttcaggcgtcggccttctgcggcctcggcttcctcatcgtcctggctctgtttcaggccggactgggcaggatgatgatgaagtaccgcgaccagcgggcaggcaagatttccgagaggttggtgatcacctcagaaatgatcgaaaacatccaatcggtcaaggcatactgttgggaagaagccatggagaaaatgattgagaacctccgacagacggagctgaagctcaccagaaaggccgcttacgtgcgctacttcaacagcagcgctttctttttctccgggttctttgttgtgtttctctccgtgctcccttacgctcttatcaaaggaatcatcttgcgaaagatcttcactacgatctcattttgtatcgtgctccggatggccgtgactaggcagttcccctgggccgtgcagacttggtacgacagcctcggagcgatcaacaagatccaagacttcctgcaaaagcaggaatacaagaccctggagtacaacctgactaccactgaagtcgtcatggagaacgtgaccgcgttctgggaggaggggttcggagaactgtttgagaaagcaaagcagaacaacaacaatcgcaagacctccaacggggatgactcacttttctttagcaacttctcactccttggaacgccggtgctgaaggatatcaatttcaaaatcgagcgcggtcaactgctggccgtggccggatcgactggggctgggaaaaccagcctcctcatggtgatcatgggtgaattggaaccgtccgagggaaagataaagcacagcgggcgcatttcgttctgctcgcaattcagctggatcatgccgggaacgatcaaagagaatatcattttcggagtgtcctacgacgagtaccggtacaggtcagtgatcaaggcgtgccagctggaggaagatatttccaagtttgccgaaaaggacaatatcgtgcttggagaaggtggcattaccctgagcgggggccaacgcgcaagaatctccctcgcccgtgcggtgtacaaagatgctgatctgtacctgctggactctcctttcggctacctggacgtcctgactgaaaaggagatcttcgaaagctgtgtgtgcaagttgatggcaaacaaaacgcggatccttgtgacctccaaaatggagcatcttaagaaagccgataagatcctgatcctgcatgagggaagctcctacttctacggaacgttctccgagcttcagaacttgcaaccagacttttcgtcgaaactcatgggatgcgactcgtttgatcaattcagtgccgaaagaagaaactcgatcctgacggagactctgcatagattctcgctggagggagacgccccagtgagctggaccgagactaagaagcagtccttcaagcaaaccggagagttcggagagaagaggaagaattctatcctgaaccctatcaactctatccgcaagttttcgatcgttcaaaagacccctttgcaaatgaatggcattgaggaggactcggatgagccacttgagagacgcctgtcccttgtgccggattcggagcaaggggaagctatcctccctaggatctccgtgatcagcaccggaccgaccctccaggctcggcgcaggcagtcagtgctgaacctgatgactcactccgtgaaccagggccagaacatccatcgaaagaccaccgcaagcacccggaaagtgtcccttgccccacaagccaatcttactgagctggacatctacagtagaaggctctcccaggagactggccttgaaatctccgaagagattaatgaggaggatctcaaagagtgtttctttgacgatatggagtcaatcccagcagtgaccacctggaatacctaccttcggtacatcacggtgcacaagtcgctgatcttcgtgctcatctggtgtctcgtcatttttcttgctgaggtcgcggcgagcctggtggtgctctggctcctgggcaacaccccactgcaagataaaggcaactccacccactcccggaataactcctacgcagtgatcataacctcgacctcctcatactacgtattctacatctacgtgggagtcgcagacactctcctggccatgggatttttcaggggcctgcccctggtgcacactctgatcaccgtgtccaagatcttgcatcacaagatgctgcactccgtgctgcaggctccgatgtcaactctcaacacgctgaaggctgggggcattctgaaccggttctcgaaagatatcgccatcctcgatgacttgttgcctctcactatcttcgactttatccagctgttgctcattgtcattggcgctatcgccgtggtggcggtgttgcagccttacattttcgtcgccactgtcccagtgatcgtcgccttcatcatgctgcgcgcttacttcctccagacttcacagcagctgaaacaactcgagtcggaaggtcgctcccctatcttcacccacctggttacttcactgaagggcctgtggactctgcgcgcgttcggacggcagccatactttgaaactctctttcataaagctctgaacctccacactgctaactggtttctttacctgtcgaccctcagatggtttcaaatgcggattgaaatgatcttcgtgatcttctttatagctgtgacttttatctcgattctcaccactggggaaggagaaggacgggtgggaatcatcctgaccctcgcgatgaacatcatgtcaaccctgcaatgggccgtgaacagctcaatcgacgtggattcgctcatgagaagcgtgtcccgggtgtttaagtttatcgacatgcccactgaaggtaaacccactaaatcaactaaaccatacaaaaatggacagctctcgaaggtgatgatcattgaaaacagccatgtgaagaaggacgacatttggccgtctggcggacagatgaccgttaaggatctgactgctaaatacactgagggaggcaatgccatcctggaaaacatttcgttctcaatctccccgggacagcgcgtgggactgttgggacgcaccggaagcggtaagagcactttgctgagcgcttttctgcggctcctgaacaccgaaggggagatccagatcgacggagtgagctgggactcgatcaccctccagcagtggagaaaggcctttggcgtgatcccgcagaaggtgttcatcttctcaggtaccttccggaagaatctcgacccatatgagcagtggtctgaccaggaaatctggaaggtcgccgatgaagtggggctgaggtccgtgatcgagcagtttccgggcaagctggactttgtgctggttgatggaggatgtgtgctgagccacggacacaaacaattgatgtgtctggcgcgcagcgtcctgtccaaagccaagatccttctgctggatgagccgtcggcccacctggacccggtgacctaccagatcattcggcgcactcttaagcaggcgttcgcggactgtactgtgattctgtgtgagcatcgtatcgaagcaatgctggaatgccaacaattcctggtcatcgaagagaataaggtccggcagtacgattcaatccagaagctgttgaacgagcggagcctgttccggcaggctatctcgccgtcggatcgcgtgaagctctttccgcatcggaattcgtcaaagtgcaaatcaaagccacagattgcggctctgaaggaagaaaccgaggaagaagtgcaggacacccgcctg

SEQ ID NO: 9701 - DNA, 4440 bp, Artificial Sequence
  derived and/or modified sequence
atgcagcgctcacctctagagaaggctagcgttgtgagcaaactgtttttctcttggactaggcctatcctgcgaaagggctacaggcagcgccttgagctgtcagatatataccagataccttctgttgactccgccgacaatcttagcgagaagctcgaacgggagtgggatagggaattggccagcaagaaaaacccaaagcttattaatgccttgcggagatgtttcttctggcgatttatgttttacgggatcttcctgtatctgggggaggtgacgaaagccgtgcagccgttgctattaggaagaatcatcgccagctacgatcccgacaataaggaggaacggtccattgcaatctatctgggcatcgggctttgcctgctcttcattgtccggacactgctgctccatcccgccatcttcggattgcatcatatcggaatgcagatgcgtatcgctatgttttccctgatttacaagaaaaccttgaaactctcctcccgagtgctcgataaaatctcaataggacagttggtgagtctcctctccaataacctgaataaatttgatgagggacttgcactggctcactttgtgtggatcgcgcccttgcaggtggcgcttctgatgggcctcatctgggagttgctgcaggcaagcgccttctgtggactcggtttcctaattgtgctcgctctgttccaggctggcctggggaggatgatgatgaaatatagggaccagcgcgccggcaagatatctgagaggcttgtcattacaagcgaaatgatagagaatatccagtccgtgaaggcttactgttgggaagaggccatggagaaaatgatcgaaaacctgcgacagacagagttgaagctgacacgtaaggcagcttacgtgagatattttaactctagcgccttttttttttcaggtttctttgtcgtctttctgtctgtgctgccttacgccttgatcaaaggaataatacttcggaagatcttcaccacgatcagtttttgcattgttctgcggatggctgttactcgccagttcccctgggccgtgcagacgtggtatgattcgcttggagccataaataagattcaggactttctgcaaaaacaggaatataaaaccttggaatataatcttacgaccacggaggtagtgatggaaaacgtaacggcgttctgggaagaggggtttggcgaactcttcgaaaaggcgaagcagaacaataataataggaaaacaagtaacggggatgattctctgtttttctctaacttttctctgcttggcactcctgtgttaaaggatattaactttaagatcgaaaggggtcagcttctcgccgtggcaggcagcacgggagccggcaagacgtccttgcttatggtaatcatgggagagctcgagccttcggagggaaaaatcaagcactccggacgaataagtttttgtagccagttcagctggattatgccggggaccatcaaggaaaacatcatttttggcgtgagttacgatgagtaccggtatagaagtgttattaaggcctgccagctggaggaagacatttcaaaattcgcggaaaaggacaacatcgtcttaggcgaaggaggcatcactttgagtggcggccaaagggcccgcatctccctggcacgggccgtgtacaaggatgcggacctttatctcctagacagccctttcggatacttggacgtcctgacggagaaggaaatatttgagtcatgtgtgtgtaagttaatggccaacaaaacccgcattctcgtcacctcaaaaatggaacatcttaaaaaggccgataaaattctgatattgcatgagggatcctcctatttctatggcactttttccgagctgcagaacttgcagcctgatttttccagtaagttaatgggatgcgattccttcgatcaattcagcgccgagcggcggaactccatcttgacagaaacactccatcgtttctcactcgagggcgatgctcccgtgagttggacagagacgaaaaagcaatcttttaagcagaccggtgagttcggcgaaaagcgaaagaattcaattttgaacccaataaactctattaggaaattcagcatcgtccaaaaaacacctctgcagatgaatggaatagaagaggatagcgatgagccgctcgagaggaggttatctctagtgcctgatagcgaacaaggtgaggcaattctcccgaggattagtgtgatatccactgggccaactctgcaggcccggcgacgtcagtccgtcctcaatctgatgacccactcagtgaaccagggccagaacattcacagaaaaaccactgcctctaccagaaaggtgtcacttgcccctcaggcgaatctcaccgaactggacatttactcccggaggctctcacaggagacgggacttgaaatatctgaagagataaatgaggaggatctgaaggaatgtttcttcgacgatatggaatccatacccgccgtaacaacatggaacacctacctgagatacataacagtgcacaagagtttgatttttgttctgatatggtgcctagtcatctttctggcggaggtggcagcctccttagtggtgctgtggctgctcggtaacaccccgctccaggataagggaaattcaacccacagtaggaacaattcctatgccgtgatcatcacatctacatcttcttattatgtgttttacatctacgtgggcgtggccgacaccctgctcgccatggggttctttcgaggtttgcctttggtgcacactctgattaccgtcagcaaaattctgcaccacaaaatgctgcacagtgtcctgcaagcacctatgtctacgctgaacactctgaaggcaggcggtatcctgaacagattttctaaggacatcgcaatactcgacgatctgctgcccctgacgatttttgatttcatacagttgctactcatcgtgataggagctatagcggtcgtggcggtgttgcaaccgtatatctttgtcgccactgttcccgtcatcgtagctttcattatgctcagagcctacttcctgcaaacatcccagcagctcaaacagctcgagtccgagggtaggtcccctatcttcacccacctggtgacttctctaaagggactctggactctcagggcgttcggtcgccagccctatttcgagactctcttccataaggccctgaatctgcacacagcgaactggtttctgtacctaagtacgcttaggtggttccaaatgaggatcgagatgatcttcgttattttcttcattgcagtcacttttattagcattcttactacgggggagggtgaaggacgagtcggaatcatcttaactctggctatgaacattatgtccaccctacaatgggccgtgaactctagtatcgacgtggactcacttatgagaagcgtgagccgagtgtttaagtttatcgacatgcctacagagggaaaacccacgaagtctaccaagccgtataaaaacggtcaacttagcaaggttatgattatagagaactcacacgtaaagaaggacgacatttggccatccggggggcagatgactgttaaggatctgacagctaagtacaccgagggcggcaacgcaatcctggagaatattagtttctctatttccccgggacagagagtggggcttttaggccggactgggtcaggaaaaagtaccttgctgagcgcatttctgcggctcctgaacactgaaggcgaaatccaaattgacggcgtgagctgggattcaatcaccttgcagcaatggcgtaaggctttcggggttattccacagaaggtgttcattttctctgggactttccggaaaaatctagacccctacgagcagtggtcagaccaagagatttggaaggtggctgacgaggtcggtctgcggagcgtcatcgagcaattccccgggaaactggatttcgtgctggtggacggtggctgtgtattgtcccatgggcacaaacagcttatgtgtctggcacggtctgtactgtccaaggctaaaattttactgctcgatgaaccttcagcgcatctagaccccgtgacctaccaaattatccggagaaccctaaagcaggcttttgctgactgtaccgtgatattgtgtgaacaccgcattgaggcaatgttggagtgccaacagttcttggtaatcgaagaaaacaaggtcaggcagtatgattcaattcaaaaactgctcaacgagcggtcactgttcaggcaggcgatcagccctagtgacagggtaaaactgttccctcaccggaatagctctaaatgtaaatccaaacctcaaattgccgcattgaaggaagagaccgaagaagaggtgcaggatactcggctg

SEQ ID NO: 9702 - DNA, 4440 bp, Artificial Sequence
  derived and/or modified sequence
atgcaacgatcccctcttgagaaggcatccgtggtgtcgaaacttttcttttcttggacgaggccaattttgagaaagggatacagacaaagactggaactgtctgatatctaccaaatccctagcgtggacagcgccgataacctttccgaaaagctggaacgagagtgggaccgggaattggcctcgaaaaagaatccaaagctgattaatgccctgaggagatgttttttctggaggtttatgttttacggcatttttctctaccttggcgaagtcaccaaggcggtgcagcctcttctgcttggtcgaatcatcgcatcgtatgaccctgataacaaggaagagcggtccattgcaatttacctgggaattggactctgtctcctctttattgtcagaaccctgcttcttcatcctgcgatatttgggctgcaccacataggaatgcaaatgcgcattgccatgttctccctgatttacaaaaagactttgaaattgtctagccgtgtcctggataagatctcaatcgggcagctcgtatccttgttgagcaacaatttgaacaagtttgatgaaggtcttgcattggcacactttgtgtggatcgcccctctgcaggtcgcactgctcatgggactgatctgggagctcctgcaggcctccgcattttgtggactgggctttctgatcgtgctggcactttttcaggccggactgggaagaatgatgatgaagtacagagatcaacgggcaggcaagattagcgaaagacttgtgattactagcgagatgattgagaatatccagtcggtcaaggcatactgctgggaagaagcgatggaaaagatgatagagaatctgagacaaactgaactgaaactcactcgaaaggctgcatacgtgagatacttcaatagctctgcattctttttctccggcttttttgtggtctttctcagcgtcctgccgtacgcacttatcaagggaatcattcttagaaagatattcaccaccatttccttttgtattgtgctcagaatggcggttacgcgccaatttccatgggcggtgcaaacttggtacgacagtcttggagccataaacaagattcaggattttctgcaaaagcaagagtacaagacgttggaatacaaccttacgactacggaagtggttatggagaacgtcaccgcattctgggaagagggatttggggaactttttgaaaaggccaaacagaacaacaataacagaaagacctcgaacggggacgattccctgtttttcagcaacttttccctgctgggaactccagtgctgaaggacattaacttcaagatcgaaagaggccaactcctcgcggtggcgggaagcactggagcagggaaaacttccctgctgatggtgattatgggtgaacttgaaccaagcgagggaaaaatcaagcactcaggtcggattagcttctgtagccaattttcatggattatgccaggcaccattaaagaaaacatcatttttggcgtgtcgtatgacgaatacagataccgctcagtgatcaaagcatgtcaacttgaagaagatatttccaaattcgcggaaaaggacaatattgtgctgggtgaagggggaataactctctccggaggccagagagccaggatctcgctcgcacgcgcggtgtacaaagacgcggatctgtatcttcttgatagcccctttgggtaccttgatgtgctcaccgagaaggagatattcgagtcgtgcgtctgcaagctgatggcaaataagaccaggattctggttacctccaagatggaacatcttaagaaagccgataagattcttatcctgcatgaggggtcaagctacttctacggaacgttttcggagctgcaaaacctgcaaccggatttctcgtccaaactcatgggatgcgattccttcgatcaattttcggctgagagacggaactcgatactgaccgaaacccttcatcgctttagcctggagggagatgcccctgtctcgtggaccgaaactaagaaacaatcgttcaagcagaccggagaattcggggagaaacggaaaaactccatattgaaccctatcaactccattcggaagtttagcatcgtgcaaaagacgcctctgcaaatgaatggcattgaggaggattcagatgaaccacttgagcgcagactgtcacttgtccctgactcggaacaaggagaggcaattcttcctcgcatcagtgtgatctcgactggaccaaccctgcaagcacggcgcagacaatcagtgttgaatctgatgacccattccgtgaaccagggtcagaacatccaccgcaagactactgcatccactaggaaggtcagtctggctccccaggcaaatcttacggaacttgacatttactcaagacgactgtcgcaggagactggtttggaaatttcagaggagattaacgaagaagatcttaaggagtgcttttttgatgatatggagtctattcctgcagtgaccacttggaatacctacttgaggtatatcactgtgcacaagtccctcatttttgtccttatttggtgtctggtgatattcctggcggaagtcgcagcttcccttgtggtcctgtggctgctgggcaatactcctctgcaggataagggtaattcaacccactcacgaaacaactcctacgccgtcattatcacttcgacctcatcatactacgtgttttacatctacgtgggtgtcgcggatactttgctggcaatgggatttttccgaggtctgccactggtgcacacccttataacggttagcaaaattcttcatcataagatgctccactccgtccttcaggctccaatgtccaccctcaacactctgaaggcgggaggaattctgaatcgattctcgaaggacatcgcaatcttggatgatctgctgccactcactattttcgatttcattcagctgctcctgatcgttataggagccatagcggtggtggccgtccttcagccatacatctttgtcgccaccgtgcctgtcatcgtcgctttcatcatgttgcgcgcgtactttctgcagaccagccagcaacttaaacagcttgagtcggaagggcgttcacccatattcactcatcttgtgacgtcgcttaagggcttgtggacgctgcgcgcatttggtcggcaaccatacttcgaaactctgtttcacaaagctctgaatcttcataccgcaaattggttcctctacctttcaaccctgaggtggttccagatgcgaattgaaatgattttcgtgattttctttattgccgtgacttttatctccatcctgaccaccggtgaaggagaaggacgggtgggtatcattctgactctggcaatgaacattatgagcacccttcagtgggctgtgaactcgagcatcgacgtagacagcctgatgaggagcgtatccagagtgtttaagtttattgacatgcctaccgaagggaaacctactaagtccaccaagccctacaaaaacggtcagctcagcaaagtgatgataatcgagaattcgcatgtgaaaaaagacgatatctggccctcaggcggtcaaatgactgtgaaggatctgacggccaagtacaccgaaggggggaacgcaattctggagaacatttccttctccatatccccaggccagcgagtgggactgctgggccgaaccggtagcggaaagtcaaccctcttgtcagcctttcttaggctcctgaataccgagggtgaaattcaaatcgacggtgtttcgtgggacagcattaccctccaacagtggagaaaggcatttggggtgattccacaaaaagtattcattttctctggtacttttcggaagaacctggacccttacgaacagtggagcgaccaagaaatttggaaggttgcagatgaggtcggcctgcgcagtgtgatagaacaatttcccggaaagctcgatttcgtcctggtggatggtggttgtgtgttgtctcacggccacaagcagcttatgtgtcttgcaagatcggtcttgtcaaaggcaaagatacttcttctcgatgaaccttcggcacatctcgaccccgtgacctaccagattatccgtcgcactctgaagcaggcattcgcggattgtacggtgattctctgcgagcacagaattgaagctatgcttgaatgccagcaatttctcgtgatagaagaaaacaaggtgcgacagtatgattccatccagaaactgctgaacgaaaggtcactcttcaggcaagcaatctcgccttcggatcgggtgaagctcttcccccataggaactcctcgaagtgtaaatcgaaacctcaaatcgcagcactcaaagaagaaaccgaagaagaagtgcaagacacgcggttg

SEQ ID NO: 9703 - DNA, 4440 bp, Artificial Sequence
  derived and/or modified sequence
atgcagcgcagcccactggagaaagcgtccgtcgttagcaagctgttttttagctggacacgccccattcttaggaaaggctatcggcagagactcgagctctccgacatctatcagattccatctgtagactccgctgataacctgtcggagaaacttgagcgagagtgggaccgcgagttggcaagtaaaaagaatccaaagctcattaatgcattgagacggtgtttcttttggcggttcatgttttacgggatcttcctctatctgggcgaagtgaccaaggctgtccagccgcttctgctgggccggatcattgcctcctatgacccagacaacaaagaagagcgctccatcgcaatatacctgggaattggcttatgcctcctgtttatagtgcgcacactgctgctccatcctgctatatttggacttcatcatattggaatgcagatgcggatcgccatgtttagcctgatttacaaaaaaacactgaagctgtcatcgcgggtcctagataagatttccattgggcagctcgtgtccctgctgtcaaacaacctgaacaaatttgatgaaggtctcgctctcgcccactttgtctggattgcacccttgcaagtggccctgcttatgggactgatttgggagctgctacaggccagcgccttctgtggcctgggcttcttgatcgttctggcgttatttcaagctggactgggaaggatgatgatgaagtacagagaccagcgcgccggcaagatctccgaacggttagttattacctcagagatgatcgagaacattcagtccgtcaaggcatactgctgggaggaggctatggaaaaaatgattgagaacctgcgccagaccgaattgaaactcaccagaaaggccgcgtacgtccgatatttcaactcctccgcctttttcttcagtggttttttcgtggtgttcctttccgtgctgccttacgcgctaataaaagggattattctccggaaaatttttaccaccatcagcttctgcatcgtcttgagaatggcggtgacccggcaattcccatgggctgtgcaaacctggtacgactctttgggcgcaatcaataagattcaggacttcctgcagaagcaggagtacaagactttggagtacaacctcaccaccactgaagtcgtaatggagaacgtcactgccttctgggaggagggttttggcgagctgttcgagaaagcgaagcagaacaacaataatcgcaaaacttcaaacggtgatgacagcttattcttctctaatttctctcttttgggtacccctgtgctgaaggacattaatttcaagatagagagaggccagctgctcgctgtcgctggatccaccggggcaggaaagacctcactgttgatggtaattatgggggagctcgaacctagcgagggcaaaattaagcactcaggacgaatctccttctgtagccagttttcttggatcatgcccggcacaataaaggagaacattattttcggcgtgtcatacgatgagtaccgctatcggtccgtgatcaaggcatgccagctcgaggaagacatctctaaatttgctgagaaagacaacattgttctcggcgaaggtgggattaccctgtcagggggccaacgggcccggatctctctggcccgggccgtatataaggacgccgacttgtacttacttgattcccctttcggttacctggacgtcctgactgagaaggagatatttgagagttgtgtgtgtaagctgatggccaataaaacccgcatcctcgtcaccagtaagatggaacatcttaagaaggcggacaagatcctgattttgcatgaaggatcatcctacttctacggaactttttcagaactccagaacctccaacccgatttctcttccaagctcatgggatgcgatagcttcgatcaattcagcgccgagagacgaaattcaattcttaccgagactttgcaccgcttcagcctggaaggcgacgcaccagtgtcttggactgaaacgaaaaaacagagcttcaagcaaacaggggagtttggggaaaagcgtaagaactcaatcctcaatccaatcaactccatccgcaagttttctatcgtccagaagacccccctgcagatgaatgggatcgaggaggatagtgatgagcctctggagcggagactgtcactagtgccagactccgaacagggggaggccattttacctcgcatcagcgttatctccacaggacctacacttcaggcgaggagaagacagtcggtgctcaacctgatgacccactccgtcaaccaggggcagaatattcatcggaagacgaccgcctccacgagaaaggttagcctagcccctcaggctaatttgacggaactggacatttattcgcgcaggctgtcccaggaaacaggtctcgagatttcggaggagattaatgaagaggacctgaaggaatgcttctttgacgacatggaatccattcccgccgtcactacctggaatacatacctgcgatacatcaccgtgcacaagagcttgatattcgtactaatatggtgccttgtgatattcctggcagaggtggccgcatctcttgtcgtcttgtggttgctgggtaacacacctctgcaagataaaggtaacagtactcactcacggaataactcttatgctgtcatcatcaccagcacatcgagttactacgtgttctatatctatgtcggcgtggcagatactctactagccatggggttctttcgtggactgcctctggttcatacgttgattaccgtttccaaaattctgcaccacaagatgttgcactctgtcctacaagctcctatgagcaccctgaatacccttaaagcaggaggcattctaaatagattctcgaaagacatcgcaattctggatgaccttcttccgcttacaatctttgactttatccaactcctgctcatagtgataggggcaatcgcagtagtggcagtcctacagccttatattttcgtggctaccgtgcccgtgatagtggccttcatcatgttgagggcttacttcttacaaaccagccagcagctcaaacaactggaatctgaggggaggtccccaattttcacacaccttgtcacctccctcaagggcctatggaccctgagggcctttggtagacagccctactttgagaccctcttccataaagcgctgaacctgcacacagcaaactggttcctgtatctttccacactgaggtggtttcagatgagaattgaaatgatttttgtcattttttttatcgcagtgacattcataagcatcctaacaacgggggagggcgaaggccgggtcggaattattcttacgctggcaatgaatataatgtcaactctccaatgggccgttaatagtagtatagacgtcgattcactgatgaggtccgtgtccagagtgttcaaatttatcgacatgccaaccgaagggaaaccaaccaaaagcactaagccatacaaaaacggacagctatctaaagttatgattatcgaaaactcccacgtaaagaaagatgatatctggccaagtgggggtcagatgacagtgaaggacctgaccgcaaaatatactgaggggggcaacgctatccttgaaaacattagctttagcatcagtcctggccaacgggtgggcctcctcggtaggaccggttctggtaaatccaccctgctgagcgccttccttcgcctgctcaatactgaaggcgagattcaaatcgatggcgtctcttgggatagtatcactctccagcagtggcggaaagccttcggagtcattccacagaaggtctttatattcagcggcacgtttcggaagaatttggacccctacgagcagtggtccgaccaagaaatctggaaagtggcagacgaagtagggctgaggagtgttatcgagcaattccccgggaaactcgattttgtcttagtcgatgggggatgcgtgctgtctcacggacataaacagctgatgtgcttggcccggagcgtcctcagcaaagctaagatcctcctgctcgacgagccaagtgcccatttggaccctgtgacatatcagattatccgcaggacactcaagcaggccttcgcagactgtacggttattctgtgcgagcatcgcattgaagccatgctagagtgccagcagttcctagtgatagaagagaataaggtgcgacagtatgactctatacagaagttattgaacgagagatctctgttccggcaggctatatcaccaagcgaccgcgttaagctcttcccacataggaactcttcgaagtgtaaatcgaaaccacaaattgcagcgctgaaggaggagacagaagaggaagtgcaggatacaaggctt

SEQ ID NO: 9704 - DNA, 4440 bp, Artificial Sequence
  derived and/or modified sequence
atgcaacggtcaccgctcgaaaaagcatcagtggtaagcaagctcttcttctcctggacgagaccgattcttcgaaagggatatcgacaaaggttggagctcagcgatatttaccaaatcccatcggtggattcggcagataacctgtcagaaaagctggagcgggagtgggaccgcgagcttgcaagtaagaagaaccctaagctgatcaatgccttacgcaggtgcttcttttggagattcatgttctatggtatattcctgtacctcggcgaggtaaccaaagctgtccagcctctgctcctggggcggatcatcgccagttatgatccggataacaaggaggagcgctccatcgccatctacctcggaatcggcctgtgtctgctttttatcgttcgtaccctcctgctccacccggctatctttggcctgcaccatattggcatgcaaatgcgaatcgccatgttttcactgatctacaagaaaactctcaaactgtcttctcgggtccttgacaaaattagcattggccagctggtttctttgcttagcaacaatctcaacaagttcgatgaaggactcgcactggctcatttcgtgtggatagcccccctacaggtagcccttttgatgggcctcatttgggaactcctgcaggccagcgccttctgcggcttaggtttcctcatcgtactggctctttttcaggcaggtctcggaaggatgatgatgaagtatcgcgaccaacgggccggaaagatcagcgagcgcttagtgattaccagcgagatgatagagaacatccagtccgtcaaagcatactgttgggaggaagcaatggagaagatgatagagaatctgagacagaccgagctgaagctcactagaaaggccgcctacgtccgttactttaacagctctgcattcttctttagcggattcttcgtggtctttctaagtgtattgccttacgctctcattaaaggaatcatattgcggaagattttcacaactataagcttttgtatcgtgttgagaatggccgtcactcggcaattcccatgggctgtgcaaacatggtacgacagcttaggagcaattaacaagattcaagattttctacagaagcaggagtacaagaccctcgaatacaacctgaccacgacagaagtggtcatggagaacgtgaccgcattctgggaagaaggatttggcgaattatttgaaaaggcaaaacagaacaataacaatcggaagacaagcaacggggacgactccctgtttttttccaacttctccctcctaggcacacctgtgcttaaggatatcaatttcaaaattgaacgtgggcaactgcttgcagtagctggctctactggagcgggtaagacaagtctgctgatggttattatgggcgagctggagccctccgaggggaagataaaacacagcgggaggatcagtttttgctcgcagttctcatggattatgccgggaacgataaaggaaaatattatctttggagtgtcttacgatgagtatcgctaccggagcgtgatcaaagcttgccaattagaggaagacatatctaaatttgccgaaaaggataacattgtactgggagagggaggaattaccttaagtggtggccaacgggctcgaatatcactagcacgagcagtgtataaagacgccgatctctacctactggattctccatttgggtatttggacgtcctcacagaaaaagagatattcgaatcttgtgtgtgcaaactcatggcaaataaaacccgcatcttggtgacaagcaagatggagcacctgaagaaagccgacaaaattctgattttgcacgaaggatcaagctacttctatgggactttctccgagctgcaaaatctgcagccagactttagctcgaagttgatgggatgcgatagcttcgaccagttctccgctgaacgacggaactcaatcctgacagagacgttacaccgcttctcattggaaggcgatgccccagtctcctggacagagaccaagaagcagagctttaagcagaccggcgagttcggagaaaagaggaaaaattcaatcttaaatcctataaactcaatccgcaagttctccatcgtccagaagacccctctgcagatgaatggaattgaagaggatagcgacgagcctctggagaggcgcctctctctggtgccagacagcgagcaaggcgaagcaatcctccctcgcatatctgttatcagcactgggcccacgcttcaggcaaggcgccgtcagtccgtgctgaacctcatgactcattccgtgaatcagggacagaatatccacagaaaaacaactgccagcacccgtaaggtgagcctcgctccccaggccaacttaaccgaattggatatttattctaggagactgtcccaggagactggccttgagataagcgaggagattaacgaggaggacttaaaagaatgttttttcgatgatatggagtcaatcccagccgtcaccacatggaacacttacctgcgatatataacagtgcataagtcattaattttcgtgctgatctggtgcttggtcatattcctcgctgaggttgccgccagcctggttgtactgtggttattaggtaacactcccctacaagacaaggggaactccacccacagccgcaataatagttacgctgtgataattacaagcacttcatcatactacgtgttctatatttatgtcggtgtcgctgacacccttctggccatgggattttttagaggcctgcccttagtccatacgctcatcactgtttctaaaattctgcatcacaaaatgctccatagcgttttgcaggccccaatgagcacactcaataccctgaaagccggggggatccttaatcgattctcgaaagatattgcgatcctcgacgatcttttaccattgacaatcttcgatttcatacaactgctcctgatcgtgatcggcgctatcgcggtggttgccgtattacagccctatatctttgtggctaccgtgcctgtgatcgtggcttttatcatgttacgcgcttacttcttacagacctcccaacagctaaaacaactggagtcagaaggacggtctcccatatttactcacctggtgactagcctgaaagggctgtggacgttgcgcgcatttggcaggcagccttacttcgagaccctatttcataaagccctcaacctgcatactgctaactggtttctgtatctcagtaccctgcggtggtttcagatgagaattgaaatgattttcgtcattttctttatcgctgttacattcatttctattcttactaccggggaaggcgaagggcgggtgggcatcatacttacactggccatgaatatcatgtcgacattgcagtgggctgttaactcatccatcgacgtggactccctgatgcgatcagtgtccagggtgtttaagtttatcgatatgcctaccgagggtaaaccaaccaagtcaacaaaaccctataagaatgggcaactttccaaggttatgatcatagaaaactctcatgtcaagaaggacgacatatggccttccgggggccaaatgaccgtgaaggacctcaccgccaaatacaccgagggtggaaatgccattctggagaacatcagcttctccatcagcccagggcagcgagtgggccttctgggacgcaccggctctgggaagagcaccctgctgtctgcctttctccggctcttgaacactgagggcgaaattcagatcgatggcgtctcatgggactctatcaccctccagcagtggcggaaagctttcggtgtaataccccagaaggtatttatttttagtggcacgttcagaaagaacctcgatccgtatgaacagtggtcagaccaggagatctggaaggtggcggatgaggtgggactgcgatcagtgatcgaacagttccccggcaagttagatttcgttttagtagatgggggttgcgtgttatcccatggtcataagcagcttatgtgcttagcacggtccgttctctctaaggcgaagatactcttgctcgatgaaccttctgcccacctagaccccgtgacataccagattatcagaaggacacttaaacaggcattcgcggattgcaccgtgattctgtgtgaacatcggatcgaggcaatgttggagtgccagcaattcctggtgattgaagagaataaggtcagacagtatgactctatacaaaagttactgaacgaaagatccttgttcaggcaagcaatctcccccagcgaccgggtaaaactgttccctcaccgtaatagttccaaatgtaagtctaagccgcagatcgccgctctgaaggaagagacagaggaggaggtccaggacacgagactc

SEQ ID NO: 9705 - DNA, 4440 bp, Artificial Sequence
  derived and/or modified sequence
atgcagcgttcaccactggagaaggcaagcgtggtgagcaaactcttcttctcttggacgcgacccattctacggaagggatacagacagcgcctcgagcttagtgatatataccagattcctagtgttgactctgccgacaatttatccgaaaaactggagagagagtgggatagggagctggccagcaagaagaatccgaaactgataaatgccctgcgtcggtgtttcttctggaggttcatgttttatggtatttttctgtacctgggcgaggttacaaaagccgtccagccattgctgctcggtagaattatagcctcctatgacccagataataaagaggaacgcagtattgccatttacctgggcattggcctgtgcctgctctttattgttcggacactgctgctgcacccagcaatattcggactacaccatatcggcatgcagatgcgaatcgccatgttcagtctgatttacaagaaaaccctgaaactttcctcgcgggttcttgataagatttctattgggcagctggtctctcttttgagtaataacctgaataagtttgatgaaggactggcacttgctcacttcgtgtggattgcacccctccaggtagccttattaatgggtctgatttgggagcttctccaggcctctgctttctgtgggcttgggtttctgattgtgttggccctgtttcaggctggcctggggcggatgatgatgaagtaccgggaccaacgcgccggaaagatatcggagagactagttataacaagcgaaatgatcgaaaacatccagagcgttaaggcgtattgctgggaggaggccatggaaaaaatgatcgaaaacttgcgccagaccgaactaaaattgacgcgaaaagccgcatatgtgaggtatttcaattcatctgccttctttttcagtggtttcttcgtcgtgtttttatccgtcctcccctatgccctgatcaaaggtatcattctgcgcaagatattcacaactatctccttctgtattgtcctccgcatggctgtcacaaggcagtttccatgggcagtgcaaacgtggtacgactcacttggagccattaacaagattcaagattttctgcaaaagcaagaatacaaaaccttagagtataatctcactactacggaagtggtgatggagaacgtgacggctttttgggaggaaggattcggggaattgtttgaaaaagctaaacagaacaataacaacagaaaaacgtcaaatggagacgatagcttatttttcagcaacttttccctgttgggaacaccagttctgaaagatattaattttaagattgagcgagggcagctgctggccgtcgcagggagtaccggagcagggaagacctcacttttaatggtgattatgggagagttggagcctagcgaggggaagatcaagcactcgggtcggatcagcttctgctcccagttctcatggattatgcccggcacgattaaggagaatatcatttttggagtgtcttacgacgaataccgatatagatccgtgatcaaggcctgccagctggaagaagacatctccaagtttgctgagaaagacaatatagtccttggtgagggcggcataacactctcaggcggacagagggcacgaatctcattggctcgggcagtatataaagacgcagacctctatttgctggactcacccttcgggtaccttgacgtccttacagaaaaggagatcttcgagtcgtgtgtgtgcaagctgatggcaaacaagacgaggatcctggttacctccaagatggagcacttgaaaaaggcagacaagattcttatactgcacgaaggaagctcctatttttacggaacattttctgaactccagaacttgcagccggatttcagttctaaactcatgggctgtgactcttttgatcagttcagtgctgagcgtaggaatagcatactaacagagaccttgcatagattcagtttggagggggacgctcccgtcagctggaccgagacaaaaaagcaatcattcaaacagaccggtgagttcggcgagaagcgaaaaaacagcatcctgaaccccattaactccattcgtaagttctccattgtgcagaagacgccactacagatgaatggaattgaggaagattctgacgaacccctggaacggcggttgtcattagttcctgacagcgagcaaggggaggccatcctcccccggatctccgtgatttctaccggtcccaccttgcaggctcggaggcggcagtctgttttgaacctgatgacccacagtgtaaaccaagggcagaatatccaccggaagacgacagcttcaaccagaaaggtcagcctcgcaccccaggccaacctgacggaattagatatctactcacgccgcctgtcacaagagactggcctggaaattagcgaagaaatcaacgaggaagatctgaaggagtgcttctttgacgatatggagagcattcccgcagtgaccacctggaatacttaccttcgttatattacagtccacaaaagtctgatattcgtactaatctggtgtctggtgatttttctggcagaagtcgccgcttccctggttgtcctctggttacttggcaacaccccccttcaagacaagggcaattctacacatagtagaaacaactcatatgcagtgatcatcacatccaccagtagctactacgtgttctatatctacgtgggagtcgccgacacactgctggccatgggcttttttagaggattacccttagttcacactctgattaccgtctccaagatccttcatcacaaaatgctgcactctgtcctgcaggcccctatgagcacattaaataccctaaaggccggcggcatcctgaaccgcttctccaaggacattgccatcctggatgatttgcttccattgacaatattcgattttatacagctcctactgattgtgataggcgcgattgctgtggtggctgtgcttcaaccgtatatttttgttgccacagtccctgtgatagtggcatttatcatgctgcgggcctactttcttcaaacaagtcagcaactgaagcagcttgagagtgagggaaggagccccattttcacccacttggtgacttcgctgaaaggcttgtggacgctcagagcttttgggagacaaccatacttcgaaaccctgttccacaaggctctcaacctgcatactgctaattggttcctgtatctttcgactctgcggtggtttcaaatgcgaatagaaatgatctttgtgatatttttcattgcggtgacctttatttcaatcctaaccaccggggaaggagagggaagagtcggaataattctgacgttggcaatgaacatcatgtccacgctccagtgggctgtgaattcctctatagacgtcgacagcctcatgcgaagtgtgagccgtgtgttcaaattcatcgacatgcctacggaaggtaaacccactaagagtactaaaccttacaagaacggccagctttctaaagtcatgatcattgagaactcccatgtgaaaaaagatgacatttggccgtccgggggccagatgacagtgaaggatctcaccgctaagtacaccgaaggcgggaacgcaatccttgagaatattagcttctctatttcccctggccaacgggtgggcctgctgggccgtacaggcagtgggaaaagcacgctgttgagcgcgttcctgaggttgttaaacaccgagggtgagatacagatcgatggtgtcagctgggactctatcactttacagcagtggagaaaggccttcggagtgattccgcaaaaggttttcatcttcagcggcacttttcgcaagaatctagacccgtacgaacagtggtctgatcaggagatctggaaggttgccgacgaagtggggctccggtcagtgatcgagcagtttcccgggaaactggatttcgtactcgttgacggcggctgcgtgctctcccacgggcataagcagcttatgtgcctggcaaggtcagtcctcagcaaggcaaagattctcctcctggatgagccatcagctcaccttgatccagttacctatcagatcatccggcgaactctcaaacaggctttcgcagattgcaccgtgattctgtgtgagcaccgcattgaagctatgctggaatgccagcagttccttgttatcgaagagaataaagtccggcagtacgacagcatccaaaagctgctcaacgagcggagcctttttaggcaagccatcagtccatctgacagggtcaagcttttcccccacaggaacagttcaaaatgtaagagtaagccacagatcgcggccctgaaggaggagaccgaggaggaggtgcaggatacacgactc

SEQ ID NO: 9706 - DNA, 4440 bp, Artificial Sequence
  derived and/or modified sequence
atgcagcggtcaccacttgaaaaggcctcagtggtgtcgaaacttttcttctcgtggactcgaccaattctccgaaaaggatacagacaaagacttgaactctcagacatttatcagatcccctccgtcgacagcgctgataacctgtccgagaaattggaacgtgagtgggatcgggaattggcctccaagaagaatcctaagctgattaatgcacttagaagatgcttcttttggaggtttatgttttacggaattttcctgtacctgggggaggtgaccaaagcagtgcagcccttgctgctgggaagaattatcgcttcctacgatcctgataacaaggaagaacgcagcatcgcaatttaccttggaattgggctgtgtctccttttcatcgtccgaaccctgcttcttcaccccgcaatctttggtctgcatcacatcggaatgcagatgagaattgcaatgttctcgcttatctacaagaaaaccctcaagctgtcatccagggtgctggacaagattagtattggacagctggtatcccttctttcgaacaaccttaacaagtttgacgaaggcctggcgttggcacactttgtctggatcgcaccgctccaagtcgctcttctgatgggactgatttgggaacttctgcaggcaagcgcattttgtggtctgggttttctcatcgtgcttgcacttttccaggcaggtctggggagaatgatgatgaagtaccgggatcagcgagctgggaagattagcgagcgactggtgatcactagtgaaatgattgagaatattcaatcagtgaaggcatactgttgggaagaagccatggagaagatgatcgaaaacttgcgccaaaccgaactcaaacttacccgcaaggccgcatacgtgcgctactttaactcgtcggctttctttttcagtggctttttcgtggtgttcctgagcgtccttccatacgcattgattaaaggtatcattctgagaaagatctttaccactatttcattttgtattgtgctgcggatggcagtgaccaggcagtttccctgggccgtccaaacctggtacgacagcctgggtgcaattaacaagattcaagatttcctgcaaaagcaagagtacaagactctggagtacaacctcactactactgaggtggtaatggaaaatgtgaccgcattttgggaggagggatttggtgagctttttgaaaaggctaaacaaaacaacaacaaccgaaagacgtcaaacggagacgattcgcttttcttcagcaacttctcattgcttggtactcctgtgcttaaggacataaacttcaagatagagcgcggacagcttctggctgtggccggctcgacgggtgccgggaaaacgtcgcttctgatggtcatcatgggtgaacttgagccgtcagaaggaaagattaagcattcgggacgcatttcattttgctcacaattctcgtggataatgccgggcaccattaaggaaaacatcatctttggtgtgtcctacgacgaatatcgatacagaagcgttatcaaggcatgccaacttgaagaagatatttcaaagtttgcagagaaagacaatattgtgttgggagaaggtggaatcaccctctccggcggccaaagagcaagaattagcctggcccgtgcagtgtacaaggacgcggatctttaccttcttgattcgccatttggatacctcgatgtgctgactgaaaaagagatattcgaaagctgtgtctgtaaactgatggcgaataagactagaatccttgtgacttccaagatggagcacctcaaaaaagcagacaaaatacttatactccacgagggatcttcgtacttttacggaaccttttcagagctgcaaaaccttcaacctgatttcagctcgaagctgatgggttgcgacagctttgatcaattcagcgcagaacgcagaaattcgattctgaccgaaacccttcataggttctccctcgaaggcgatgcaccagtctcatggaccgagactaaaaagcaatcctttaagcagaccggtgaatttggcgaaaagcgcaagaactccatactgaatccgatcaatagcattagaaagttttcaattgtccaaaagactccgctgcagatgaacggaattgaagaggattcagacgagccacttgaacgacgtctctccctggtgccagattcggagcagggagaagcaatacttccaagaatttccgtcatttcgaccggacctaccctgcaggctaggcgacgtcagtcggtcctgaatctcatgactcattcagtcaaccaaggtcaaaacattcatagaaagactaccgcaagcaccagaaaggtgtcgctggcaccacaagcaaatttgactgaacttgacatctactctcgccgactgagccaggaaactggtctggaaatctccgaagagattaacgaagaggacctgaaggaatgtttctttgatgacatggagtccattccggcagtcactacctggaacacttatctgagatacatcactgtccacaagtccttgatttttgtgctgatatggtgtctggtgattttcctggccgaggtcgccgctagcctcgtcgtgctgtggctccttgggaatactcctcttcaagataagggaaatagcactcattcgcggaacaattcgtacgcggtgatcattacgagcacttcgtcgtactacgtgttttacatctacgtgggggtggccgacaccctgctggcaatgggattctttcggggtttgccccttgtgcataccctgataactgtgtcgaagatcctgcaccacaagatgctgcattccgtgctgcaagcccctatgagcactctgaatacgcttaaggcaggaggtattcttaacagattttcgaaggatatcgcgattctggatgacctcctcccacttactattttcgactttattcaacttcttcttattgtgataggcgcaatcgcggtggtggctgtgctccagccatacatttttgtggcaactgttccagtgattgtggcgttcatcatgcttagggcgtactttcttcagacctcgcaacagctgaagcaacttgaatcggaagggcggtcgcccattttcacgcatctggtgaccagcctcaaaggcctctggaccctgagagcatttggtagacaaccttacttcgagactctttttcataaagccctgaacctccacaccgcaaactggttcctttacctttccaccctcagatggtttcagatgaggatagagatgatctttgtgatcttctttatcgcagttaccttcatttcaattcttacgaccggagaaggggaaggcagggtggggatcatcctgaccctggcaatgaacatcatgtccactttgcaatgggcagtgaattccagcatcgatgtggactcacttatgagatccgtatcaagagtgtttaagtttatcgacatgcccactgaaggcaagcctactaagtcaaccaagccttacaagaatggccaactttcgaaggtgatgattattgaaaactcccatgtgaagaaggacgatatttggccttcaggaggtcagatgactgtgaaggatcttaccgcaaagtatacggagggtggaaatgccattctggaaaacattagcttttccatttcacctggtcagagagtggggctccttggtcgcaccggctcgggaaagtcgactctgctgtcggcatttcttagactgttgaacactgaaggtgagatacaaattgacggtgtctcctgggattccataaccctccagcaatggcgtaaggcattcggagtcatccctcaaaaagtgtttatcttctcaggtacctttagaaagaatctggacccatacgagcagtggtcagatcaggaaatctggaaagtggccgatgaggtgggattgcgcagcgtgatcgaacaattcccaggaaagctggactttgtgctggttgatggtggatgtgtgctgtcgcatggacacaagcaactgatgtgtcttgcccgttcggtgctttccaaagcaaagatactgctcctcgatgaaccgtccgcccacctggatcccgttacttaccaaatcatcagacgaaccttgaagcaagcatttgcggattgtactgtcatcctgtgtgaacatagaatcgaagcaatgctggaatgccaacaatttcttgtcattgaagaaaacaaggttagacagtacgattccattcaaaagctgctgaacgagaggtccctttttcggcaagctatctccccatcggatagagtgaaactgttcccacatagaaattcctcgaagtgtaagtcgaagccccagattgccgcccttaaggaagaaactgaggaggaggtccaggataccagactt

SEQ ID NO: 9707 - DNA, 4440 bp, Artificial Sequence
  derived and/or modified sequence
atgcaaaggtcgcccctggagaaggcctcagtggtgtctaagctgttcttttcgtggacccgtccaattctccgaaagggataccgtcagagactggaactttcagacatttatcaaatcccatcggtcgattcggcggataacttgtcagaaaagctggaaagggaatgggatagggaactggcaagcaagaaaaatccaaaactcattaatgcactgaggagatgttttttctggagatttatgttttatggtatcttcctgtaccttggagaggtcacgaaggcagtgcaacccctgctgcttggtagaatcatcgcatcatacgatcctgacaataaggaggaacgatccatcgcaatctacctggggattggtctttgtctccttttcattgtgcgtacgcttcttctgcatcctgcaatcttcggactgcatcatattggtatgcaaatgcggatcgcaatgttctcattgatttacaagaaaactctgaagctgtcctccagggtccttgacaagattagcattggacagctggtgagcctgctttcgaacaacctcaacaaatttgacgagggacttgcacttgcacacttcgtgtggatagcccctcttcaggttgcactgctgatgggacttatctgggaacttctgcaagcatccgcattctgtggtcttggatttcttatagtgctggctctgtttcaggccggtctgggacggatgatgatgaagtaccgagatcagcgagcaggaaagatatcggaaaggcttgtcataacctccgagatgatcgagaacattcaaagcgttaaggcctactgctgggaagaagccatggagaagatgatcgaaaatctgcgccagaccgagttgaagctgacccggaaagcagcatacgtgaggtacttcaactcatcagcattcttcttttctggttttttcgtcgtttttctttccgtgctcccctacgcactcatcaagggtatcattctccggaagattttcactaccattagcttttgtatcgtgctccggatggcagtcacccgacagtttccctgggccgtgcaaacgtggtacgacagccttggcgcaattaacaagattcaggattttcttcaaaagcaggaatacaaaacgcttgagtacaatcttactactaccgaagtcgtgatggaaaacgtgactgccttttgggaagagggatttggtgagctgttcgaaaaggctaaacaaaacaacaataatcggaaaacgtccaatggagacgactcccttttcttctctaacttttccctgcttgggactcctgtcctcaaggacatcaatttcaagatcgagcgtgggcagctgctggctgtggcaggatcgacgggagccggtaagacctcacttctgatggtgatcatgggagaactcgaacctagcgaaggaaagattaagcattcaggccgcatctccttttgttcgcaattttcctggattatgcctggaactatcaaggagaacattatcttcggtgtgtcgtacgatgagtacagatacaggtcagtcattaaagcgtgccaactggaggaggatatctccaaatttgcagaaaaggacaatattgtgctcggagaaggtggcattactctgagcggaggacagagagcgaggattagcctggcaagagcggtctacaaggatgcagatctttacctgctcgacagcccatttggatatcttgatgtgctcactgaaaaggagatctttgagtcgtgtgtgtgcaagctcatggcgaataagactagaattcttgtcacttcgaagatggagcacctcaaaaaggccgataagatcctgattttgcatgaaggatcatcatacttctacggaaccttttcggagctgcagaacctgcaacctgacttcagctccaagctcatgggttgtgattcatttgatcagtttagcgctgaacgtcggaattcaatcctgacggaaaccctccatagattttcgttggaaggagacgcaccggtttcgtggacggaaactaaaaagcagtcatttaagcaaaccggtgaatttggggagaaacgcaagaattcaattctcaaccccatcaatagcatccgcaagttctcgatcgtgcagaaaactccactccagatgaatggtattgaagaggattcggatgaaccacttgaaagacgactgtcactggtgcccgattcagagcaaggggaggcaatccttcctcggatcagcgtcatctcaaccgggcctactctgcaggcaagacggagacaatccgtgctgaatcttatgactcatagcgtcaatcaaggacaaaacattcacagaaagactaccgcatccaccagaaaagtctcccttgcgccgcaagcgaacttgaccgaactggatatctactcgcgtcgcctctcgcaggaaactggtttggaaattagcgaagaaatcaatgaagaagatcttaaggagtgttttttcgacgatatggaatcaatccctgcagtgactacttggaacacctacctgagatacatcactgtccataagtcccttatcttcgtcctcatttggtgtcttgtgatttttctcgcagaagtggcggcttcgctggtggtgctttggctgctcggtaatactcccctgcaggacaagggaaattcgactcattcgagaaacaattcgtacgcggtgataatcacttcgacttcctcgtactacgtgttctacatttacgtgggagtcgctgatactcttcttgcgatgggcttttttcgaggactccccctggtccatactctcataaccgtctcgaagattctgcatcataagatgcttcattccgtgttgcaagcacctatgtccactcttaataccctgaaggccggcgggattctgaacagattttcgaaggatatcgctatcctcgacgatctcctcccactgaccattttcgactttattcaactgctgctgatcgtgatcggagcaattgcagtggtcgccgtgcttcaaccatatatcttcgtggccactgtgccagtgatcgtcgccttcatcatgctccgcgcatactttctccaaaccagccaacaacttaagcaacttgaaagcgaaggacgctcgccaatctttacccatcttgtgacctccctgaagggcctgtggaccctgcgggccttcggtcgccagccgtattttgaaaccctttttcacaaagctctcaacctccacactgcaaattggtttctgtacctgtcgacgctgagatggtttcagatgcgcatcgaaatgatcttcgtgattttctttatagcagtgactttcattagcatcctgactaccggggaaggggaaggtcgtgtcgggataattcttactcttgcgatgaacattatgtcgactctgcagtgggccgtcaactcgtcgattgacgttgactcccttatgagaagtgtctcacgcgtgtttaagtttatagatatgcccaccgagggaaagccaactaaatcgaccaagccctacaaaaatggccaactcagcaaggtcatgattatcgagaattcccatgtcaagaaagacgacatttggccttcaggcggtcagatgaccgtgaaggatctgaccgcaaagtacaccgagggtggcaacgcaatactcgaaaacatatcctttagcatcagcccgggccaacgcgtgggactcctgggtagaaccggatcgggcaagtcgacccttctgagcgcctttctgcgcctcctgaacaccgaaggcgagatccagatcgatggagtgtcgtgggactcgatcacccttcagcaatggcggaaggcctttggagtgattccccaaaaggtgtttatcttttcgggtacctttcgaaagaatctcgatccttacgagcaatggtccgatcaagaaatatggaaggtcgcagacgaagtcggacttcgatccgtgatagaacagtttcctggaaagctcgattttgtgttggtggatgggggctgtgtcctttcccatggtcataaacaactgatgtgtctcgcaagaagtgtgctttcgaaggccaaaattctgctgcttgatgagccttcggcgcacctggatcccgtcacttaccagatcattagacgcactctgaagcaagcctttgccgattgcaccgtgattctttgtgaacaccgtattgaagcgatgcttgaatgtcaacagtttctggtgatagaggaaaacaaggtcagacagtacgattccatccaaaaacttttgaatgagcgatcgctgttccgacaagccattagcccatcagatcgggtcaagctgtttccccatagaaattcgtccaagtgcaagagcaagccacagattgcagccctcaaggaggaaaccgaagaagaagttcaagacactaggctt

SEQ ID NO: 9708 - DNA, 4440 bp, Artificial Sequence
  derived and/or modified sequence
atgcaacggtcgcctcttgaaaaagcgtcggtggtgagcaagctgtttttctcgtggactagaccaattctgaggaagggctaccgccagaggcttgagctgtccgacatctaccagataccctcggtagattcagcagacaacctctcggaaaaacttgaacgggaatgggacagagaactggcatccaaaaagaatccgaaacttatcaacgcacttagacggtgttttttctggcggttcatgttctacgggatatttctctaccttggggaagtgactaaggccgtgcaaccactgcttctcggacggattattgcatcctacgatccagacaataaggaagaaagatccattgcaatctacctgggcatcggactgtgcctgttgtttattgtgcgaactttgctcctgcatccagccatttttggactccaccatattggcatgcaaatgaggatagcaatgttctcgctgatctacaaaaagactcttaaacttagcagcagagtcctcgacaaaatctcgataggacagctggtaagccttctgtcgaataacttgaacaagtttgatgaaggacttgcccttgcccatttcgtgtggattgcgcctctgcaagtggcgctgctgatggggcttatttgggagctcctgcaagcgtccgctttttgtggacttgggtttctgatcgtgcttgctctgttccaggccggactgggcaggatgatgatgaagtacagagatcagcgggccggtaagatctcggaacgtctcgtgattacctctgaaatgattgaaaacatccagtcggtgaaggcatactgctgggaagaagcaatggaaaagatgattgagaatctgcggcaaaccgaacttaagttgacccgcaaagctgcatacgtgagatactttaacagtagcgccttctttttctcgggtttcttcgtggtgtttctttcggtgctgccatacgccctgattaaaggaatcattctccgaaagattttcaccaccatctcattttgcattgtccttagaatggctgtgactagacagtttccatgggccgtccaaacctggtatgactcccttggcgcaatcaacaagattcaagattttcttcaaaagcaggaatacaaaactcttgagtacaatcttaccactactgaagtcgtcatggaaaacgtgactgctttctgggaagaagggtttggtgagctttttgagaaggccaaacaaaacaacaataatcgcaagacgtctaacggagatgattcattgtttttctcgaactttagtttgctcggaaccccagtgctcaaagacatcaatttcaaaattgaaaggggccaacttctcgcggtcgctggaagcaccggtgcaggtaaaacttccctccttatggtgatcatgggggaactggaaccgtcggaaggaaagattaagcattcgggtaggatttccttttgttcgcagttttcatggatcatgccgggcactatcaaggagaacatcatttttggtgtgagctacgatgaatacagatacaggagcgtcattaaggcatgccaactggaagaggacattagcaaatttgccgaaaaggacaacattgtgctcggggaaggtggaatcactctcagcggtggacaaagggcaagaatctcacttgcacgggcagtgtataaagatgcagatctttacctgctcgactcgcctttcggctacctggatgtcttgactgagaaggaaatcttcgaatcctgcgtgtgcaagctgatggcaaacaagactaggatccttgtcacgtcgaagatggaacacctcaagaaagcggacaaaatactcatcctgcacgaaggatcaagctacttttacggaaccttttccgaactgcaaaatctgcaaccagatttttcgtcaaagctcatgggatgcgattcatttgatcaattctcagcggagcgccgtaattcgattctcaccgaaactctgcatcggttctccctggaaggagacgccccggtcagttggactgaaaccaagaaacagtcatttaagcagacgggtgaatttggagagaagcgcaagaatagcattctgaacccaatcaattccatccgaaagttctccatcgtgcaaaagacccccctccagatgaatggcattgaggaggattcggatgagcctctggaaaggagactgtccctggtgcctgactccgaacagggggaagcaattctgcctcgaatatcggtgatttccaccgggccaaccctgcaagcacgcaggcgtcagtccgtcctcaatctcatgactcatagcgtcaaccaaggtcaaaacattcatcgtaagaccactgcgtcgactaggaaggtcagcctggctccacaggccaatcttactgaactggacatttactcccgccggcttagccaggaaaccggactggaaataagcgaggagatcaacgaagaggatctgaaggagtgcttttttgacgatatggagtccattccagcagtgaccacttggaacacttatctgcggtacataacggtgcacaagtcccttatcttcgtgttgatctggtgcctggtgatttttctcgcagaagtggcagcgtcactcgtggtgctttggctgctgggaaacaccccactgcaggataaaggtaacagcactcatagcagaaataactcatacgcggtgattatcacgtccacctcctcctactacgtgttttacatctatgttggtgtggcggacacccttctcgcaatgggcttttttcgtggtttgcctctcgtccacacgcttataacggtttctaagattctccatcataagatgctgcatagcgtcttgcaggcacctatgtcaaccctgaacaccctgaaagcaggtgggatcctgaatcgattttccaaggatatcgcaattcttgatgacctgcttcctcttaccatttttgacttcatccaactgcttctgatcgttattggagcaattgcggtggtggcagtcctgcaaccgtacatttttgtggcaaccgtgccagtcatagtggcctttatcatgctcagggcatacttcctgcaaacctcccagcaactgaagcaactggaatcagaggggaggagccctatctttactcatctggttaccagcctcaagggactttggacccttcgtgcatttggacgccagccatactttgagactctctttcataaggcactcaaccttcacactgcaaactggttcctgtatctttccaccctgcgatggttccaaatgaggattgaaatgatcttcgtcatattcttcattgcagtgaccttcatcagcattctgactaccggagaaggcgagggaagagtcgggatcatattgacccttgctatgaacattatgtccactcttcaatgggccgtgaacagctcgatagatgtggattcgctgatgagatctgtctctagggttttcaagtttatagatatgccgaccgaaggaaaacccacgaagtcgactaagccctacaagaacggccagctttcgaaggtcatgattattgaaaactcgcatgtgaaaaaggatgatatttggccttcaggtggtcagatgaccgtgaaggatcttactgcaaagtacaccgaaggaggtaacgcgatacttgagaatatctcattctccatttcgcctggtcaaagggtgggactccttgggcgcaccggttcagggaagtcaacccttctttcagcgtttcttagactccttaataccgaaggggaaattcagattgacggagtgagctgggactcaataacgctgcaacagtggcgcaaagccttcggagtcattccacaaaaagtgttcatcttttccggaactttccgaaagaatctcgatccctatgaacaatggtctgatcaagaaatctggaaggtcgcagacgaagtcggactgcggtccgtgatcgagcaattccctggtaagctggacttcgtgctcgtggacggtggttgtgtgctttcacacggtcacaagcagctgatgtgccttgcacgatccgtgctgtccaaggcaaagattctgctccttgatgaaccttcggcgcatttggatccagtcacgtaccaaatcatcagaagaactctcaaacaggcttttgcagattgcaccgtcatcctctgcgaacacaggattgaagcaatgcttgagtgccagcaatttcttgtcatcgaggaaaacaaagtgaggcaatatgactcgatccagaagctcctgaatgaacgttcactgtttcggcaggcaatttccccctccgatagagtcaaacttttcccgcatagaaattcgtcaaaatgtaaatccaagccacaaatagcggcactgaaggaagaaaccgaagaagaagtgcaggacacccggctt

SEQ ID NO: 9709 - DNA, 4440 bp, Artificial Sequence
  derived and/or modified sequence
atgcaacggagcccgctcgaaaaggcgtcggtggtgagcaaactgtttttctcctggactcgcccgatcctgcgcaagggataccgccaaaggctggaactgtcggacatctaccagatcccgtccgtggactcggcagacaacctgtcagaaaaactggagagggaatgggaccgtgagttggcatcaaagaaaaatcccaagctgattaacgccctccgacgctgctttttctggcggttcatgttttacggtatctttctctacttgggcgaagtgactaaggctgtgcagcctctcttgctcggaagaatcatcgcctcatatgaccctgacaataaggaagaacggtccattgcgatttacctgggtatcggactctgcctgctgttcattgtgcgcactctgctgcttcatccagcgatctttggactccaccacatcggcatgcaaatgagaatcgccatgttcagcctgatctacaagaaaactctgaaactttcgagcagggtgctggataagatctcaatcgggcagttggtttccctccttagcaacaacctcaacaagttcgacgagggactcgctctggcccactttgtctggattgcccctctgcaagttgctctgttgatgggcttgatttgggaattgctccaggcctcagcgttctgtggactgggattccttatcgtgcttgcactgttccaagcgggactgggacgcatgatgatgaagtacagagatcagcgcgctggtaagatctccgagagactggtcatcaccagcgaaatgattgagaacatccaatccgtcaaggcctactgttgggaagaagcaatggagaagatgatcgaaaatctccgccagacggagctcaagctgacccggaaggcagcgtacgttcggtactttaactcctcggccttctttttctccggtttcttcgtcgtgtttctgtctgtgcttccttacgcactgatcaaggggatcatcctccgcaaaatctttaccaccatctccttctgtatcgtgctgagaatggccgtgactcgccaattcccatgggccgtgcaaacctggtatgactcgctcggcgccattaacaagatccaagactttttgcagaagcaggagtacaagacgctggaatacaacctgactaccaccgaggtagtcatggaaaacgtgactgcattttgggaagagggcttcggagaactttttgagaaggccaagcagaacaacaacaaccgcaagacttcaaacggggacgactcgctctttttcagcaatttcagtcttttgggcacccccgtgctgaaggatatcaacttcaaaatagagcggggacaacttctggccgtggcgggatcgactggtgcgggaaagacctcgctgctcatggtgatcatgggagaactggagccatccgaggggaagattaaacattcaggtcgcatctcgttctgctcacagttctcatggatcatgccgggcactatcaaggaaaacatcatcttcggagtgtcatacgacgaataccggtatcgctcggtgataaaggcgtgccaactcgaagaagatatttcaaaattcgcggaaaaggataacatagtgttgggagagggagggatcactttgtcgggtggccaacgcgcccggatctccctcgcgcgcgccgtgtacaaagatgcagacctctaccttttggattctccgttcggatacctggacgtgctgaccgaaaaagaaatcttcgaaagctgcgtgtgcaaactcatggcgaataagacccgcattcttgtgacgtcgaaaatggaacatctcaagaaggcagacaagatcctgatcttgcacgagggctcctcctacttctacggaactttctcagaactgcagaatctgcaacccgactttagctcgaagttgatgggttgtgactcctttgaccagttctcggccgaacgccggaactccatcctcactgagactctgcatcggttctccctggaaggagacgcaccggtgtcatggaccgaaaccaagaagcagtcatttaagcagaccggagagtttggagaaaaacgcaagaactctattctcaatccgatcaactcgatccggaagttttcaatcgtgcaaaagaccccgcttcagatgaatggcatcgaggaggactcggacgaacctctggagcggcgcttgtcgttggtcccggactctgagcagggggaggctattctgccgcggatcagcgtgatttccactggcccgaccctgcaggcaagaagaaggcagtccgtgctcaacctcatgactcactcggtgaaccaaggccagaatatccacagaaaaaccaccgcatcgacccggaaagtgtctctggcacctcaagcaaacctcaccgaactcgacatctacagccggcgcctgtcgcaggagactggattggagatctctgaggaaatcaatgaggaagatctcaaggagtgttttttcgatgatatggaaagcatccctgcagtgaccacctggaacacgtacctccgctacattacggtgcacaagtcgttgatcttcgtcctgatttggtgcctcgtgatctttctggccgaagtggcggcctcgttggtggtgctgtggctgctcggcaacactccactgcaagataagggcaattcgacccactcaagaaataactcatacgctgtgatcatcaccagcacttcatcatactatgtgttctacatctacgtcggcgtggccgacactctgctggcaatgggcttcttccgcggattgccgctggtccatactttgatcactgtgtcgaaaatcctccatcataagatgctgcattcagtgctccaagcacctatgtcgactctgaacaccctgaaggccggaggcatcctcaacagattttcgaaggacatcgcgattctcgatgacctcctgccgctcaccattttcgacttcatccagctgctgctgatcgtcatcggagccatcgcggtcgtcgcagtgctccaaccatacatcttcgtggccactgttccggtcatcgtcgcgtttatcatgctgcgggcatacttcctgcagacctcccagcagctgaagcagctggaatccgaaggccgctccccgattttcactcatctggtgacctcgctgaagggactgtggactctgcgggcgtttggtagacaaccgtactttgaaaccctgttccataaggcactgaatttgcacacggcgaattggttcctgtacttgagcaccctccgctggttccaaatgagaattgaaatgatctttgtgatctttttcattgcggttaccttcatcagcatcttgaccactggagaaggagaaggcagggtcggaatcatcctgactctggccatgaacattatgagcaccctgcagtgggcagtgaactcatccattgacgtcgattcgctgatgaggtccgtgtcccgggtgttcaaattcatcgatatgccaacggaaggaaagccgaccaagtcgaccaagccgtacaaaaacggtcagctctcgaaggtgatgatcattgagaactcccatgtgaaaaaggatgacatctggccttccggtggtcagatgaccgtgaaagatctgaccgcaaagtacactgaaggaggcaatgccatcctcgaaaacattagcttctccatctccccgggacagcgggtgggcttgctgggtcggactggatcaggcaagtccacgctgctttcggccttcctcagactgctgaacactgagggagaaatccagatcgacggagtgagctgggattccatcaccctgcaacagtggagaaaggccttcggagtcatcccgcagaaagtgttcatcttctcgggcactttccggaagaatctggacccctacgagcagtggtctgatcaggagatctggaaagtcgctgacgaagtgggactgcggagcgtcatcgagcagtttccaggtaagctggacttcgtcctggtcgatggaggatgcgtcctctcgcatggccataagcagcttatgtgcctcgctcgctcagtcctgtccaaggcgaagattcttctgctggacgagccatccgctcacctcgaccctgtgacttaccagattatccgccgcaccttgaaacaagccttcgccgactgcactgtcatcctttgcgagcatcgcattgaagcgatgctggagtgccagcagttcctggtgatcgaagagaacaaggtgcgacagtacgactctatccagaagctgctgaacgaacgatcgctgttccgccaggcgatttcaccgtcagacagggtcaagctctttccgcatagaaacagctccaaatgtaagtcgaagcctcaaattgccgccctgaaagaagaaacggaggaggaggtgcaggacaccagactg

SEQ ID NO: 9710 - DNA, 4440 bp, Artificial Sequence
  derived and/or modified sequence
atgcagcgcagtccactggaaaaggccagcgtcgtatccaagttgtttttctcttggaccaggcccatcctgcggaagggataccggcagaggctcgagttgtccgatatctatcagatccctagtgtggacagcgctgataatctgtcagagaagctggagagagaatgggatagggagttggcatccaagaagaacccaaaactgatcaatgcactcaggcggtgctttttttggaggttcatgttttacggtatcttcttatatctgggcgaggtgaccaaagcggttcagccgctcctgcttggacggattattgcatcttacgatcccgataataaagaggagcggagtattgcgatttacttggggattggcttgtgcctgctcttcatcgtgcgaactctactgctacatcctgcgatctttggcttgcaccatatcggtatgcagatgcgaatcgctatgttttctctaatctataagaaaacattgaaactcagttcgagagtgcttgacaaaatctccataggacagttagtgagtttgttgtccaataacctgaacaaattcgatgaggggttggcgcttgcccatttcgtgtggatcgcccctctccaggtcgctctcctcatgggactgatttgggaattgttgcaggcctccgcattctgcggcctcggatttctgattgtgctcgcacttttccaggcgggcctcgggagaatgatgatgaagtaccgggaccagcgcgcgggaaaaatttctgaacgccttgtaattacgtccgagatgatcgagaacattcagtccgtgaaggcctactgttgggaagaggcgatggagaagatgatcgagaatcttcgacagacagagctgaaactcacccggaaggcggcttacgtaaggtattttaactcaagtgccttcttcttttccgggttcttcgtagtgtttctctctgtgctcccttatgccctcattaaggggataatattaaggaaaatcttcaccaccataagtttctgtatcgtgttgcgcatggcagtgacccggcagttcccctgggctgtgcagacctggtatgactccctcggggccatcaacaagatccaggatttcctacagaagcaggagtataagacactggagtacaatttgactactacagaagtggtaatggagaacgtcaccgccttttgggaggaaggtttcggtgagctctttgagaaagcgaagcaaaacaacaataaccggaagacatccaatggagacgactccctgttcttcagcaatttctctctgctcggcacccctgtgttgaaggacatcaacttcaagatcgaacgcgggcagctcctcgcagtggcaggaagtaccggcgctgggaagacatccttgttaatggttattatgggcgagctggaaccatcggaaggcaagattaaacatagcgggcggatttctttttgcagccaattctcttggattatgcccggtaccattaaggagaacataatcttcggcgtttcctatgacgaatacaggtataggtctgtcataaaagcctgtcagctagaagaagatatttctaagttcgcagagaaggataacattgtcttaggcgagggcgggatcaccctaagcggtggccaacgcgctcgtatttctcttgcccgggcagtatataaggatgccgacctgtacctcttggactcacccttcggctacttggacgtcctcacagagaaggagatattcgagtcctgcgtgtgtaaactgatggccaacaagacacgcatcctagtgaccagcaaaatggaacacctgaaaaaagctgataaaatattgatactacatgaagggtcaagctacttctatgggactttttccgagttacagaacctgcagcctgatttttcttctaagctaatgggctgcgattcttttgaccagtttagcgctgagcggaggaactcaattctcaccgaaaccttgcaccggttttctctggaaggcgatgctcctgtatcatggacagagaccaaaaagcagtctttcaagcagactggcgaattcggagaaaaacgaaaaaactcaatccttaacccaattaactccatccggaagttcagcatcgtccagaaaactcccctgcaaatgaatggcattgaagaggattccgatgaaccattagaaaggaggctgtcacttgtaccagatagcgaacagggcgaggctatccttcccagaatcagcgtaatcagcactgggccgacactccaggcacgcaggaggcagtccgtgctgaacttaatgacgcactccgtgaaccagggccaaaacatccatagaaagacaactgcatccactaggaaagtttctctggctccacaggcaaacctaaccgagcttgatatctattcgcgacggctgtcccaagaaacgggattggagatcagcgaagagattaacgaggaggacctgaaggagtgtttcttcgatgacatggagagtattcctgctgtcaccacctggaatacctatctcaggtacattaccgtacataagagccttattttcgttctcatctggtgcctggtgatatttctggctgaagtagcggctagtttggtggtcctctggctactgggcaatacccctttgcaggacaagggtaactctactcacagtaggaataattcatatgcggtcattattaccagcacctcttcctattatgtcttctatatttacgttggagtcgctgacaccttgctggcaatgggtttctttcgggggctcccactggtgcataccctgatcacagtcagcaagatcctgcatcacaagatgcttcactccgtgctccaagccccgatgtcgactctaaacacactgaaggcagggggcattctgaatcgcttctcaaaagacattgccattctggatgacctcttaccgcttactatttttgatttcattcagctgctgctgatagtgattggggccatagccgtggtcgcagttctccaaccttacatctttgtcgccaccgtgcctgtgatagtagcctttatcatgcttcgcgcctatttcctccagaccagccagcagctcaagcagttggaatcagaaggcaggtcacccatttttacacatctggtgactagtttgaagggactttggactctgcgcgcgtttggccgacaaccatactttgagacactgttccacaaagctctaaacctgcataccgccaattggtttttgtatttgtccaccctccgctggttccagatgcgcatcgagatgatcttcgttattttctttattgcggtgacgttcatcagtatcctcacgaccggagagggagaaggaagagtggggattatactgacgctcgcaatgaatataatgtcgacgctgcagtgggctgtcaattctagtatcgacgtggactccctgatgcggtcagtgtcacgagtgtttaaatttatcgatatgccaaccgagggcaagccaacaaagtcaaccaaaccttacaagaatgggcagttgtctaaggtgatgatcatagaaaactcccacgtgaagaaagacgacatctggccttctggcggccagatgacagtgaaggaccttaccgcgaaatacacagaaggagggaatgctattttggaaaatatctcgttttcaatttccccaggacagagagtcggcttactcgggaggacaggctccgggaagtctaccctgctgtccgcctttctgcggttattaaataccgagggggagatacaaatcgatggcgtttcttgggacagcattaccctgcaacagtggcggaaagccttcggggtgataccacagaaggtctttattttctctggcacatttagaaagaacctggacccatatgaacagtggagcgaccaggagatctggaaggtggctgatgaggtgggactccgctcagtcatcgaacaattcccggggaaattagacttcgtgctggtcgacgggggatgcgtgctgagtcacgggcataagcaactcatgtgtctggcacggtccgtcctctcaaaagcgaaaatactgctcctggacgagccgtcagcgcacctggatcccgtgacataccagattatacgccggacactgaaacaggcttttgcagattgcactgtcattttgtgtgagcaccggattgaggcaatgttagaatgccagcagtttcttgtgatcgaggaaaacaaggtaaggcagtacgacagtatccagaaactcctcaatgagaggtccctgtttcgacaagccattagcccgtccgatcgagtcaagcttttcccccatcgcaatagctcgaagtgtaaatccaaaccacaaattgcagctctaaaagaggagacggaagaagaggtgcaggacactaggttg

SEQ ID NO: 9711 - DNA, 4440 bp, Artificial Sequence
  derived and/or modified sequence
atgcagcgatcaccactcgaaaaagctagcgtagtcagtaaattgtttttttcttggacacgcccgattctgcggaagggttatcgccagagactcgaactctcagatatttatcagataccaagcgttgactctgcagacaatctcagtgagaagctggagcgggaatgggatagggaactggccagcaaaaagaacccgaagcttatcaacgcccttcgcagatgctttttctggcgcttcatgttttacggcatcttcctttacctgggggaggtcacaaaagccgttcagcccctacttctggggagaattatcgctagctacgaccccgataataaggaggagcgttccatagctatttatctcggtatcggtctctgcctcctcttcatcgttcgcaccctgctgctgcaccctgccattttcggtttacaccatatcgggatgcagatgcggatcgcaatgttctctctgatttacaaaaagacactaaaattgtcctctcgagtgttagacaagatcagcattgggcaactggtttccttgctgtcaaacaatcttaacaaatttgacgaggggctcgctttggcccattttgtctggatcgcccccctgcaggtcgccctgctgatgggcctgatttgggaattgcttcaggccagtgccttttgcggactcggattcttgattgttctagctctgtttcaggccggtctgggaagaatgatgatgaaatacagagatcagcgtgccggcaaaattagcgagcgcctggtgattacttccgaaatgatagagaatattcaatcagtgaaggcctattgctgggaagaagcaatggaaaagatgatagagaacctgagacaaacagagctgaagttgacccgaaaggctgcctacgtcagatacttcaattcgtctgcttttttctttagcggattttttgtagtttttctgagtgttttgccttacgccttgatcaaggggatcattttgcgcaagatcttcacgacaatatcattctgtattgtcctgagaatggccgtgactagacaattcccttgggctgtccagacctggtatgactcactgggagccatcaacaagatccaggattttctgcagaaacaggagtacaagactctggaatataatctgacaacaactgaagtggttatggaaaacgtgacagctttttgggaagaagggttcggagagctgtttgaaaaggctaagcagaacaacaacaaccgtaaaacctccaacggtgacgacagtcttttcttctccaatttttccctgctgggcaccccagttttaaaagacatcaacttcaaaatagagagaggtcaactcctggccgtggccggatccaccggcgcgggaaaaacaagcttgctcatggttattatgggcgaattagaacccagcgaaggaaaaattaagcactcaggcagaatatctttctgtagtcaatttagctggattatgccaggtacgatcaaggagaatattatcttcggcgtgagctacgacgagtaccgatatagatccgtgatcaaagcatgccagctggaggaggacatttcaaaatttgctgagaaggataacattgttctgggggaaggtggaattaccctttccggagggcaaagagcccggataagcctggcacgagcggtatataaagacgcggacctgtacctgctggatagcccattcgggtatctcgacgtcttgaccgaaaaggaaatatttgaaagttgtgtgtgtaagttgatggccaataagacacgaatcctcgtgacttctaaaatggagcatcttaaaaaggcagacaaaattctgatcctccacgaaggcagttcctatttctacgggacgttctcagaactgcagaatttgcagcctgacttttcctccaagttgatggggtgcgatagcttcgaccagtttagtgccgagcgccggaatagtattctgactgagaccctgcaccggttttcactcgaaggagatgccccagtgagttggaccgaaacaaagaaacagtcattcaagcagaccggagagttcggcgagaaacggaagaactccatcttgaatccgattaacagtatcaggaagttttcaatcgtgcagaaaactcctctccaaatgaatggaattgaagaggatagtgacgaacctcttgagcggcgcctcagtcttgtgcccgacagcgaacagggcgaggcaattctgcccagaataagcgtgatctccactggtcctactcttcaggctcgccgcagacagagtgttctgaatttaatgacacactccgtgaatcagggccagaatatccaccggaagaccactgcaagcacacgtaaggtgagcctcgcccctcaagcaaacctgacagagcttgacatttactccaggagactgagtcaagaaactggtctcgagatatctgaagaaattaacgaagaggacctcaaggaatgcttcttcgatgacatggaaagtatcccagctgttactacctggaatacctacctgcgctatattaccgtgcacaagtcgcttatctttgttcttatttggtgcctagtgatctttttggccgaggtagcggccagcctagtagtcctgtggttgctgggcaatacccctctgcaggacaagggcaacagcactcattcacgcaataattcttatgccgtgataatcaccagcaccagctcctattatgtgttttatatctacgtgggtgtggcagatacactgctcgcaatgggttttttccggggcctgccactagttcacaccctcattaccgtttctaaaatacttcatcacaaaatgctgcactcagtcttgcaggccccaatgagtactttgaatacgttgaaagccggaggtatcttaaaccgattcagtaaagatattgccattctggatgaccttctgcccctcaccatcttcgattttatacaacttttactaattgtgattggagcaattgctgtcgtggccgtgttgcaaccctacatctttgttgctactgtgccagttatcgtcgcttttataatgctgagagcctattttcttcaaacatcccagcagctgaagcaactggaatcggaggggcgcagccccatattcacacatctggtcacctctttgaaagggctgtggaccctccgagcctttggcaggcaaccctacttcgagacgttgttccacaaggctctgaacttacataccgccaactggttcctctacctgtcaacattgcggtggtttcagatgagaatcgaaatgatcttcgtcatcttctttatagctgttaccttcattagtattctgacgactggggagggtgaaggcagagtgggtataatactgacgctcgccatgaacattatgtcaacgctgcagtgggccgtgaacagcagcatagatgttgacagcctcatgcgatcggtctctcgtgtcttcaagttcatcgatatgccaaccgaggggaaacctacaaaaagcacgaagccatacaagaatggccaactgagcaaggtgatgattatcgagaactctcacgtgaagaaagatgatatctggccaagtgggggccagatgactgtgaaggatttgactgcaaaatataccgaaggcgggaatgcgattcttgagaatatctctttttcgatttcacccgggcaaagggttggcctcctgggacgcactgggtccggaaagagcaccttactatcagcttttctgcggttgctgaatacagagggggaaattcagatcgatggcgtttcatgggattcaattacgttacaacagtggcggaaagcctttggcgttattccccaaaaggtgttcattttttcaggaacctttagaaagaacttggacccatatgagcagtggtcggatcaggagatctggaaggtcgcagacgaagtgggcctcaggtccgtgatcgagcaattccccggaaagctggactttgtgttggtggatggcggatgtgttctttcacatggacataagcagctgatgtgtctggcaagaagtgtattatccaaggctaaaattttgcttctcgatgaaccgtctgcgcacttggaccccgtcacataccaaatcatacgccggacattgaagcaggctttcgctgattgtactgttattctgtgcgagcacaggatagaggccatgctcgaatgtcagcaatttcttgtcatagaagagaacaaggttagacagtacgacagtattcagaagcttttgaatgagagatcgctgttcagacaggctatttcaccatcagaccgggttaagctatttccccaccgcaattcttctaagtgcaagtctaagccacaaattgctgctctaaaggaggagacagaggaagaggtgcaagatacccgactt

SEQ ID NO: 9712 - DNA, 4440 bp, Artificial Sequence
  derived and/or modified sequence
atgcagagatcccctttagaaaaggcaagcgtggtgagtaagctatttttcagttggactagacctatcctgagaaaggggtacaggcagcgtctcgagctgagtgatatctaccagatcccaagcgttgatagcgctgacaacctttccgaaaagctcgagcgcgagtgggatagggaactggcctctaagaaaaaccccaagcttatcaatgcgctccgtcgttgcttcttctggcggtttatgttttacgggatctttttgtatttgggtgaagttactaaggctgtgcaaccactattgctgggtcggatcattgcgtcctatgatccagataataaagaggagcgcagtattgcgatttacctcggcataggtctctgcttgctatttattgtgcgcaccctgctgctgcacccagctatctttggcctgcaccacataggaatgcagatgcggattgccatgttcagcctaatctacaaaaaaacactgaagctgagttcccgggtgttggacaagattagcatcgggcaactggtgagtctcctcagcaacaacctgaacaagtttgatgaagggctggctctggctcacttcgtctggatcgccccactgcaggttgcgttgctgatgggtctcatatgggaattgctgcaggccagcgccttttgcgggctgggctttctgatcgttctggctctgtttcaggccgggctcggccgtatgatgatgaagtaccgcgatcaacgcgcagggaaaatttcagagcggctagtcatcaccagtgaaatgatagaaaatatccaaagcgtgaaagcgtactgctgggaggaagctatggagaaaatgattgaaaaccttcgccagacagagctgaagctgactcgcaaggctgcctacgtgcgctacttcaactcatccgcttttttcttttccggtttctttgtggttttccttagtgtgctgccctacgctctgataaagggaattatcctacgcaagatctttacaaccattagcttttgtatagtgctgagaatggcagtgacccgacagtttccctgggctgtgcagacctggtatgatagtttgggagcaatcaacaagatacaggacttcctgcaaaagcaggagtataagactctggagtataaccttacaacaaccgaggtggtgatggaaaatgtcacagccttttgggaggaagggtttggggaactgtttgaaaaagccaaacagaacaacaacaacaggaagacatctaatggcgacgattcgctcttcttttccaatttctctctgcttgggactccagttctcaaagatatcaatttcaaaatagagcgcgggcagctgttggcagtcgctgggtctacaggggccggcaaaactagcctgctgatggtgattatgggggagttggagccttccgagggcaagatcaaacacagcgggcgcatcagtttttgtagccagttctcttggatcatgcccgggacgataaaagaaaacatcatatttggcgtgtcttatgacgaatatcgatatcggagtgttatcaaggcatgccagctggaagaggacatatcgaaatttgccgagaaagataatatcgttttaggagaggggggaattacattgtcgggtggccaacgggcacgaatatctttggcacgggctgtctataaagacgccgacttgtacctgctggactcccctttcgggtatttggatgttctgaccgagaaagagatctttgaatcctgcgtctgcaagcttatggccaacaagaccaggatactggtgacatcgaaaatggaacaccttaagaaggcggacaagatcctgatcctgcacgagggaagcagctatttctatgggacattcagtgaactccagaatctgcaacccgatttcagctccaagttaatggggtgtgacagtttcgaccagtttagtgctgagcgccggaatagcatcctaactgaaaccctgcacagatttagtcttgaaggtgacgcacccgtgtcctggaccgagaccaaaaagcagagcttcaaacagactggcgaattcggcgagaaaaggaaaaacagcatcctaaacccaattaatagtatccggaaattttctattgtgcagaagacacccctccagatgaatgggatcgaagaagattccgacgagccgctagaacgtagattgagccttgtccccgatagtgaacagggggaagccatactccctcgcattagcgttatatccacaggcccgacactccaggccaggcggcgccagtccgttcttaatcttatgacgcattccgtgaatcagggccagaacatccatcgcaagactacagccagtaccagaaaagtcagcttagcaccacaggcaaacttgacagaattggacatctacagccgtaggctaagccaggagacgggtctagaaatcagtgaggagatcaacgaagaggacctcaaagagtgcttctttgatgacatggagtcaatccctgctgtgacaacctggaatacctacttacgttatattaccgtgcacaagagcctgatttttgtcctaatatggtgtctcgtcatctttctagcagaagttgctgcttcactggtggtgctctggctgttaggaaacactcctcttcaggataagggcaactctacgcatagccgaaacaattcatacgccgtaattatcacttcaacgtcctcatactacgttttctatatctatgttggtgtagccgatacgcttctggccatgggcttttttcgggggcttcctctcgtacacactttaattactgtgtccaagattttacaccacaaaatgttgcactccgtgttacaggcaccaatgtctactcttaacacgctcaaggctggaggaattctcaatcgcttcagcaaggacatagctatccttgatgacctattgccactgacaatctttgatttcatccagctgctcttgattgtgattggcgcaatcgccgtagtggctgtactccagccctatatattcgttgctaccgtgcccgtgattgtagccttcatcatgctgcgagcctatttcctccagacaagtcagcagttaaagcaattagagtctgagggccggtctccgatctttacacacttagtaactagccttaagggactatggacactaagggctttcggtcgtcaaccttactttgagactttattccataaggcacttaacctgcataccgccaactggttcctctacctttccactttgcgatggtttcagatgcgcatcgagatgatttttgttatttttttcatcgccgtgactttcatctctattcttacaactggcgaaggtgaaggacgggtcggcattattttgactctggccatgaatatcatgtctaccctacagtgggcagtaaactcttcaattgatgtggattcgctgatgaggagcgtttcaagggtgttcaaatttattgacatgccaacagaaggcaagcctactaagagcaccaaaccgtataagaacggacagctgagtaaagtgatgatcatcgaaaatagccacgttaagaaagatgatatctggcctagcggcggccagatgactgtgaaggacctgaccgcaaagtatacagaaggcggaaacgccatcctggagaacattagttttagtataagcccgggacaaagggtcggactgctgggacgcacaggtagtggtaagagcacactgctgagcgcttttctccgcctgctcaacacggaaggggagatacaaattgacggtgtctcctgggattcgatcaccctgcaacagtggcgtaaagcattcggcgtcataccacaaaaggtgttcattttttcaggaacgttcaggaaaaacctggatccttatgagcagtggtctgaccaggaaatctggaaagtggcagacgaagtaggcttacgctcagtaattgagcaatttcccgggaagttggatttcgtcctggtggatggcggctgcgtcctctctcacggccacaagcaactaatgtgcttggcacgcagcgtgctttctaaagcaaagattctcttattggacgaaccctctgcgcatttagaccctgtgacctaccaaatcataaggcggacactgaagcaggcgtttgccgattgtaccgtcattctgtgcgagcaccgcattgaggccatgctggagtgccagcagttcctggtaatcgaggagaacaaagtgaggcaatacgactctatccagaagctgcttaacgagcgctccctgtttcggcaagccatttcaccttcagatagagtcaagcttttcccccaccgcaattcctccaaatgtaaatctaaaccccaaattgcagccttgaaggaggaaactgaggaggaagttcaggacacccgactg

SEQ ID NO: 9713 - DNA, 4440 bp, Artificial Sequence
  derived and/or modified sequence
atgcagagatcccccttagaaaaagcctctgtggttagcaaattgttctttagttggacaaggccaatcctgaggaagggataccggcagaggttagagttgagtgatatctaccagattccaagcgtagactctgccgacaacctctccgaaaagctggagcgggaatgggacagggagctagcctccaagaagaacccaaagctgattaatgctttgcgccggtgcttcttctggagatttatgttctatggcatttttctttacctcggcgaggttaccaaggccgtacagccgctgcttctaggcagaattattgcctcctacgatcctgacaataaagaggagaggagcatagccatatatcttggcattgggttgtgcctgctgtttattgtgcgtacccttctccttcaccccgctatctttgggctgcatcacataggcatgcagatgagaattgcaatgttctctctgatctataaaaaaaccctgaaactgagttccagggtcctcgataaaatttccatcgggcaactggtgagcttgctatcgaataacctcaacaagtttgatgagggcctcgcgttagctcatttcgtgtggatcgcacccctgcaagtggccttactcatgggactgatctgggaattgctgcaggcatcagcattctgcggtctgggatttttgattgtacttgctctgttccaagccggccttggcagaatgatgatgaagtaccgggatcagagggcggggaagatttccgagaggctggttatcacatcggagatgattgaaaacatacagtcggttaaagcctattgttgggaagaagcgatggagaaaatgatcgaaaacctcaggcagacagagttaaaacttacaagaaaggcggcttacgtacgttatttcaatagctcggcttttttcttttccgggttctttgtggttttcttgtctgtactgccttacgcactgattaaaggaattattctgcggaaaattttcacgaccatatctttttgcatcgtgctccggatggctgtgaccaggcaatttccctgggccgtgcagacctggtatgattcgctcggagcaatcaacaaaatccaggacttcctgcagaagcaagagtataagactctagaatataacctgactactacggaggtggtgatggagaacgtaacagccttctgggaggagggcttcggagagctgttcgagaaggccaaacagaataataataatcgaaagacctcaaacggagatgattcacttttttttagcaatttttcccttctgggcacccccgtgctcaaggacatcaatttcaagatcgagaggggccagctccttgccgtggcaggttccacaggggcgggcaaaacaagcctactcatggtgatcatgggtgaactggagccatctgaaggtaaaatcaagcattctggtcgcatcagtttctgcagccagttctcctggatcatgcccggaacaatcaaagaaaacatcatcttcggggtgagctacgacgaatatagatatagaagcgtcatcaaggcatgccagctggaggaggacatttccaaattcgccgaaaaggacaacatagttctgggcgaggggggaattacgctctcaggcgggcaacgggcaaggatatccctggcacgtgcggtctataaagacgctgatctttacctgctggacagccctttcggatatctcgacgtgttgaccgagaaggagatcttcgagagctgcgtttgtaagctgatggctaataaaacacgaattctagtgacctctaaaatggaacacctcaaaaaggctgacaagatcctgatcctgcacgaggggagcagctacttctacgggacattcagtgaattgcaaaacttgcaacctgatttctcgtcaaagctgatgggctgcgacagctttgatcagtttagtgccgagagacgcaatagtattctaacggagactctacaccggttttctctggagggtgatgcacctgtttcttggacggagaccaaaaaacaaagctttaagcagacgggagagttcggcgagaaacggaagaacagcatattgaacccgatcaatagtatcaggaagtttagcatcgtgcagaaaacccccctgcagatgaatggcattgaagaagactccgacgagccgctggaaagacgtcttagtctggtgccggatagcgagcagggagaggccatactgccaaggattagtgtcatttccactggtcctacactccaagcccggaggcggcaatcagtgctgaatttaatgacacactccgtcaaccagggccaaaacattcataggaagaccacagcgtcaactcgcaaggtgtcacttgctcctcaagccaatttaactgagctggacatctattcccggcgacttagtcaggaaaccgggttggagatttccgaggagatcaatgaagaggacttgaaggagtgcttctttgatgacatggagtcaatcccggccgttaccacatggaacacttatctgaggtatatcaccgtgcataaatccctgatttttgtgcttatttggtgcctagtgatctttctggccgaggtggcagcctctctcgtcgtcttgtggcttctcggaaacacacccctccaggacaaaggcaattctacccacagtaggaataactcctacgctgttattattacctcaaccagttcttattatgttttctatatctatgtgggagtagccgatacattactggcaatgggatttttccgggggctccccctagtccacacgctgataaccgtctccaagatacttcaccataaaatgctacactccgtgctgcaagccccgatgtccacactgaatactctgaaagctggcggtatcctgaaccggttctctaaggacatagctatcttggacgatctactacctctgactatcttcgactttattcagcttctgctcatcgtcataggcgctatcgctgtggtcgcagtgcttcagccctatatctttgtggccactgttcccgtgatcgtcgcatttatcatgcttagagcctattttctgcagacttcccagcagcttaaacagttggaaagtgaaggacgcagccccattttcacacacctagttacaagtctgaagggcttgtggacacttcgagcgttcgggcggcagccgtacttcgagaccctgttccataaggcgttaaatttgcacacggcaaactggttcctttacctgtcaactctgagatggttccagatgaggattgaaatgatcttcgttatattcttcatagccgtgacctttatctcgatactgacaacaggggagggcgaagggcgggtgggaattattctgactctagcaatgaacattatgagcacgctgcaatgggccgtgaacagttccattgatgtagactccctgatgcgatccgtgtcgcgcgtgttcaaatttatagatatgcctactgagggtaaaccaaccaagagcactaagccttacaagaatggccagttatccaaagtaatgatcatcgagaatagtcacgtgaagaaggacgatatctggcccagcgggggtcagatgaccgttaaagacctgacagccaagtacaccgagggtgggaatgcaatcttggagaacatctcctttagtatttcacctggacaaagagtgggtctgttgggacgcactggatcagggaaatccacactgttatccgcatttctacgactcctgaatactgagggagaaatccagatcgatggcgtttcctgggactccattacactccaacagtggcgaaaggcgtttggcgtcattccccagaaggtatttattttctcaggaacctttcgaaagaatctcgacccctatgagcagtggagcgaccaggaaatctggaaagtggctgatgaagtcgggctgagatccgtaattgaacagtttccaggtaagttggatttcgtgttggtggacggcggatgcgtactttctcatggacataagcagctgatgtgtctggcgcgttccgttctgtccaaggccaaaatactgttactggacgaaccatccgcacacctggaccctgtgacgtatcagattattcggcgcaccctgaagcaggcattcgccgactgtaccgtcattttatgcgaacaccggatagaggcaatgctggaatgtcagcaatttcttgtcatagaggagaataaggtccggcagtacgattccatccaaaagttgctgaatgagcggagtctctttcggcaggccatctccccatctgatagagttaaactctttccacatagaaactcttctaagtgcaagagcaagccacaaatcgccgctcttaaggaggagacagaagaagaagtgcaggatactcgtcta

SEQ ID NO: 9714 - DNA, 4440 bp, Artificial Sequence
  derived and/or modified sequence
atgcagaggtctccacttgagaaagcgtctgtcgtttctaagctttttttctcgtggacgagacccatcctcagaaagggatacaggcagaggctcgaactgtctgatatctaccagatcccgtccgtggattctgccgataacttatcagaaaagcttgagagggagtgggatcgagagctcgcatcaaagaagaatccaaaactgattaatgctctgcgccggtgttttttttggcgctttatgttctatggtattttcctttatcttggcgaggtcaccaaggccgtgcagcccctgctgctgggtaggatcattgcatcctatgatcctgataataaggaggagagatccatcgcgatatacttgggcattggcctttgccttctttttatcgttcgaaccctactgctccatcctgccatttttggtctccaccatatcggaatgcagatgcggattgctatgttcagtttaatatataagaagactctgaagttgtcatcccgcgtcttggacaagatatccattggacagctggtgtctctgttgtctaacaatctgaacaaatttgacgagggcctggcactggcccacttcgtatggattgcgcctctgcaagtagccttgctgatgggtttgatttgggagcttctgcaggcttccgcattttgcggcctcggctttctaatcgtgctggcgctctttcaggctggtttgggacgcatgatgatgaagtatagagatcaacgggccggaaagataagcgaaagattagtgattacatcagagatgatcgagaacattcagagtgtaaaggcctactgttgggaggaagccatggaaaagatgattgaaaatctccgacaaaccgaattgaagctgaccaggaaggcagcgtatgtgagatacttcaacagctccgcttttttcttctctggtttctttgtagtctttctctcagtgctgccatacgcgctgatcaaaggaatcatccttaggaaaattttcaccacaatctccttctgcattgttctgcgtatggcagtgactagacagtttccatgggccgttcagacgtggtatgactctttgggagccattaataaaattcaggacttcctgcaaaaacaggaatataagaccttggaatacaatctaacaacgacagaggtcgtgatggagaacgtgaccgcattctgggaggagggttttggggagctgtttgaaaaggccaagcagaacaataataatcgtaaaacatccaatggtgacgacagtttgttcttttccaatttctcgctgctgggcacccccgtgctgaaagatataaatttcaaaatcgagcgcggccagcttctagccgtggctggctctaccggagctgggaagacatccttgctgatggtcattatgggtgagctcgagccgtctgaggggaagatcaagcattccggcaggattagtttttgttcccagttctcatggattatgcccggcacaattaaggagaacatcatatttggagtgagctacgacgagtataggtatagatctgttatcaaagcatgccaactggaggaggatatatccaagttcgctgagaaggacaatatcgtgctcggtgagggaggcatcacgctttccggcgggcagcgggctcggatcagcttggcacgggctgtttataaggacgcggatctctaccttctcgactcaccctttggttacctcgatgtgctaaccgagaaggagatttttgagtcgtgcgtctgcaaactgatggctaacaagactcgtattctggtgacttcaaaaatggagcacctgaaaaaggccgacaagattcttatactgcacgagggaagcagttacttttacgggactttcagcgaattacaaaatttgcaaccggacttttcctcaaagctcatgggctgcgattcttttgaccagttcagtgcggagagacgcaattctattctaactgagaccctacaccgtttcagcttagagggtgacgcgcccgtgagttggactgaaacaaagaagcagtccttcaaacagactggtgaatttggagagaagcgcaagaacagcatccttaaccccatcaactcaattcgcaagttttcaatcgtgcagaagacgccgttgcagatgaatggtatagaggaggacagcgacgaacctctagaacggcggcttagtctggtgcctgattcggagcagggtgaggccattctaccccgtatttcagtcatctctacagggccaacccttcaggcccgtcggcgccagtccgtactgaatctaatgacccatagcgtgaaccagggtcagaatattcacagaaagactactgcctccaccagaaaggtaagtctggctccccaggcgaacctcactgaactggatatttatagtcgccgactgagtcaagagactggactggagattagtgaagagattaacgaggaggatctcaaagagtgtttcttcgacgatatggagagtatccccgctgtgacaacatggaatacttacctgcggtatataaccgtacataagtctttgatcttcgtcctgatctggtgccttgtcatcttcctggctgaggtggctgcctcattagtagtactttggcttctcggcaatactccactgcaggataaggggaattccacccactctcgcaacaatagttatgccgtgataattaccagtacttcatcctattatgtgttctacatctacgtgggggtggctgacaccctgttggcaatgggattttttcgcggcctccccctggtgcataccctgattaccgtgtccaaaattcttcaccacaagatgctgcatagtgtgcttcaggcgccaatgtcaactctgaacacactaaaggcaggcggcattttgaaccgcttcagcaaagacatcgcaattttggatgatttgctgccgctgactatcttcgacttcattcaactcctgctcattgtgattggagcaatcgctgtggtggctgtcttacaaccctatatctttgtagccacggtccctgtgattgtagccttcatcatgctgcgggcttatttcctccaaaccagccaacaactgaagcagttagagtccgaaggccgtagtcccatttttacccatctcgtgaccagcctcaaggggctgtggaccctgagagcctttggaaggcagccatactttgagacattgttccataaggccttgaacctgcacaccgctaactggttcctgtacctgagtaccctgaggtggttccagatgagaatagagatgattttcgttattttcttcattgctgtgaccttcatttcaatcctaaccacgggggagggggaagggcgcgtggggatcattctcaccctggccatgaatatcatgtcgaccttgcagtgggctgtgaacagctcaattgacgtggacagcctgatgaggagtgtaagcagggtgtttaagtttatagacatgcctactgaaggcaaacctactaagtctactaagccttacaagaatggccagctgtccaaggtgatgattattgagaacagccatgttaaaaaagatgacatctggcccagcggcggccagatgaccgtcaaggatctgacggcaaagtatacagaagggggtaatgccattctggagaatatcagctttagcatcagccccgggcagagggtggggctcttgggcagaaccggtagtgggaagtctaccctcctgtcagccttcctgaggctgcttaacaccgaaggagagatacagattgacggagtcagctgggattccattacacttcagcagtggaggaaggcttttggggtaatcccccaaaaagtgtttatttttagcggtacattcaggaagaacctggacccgtacgaacagtggtctgatcaggagatctggaaggtggccgatgaagttggtctgcgctccgtcatagaacaattccctggcaagctcgattttgtgttggtggacggggggtgtgtgctcagccacggacacaaacagttaatgtgtctggcccgcagtgtgctgtcaaaagccaaaatcctactgctagatgagccctcagcccacctagatcccgtgacatatcagatcatcagacggacactcaaacaggcctttgccgactgtaccgtgatcttatgtgaacaccgcattgaggccatgctcgaatgccaacagtttctggttatcgaggagaacaaggttcggcagtatgacagcatacagaaattacttaatgaaagatctctgttcagacaggccattagtcctagcgaccgagtcaaattgttccctcaccgcaatagttcaaaatgtaagtcaaaacctcagatcgctgcactgaaggaggagaccgaggaagaagtccaagatacacgcctg

SEQ ID NO: 9715 - DNA, 4440 bp, Artificial Sequence
  derived and/or modified sequence
atgcagaggtcgcctcttgagaaggcctcggttgtctctaagttgttcttttcatggacgaggccaatcctccggaaggggtaccgccaaaggctggaactttcagacatttaccaaatcccttcagtggattcggcggacaacttgtcggagaagctggaaagagaatgggaccgcgaattggcttcgaagaaaaaccccaagctgatcaacgccctgcgtcgctgctttttctggcgcttcatgttctacgggatcttcctctacttgggtgaggtgaccaaggccgtccagccattgctgcttggccggattatcgcctcttacgacccggacaataaggaggagagatcgattgcgatctacctgggaatcggcctgtgtctgctcttcatcgtgcgcactctgctcctgcaccctgctatcttcgggctgcaccatattggtatgcaaatgcggatcgcgatgtttagcctgatctacaaaaagactctgaaactgtcctcaagagtgcttgacaaaatcagcatcggacaactcgtgtctctgctgtcgaacaatcttaacaagttcgatgaaggactcgcgttggctcatttcgtgtggatcgcgccgctgcaagtggctctcctgatgggactcatctgggagctcctgcaagcgtccgctttctgcggactcggtttcctgattgtcttggcgttgttccaggcgggcttggggcgaatgatgatgaagtaccgggaccagcgcgcgggcaaaatcagcgaaagactggtcatcactagtgagatgattgaaaacatccagtcggtcaaggcctactgttgggaggaggcgatggaaaagatgatcgagaatttgagacagaccgagctcaagctgactagaaaagccgcgtacgtgcgctacttcaattcctcagcgtttttcttttccggcttcttcgtcgtgtttctgtccgtgctgccttacgccttgataaagggaattatcttgcggaagatcttcaccaccatctccttctgcatcgtgctccgcatggcagtgactcgccaatttccatgggcagtgcagacttggtatgatagcttgggggctataaacaagattcaggacttcctccagaaacaggaatacaaaaccttggagtacaacctcactacgaccgaggtggtcatggagaatgtgactgctttctgggaggaaggattcggcgagctgttcgagaaggccaagcaaaacaacaataaccggaaaacctccaacggcgacgattcgctcttcttttccaatttctcactgcttggaacccctgtgctcaaagacattaacttcaaaatcgaacggggacagctgttggccgtggcagggtcaaccggggcgggaaagacctccctgcttatggtgatcatgggggaattggaaccaagcgaaggtaagatcaagcattccggccgcatctcgttctgctcgcagttcagctggatcatgccgggtaccatcaaggagaatatcattttcggggtgtcatacgacgaatatagataccggtccgtgatcaaagcctgccagcttgaggaagatatctctaagttcgccgaaaaagacaacatcgtgctgggcgaaggagggatcaccctctccggtgggcagcgggcgagaatctcactggctagagccgtgtacaaagacgcagatctgtacctcctggactcgccattcggttacctcgatgtgctcactgaaaaggaaatcttcgagagctgtgtctgcaaacttatggctaacaaaactcggatcctggtgacttcgaagatggaacatctgaagaaagcagacaagatcctgattctgcacgaagggtcctcctacttctacggaacgttttcggaactgcagaacctgcagcccgacttttcgtcaaagctcatgggctgcgacagctttgaccagttctccgctgagcgcagaaacagcatcctgactgaaaccctccatagattcagcctcgagggggatgcaccggtttcatggactgaaaccaaaaagcagagcttcaagcaaactggcgaattcggcgaaaagcggaagaattccatccttaacccaattaactccatcaggaagttctccatcgtgcaaaagacgcccctgcagatgaatgggatcgaagaggacagcgacgagccactggagcggcgcctgtccctggtgccggactccgagcagggagaagccattctgccgagaatctcagtcatttccactggccccactctccaggcccgccgccggcaatccgtgctgaacctgatgacccatagcgtgaaccagggacaaaacatccataggaaaacgactgcgtccacccggaaggtgagcctggcgccacaggccaatctcaccgaactcgatatctactcgagacgactttctcaggaaaccggcctggaaatctccgaagagatcaacgaagaggatctgaaagagtgctttttcgacgatatggaatccatcccagccgtgacgacctggaatacgtatttgaggtacattacggttcataagtccttgatcttcgtgctgatctggtgcttggtaatcttcctcgcggaagtggcagcctcattggtggtcctgtggctcctgggaaatactccgctgcaggataagggaaacagcactcactcacggaacaacagctacgcggttatcatcacttccacttcctcctactacgtcttttacatttacgtgggcgtggcggacaccttgctcgcgatgggatttttccggggtctgccattggtgcacaccctcataaccgtgtcaaaaatcctccatcataagatgctgcattcagtccttcaagcgccgatgtcgaccttgaacactctgaaggcgggcggaatcttgaacagattctcgaaggacatcgccatcctcgatgacctcctgcccctcactatcttcgactttatccaactgctcctgattgtgattggagcaattgccgtggtcgcggtgctgcaaccatacatcttcgtcgccaccgtcccagtcattgtcgcttttatcatgttgagagcatacttcctgcaaaccagccagcagctcaagcaactcgagtcagagggtcgctccccgattttcacccacctggtgacgagcctgaagggactgtggaccctcagagcctttgggcgtcagccatactttgaaactctgtttcataaggcccttaatctgcataccgcaaactggttcctttacctgagcactctgcggtggttccaaatgcggattgagatgatcttcgtgatctttttcatcgctgtcactttcattagcatcctgacgaccggtgaaggagaggggcgcgtgggaatcattctgaccctggctatgaatatcatgtcgactctgcagtgggcggtgaactcgtcgattgacgtggactcgctgatgagatcggtgtccagggtgttcaaattcattgatatgccgacggagggaaagccgactaagtcgaccaagccgtacaagaacggccaactgtcaaaggtgatgatcattgagaactcgcacgtcaaaaaggacgatatttggccgagcggaggtcagatgaccgtgaaggacctcacggctaaatacaccgaaggaggaaacgcgatcttggaaaacatctcgttctcgatctccccgggccagcgagtgggactgctcggtcggactggatccggaaagtcaacgctgctgtccgcgttcctgagactgctcaacactgaaggcgaaatacagatcgacggagtctcgtgggattcgatcaccctccaacaatggagaaaggcttttggagtcattccgcagaaagtgttcatcttctccggtactttcagaaaaaacctggacccttacgaacaatggtcggatcaagaaatctggaaggtcgccgatgaagtgggcctgcgctcagtgattgaacagttccctggcaagctggatttcgtgctcgtcgacggaggatgcgtgctcagccacggccataaacaactgatgtgtcttgcccgctcggtgctttctaaggccaagatccttctgcttgacgagccgtcagcgcacctggatccggtgacctaccaaatcatcaggcgtactctcaagcaagcgttcgccgactgcactgtcatcttgtgcgaacaccgcatcgaggcgatgcttgagtgccagcaattcctggttatcgaagagaataaggtccgtcagtacgactcgattcagaaacttctgaacgaaaggtccctctttcggcaggctatttcaccgtcagatcgggtcaaactgtttccgcaccgcaacagcagcaagtgtaaatcgaaaccgcaaatcgctgcactcaaagaggagactgaagaggaagtgcaggatactcgcctc

SEQ ID NO: 9716 - DNA, 4440 bp, Artificial Sequence
  derived and/or modified sequence
atgcagaggtctcccctggaaaaggcttccgttgtcagcaaattgtttttcagctggaccaggcctatactgcgcaagggataccggcaacgcttggaactctcggacatttatcagataccatcggtggactccgccgataacctgtcggagaagctggagcgagagtgggacagggaactggcgagcaagaagaacccaaagcttattaatgcgcttaggcgttgcttcttttggcgcttcatgttttacggcatctttctgtacctcggcgaggtcacgaaagccgtccaaccactgttgttgggccgcatcatagcgagttatgatccggacaataaagaagagcgctcaatcgcgatttacctcggcatcggactttgcttactgttcatagtcaggaccctcctattgcacccggcaattttcggcctccaccatatagggatgcaaatgcgtatcgcgatgttttccctgatctataagaagaccttgaagttgtcctcccgcgttctcgacaagatctcaatcggccagctagtgagtttgctcagtaacaatctgaataaatttgatgagggtcttgccctggctcacttcgtttggatcgcgcctctccaggtggctttactgatgggactcatctgggagctattacaggcatcggccttttgtggtctgggtttcctcatcgtgctggccttatttcaggctggcctgggcagaatgatgatgaaataccgtgatcagcgagcaggtaagatctcggagcgcctggttattacgagcgagatgattgagaacatccagtccgtgaaagcctattgttgggaggaggccatggaaaagatgattgagaatctgcggcagacagagctgaaactcacaaggaaggctgcttacgtccgctattttaacagcagtgccttctttttctccggtttcttcgtggtgttcctgtccgtccttccctatgccctgatcaagggtatcatactgcgcaagatttttacgacgatttcgttctgtattgttttgcggatggccgttacgcgacagttcccatgggcagtccagacgtggtacgatagtctgggcgccatcaataagattcaggacttcctgcagaagcaggagtacaagaccctggagtataacttgacaaccacggaagtggttatggagaacgtgaccgcgttttgggaagagggatttggtgagctttttgagaaggccaaacaaaacaacaataatcggaagacaagcaacggcgacgattccttattcttctctaactttagccttttaggcacccccgtactaaaggacattaatttcaagattgagcgcggacaactgctggcggtagctggcagtaccggtgctggcaaaactagcttgctgatggtgattatgggcgaactggagccctccgagggaaagattaagcatagcggtcgcatctccttttgctctcagttcagctggataatgcccggcaccatcaaggaaaatataatttttggcgttagttacgatgaataccgctaccgctccgtgataaaagcatgccagctagaggaggacatcagtaagttcgctgagaaggataacatcgtcttaggcgagggcggaatcactctcagtggaggccagagggcccgcatctccctggcgagagcggtctacaaggacgccgacttgtacctgctagatagcccatttggttacctggacgtcctcacagaaaaggagattttcgagtcgtgcgtgtgcaaacttatggccaataaaactcgcatcctggtcacctcgaagatggagcaccttaagaaagccgacaaaatcctgatcctgcacgaaggatcctcctacttctatggcacattttccgagctgcagaaccttcagccggatttttcgtccaaactaatgggttgcgacagtttcgaccagttcagcgcagagcgccggaactcgatcttgacagagaccttgcacaggtttagtctggaaggagacgcgccggtgagctggaccgagacaaagaagcaatccttcaagcaaaccggcgagtttggagaaaagagaaaaaatagcattctcaacccgatcaattccattcgcaaattcagcatcgtccagaaaacacccctacagatgaacggaatagaagaggattctgacgagcccctggagcggcggctttcccttgtgccggatagcgaacagggagaagcaatactgccgcgcatatcagtgatcagcacgggtccaacactgcaggctcgccgacgtcagtccgtgctgaacctcatgacccattcggtgaatcagggccagaacatacatcggaaaacgaccgcttccacccgcaaggttagcctcgcgccacaggctaacctaacggaattggatatctattccaggcgcttgtcccaggaaaccggacttgaaatctccgaagaaatcaacgaagaggatcttaaagagtgcttttttgacgacatggaaagcattccagccgtaacaacttggaatacgtatcttcgatacataaccgtacacaagtcgctgattttcgtcctgatttggtgcctagtgattttcctggccgaggtggccgcatcattagtcgttctgtggcttctgggaaacactccacttcaggacaagggcaattccacgcacagtcgcaataactcctatgcggttattataacctccacgtcttcctactacgtgttctatatttatgtgggtgtggcggacaccctcctggcgatgggttttttcaggggccttccactcgttcatacgttaataaccgtatctaagatcctacatcataagatgctgcactcagttctgcaagcccccatgagcacgctcaataccctgaaggcaggcggaattctaaatcgttttagcaaggacatcgcgatcctggatgatctgttgccactgacgattttcgatttcatccaattgctgctaatcgtgatcggcgccatcgctgttgtggccgttttgcagccctatatctttgtggccacggtgccagtcatcgtggcctttattatgctgagagcctactttttgcagacctcgcaacaattgaagcagctcgagagtgaaggacgttcccccatttttacgcatctggtcacatccctgaagggactgtggacactgagggcgttcggacgacagccgtacttcgagaccttgttccacaaggccctaaacctgcacaccgccaactggtttctgtacttgtccactttgcggtggttccagatgcgaattgagatgatcttcgtcatcttcttcatcgctgtgaccttcatcagtatactgaccaccggcgagggagaaggccgcgtgggcatcatcctaacgctggccatgaatattatgtctaccctgcagtgggcggtcaattcatcgatcgatgtcgacagcctgatgcgctccgttagtcgagtgtttaagtttattgatatgcccactgagggtaagcccactaagtccacgaagccgtataagaatggccaactgtctaaagttatgattattgagaactcgcatgtgaagaaagatgacatttggccttcaggaggacaaatgactgtgaaggatctaaccgctaagtacaccgaaggcggcaatgccatcctagaaaacatttcgttctccatatcgccgggccagagggtgggactgcttggacgcaccggcagtgggaagtcaactttgttgtcagcgtttctgcggttgctgaacacagaaggtgagatccagattgacggtgtgagctgggactcgatcacgctgcagcagtggcgtaaggccttcggagtcataccgcaaaaggtattcatattctctggcacattccgcaaaaatctggacccatacgaacagtggagtgatcaggagatatggaaggtcgctgatgaagtcgggcttcgcagtgtgatcgagcaattcccagggaaactggatttcgtgctagtagacggaggttgcgttttgagtcacggacacaaacagctgatgtgtttggctcggtcggtcctctcgaaagcaaagattctactgcttgacgaaccatcagcacacctggacccagtaacatatcaaattatacgccgtacgctgaaacaagcctttgcagattgtaccgttattctctgcgaacaccgcatagaagccatgttggaatgtcagcagttcttggtgatagaggagaataaggtgcgccagtatgatagcatccagaagctgttgaacgagcgctccttgttccgtcaggctattagtccctctgatagggtgaagctcttcccacaccgaaatagctcaaagtgtaagtccaaaccgcaaatagccgctctgaaggaggaaaccgaagaagaggtgcaagacacccggctg

SEQ ID NO: 9717 - DNA, 4440 bp, Artificial Sequence
  derived and/or modified sequence
atgcagcgtagcccacttgagaaggcttccgtggtgtccaagctgtttttctcctggacaaggcctattttgcgtaaagggtataggcagcgcctggaacttagcgacatatatcagattccctctgtcgatagcgccgacaacctgagtgaaaagctagagagagagtgggaccgtgagctagctagcaagaagaatcctaaactgatcaatgccctgagaagatgcttcttctggcggttcatgttctacggaatcttcctgtatctcggcgaggtcactaaggctgtccaaccactgctgttgggccggatcatcgcgtcttatgatcctgacaacaaggaagagcgtagcatcgcaatatacctaggtatcggcttatgtctgctgtttatcgtgaggactctcctgctccaccctgcaatctttgggctacatcacataggaatgcagatgagaattgccatgttctccctgatatacaaaaaaaccttgaagctgtcaagccgggtgctggataagatttctattgggcagctggtgagcctgctttccaataatcttaacaagtttgatgagggtctcgctcttgcccatttcgtgtggattgcccctttgcaggtcgccctgctcatgggcctgatatgggagctgttacaggcctccgccttttgcgggctaggatttctcatcgtgctagcactttttcaggccggtctgggccggatgatgatgaaatatcgcgaccagcgggccggaaagattagcgaacggttggtcatcaccagtgagatgatcgaaaatatacagtccgttaaggcttactgctgggaggaggccatggagaagatgatcgagaacctgcgtcagactgaacttaaactgacccggaaagccgcgtatgtgcgatactttaatagttcagccttttttttcagcggcttcttcgtcgtatttctgtccgtgttgccttacgccctaatcaagggaattatcctcaggaagatatttaccactataagcttctgtattgttttgaggatggcagtcactcgccagtttccctgggccgtgcagacttggtacgattctctcggggcaataaacaaaatccaggactttttgcaaaagcaggagtataaaaccctagaatacaatctgacaaccacagaggtagtgatggaaaatgtcactgccttctgggaagagggctttggagaactattcgagaaagccaagcagaataacaacaaccggaaaacgtccaacggggacgattccttgttcttttcaaatttttctttactggggacgcccgtcctaaaagatattaatttcaaaattgagagaggacaactccttgcagttgcaggctcaactggtgctggtaagacgagcctattgatggtgatcatgggggagttggaacccagcgagggaaaaatcaagcattctggcagaatttccttttgttcgcagttttcctggataatgcccggaacaattaaggaaaacatcatcttcggcgtgagctacgatgaatacaggtatcgaagtgtaatcaaggcatgtcagctagaggaagatatttctaaatttgcagagaaagacaacatagtgctaggggagggaggcattaccctgtcaggcggtcaacgggccaggatcagcctggcgcgagccgtttataaggacgctgatctgtacctgctcgatagcccgtttggttatctcgatgtgcttaccgagaaagaaatcttcgagtcctgtgtgtgcaaacttatggcgaataaaacccgtatcctcgtgacctcaaaaatggaacacctcaagaaagccgacaagattctcattttacacgaaggctcatcctacttctacggcaccttctccgagctgcagaatctgcagccagacttttcatctaagctgatgggttgcgacagcttcgaccagtttagtgctgaacgacgaaacagtatccttaccgaaaccctccacagattcagcttagaaggagacgccccggtatcctggaccgaaacaaagaaacagtctttcaagcagactggggagttcggcgagaagcgaaagaatagtatcctcaaccccatcaactcaatcaggaagtttagcattgtgcaaaaaaccccactgcaaatgaacggcatcgaggaggatagtgacgaacctctcgagcgaaggcttagcttggtgcctgattctgagcagggcgaggctatactcccccgaattagcgttatatctactggacctacactgcaggccagaaggcgccagagtgtgctgaacttaatgacacactccgtgaaccagggtcagaacattcacagaaaaactaccgcctccaccagaaaggtctcattggctccacaggcaaatttaaccgagctagacatttacagccgccgtctgagccaagagaccggtttagaaatcagtgaggaaatcaacgaggaagacctgaaagagtgtttctttgacgatatggagagcatccctgccgtgacaacctggaacacctatctgcgctatataaccgtccacaagagtttgatttttgtactgatctggtgtttagttatcttcctagctgaagtggccgcaagtctcgtggtgttatggcttctcggaaacacgccattgcaggataaaggtaactctacgcacagtcgcaataattcatacgcggtgattattacatcaacaagtagctactacgtcttttacatttacgtcggggtggcagacacccttctcgccatgggctttttccggggcctgcccttggttcatacgttgattaccgtgtccaagatcctccatcataagatgctccactcagtacttcaagcccctatgtctacgctgaacaccctcaaagccggaggcatacttaacagatttagcaaggatatcgctatccttgacgatctgctccctttgactattttcgatttcatccagctcctactaatcgtcattggagctatcgcagtggtcgccgtgcttcaaccctacatattcgtggccaccgtgccagttattgttgcctttatcatgctgcgagcctacttcctccagactagccagcagttgaagcagctagagtccgaggggcggagccccatttttacccacctggtgacatccctgaaagggttgtggactctccgtgcgtttggcaggcagccgtacttcgaaaccttgttccataaagccttgaatctccacacagctaactggttcctgtatctatcaacactccgatggttccagatgaggattgagatgatcttcgtcatctttttcatcgcagttacatttatatccatcctaactaccggcgaaggcgaaggacgtgtcggaatcatccttactctggcaatgaatatcatgtctacgctacaatgggcagtgaattcttctatagacgtggactccttaatgcgctcagtctctagagtttttaagttcatcgatatgcctacagaaggcaagcctacgaagtctaccaaaccatacaagaatgggcaattaagcaaagtgatgataattgagaacagtcatgttaagaaagacgacatttggccttcaggaggccagatgacagtcaaagatctaacggcaaaatatactgagggagggaatgccatactcgaaaacataagcttttccatttcccctgggcagcgggtgggtctactgggacggacaggctctggaaagagtactctgttgagcgccttcttacggctgcttaatactgagggtgagattcagattgacggggtgagctgggactcaatcactctgcagcagtggaggaaggcattcggagtaattccacagaaagtgtttatatttagcgggacatttcgcaagaatctggatccctacgaacaatggtctgaccaagagatctggaaagtcgctgacgaggtgggcctgaggagcgtgatcgaacaatttcctgggaaacttgacttcgttttggtagacggtgggtgtgttctctctcacggacataaacagctgatgtgtctcgccaggtctgtgcttagcaaggccaagatattgctgcttgatgagcctagtgcacacctggatccagtgacttaccagataattaggcggacactgaagcaggcattcgccgactgcaccgtgattctgtgcgaacaccggatcgaagccatgttggaatgccagcagtttctggtgatcgaagagaacaaagtgcgccagtacgactcaattcagaagctcttaaacgaacggtccctcttccgccaggcaatctctccaagtgaccgtgttaagctattcccccatagaaactctagtaagtgtaagtctaaacctcagattgctgccttgaaggaggagacagaggaggaagtccaggacacccggtta

SEQ ID NO: 9718 - DNA, 4440 bp, Artificial Sequence
  derived and/or modified sequence
atgcaaagatcacccttggagaaagcttccgtggtgtctaaactgtttttcagttggacaaggccgattctccggaaggggtaccggcagcggctggagctgagtgacatataccagatcccatcagtcgattccgcagacaacctgagtgaaaagctcgaacgggagtgggacagggagctggcatcgaagaagaatcccaaactaatcaatgccctgagaaggtgcttcttttggcgctttatgttctacggcatctttctgtatctgggcgaggttacgaaggctgtgcaacctctgctgcttggcaggatcatcgcatcctatgacccagataacaaagaagaacgcagcattgcgatttacctggggattgggctctgcctgctgttcatcgtgaggaccctcctactccaccctgcaattttcgggctccaccacatcggaatgcagatgagaattgccatgttcagcctcatctacaagaagaccttgaagctgtcatctcgagtgctggacaagatttcaattgggcaactggtctcattactgtcgaacaatcttaataagtttgacgaggggctggcgctggcacattttgtctggatcgcgcctctgcaggtagccctcctgatgggactgatctgggaactcctacaggcctccgccttctgtgggttgggattcctgattgtgcttgcactgtttcaagcaggcctcggtcgcatgatgatgaaataccgtgatcagcgcgctggcaagatttccgaaaggttggtgataactagtgaaatgatcgaaaatattcagagcgttaaggcgtactgttgggaggaggccatggagaaaatgattgaaaacctaagacagacagaactcaagttgaccagaaaagcagcctacgttaggtactttaacagttccgctttcttcttctccggcttctttgtggtgtttctcagcgtgctgccttacgctctcatcaaaggaatcattttgcggaaaatcttcaccactatttcattttgcatcgtattaaggatggccgtcacacgacagtttccttgggccgtccagacatggtatgactccttgggggcgattaacaaaatccaggacttccttcagaagcaagagtataagacactggaatataatctaaccaccactgaagtagtgatggagaatgtaaccgctttctgggaggaggggttcggggagctcttcgagaaggcaaaacaaaacaataacaacagaaagacttccaacggcgatgactctttatttttcagcaactttagcctgctcggcactcccgtactgaaagatattaacttcaaaatagagagaggccagctgctcgctgtggctggttctaccggcgctggaaagacaagccttttgatggtgatcatgggcgagttggagccttcggagggcaagattaaacacagtgggcgcatatcattttgctcccagttttcctggatcatgcccggaacaattaaggaaaacattattttcggtgttagttacgatgagtatcgctaccgatccgtgatcaaggcatgccagctggaggaagacatctcgaagttcgccgagaaggacaacatcgtgcttggcgagggaggcatcaccctgtctggcgggcagcgagctaggatctcactggccagggcagtatacaaagacgccgatctgtacttattggattcaccttttggctatctcgatgtgctgaccgaaaaagaaatctttgaatcttgcgtatgtaaacttatggctaataaaacacggatcttagtgaccagcaaaatggagcatctcaaaaaggccgacaagatcctcatactgcatgaggggtcgtcttacttctatggcacattctccgagctccagaatttacagcctgacttcagtagtaagttgatggggtgcgactcatttgaccaattcagtgccgagaggcgaaactctattctaacggagacacttcatagattttcgctggagggggacgcgcctgtctcctggaccgagacaaaaaagcagagcttcaaacagactggggagttcggggagaagagaaaaaattctattctgaatcccataaattccatccgaaaattctccatcgtgcagaagaccccactccagatgaacggtattgaggaagacagcgacgagccactggaacggcgattatccctcgtgcctgacagtgaacagggggaggcaattttgccacgcattagtgtcataagcaccggaccaaccctgcaggctaggaggcgccaatccgtactgaatctgatgacacactccgtcaaccagggacagaatatccacaggaaaactactgcctcgactcgtaaggtctccctggcaccacaggccaacttgaccgaactcgacatttactcccgtaggctcagccaagagactggtcttgaaatctcagaggagatcaacgaggaggacctgaaagaatgcttctttgatgacatggagtctattcccgcagtaaccacatggaatacatacttgagatatatcacggtacacaaatccctgatatttgttttgatatggtgtctggtcatcttcttagccgaagtggcagccagcctggtagtgctgtggctcctcggcaacacaccactgcaagataaagggaattcgactcactcgcggaataatagctatgcggtgatcattacctctacttcatcctactatgtattttacatttatgtcggcgttgcggacacccttctggccatgggattcttccgagggcttcctctcgtgcacactctaatcacagtgtcgaaaatccttcaccacaaaatgttacactcagtactgcaagccccaatgagcaccctcaacacacttaaagctggtggcatcttgaatcgattctcaaaagatattgcaatactggacgacctgctgcccctgaccatcttcgactttattcagctgctgctgatagtgatcggcgctatcgctgttgtcgccgtgctgcaaccttacatcttcgtggccactgtgccagttatcgttgcttttataatgctccgcgcttattttttgcagacctcgcagcagcttaaacaactggagagtgaggggcgaagcccgatttttacacacttggtgacctccctaaaaggtctctggactctccgggccttcggcaggcaaccttactttgagaccctgtttcacaaggccctcaacttgcacacggctaactggttcctttatctttcaacccttaggtggtttcagatgaggatcgagatgatcttcgtgatcttttttatcgctgtaactttcatcagcattctcactacaggcgaaggagaggggagagttggaatcattctaacactggccatgaatattatgtccaccctgcaatgggccgtcaacagcagcatagatgttgatagccttatgcggtccgtgagtcgggtattcaaattcatagacatgccgaccgaaggaaagccaactaagtccacaaagccctataagaatgggcaactgagcaaagtgatgattattgaaaactcacacgttaaaaaagatgatatctggccctcagggggacagatgacggttaaagatttgaccgcaaaatacactgagggaggcaacgctattctcgagaacatcagtttttcaatcagtccaggtcaacgcgtcggactgttaggaagaactggctctgggaagagtactctgttatcggcgtttctaaggctgctaaacaccgaaggcgagatccagattgacggcgtttcgtgggacagtatcacactccaacagtggaggaaggcatttggagtgatcccccagaaggtgttcatcttctcaggcacctttcgtaagaatctagacccatacgaacagtggtccgaccaggaaatttggaaggtagcagacgaggtcgggctgcgttcagtgatcgagcagtttcccgggaagctcgacttcgttctggttgacggaggatgtgtgctctcgcatgggcataaacagctaatgtgtctagcccgctcggtactgtcaaaggctaaaatcctgctgttagatgaaccttcggctcatctagaccccgttacataccaaatcatccgacgaacactaaagcaagcattcgccgattgcaccgtcattctgtgcgagcaccggatcgaagctatgctggagtgtcagcagttccttgtcatcgaggagaataaggtgcgccagtatgacagcatccaaaagcttctcaacgagcgttccttgtttcgacaggctatctcaccgtccgaccgcgtcaagctgtttccccataggaatagcagcaaatgcaagtcaaagccccagattgccgcattgaaggaggagactgaggaagaggtgcaggatactcgactg

SEQ ID NO: 9719 - DNA, 4440 bp, Artificial Sequence
  derived and/or modified sequence
atgcaaaggtcacctcttgaaaaggctagcgtggtttcgaaactgttcttcagttggaccagacctattttgcgcaagggatataggcagcgtctcgaattatccgatatttatcagattccatccgttgactccgcagataacctctcagagaagcttgagcgggaatgggatcgggaacttgcaagcaaaaagaatccaaagttaataaacgctctcagacgatgctttttttggcgatttatgttttatggaatctttttatacctcggagaagtaacaaaggccgttcaaccgctccttctcggacggattatcgcatcttatgacccagacaataaggaggagagatctatcgcaatttacctgggaattgggctatgtctgctgttcattgtgagaacgttacttcttcatccagcaatttttggattgcatcatatcggaatgcaaatgagaattgctatgttttcattgatttataaaaaaacactcaagctttcttcaagagtcctagataagatatctattggtcaactagtatctctactcagcaacaaccttaataaatttgatgagggacttgctctagctcactttgtgtggattgcaccactccaagtggccctcttgatgggactgatttgggaactgcttcaggcgtctgctttttgcggacttggattccttattgtgctagcactctttcaagccggtttgggaagaatgatgatgaaataccgagaccagagagcgggaaaaatcagtgagagattggtgatcacatcggagatgattgagaatattcagtctgttaaagcatactgttgggaagaagctatggagaagatgattgagaatctccgtcaaacagagcttaaactcacacgtaaagctgcatatgtcagatacttcaattcttctgcgttctttttcagtggcttcttcgtggtttttttgtctgtcttgccttacgctcttatcaagggaataatcctcagaaagatattcactactattagtttttgtattgtgctaaggatggcagtaactagacaatttccatgggccgtacaaacgtggtatgactcacttggtgctatcaataaaattcaagatttcctgcagaaacaagagtataagacactggaatacaatttgacaactacagaggttgttatggagaatgttacagccttctgggaagaaggtttcggagaacttttcgaaaaagctaaacagaataataataatagaaaaacttctaatggagatgattcgttatttttctcaaacttcagcctgcttggaactcccgtccttaaggatattaacttcaagatcgaacgaggacagttgctcgctgttgcaggatcaaccggtgctggtaaaacatcattacttatggttattatgggagaacttgagccgtctgaaggaaaaataaagcattcgggacgtatttcattttgctcgcaattctcctggataatgccaggaacgatcaaggaaaacatcatattcggagtgtcgtatgacgaatatcgctacagatcagtcataaaggcttgccagcttgaagaagatatttcaaagtttgcagaaaaggataatatagtattaggggaaggagggattacgcttagcggaggacaacgtgcacgaatttcgctggctcgagctgtttacaaagatgctgacctataccttctggattccccatttggctacctcgacgttctcacggaaaaggagattttcgaatcatgtgtttgtaagctcatggctaacaagacacgaatcttggtcacatcgaaaatggagcatttgaaaaaagctgataaaatactgatccttcacgagggtagttcctatttctacggaacattctcggagttgcaaaatctgcagccagatttttccagtaagcttatggggtgtgattccttcgatcaattttcagctgaacgtcgtaattctattctaacggagactcttcaccgtttctctttggaaggtgatgccccggtgtcatggacggagactaaaaaacaatcgtttaaacagactggagaatttggggagaaaagaaagaattctattctgaatcccattaattctatcagaaagttcagcattgtccaaaagactccactgcagatgaatggaatcgaggaagatagtgatgaaccattagaacgaagactatcgttggttccggatagcgaacaaggcgaggctatcttgcctcgtatatcagtaatcagtacgggacccacactccaagcccgacggcgtcaatccgttctgaatctcatgactcattcagtaaaccaaggacaaaatattcatagaaagacaaccgcaagtactagaaaagtttcactcgcaccacaggcaaatctgacagaacttgatatatatagtagaagattgtcccaggaaacgggtttggaaatctctgaagagattaacgaagaggacctgaaggaatgttttttcgatgatatggagtcaattccggcagttactacatggaatacctacttgcgttatattactgttcacaaatctctcatctttgttttaatttggtgcttggtaatattcttagctgaagtcgcagcgtcactcgttgtgctttggcttttgggaaatactccattgcaagacaaaggtaattccactcattctcggaacaatagttatgcggtcattatcacttcaacgtcgtcatactatgtcttttacatttatgtcggagttgctgatactctactggctatgggattcttccgcggattacccttggtccacaccctaattactgtttcgaagattctacaccataaaatgctccatagtgtcctccaggctccaatgagtactttaaatacactcaaagctgggggaattttaaatagattctccaaggatatcgcgattcttgacgaccttttgcctttaactatctttgattttattcaactcctccttatagtgatcggggctatagctgtcgtagctgttttgcaaccttatatctttgtggcgaccgttccagtgatcgttgcatttattatgctccgggcatatttcttgcaaacttctcagcagctcaaacaattggagtcggagggaagaagcccaatttttacccacttggtgacttctttgaagggattgtggactcttcgggcattcggcagacagccatatttcgagactttatttcataaggcactgaatcttcatactgctaactggtttctgtatttatcgacacttaggtggttccagatgagaattgaaatgatttttgttatatttttcatcgcagtcacattcatatccatacttaccacaggcgagggagaaggtcgtgttggaattatccttaccctcgctatgaacattatgtctaccttgcaatgggctgtcaattcctctatagacgtcgactctctgatgcgttctgttagcagagtcttcaaatttattgacatgcctacagaaggaaagcctaccaagtcgactaaaccatacaaaaatggacaactttcaaaagtgatgatcattgagaattcccatgttaaaaaagacgatatttggccaagtggaggacagatgacagtcaaggatttgactgcgaaatacacagaaggaggaaatgcaattctagaaaatatcagcttctcaatttcgccagggcagcgagttggtttgctcggacgcactggttcaggaaagtccactcttctctcagcgttcttaaggcttctaaacacggagggagagatccagatcgatggagtttcttgggactctattactctgcaacaatggcgtaaggcttttggtgttattcctcaaaaggtgtttatcttttcgggaaccttccgcaaaaatttagatccatatgaacaatggtccgatcaggaaatatggaaagtcgcggacgaggtgggacttagatcagttattgagcaatttccgggaaaacttgacttcgtcctggtcgacggtggatgtgttctgagtcacggacataagcaacttatgtgtctagcaagatctgttctttcaaaagcaaaaattttgctacttgatgaaccaagcgctcacctagaccctgttacctaccaaattattcgcagaactttgaagcaagcgttcgctgattgcacagtaatcctctgcgagcacagaattgaagcaatgctagagtgccagcaatttttagtcattgaggaaaataaagtgcgacaatacgatagcatacaaaagcttctgaacgaacgaagtttgtttcgacaagcaatttcgccatcggatcgggtcaaattgttcccgcacaggaacagtagtaagtgtaaatcaaaaccgcaaattgcggctcttaaagaagaaactgaagaggaagtgcaggatacacgattg

SEQ ID NO: 9720 - DNA, 4440 bp, Artificial Sequence
  derived and/or modified sequence
atgcaacggtcgcccctggagaaagccagcgtggtgtccaagctgtttttctcatggactaggccaatcctgcggaagggctaccgccaaaggcttgaactgagcgacatttaccagatcccttcggtggatagtgctgataatctttcggaaaagctggaacgtgagtgggatcgcgagcttgcatccaagaagaacccgaagctgatcaacgcgctcagacgatgcttcttctggcggtttatgttctacggaattttcctctacctcggagaagtgaccaaagcagtgcagccgctccttctgggacgcatcatcgcgtcgtacgaccctgacaataaagaagagcggtcgatcgctatctacctcggaatcggactttgcctgctgttcatcgtgcgcaccttgctcctccaccccgctatctttggcttgcaccatatcgggatgcaaatgagaatagctatgttctccctcatctacaaaaagactctgaaattgtcctcccgagtcttggacaaaatctcgatcggacaactggtgagcctgctctccaataacctgaataagttcgacgaaggcctcgccctggctcacttcgtctggatcgccccgttgcaggtggccctgctcatggggcttatctgggaactgctgcaagcctcggcgttctgcgggctcgggttcctgattgtgcttgcgctctttcaggccggactgggacgcatgatgatgaaatacagggatcaaagagctggaaagatatcggaacggctggtgattactagcgaaatgatcgagaatattcagagcgtgaaggcatactgctgggaagaggccatggagaagatgatagagaacttgagacaaactgaactgaagctgacccggaaggcagcgtatgtgcgctactttaactctagtgcattcttcttctccgggttcttcgtggtttttctcagcgtgttgccatacgccctcatcaaaggaatcattctcagaaagatcttcactactatttcattttgcatcgtcctgcgcatggccgtcacccggcagtttccttgggcagtgcagacctggtacgactcgctgggtgcaattaacaaaatccaggatttcctccaaaagcaggagtacaagacgctcgaatacaatctgaccactaccgaagtcgtgatggagaacgtgaccgccttctgggaagaggggttcggggagctgtttgagaaggcgaaacagaacaacaacaatagaaagacttccaatggagatgattcgcttttcttttccaacttctccctgctgggtacgccggtcctcaaggacatcaacttcaagatcgaacgcgggcaactgctggcggtggcgggatcgacgggagccggaaagacctcactcctgatggttatcatgggcgaactcgagccgagcgaaggaaagattaaacactcgggaagaatctctttctgtagccagttcagctggataatgccgggcactatcaaggaaaacatcatttttggagtgtcgtacgatgaataccgctacaggtcagtcatcaaggcctgccaactggaggaagatatttcgaagtttgcagaaaaagacaacatcgtgctgggcgagggaggaatcactctgtctggaggacagcgagcccggatttctttggctagggcggtctacaaagacgccgacctgtacctcttggactcgcctttcggatatcttgatgtgcttaccgagaaagaaatcttcgagtcgtgtgtttgcaagctcatggccaacaagaccagaatcctggttacctccaagatggagcatctcaaaaaagcggataagatcctgatcctgcatgaaggatcgagctacttctacgggaccttctccgaactccaaaacctgcagccggatttctcatcgaaattgatgggctgcgacagctttgaccaattttctgccgagcggcgcaattcgatcttgactgaaactcttcaccgcttctcgctggagggcgatgcgccggtgtcgtggactgagactaagaagcagtcctttaagcagactggtgaattcggcgaaaagcgcaaaaactcgattcttaatcccattaactcaatccggaagttcagcatcgtgcagaaaaccccactgcaaatgaatggtatcgaagaagattccgatgagccgctggaacgtcggctgtccctcgtgcctgacagcgaacagggagaggcgatcttgccgcgcatcagcgtgatctcgactggaccaaccctgcaggcccgccgtcggcagtcagtgctcaacttgatgacccatagtgtgaatcaaggacagaatatccaccgcaagacgactgctagcacccggaaagtgtcgttggcgccgcaagccaacctgaccgaacttgatatctactcacggaggctgtcccaggagactggcctggaaatctctgaagagatcaatgaggaggacctcaaggagtgcttcttcgacgacatggagagcatcccagccgtcactacctggaatacctacctgcgctacatcacggttcacaaaagcctgatcttcgtgctgatctggtgtttggtcatcttcctggccgaggtcgccgcctcactcgtggtgctgtggctgctgggcaacactccactgcaggataagggcaactccactcattcccgaaataactcttacgccgtgatcataacctcgacctcgtcatactacgtgttctacatctacgtcggggtggcagacaccttgctcgccatgggattcttccgcggattgccgctggtccacactctgatcactgtgagcaagatcctccaccacaaaatgctgcacagcgtcctgcaagccccaatgagcactctgaacactctgaaagccggaggaatcctcaatcggttttcgaaagatattgcaatcctcgacgacctgctgcctctgaccatcttcgacttcatacagttgcttttgatcgtcatcggcgcaatcgccgtggttgctgtgctgcaaccctacatcttcgtggcgaccgtacccgtcatcgttgcgttcatcatgctgcgcgcgtacttcctgcagaccagccaacagcttaagcaactggagtcggaggggagatcaccaatcttcacccatctcgtgacctccctcaagggcctgtggactctgcgcgcattcggccggcaaccgtactttgaaaccctctttcacaaggcgctcaatctgcataccgctaactggttcctgtatctctccacgctgcgctggttccagatgcggatagaaatgatcttcgtcatctttttcatcgcagtcacgtttatcagcatcttgactaccggtgagggagagggcagagtcggaatcatcctcaccctcgcgatgaacatcatgagcaccctgcagtgggcagtcaactcatccatagacgttgacagccttatgagatcggtttccagggttttcaaattcatcgacatgccgactgaaggaaagccgacgaagtcaactaagccgtataagaacggacaactgagcaaggtcatgattattgagaattcccacgtgaagaaggacgatatatggccttcgggaggccagatgaccgtgaaggatctgacggctaagtacactgaagggggtaacgcgatccttgaaaacatctccttctccatctcaccaggccagcgggtggggttgctgggtcgcactggatcgggcaaatcaactctgctgagcgcattcttgcgcttgctgaacactgaaggagaaatccagatcgacggtgtgtcctgggactccatcaccctgcagcaatggagaaaggcctttggcgtcattccgcagaaggtgtttatcttctcgggaaccttccgcaaaaacctggatccttacgaacaatggtccgaccaagagatttggaaggtggctgacgaagtgggactgcggtcggtcattgagcagttcccgggcaagctcgacttcgtgctcgtggacggtggttgtgtcctgagccatggtcacaagcagttgatgtgtctggctagatccgtgctgtccaaagctaagatcctccttcttgacgaaccaagcgctcacttggacccagtgacctaccagataattcgccggactctcaagcaagcctttgcggattgcaccgtgatcctctgcgaacatcgtatcgaagcgatgctggaatgccagcagttcctggtaatcgaagagaacaaggtgaggcagtatgactccatccaaaagctcctcaacgaacgctccctcttcaggcaggcaatctcaccttcggaccgcgtcaagttgtttccgcatcggaatagctcaaaatgcaagtccaagccacaaattgccgccttgaaggaggaaaccgaagaggaagtgcaggatacgcggctc

SEQ ID NO: 9721 - DNA, 4440 bp, Artificial Sequence
  derived and/or modified sequence
atgcaaagaagcccactggagaaggcatcggtggtgtccaaactgtttttctcctggactagacccatcctgcgtaaaggctaccgccagaggctcgaactgtcagatatctaccagatcccgagcgtggattcagcagataacctgtccgaaaagctggaaagagagtgggatcgggaactggcatcgaagaagaatcccaagctgattaatgcacttcgcagatgctttttctggaggtttatgttctacgggatttttctgtacctcggggaggtgactaaagctgttcaacctctcctccttggtcgcattattgcgtcgtacgacccggacaataaggaagaaagatcaatcgcgatttaccttggcattggactgtgtctgctgtttatcgtgcgcacccttctcctgcaccctgctatctttgggctccatcacattgggatgcaaatgagaattgcaatgttctcgcttatctacaagaaaaccctcaagctctcatcccgtgtgcttgataagatatcaatcgggcaattggtgtcgctgctgtccaacaacctgaataagtttgatgaagggctcgcactggctcactttgtgtggattgcaccgcttcaggtcgcactgctgatgggactgatctgggaactgctgcaagcctcagcattttgcgggcttggatttctcatagtcctggccttgtttcaggcaggtcttggtcgaatgatgatgaaatacagggatcagagggccggtaagattagcgaacgactggtgatcacttcggaaatgatcgaaaacatccagtcggtcaaggcctactgctgggaagaagcaatggaaaagatgatagagaatttgcgccaaaccgaattgaaactcactagaaaagcagcatacgtgaggtacttcaacagctcagcattctttttctctggctttttcgtggttttcttgtccgtccttccatatgcccttatcaagggcattatccttcggaagatctttaccacgattagcttctgcattgtccttagaatggcggtcacccgccagtttccttgggccgtgcagacctggtacgactcccttggggcaatcaataagatccaggactttctccagaagcaggaatacaaaactcttgaatacaacctcaccaccactgaggtggtcatggaaaacgtgactgcgttttgggaagagggattcggggagctcttcgagaaagcaaagcaaaacaacaataacagaaaaacctcgaatggagacgattcccttttctttagcaacttttccctcctcggtaccccagtgcttaaggacataaactttaagattgaaagaggtcaactgctcgccgtggcaggatcgactggagccggtaaaacgagccttttgatggtcattatgggagaactggaaccgtcagaaggcaagattaagcatagcggtcggatcagcttttgttcgcaatttagctggattatgccggggaccataaaagagaacatcatctttggtgtgtcatacgacgaatacagataccgcagcgtcatcaaggcctgccagcttgaggaggatatttcaaaattcgcagaaaaagataacatcgtgctcggcgaaggaggcattactctctccggtggacaaagagcccgtatctcactcgccagagctgtgtacaaggatgccgatctgtacctgctggattccccctttggatacctggatgtcctcactgagaaggagatttttgaatcgtgtgtttgcaagttgatggccaacaaaactcggattcttgtcacttcaaagatggaacacttgaaaaaagcggacaagattcttatactccacgaaggatcatcgtatttctacggaaccttctcggaacttcaaaacttgcaacctgatttctcatcgaaactgatggggtgtgattcgtttgatcagttttccgccgaacgacgcaattccatccttacggaaaccctgcatcgcttcagcctcgaaggggatgccccagtgtcctggaccgaaactaaaaagcaatcattcaaacagaccggcgaatttggagaaaaaagaaagaattcgattctgaatcccattaactccattcggaagttctcaattgtgcaaaaaacgcctcttcagatgaatgggatcgaggaagattccgacgaacctcttgagcggcgcttgtccctggtccccgattccgagcaaggtgaagccatccttccacggatttcagtcatctcaactggacccactttgcaagctcgccggcgccaaagcgtccttaatcttatgactcacagcgtgaaccagggacagaacatacatagaaaaaccaccgcctcgacccggaaagtgtcccttgcacctcaggcaaatctgactgagcttgacatctactccagacggttgtcccaagagactggtcttgaaatttcggaagagattaacgaagaagatctcaaggagtgtttctttgacgacatggagtcgattcctgcagttaccacctggaacacttatctgagatacattaccgtgcataaatccctgatcttcgtcctcatctggtgtctggtgattttcctggccgaagtggctgcttcgcttgtggtgctttggctgctcgggaacacgccgttgcaagacaagggaaactcgacccatagccgcaataactcatacgcagtgataatcacttcgacctccagctactatgtgttttacatatacgtcggagtggccgataccttgctggcaatgggtttctttagaggccttcctctcgtgcatactctgattacggtgagcaagattctgcatcataagatgctgcattctgtgctgcaggcaccgatgtcgactttgaacacccttaaggcaggtgggattctgaatcgctttagcaaggacatcgcgatccttgatgatcttctgcccttgacgatatttgactttatccagcttctgctcattgtgattggagcgatagccgttgtggcagtgcttcaaccatacatctttgtcgccactgtgccagtgattgttgcgtttatcatgcttcgagcctactttcttcaaaccagccagcagcttaagcaactcgagagcgaaggtcggtcccctattttcactcatctggtgacttccctcaagggtttgtggactctccgtgcttttggacggcagccttactttgaaactctgtttcacaaggctctgaatttgcataccgctaactggttcctttacctctcgaccctgcgttggttccaaatgaggatagagatgatcttcgtgatctttttcatcgccgtcacctttatcagcatactcactaccggagaaggagaggggagagtgggtatcattcttacgctcgccatgaacatcatgtccactttgcagtgggcagtgaatagctcaatcgatgtggatagccttatgcggtcagtctcacgtgtgtttaagtttatagacatgcctactgaaggaaagcccactaaatccacgaagccttacaagaacgggcagctgtcgaaggtcatgattattgagaactcgcatgtgaagaaagatgatatttggccgtccggagggcagatgacggtgaaggaccttaccgcaaagtacaccgagggaggaaacgccatccttgagaacatctcgtttagcatatcgccaggccagcgtgtgggactcctgggtagaaccggctcaggaaagtcaaccctcctttctgcctttcttcgccttctgaacaccgaaggagagatacagatcgacggtgtgtcgtgggactcgatcactcttcaacagtggagaaaagcattcggagtgattccacaaaaagtgtttatcttttcgggtaccttccgtaagaacctggatccatacgaacagtggtcagatcaggaaatatggaaggtggccgatgaggtgggacttcgatcggtcatcgagcagtttccgggcaaacttgactttgtgttggtggacggcggatgtgtgctgtctcatggtcacaagcaacttatgtgccttgcacgctctgtcctgtcgaaggcaaagattctgctgcttgatgaaccaagcgcgcatctggaccctgtgacctaccagataatcagaaggaccctgaagcaggcattcgccgactgtactgtcattctctgcgaacatcggattgaagcaatgcttgaatgtcaacaatttctggtcatagaagaaaacaaggtgaggcagtacgattcgattcaaaaactgctcaatgagcggtccttgttccggcaagcaataagcccatccgacagagtcaaattgttcccacaccgaaactcgagcaagtgtaagtccaaacctcaaatagcggcactgaaggaagaaaccgaggaggaggtgcaagatactaggctt

SEQ ID NO: 9722 - DNA, 4440 bp, Artificial Sequence
  derived and/or modified sequence
atgcaacgttcgccgttagaaaaagcgtcggttgtatcgaaactatttttttcgtggacgcgtccgatactacgtaaaggttatcgtcaacgtttagaactatcggatatatatcaaataccgtcggtagattcggcggataatctatcggaaaaactagaacgtgaatgggatcgagaattagcgtcgaaaaaaaatccgaaattaataaatgcgttacgacgttgttttttttggcgatttatgttttatggtatatttctatatttaggtgaagtaacgaaagcggtacaaccgttactactaggtcgaataatagcgtcgtatgatccggataataaagaagaacgatcgatagcgatatatctaggtataggtttatgtttactatttatagtacgtacgttactattacatccggcgatatttggtctacatcatataggtatgcaaatgcgtatagcgatgttttcgctaatatataaaaaaacgctaaaattatcgtcgcgagttttagataaaatatcgataggtcaattagtatcgctattatcgaataatctaaataaatttgatgaaggtttagcgttagcgcattttgtttggatagcgccgctacaagttgcgctactaatgggtttaatatgggaattattacaagcgtcggcgttttgtggtttaggttttttaatagtactagcgttatttcaagcgggtctaggtcgtatgatgatgaaatatcgagatcaacgagcgggtaaaatatcggaacgattagtaataacgtcggaaatgatagaaaatatacaatcggttaaagcgtattgttgggaagaagcgatggaaaaaatgatagaaaatttacgtcaaacggaactaaaactaacgcgtaaagcggcgtatgtacgttattttaattcgtcggcgttttttttttcgggtttttttgtagtttttttatcggtattaccgtatgcgttaataaaaggtataatactacgaaaaatatttacgacgatatcgttttgtatagtattacgtatggcggttacgcgtcaatttccgtgggcggttcaaacgtggtatgattcgctaggtgcgataaataaaatacaagattttctacaaaaacaagaatataaaacgttagaatataatctaacgacgacggaagttgtaatggaaaatgttacggcgttttgggaagaaggttttggtgaattatttgaaaaagcgaaacaaaataataataatcgtaaaacgtcgaatggtgatgattcgctatttttttcgaatttttcgttattaggtacgccggttctaaaagatataaattttaaaatagaacgaggtcaattactagcggtagcgggttcgacgggtgcgggtaaaacgtcgttattaatggttataatgggtgaattagaaccgtcggaaggtaaaataaaacattcgggtcgtatatcgttttgttcgcaattttcgtggataatgccgggtacgataaaagaaaatataatatttggtgtatcgtatgatgaatatcgttatcgttcggtaataaaagcgtgtcaactagaagaagatatatcgaaatttgcggaaaaagataatatagttctaggtgaaggtggtataacgttatcgggtggtcaacgagcgcgaatatcgttagcgcgagcggtatataaagatgcggatttatatttactagattcgccgtttggttatttagatgtactaacggaaaaagaaatatttgaatcgtgtgtatgtaaattaatggcgaataaaacgcgtatactagtaacgtcgaaaatggaacatctaaaaaaagcggataaaatactaatactacatgaaggttcgtcgtatttttatggtacgttttcggaactacaaaatctacaaccggatttttcgtcgaaattaatgggttgtgattcgtttgatcaattttcggcggaacgtcgtaattcgatattaacggaaacgttacatcgattttcgctagaaggtgatgcgccggtatcgtggacggaaacgaaaaaacaatcgtttaaacaaacgggtgaatttggtgaaaaacgaaaaaattcgatattaaatccgataaattcgatacgtaaattttcgatagtacaaaaaacgccgctacaaatgaatggtatagaagaagattcggatgaaccgttagaacgtcgtttatcgctagtaccggattcggaacaaggtgaagcgatactaccgcgtatatcggtaatatcgacgggtccgacgctacaagcgcgacgtcgtcaatcggtactaaatttaatgacgcattcggttaatcaaggtcaaaatatacatcgtaaaacgacggcgtcgacgcgtaaagtttcgctagcgccgcaagcgaatttaacggaactagatatatattcgcgtcgtctatcgcaagaaacgggtttagaaatatcggaagaaataaatgaagaagatctaaaagaatgtttttttgatgatatggaatcgataccggcggtaacgacgtggaatacgtatctacgttatataacggtacataaatcgttaatatttgtattaatatggtgtctagtaatatttctagcggaagttgcggcgtcgctagttgtactatggttattaggtaatacgccgttacaagataaaggtaattcgacgcattcgcgtaataattcgtatgcggtaataataacgtcgacgtcgtcgtattatgtattttatatatatgttggtgtagcggatacgctactagcgatgggtttttttcgtggtctaccgttagtacatacgctaataacggtatcgaaaatattacatcataaaatgttacattcggtattacaagcgccgatgtcgacgttaaatacgctaaaagcgggtggtatactaaatcgtttttcgaaagatatagcgatattagatgatttattaccgctaacgatatttgattttatacaattattattaatagtaataggtgcgatagcggttgtagcggttctacaaccgtatatatttgttgcgacggttccggtaatagtagcgtttataatgctacgagcgtattttttacaaacgtcgcaacaattaaaacaattagaatcggaaggtcgttcgccgatatttacgcatctagtaacgtcgctaaaaggtttatggacgctacgtgcgtttggtcgtcaaccgtattttgaaacgctatttcataaagcgctaaatctacatacggcgaattggtttttatatttatcgacgttacgttggtttcaaatgcgtatagaaatgatatttgtaatattttttatagcggtaacgtttatatcgatattaacgacgggtgaaggtgaaggtcgtgtaggtataatattaacgttagcgatgaatataatgtcgacgctacaatgggcggttaattcgtcgatagatgttgattcgctaatgcgttcggtttcgcgtgtatttaaatttatagatatgccgacggaaggtaaaccgacgaaatcgacgaaaccgtataaaaatggtcaactatcgaaagttatgataatagaaaattcgcatgttaaaaaagatgatatatggccgtcgggtggtcaaatgacggttaaagatttaacggcgaaatatacggaaggtggtaatgcgatattagaaaatatatcgttttcgatatcgccgggtcaacgtgtaggtctactaggtcgaacgggttcgggtaaatcgacgttactatcggcgtttctacgattattaaatacggaaggtgaaatacaaatagatggtgtatcgtgggattcgataacgctacaacaatggcgaaaagcgtttggtgttataccgcaaaaagtatttatattttcgggtacgtttcgtaaaaatttagatccgtatgaacaatggtcggatcaagaaatatggaaagttgcggatgaagtaggtctacgatcggttatagaacaatttccgggtaaattagattttgttctagttgatggtggttgtgtactatcgcatggtcataaacaattaatgtgtctagcgcgatcggtattatcgaaagcgaaaatactactactagatgaaccgtcggcgcatctagatccggtaacgtatcaaataatacgacgtacgttaaaacaagcgtttgcggattgtacggtaatactatgtgaacatcgtatagaagcgatgctagaatgtcaacaatttttagtaatagaagaaaataaagttcgtcaatatgattcgatacaaaaactattaaatgaacgttcgctatttcgtcaagcgatatcgccgtcggatcgtgtaaaactatttccgcatcgaaattcgtcgaaatgtaaatcgaaaccgcaaatagcggcgttaaaagaagaaacggaagaagaagttcaagatacgcgtcta

SEQ ID NO: 9723 - DNA, 4440 bp, Artificial Sequence
  derived and/or modified sequence
atgcaacgcagccctttggagaaggctagtgtggtgtcaaagctctttttctcttggacccgcccaatcctgcggaaaggctacaggcagcgcctggaactgtccgacatttaccagattccttctgttgatagtgcagacaacctaagcgagaagcttgagcgagagtgggatcgggagctggcctcaaaaaaaaatccaaaacttatcaatgcacttcgcagatgcttcttctggcgctttatgttctatggcatatttttgtaccttggggaggtgactaaggcagtgcaaccgctgctgctaggccggattatcgcttcatacgaccccgacaacaaggaagagcggagcatagctatttacctggggattggtctgtgtctcctgtttatcgtgagaacactcctgctacatccagccatttttggcctccatcatattggaatgcaaatgagaattgccatgttttccctcatctacaaaaaaacactgaaactctcatcgagagtgctagataagatttctatagggcagctggtgtccttgctttccaacaaccttaacaaattcgatgagggcttggcccttgcccacttcgtgtggatcgcgccactgcaagtcgctctgctgatgggattgatttgggagctgctgcaggcaagcgcattctgtggcctggggttcttaatagtgcttgcactgtttcaggctggactcggacgaatgatgatgaaataccgcgaccagagggctggcaagataagtgaacggctcgtgatcactagcgaaatgatcgaaaatatccagagcgtaaaagcttattgctgggaggaagctatggagaaaatgatagaaaacttgcgtcagacggagttgaagctgacccgtaaggctgcttatgttcgctacttcaattccagcgcgtttttcttctcaggcttttttgtggtatttctgtcagtcctaccttatgcccttatcaagggcattatcctgcggaagatttttacaaccatttccttctgcatagtgctgcggatggcagtaacaagacaatttccgtgggctgtgcaaacgtggtacgactccctcggcgccatcaacaagatccaggactttcttcagaagcaggaatataagacactcgagtataacctaaccactacagaagtggttatggagaatgttacagctttttgggaggagggcttcggtgagctcttcgagaaagctaagcagaacaataataaccgcaagacaagtaatggcgacgatagtctgtttttcagcaatttcagcctgctggggacacccgtgctaaaggatattaattttaagatcgagcgcggccagctgctggcggtcgctggcagtacgggggctggcaaaactagtttgctaatggtcattatgggagagctagaaccttctgagggcaaaataaaacacagcggaagaatatcattctgcagtcagttctcctggataatgcccggcacaataaaagagaacataatctttggagtctcgtacgatgaatacagatatagatcggtcattaaagcctgtcaactagaagaggatatcagtaagttcgcagaaaaagacaatatcgtgctgggcgaaggtgggattacgcttagcggcgggcagcgggcccgtatatcactggccagggctgtatataaggacgcggatctgtatctcctggactccccgttcgggtatttagatgttctaacagagaaggaaatctttgaatcctgtgtgtgcaaattaatggcaaacaagacccgcattctggtgacttccaaaatggaacatttgaagaaggccgataagatattaatcttgcacgaaggttcatcttatttttatggcactttttccgagctgcagaatctacaaccagatttttcctccaagctcatggggtgcgactcttttgatcagttcagtgccgagcggcggaatagtatcctgacggagactctgcatcgattcagcctggaaggggatgcgccagtatcgtggacagagaccaaaaagcaatcctttaagcagacaggggagttcggcgaaaaacgtaagaattctattttgaaccccataaactccatccgaaagttttcaatcgttcagaagacccccctgcagatgaacggaattgaagaggactccgacgaaccactggagcgcagactgtctctggtccctgactccgaacagggagaggcaattcttccgagaatatccgtgatctcaacgggccccacgctgcaggcccggcggagacagagtgtactcaatctgatgacccattcagtaaatcaaggacagaacatccaccgcaagaccacagcctcaaccaggaaggtctctctggccccccaggctaacctgaccgaactggatatttatagcaggagactgtcacaggaaacagggttggaaatttcagaggaaattaatgaagaggaccttaaagagtgctttttcgacgacatggagtccatacccgcagtgaccacgtggaacacatatctcagatatattactgtgcataaaagtttgatcttcgtcttaatctggtgccttgttattttcctcgccgaggtggcagcctccctggttgtgctgtggcttttggggaacacacctttacaggataaaggaaatagcacccactccagaaacaacagctacgcggtgataatcacaagtacttcatcctattacgtcttctatatttacgtcggagtcgcagatactctgctcgctatgggcttctttagggggcttccactggtgcacaccctgataaccgtttccaagatattgcatcataaaatgttacattctgtgctgcaggctcctatgagtactttgaatactctcaaagcgggtggcatactgaaccgattctcaaaggatatagcaattctcgacgacttactcccactcacaatatttgattttatacaattgcttctcatagtgatcggcgcgatagccgttgtggccgtattgcagccctacatttttgttgcaactgttcccgtgatcgtcgcttttataatgctgcgtgcctatttcctgcagacaagccagcaactcaaacagttggagagcgaggggcggagccccatctttacacatctggtcacatctttgaagggtctctggacactgagggcatttgggcgtcagccctacttcgagacactgtttcacaaagcattaaatctccatacggccaactggtttttgtacctttctacccttagatggttccagatgcgcatagagatgatctttgtcattttcttcatcgccgtaacctttatttcgatcctgactaccggagagggtgagggacgagtcggcatcattctgacacttgctatgaatatcatgtctacactgcagtgggccgtcaatagctccattgacgtggacagcctgatgcggagcgtcagccgcgtcttcaaattcattgacatgccgaccgagggcaagcccacaaaatccaccaaaccgtataagaacgggcagctgagcaaagtgatgatcatagaaaacagtcacgtaaaaaaggatgacatttggccatccggggggcagatgacagttaaagatctgacagcaaaatacacagaagggggcaatgcaattttggagaatatatcctttagcattagccccgggcagcgcgtggggctgctcggcaggacaggctccggaaaatccaccctgctgtcggccttcctgaggctgctcaatacagaaggagaaatccaaattgacggtgtgagctgggatagcatcacattacaacagtggcggaaagcctttggcgttatccctcagaaagtcttcatcttttccggaacatttaggaaaaacctggacccttacgagcagtggtctgatcaggagatctggaaggttgcggatgaagtggggttaaggtcagttatcgagcagtttcccggtaagttggactttgtcctggtggatggaggatgcgtccttagtcacggtcataagcagttgatgtgccttgctcggtcagtgctctccaaggccaaaattctgctgttggacgaaccctctgcacacctggaccccgtgacttatcaaattattcgaagaacactgaagcaggccttcgctgactgtacggttattctgtgtgagcataggatcgaagcgatgctggaatgtcagcaattcctggttattgaggagaataaagtcagacagtatgattcaatccagaagctgcttaacgagaggagtctcttccgccaggcgatcagtccttcagatcgtgtgaagctcttccctcaccgaaattctagtaaatgcaagtcaaagccccaaattgcagccctcaaagaagagacagaggaggaagtgcaagacacacgcctc

SEQ ID NO: 9724 - DNA, 4440 bp, Artificial Sequence
  derived and/or modified sequence
atgcagaggtcacctcttgaaaaggcatcggtggtttcgaaattgtttttctcgtggacccgccccattcttagaaagggatacagacagcggctcgagctcagcgatatctatcagattccatccgtggatagcgcagacaatctttcggaaaagctggaacgagaatgggaccgcgagttggcgagcaagaaaaaccctaaactgattaacgctcttcggagatgcttcttttggagatttatgttctacggaattttcctctaccttggtgaggtgaccaaagcagtgcaaccattgctcctgggacgcatcattgcatcatatgacccagacaacaaggaagaacgcagcatagcaatctacctcggaattggactttgtctcctgtttatcgttcggaccctgctgctgcatcccgcaatctttggccttcatcatattggaatgcaaatgcggatagcaatgttctcgcttatctacaagaaaactttgaagctgtcgtccagagtgttggacaaaatctccatcggtcaattggtgtcgctcctgtccaataatctcaacaaatttgatgaaggtcttgccctggcacatttcgtctggatcgcacctctgcaagtggcgctgcttatgggcctcatttgggagctgctgcaagcctcggccttttgtggtctggggtttcttattgtgctggcattgttccaggccggccttgggcgcatgatgatgaagtacagagatcaaagagcaggcaagatatccgaaagacttgtgattaccagcgaaatgattgagaacattcaatccgtcaaggcatactgttgggaggaagcaatggaaaagatgatagaaaacctgcgacagaccgaactgaagctcaccagaaaggcagcatacgtcagatactttaacagctcagccttcttcttttccggattctttgtggtgttcctgtcggtgctgccttacgcactcattaaagggattattctccgcaagattttcactactatctccttttgcattgtgctccgcatggcagtgactaggcagttcccttgggcagtgcaaacgtggtacgacagcttgggagccattaacaaaattcaagatttcttgcagaagcaagagtacaagacgcttgaatacaacctcacgaccactgaggtggtgatggaaaacgtgactgcattttgggaggaaggcttcggtgagctgtttgagaaagcaaagcaaaacaacaataaccggaaaacctcaaatggggacgacagccttttcttctcaaacttttcgctcctgggcaccccagttctgaaggacataaacttcaagattgaacggggacagctgctggcagtggcgggtagcactggggccggcaagacctcgctccttatggtgataatgggcgaactggagccctcggagggaaagatcaaacattcgggcaggatctcattctgctcccagttttcgtggattatgcctgggactattaaggaaaacattatcttcggagtgagctacgatgaatacagatacaggagcgtgattaaggcgtgccaacttgaggaggacatttctaagtttgccgagaaggacaatatagtgctgggagagggaggaattaccctttctggagggcagcgtgcccgtatctccctggcaagagcggtctacaaggatgccgatctgtaccttctcgattcaccttttgggtacctcgatgtgctgacggagaaggagattttcgagtcctgtgtctgcaagctgatggcaaataagacccgaattcttgtgacctccaaaatggaacatttgaaaaaagctgataagatactgattctgcacgaagggtcctcatacttttacggaaccttttcagaactccagaatcttcagcccgatttttcctccaaactcatgggatgcgattcgttcgaccaattctcggcggaacggcgtaattccattcttaccgaaaccctccacagattttctcttgaaggcgatgcacctgtctcgtggaccgaaacgaaaaagcagtcctttaagcaaactggagaattcggtgaaaagcgcaagaattcgatccttaaccccatcaattctatcaggaagtttagcatcgtgcaaaagaccccactccagatgaacggaattgaagaggactcggatgagccacttgagcggcggctctccttggtgcctgacagcgaacagggcgaagcaattctgcctcgaatttcggtgatctcgaccggaccgacgctgcaggcaagaagaaggcaatccgtcctcaacctcatgactcattcagtgaatcaaggacaaaacattcatagaaagaccactgcatccaccaggaaggtcagcctggccccccaagcaaatcttactgagctggacatctactctcggaggctgtcccaagaaactggtcttgagatttcagaagaaatcaatgaggaggatctcaaggaatgtttctttgatgatatggaatcgatcccagccgttaccacttggaacacttatctcaggtacattaccgtgcacaaatccctcatcttcgtccttatttggtgccttgtgatttttctggccgaagtggccgcatcactggtggtcctgtggcttctgggtaacactccgctgcaagacaaaggaaactccactcacagcagaaacaatagctacgcagtgatcatcacgtccacttcctcatattacgtgttttacatctacgtcggagtggcagatacccttctggcgatgggcttttttcggggacttcctctggtgcacaccctcattactgtcagcaagattctccaccataagatgctgcattccgtgctgcaggcacctatgagcacccttaacaccctcaaggctggaggcattctgaaccggttctccaaagatatcgcgattctggatgatcttctgccactgaccatatttgacttcatccaactgctcctgatagtgataggcgccattgcagtggtcgcagtgctgcaaccttacatctttgttgcaaccgtgccagtgattgtcgccttcatcatgctcagagcctacttccttcaaacttcacagcagcttaagcaacttgaatcagagggccgatcgccaatcttcacccatctcgtgacctcgcttaagggactgtggaccttgagggcctttggcagacagccgtacttcgagactctgttccacaaggcactcaacctgcacactgctaactggtttctttacctgtcgaccctgaggtggtttcaaatgcggatcgaaatgatatttgtgatctttttcatcgctgtcactttcatcagcattttgactacgggcgaaggtgaagggagggtcggcataattcttacccttgccatgaacattatgtccacccttcaatgggcagtcaactcgtcaatcgatgtcgattcgctcatgcgtagcgtcagccgtgtgtttaagtttatcgacatgcctactgaagggaaaccaactaaatccactaagccttacaagaatgggcagctttcaaaggtcatgattatcgaaaactcccatgtgaagaaggacgacatctggccgtccgggggtcagatgaccgtcaaagatctcacggcgaagtacaccgagggtggtaacgcgatccttgaaaacatttccttttcaatctcgcctggtcagagagtgggattgctcgggcgaacgggaagcgggaagtcaacccttctttccgcatttctccggttgctcaacactgaaggagaaattcaaatcgacggcgtgagctgggattcaatcaccctccaacagtggcggaaagcatttggggtgatcccacagaaggtgttcatcttctccggtacttttcggaaaaaccttgatccctacgaacaatggtccgaccaggagatatggaaggtcgccgacgaagtgggacttaggtcggttattgaacaattcccgggcaagctggatttcgtcttggtggatggtggttgtgtgctctcgcatggacataaacagctgatgtgtctcgcgaggagcgtccttagcaaagctaagattttgcttcttgatgagcctagcgcacacttggatccagtgacctaccagattatccggcggactctcaagcaagcgttcgcagactgcacggtgatcctttgcgaacataggattgaagcaatgctggaatgccagcaatttcttgtgattgaagagaacaaagtgagacaatatgattcgattcagaaacttctgaacgaaaggtcgttgtttagacaagcaatatccccatcagacagagtcaaactttttcctcataggaattcatcgaagtgtaagtccaagccacagatcgccgcattgaaggaggaaactgaagaggaagtccaggatacccggctt

SEQ ID NO: 9725 - DNA, 4440 bp, Artificial Sequence
  derived and/or modified sequence
atgcaacggagccccctggaaaaagcctcagtggtatctaagctgttcttctcctggacccggcccattctgaggaaaggttaccgacagagactggaactgtcagatatctaccagatcccgagtgttgactcggccgacaacctgtccgaaaagttggagcgggaatgggatagagagctcgcctcaaagaagaatccgaagctgattaacgcactgcgccggtgtttcttctggagattcatgttctacgggatcttcctgtacctgggagaggtcaccaaggcggtgcagccactcctcctgggcagaatcatcgcgtcctacgacccggataacaaggaggaacggtcgatcgccatctacctggggatcggactgtgccttctgttcatcgtccgcactctgctgctccacccggcgatctttggcctgcaccacatcgggatgcagatgcgcatcgctatgttttcgctgatctacaagaaaaccctcaagctcagctcaagagtgcttgacaaaatcagcatcggtcaactggtgtcgctgctctcgaataatctgaacaagttcgatgaagggttggcgctggcgcattttgtgtggatcgcgccgctgcaggttgccctgcttatgggactgatctgggagcttctgcaagcatcagccttctgcggattgggatttctcatcgtcctggccctgtttcaggccggccttggcagaatgatgatgaagtaccgcgatcagagagctggtaagatatcggagcgcttggtgattacctcggaaatgatagaaaacatccaatcggtgaaagcctactgctgggaggaggcgatggagaagatgatcgagaatctccggcagaccgaattgaaactcacccgcaaagcggcctacgtgcgctacttcaactcgtccgctttcttctttagcggattctttgtggtgttcttgagcgtgctcccctacgccttgattaagggcatcatcctccgaaaaatcttcaccactatcagcttttgcatcgtgctgcgcatggcagtgactcgacagttcccgtgggcagtgcagacctggtatgactcgctgggagcgatcaacaaaatccaagactttctgcagaagcaagagtacaaaactctggagtacaatctcactaccacggaagtggtcatggaaaatgtgaccgccttctgggaagaaggatttggagaattgttcgagaaggctaagcagaacaacaataaccgcaagaccagcaatggcgatgactcacttttctttagcaacttctccctgctggggaccccagtcttgaaggatatcaatttcaagattgaacgcggacagctgctggcagtggccgggtcaactggggccgggaaaacctccctgctgatggtgattatgggagaactcgaaccttcggaaggcaagatcaagcattccggccgcatcagcttttgttcccaattcagctggatcatgccaggaacgatcaaggaaaacatcatcttcggagtctcctacgatgaatacaggtacaggtcggtcatcaaggcatgtcagctggaagaggatatctcgaaattcgctgagaaagataacatcgtgctgggggagggtggaatcaccctctcgggaggacagcgggcccggatttcgctggctagagccgtctacaaagacgcagatctgtaccttctcgattcaccgttcggatacctcgatgtgctcaccgaaaaggagatatttgagtcttgcgtgtgcaagctgatggcgaataagacgagaatcctcgttacttccaagatggaacatctgaagaaggcagataagattttgatcctccatgagggatcatcttacttttacggaactttctcggaactccaaaacctgcagccggacttctcctccaaactgatggggtgcgacagcttcgaccagttcagcgcagaacggcgcaattcgatcctgaccgagactctgcacagattctcactcgagggagacgcgcctgtatcctggaccgagactaagaagcagtcgttcaagcagactggcgaattcggggaaaagcggaaaaactccatcctgaacccgatcaattcgattcggaagttttccatcgtccaaaagacccccctccaaatgaatggcattgaagaggactccgacgagcctctggagcggcgcctgagcctggtgccggactcggagcaaggtgaagccattttgcctcggattagcgtcatctcgaccggaccaactttgcaagcgcggaggagacaatcggtgctgaatctgatgacccactcagtgaaccaaggccagaatattcacagaaaaactaccgcctcgactcgaaaggtcagcctcgctccgcaggccaacttgaccgaactggacatttactcgcggcgactgagccaagaaaccggcctggaaatctccgaggaaatcaacgaagaagatctgaaagagtgcttcttcgatgatatggaatcgatccccgcagtgaccacttggaacacctacctgcgctacatcaccgttcacaaatccctgattttcgtgcttatctggtgcctcgtgatcttcctggccgaggtcgccgcatccctcgtcgtgctgtggctgctggggaacacccctctgcaggataagggaaactcgacccactcgcgtaacaactcgtatgcagtgatcattacctctacctcgtcctactatgtgttttacatctacgtgggagttgcggataccctcctggcgatgggatttttccgggggctcccactcgtgcacactctgatcacggtatcgaaaatcctgcaccacaaaatgctccacagcgtgctgcaagcgccgatgtccactttgaatactctgaaggcaggggggatcctgaatcgcttttcgaaggacatcgctattctggacgacctgctgccgttgaccatctttgatttcatccagctgcttctgatcgtgatcggcgcgatcgcggtggtggctgtgctgcagccgtacattttcgttgcaactgtgcctgtcattgtggcattcattatgcttagggcctacttccttcagacctcgcaacaactgaaacagctggagtcggaaggccgctccccgatcttcactcacctcgtgacttcgttgaaaggtctgtggaccctgcgggcttttggacgccaaccgtattttgagactctctttcacaaggccctgaatctgcacactgcgaactggtttctctatctgtccaccctgcggtggttccagatgagaatcgaaatgatcttcgtgatcttcttcatcgcggtgacgttcatctcaattctgacgactggagagggtgaaggccgcgtgggaataatcctgaccctggccatgaacatcatgagtactctgcagtgggccgtcaactcgagcatcgacgttgacagcctgatgcgctccgtctcgcgcgtgttcaagtttatcgacatgccaaccgagggaaagccgactaagtccaccaagccatacaagaacggacagctttccaaggtcatgattattgaaaactcccacgtcaaaaaggacgatatctggccttcgggagggcagatgaccgtgaaggatctcactgcaaagtacactgaaggaggaaacgctattttggagaatatctccttctcaatctccccaggccagcgggtgggactgctgggccgcaccgggtccggaaagtcgaccctgctttcagcctttctgcggcttctgaacaccgagggagagatccaaatcgatggagtctcctgggattccatcactctgcagcagtggcggaaggccttcggagtgatcccccagaaggtctttatcttttccggtactttccggaaaaatcttgacccatacgaacaatggtccgaccaagaaatctggaaggtggctgacgaagtcggcctccgctctgtcattgagcagttcccgggcaaactggactttgtgctggtggacggaggctgcgtgctgtcccatggacacaaacagctgatgtgtctggcccgctctgtgctctcaaaggcgaagatcctgcttctggatgaaccgtccgcgcatctggatccagtgacctatcagatcatccggcggactctgaagcaggcctttgctgactgcaccgtcatcctgtgtgaacatcggatcgaagcaatgctggaatgccaacagttcctggtgatcgaagagaacaaagtcaggcagtacgattcgatccaaaagctcctgaacgagagatcgctcttcaggcaagccattagcccaagcgaccgagtcaagctcttccctcatagaaactcgtcgaagtgcaaatcgaaaccgcagatcgccgccctgaaggaagaaactgaggaggaggtacaggacactagactc

SEQ ID NO: 9726 - DNA, 4440 bp, Artificial Sequence
  derived and/or modified sequence
atgcaacggtcaccactggagaaagctagcgtcgtttccaaattgttctttagctggactagaccaattctccggaaggggtatcggcagcggctggagctttctgatatataccagattccaagtgtggattccgcagataatctcagtgaaaagctcgagcgagaatgggaccgcgaactggcctctaaaaagaatccgaagctcatcaacgcacttcggcgctgttttttctggcggttcatgttctacggaatctttctgtatctgggcgaggtcactaaggccgttcagcccctgctgcttggccggatcatcgcctcctacgaccccgataataaggaggaacgcagcatcgctatctatctgggcattgggctgtgtttattattcatcgtccggaccttgctcctgcatccagccatatttggcttacatcatatcggcatgcaaatgcggatagccatgttctccctgatctataaaaaaacccttaagctaagcagccgagtacttgacaagataagtatcggacaactcgtttctcttctgagcaataacctgaacaagtttgatgagggccttgccctggcacacttcgtgtggatcgcgccacttcaggtagccctgctaatgggcctgatctgggagctcttgcaggcttctgcgttttgcggtctcgggtttctgattgtccttgcactgttccaagctggactgggtagaatgatgatgaagtaccgtgaccaaagggctggcaagatttccgaacgactggtgattacatcggagatgatagagaatatccaaagcgtgaaagcttactgttgggaggaggccatggagaagatgatcgaaaatctcaggcagaccgaactgaagctaactagaaaggccgcttatgtgcgctactttaacagctccgctttctttttctctggttttttcgtcgtgtttcttagcgtgctgccttacgccttgatcaagggcataatcttacggaaaatctttacaaccatttctttctgcattgtgctgcggatggcagtaacacgacaattcccctgggccgtccagacatggtatgactctctgggcgctataaataagatccaggactttctgcaaaaacaggagtataagaccctggagtataatctgactactaccgaggtggttatggaaaatgtaacagcgttctgggaggagggatttggtgaactttttgagaaggctaagcagaacaacaataaccgaaagacttcaaatggcgacgactctctgttcttcagcaacttcagcctcctgggcacaccagtacttaaggatatcaacttcaaaatcgagagggggcaattactggctgtggcaggctcgactggcgcggggaagaccagtttgttaatggtgattatgggcgaacttgaaccttctgagggcaagatcaaacactccggcaggatctccttctgttcacagttctcatggatcatgccaggaacaatcaaggaaaatattatctttggtgtgtcatacgacgagtataggtatcggagcgtgatcaaggcttgccagctggaggaagacatcagcaaattcgcggaaaaggataacattgttctaggggagggtgggataaccttatctggaggccagagggcgcgcatttctcttgccagggcagtgtacaaagatgccgacctctacctcctcgacagcccattcggctacctggacgtcttaaccgaaaaagagatattcgagtcatgcgtgtgcaagctcatggcgaacaaaacccgaatactggtgacatccaaaatggaacacctgaaaaaggcggataaaatcctgattttgcacgaagggtcatcctatttttacggcacattttctgaacttcagaatctgcagcccgactttagttcgaaactgatgggttgtgatagtttcgatcaattctctgcggagcggcgaaatagcatcctcacggaaacgcttcaccggttctctttggagggagacgccccggtcagctggactgagacgaaaaaacagagcttcaagcagacgggggaattcggcgaaaagcggaagaacagtattctgaatcctattaactccattcgcaaattttcaatagtacaaaagacgcccctgcagatgaacgggatcgaagaggactcagacgagcctctcgagcggcggctgtctctggtgcctgactccgaacagggtgaggcaatccttccccgcatctctgtgatctctaccggacctacactccaggcacggagacgccaatccgtcctaaatctcatgacacactccgtcaatcagggccagaatatccacaggaaaaccactgcgtcgacgaggaaggtgtctttggcaccacaggcaaacctgaccgaattggatatctatagcaggcgtctgagccaggagacaggactcgagatctccgaagaaatcaacgaggaagatctgaaagagtgcttctttgacgacatggagtccattcctgcggtaacaacttggaacacatatcttcgctacatcacagtgcataagtctcttatctttgtcctgatttggtgtttggttatctttcttgctgaggtggccgcgtcactggtggttctatggctgctgggtaacactccactgcaggataagggcaatagtactcatagtcgtaacaatagttatgccgtcatcataacctctacaagttcatactacgtgttttatatctacgtgggagtcgccgacacactgctggctatgggcttcttccggggcctacccctggtgcatactctgatcactgtaagcaaaatcctgcaccacaaaatgctgcatagcgtcctgcaggccccaatgagtacactcaacacccttaaggccggggggatattgaaccggtttagtaaggacatcgctatcctggacgacctgctgcccttaactatcttcgattttattcaactactgttgatcgtcatcggcgccatagccgtggtggcagtgctgcaaccatatatcttcgtcgccactgttcccgttatcgtcgccttcattatgctgagagcctatttcctccagacaagccagcagcttaaacaactggaatccgaggggagatctccaatattcactcacttggtgactagcctgaaaggtctgtggactttgcgggcgttcggaagacagccttattttgagactttgtttcacaaagcactgaacctgcacacagcgaattggtttctgtacctgtccacactgcgctggttccagatgagaattgagatgatattcgtgattttcttcatcgccgtcaccttcatttctattttaacaacaggggaaggggaaggccgagtcgggattatcctgacattagccatgaacatcatgagcacattgcagtgggccgttaacagcagcatagacgtcgacagcctcatgcgctccgtcagtagggttttcaaattcatagatatgccaactgagggaaagccaacgaagagcacaaaaccttataaaaacggacaactgagtaaggtgatgatcatcgagaattctcacgtcaagaaggacgacatatggccttccggcggccaaatgactgtcaaagatctgactgcgaaatatactgagggaggcaacgccatccttgaaaacatctccttttccataagtcctgggcagcgcgtagggctgctgggccgtaccgggtccggcaagtctacgctgctgtcagcatttctgcgcctactaaatacagaaggcgagattcagatcgacggagtctcctgggactcgatcacactccagcagtggcgtaaagctttcggcgtgatcccacagaaggtttttatcttttctggaaccttcagaaagaatctggacccttacgaacagtggtctgaccaagagatttggaaggttgccgatgaggttggtctgcggtccgtcattgagcagttccccggcaagctggacttcgtgctggtagatggaggttgcgtgctgagccacggacacaagcaattgatgtgcttggccaggagcgttttgtctaaagcaaagatacttttgttagacgagccgtccgcccatctcgaccctgtcacatatcagatcatcagacggaccctcaaacaggcattcgcggactgcaccgtgatactgtgtgagcatcggatcgaggcgatgctcgaatgtcagcaattcttggttatcgaggagaacaaggttcggcaatatgattccattcagaaacttctaaatgaacgcagtctattcaggcaagccatatctccaagcgatagggttaaactgttccctcatagaaattcgtcaaagtgtaagtccaagcctcagatcgccgctttaaaggaggaaacagaggaagaagttcaagatacacggtta

SEQ ID NO: 9727 - DNA, 4440 bp, Artificial Sequence
  derived and/or modified sequence
atgcaacggagccctctcgagaaggcctccgtcgtgtcaaaacttttcttcagttggactaggcccatccttagaaagggatatcgacagcggcttgaactttcggatatctatcaaatcccctcggtggactcggcagataatctgtctgaaaagctggagcgagaatgggatagagaactggccagcaagaagaacccaaagctgataaacgctcttagaagatgtttcttttggcgcttcatgttctacgggattttcctttaccttggtgaggtgaccaaggccgtgcaacctctgcttctcgggcgcatcatagcatcctacgatccagataacaaagaagaaaggtcgattgcaatctaccttggaatcggactttgtcttttgtttattgtccggaccttgcttctgcacccggccattttcggattgcatcacattggaatgcaaatgagaatcgccatgttctcgcttatctacaaaaagactctgaagttgtcgtcgcgtgtgttggataagatttccattggacaattggtatcactgctctcgaacaacctgaacaagttcgatgaaggtcttgcactggcccacttcgtctggatagcccctttgcaagtggcactgctcatggggctgatttgggaactcctccaagcatccgcgttttgcggcctcggatttcttatagttctggcattgttccaggccggtctgggtcgcatgatgatgaagtatcgcgatcagcgggcgggcaagatttcggaaaggctggtgattacgtcagagatgatcgagaatatacaatccgtgaaggcctactgttgggaagaagcgatggagaaaatgattgaaaatcttcgccagaccgaacttaagctgactaggaaggccgcatacgtgaggtactttaactcttcggcattctttttcagcgggttcttcgtcgtgtttctgtcagtgctcccttacgcacttatcaagggcatcattctcaggaagattttcaccaccattagcttttgtatcgtccttaggatggcggtgaccagacaatttccatgggcagttcaaacttggtacgattcacttggtgccattaacaaaattcaagacttcctgcaaaaacaggagtacaagaccctggaatacaaccttactaccactgaagtggtcatggaaaatgtgactgcattttgggaagagggatttggagagctgttcgagaaggcaaagcaaaacaataacaatagaaaaactagcaacggcgatgatagcctgttcttctcaaacttctcgctgctcggaactccagtgctgaaggacattaactttaagatcgaaagaggccagctcctcgcagtcgcagggagcactggtgctggtaagacttcgcttctgatggtgataatgggagaattggaaccctccgagggcaaaatcaagcattcgggcagaatctccttttgttcccagttttcatggattatgcccggtactataaaggaaaacatcatttttggagtctcctacgatgagtacaggtaccgctccgtgatcaaggcttgtcaactggaagaagatatatccaaatttgcggaaaaggataacatcgtgcttggagaaggtggcatcactctgtcgggaggtcagcgtgcacggatttccctggcacgagcagtgtacaaggacgctgacctttacttgctggattcgccttttggttacctcgatgtcctgacggaaaaggagatatttgaaagctgtgtctgtaaactcatggcaaacaagactcggatcctcgtcacttcaaaaatggagcatctgaagaaggcagacaaaatcctcatcctgcatgagggtagctcttacttttacggcaccttcagcgaacttcaaaacctgcaacctgacttcagctcgaagctcatgggttgtgactcttttgatcaattttcggcagaaagacgcaactccattctgaccgaaaccctccaccgcttttcgcttgaaggtgacgcccccgtgtcctggacggaaaccaagaagcaatcgtttaaacaaacgggtgaatttggcgagaagcgtaagaacagcatcctcaacccgattaactcaatccgtaagtttagcattgtgcaaaagactcctctgcagatgaacgggattgaagaggattccgacgaacctctcgagcggagactctcgctggtgccggattcagagcaaggtgaagcgatccttccccggatttctgtgatctcgactggaccaacgcttcaagcacggagacggcagtcggtccttaaccttatgacgcatagcgtgaatcagggacagaatattcacagaaagaccaccgcgtccacgcgcaaggtgtccctggcaccccaagccaatcttaccgagctcgatatctactcaaggcggctctcgcaagagactggacttgagatttccgaagaaatcaacgaggaggacctgaaagaatgtttctttgatgacatggagagcatccccgccgtcacgacttggaatacctatctcagatacataaccgtccataagtcgcttatctttgtgctgatttggtgcctggtgatttttctggcagaagtggcggcatcgctggtggtgctgtggctgcttggaaatactcctctgcaagataaaggaaatagcactcatagcagaaacaactcctacgcggtgatcattacttcgacctcatcctactacgtgttctatatctatgtcggagtggctgacacccttctcgctatgggattctttagaggcctccctctcgtgcatacccttattaccgtgtccaaaattctgcaccacaagatgctgcattccgtcctgcaagcacctatgtccactctgaatacgctcaaggcaggcgggattcttaaccgattttcaaaggatatcgcaattctggatgatctgctgccactcaccatctttgatttcatacaattgttgctcatcgtgatcggcgcgattgccgtggtggcagtgcttcagccatacatttttgtggcaactgtgccggtcattgtggcatttatcatgctccgggcatactttctgcagactagccaacagcttaaacaattggagagcgagggaagatcgccgattttcactcatttggtaacctcactgaagggactgtggaccctgcgcgcgtttgggagacagccctacttcgagactctttttcacaaggccctgaatcttcataccgcaaattggttcctgtacctctcgactcttcgctggtttcaaatgaggattgaaatgatctttgtcattttctttattgcagtgaccttcatttcgatcctgaccaccggagagggagaaggcagagtcggaatcatactgaccctcgcaatgaacatcatgtccaccctccaatgggctgtcaattcttctatcgacgtggactcacttatgagatcagtgtccagagtgttcaagtttattgatatgccaactgaaggcaagccaaccaagtcgaccaagccatacaagaacggtcagctctcaaaggtcatgattatcgaaaactcgcatgtgaagaaagatgatatctggccttccggcggccaaatgaccgttaaagatcttaccgcaaaatacactgaagggggtaacgcgatccttgagaacatatcgttctcaatttccccgggacagcgggtgggtctgctgggtcggacgggaagtgggaagtcgactctgttgtccgcctttcttagactgctgaatactgaaggcgaaattcagatcgatggcgtgagctgggactcaatcactcttcaacagtggagaaaggcctttggcgtgattccccagaaagtgtttatcttttcgggaaccttccggaagaatctcgatccgtacgaacagtggtcagatcaggagatctggaaagtggcggacgaagtgggattgcgctcagtgatagaacaattcccgggtaagctggattttgtgcttgtggatggtggctgcgtgctttcacatggtcataagcagctgatgtgtctggccagatcagttctctcaaaagcaaagattctcctgttggacgaaccatcggcccacctcgacccagtgacttaccaaatcatacgccggacccttaaacaagcattcgccgattgcactgtaattctttgtgaacatagaattgaggcaatgctcgaatgccaacagttcctggtgatcgaagaaaacaaagtgcgacagtatgattcaatacaaaaactgctgaatgaacgaagcctttttagacaagcgatatcaccttcggacagagtgaaactgtttccccacaggaattcgtcaaagtgtaaaagcaagccgcagattgcagcattgaaggaagaaaccgaagaagaggtgcaggatacccgtttg

SEQ ID NO: 9728 - DNA, 4440 bp, Artificial Sequence
  derived and/or modified sequence
atgcaaagatcgcctcttgaaaaggcctcggtggtttctaaactgttcttttcctggactagaccgattctgcggaaggggtaccgtcaacggcttgaactgtcagacatataccaaattccttcagttgatagtgcggacaacctgtccgagaagttggaacgcgaatgggatcgggaactcgcatctaaaaagaacccgaagctgattaatgcactgagaagatgtttcttttggcgatttatgttttacgggatctttctctacctcggagaagtgactaaagccgtgcagccgctgctcttgggacgcattatagcttcgtacgatcctgataacaaagaagagaggtcaattgccatttacctgggtatcggactgtgcctcttgttcatcgtgaggaccctgttgcttcaccctgcgatttttggacttcaccatataggaatgcaaatgcggattgcaatgttcagcctgatttacaaaaagacgttgaaactgtcctcacgtgtgctcgataagatttcgatcggacaactggtgtcattgttgagcaataacttgaataagttcgatgagggattggcacttgctcattttgtgtggattgccccacttcaagtggcgttgcttatgggactgatctgggagctgcttcaggcgtcggcattttgcggactcggatttctgattgtgctggcgctgtttcaggcaggacttggcagaatgatgatgaaatacagggatcagcgagcaggcaaaatctctgagcgtctcgtcatcacgtcggaaatgattgaaaacattcaatccgtcaaggcctactgctgggaggaagcaatggagaagatgattgagaaccttcgtcagaccgaactgaaactgaccagaaaggccgcctacgtgcggtactttaactcctccgccttcttcttctccgggttttttgtggtgtttctctcggtcctcccatacgcactcattaaagggatcattcttagaaaaatcttcacgactatttccttttgtatcgtccttagaatggcagtgacgcgtcaatttccttgggcagtccaaacgtggtacgatagcctgggagctatcaacaagatacaagatttcctgcagaagcaggaatacaagactcttgaatacaatctgactactaccgaagtcgtgatggaaaacgtgaccgcgttttgggaagagggctttggtgaattgtttgaaaaggccaagcaaaacaataacaaccgaaagacctcaaacggtgacgactccctcttcttttctaatttctcgcttcttggcactcccgtgctgaaggacattaactttaagattgagcgcggtcagctcctggccgtcgcaggatcaaccggagcaggaaagacttcgctcctcatggtgataatgggtgagctggagccatcagaaggaaagattaagcattccggtaggatttcgttctgttcgcagttttcgtggattatgcctggtactattaaggaaaacatcatttttggtgtctcctatgatgaataccgctacaggtcggtcattaaggcgtgtcagctggaagaggacatctccaagtttgctgagaaggacaatatcgtgcttggagaaggagggatcaccctgtccggtggacaaagagcccgtatttctctcgcacgtgctgtgtacaaggatgcggacctgtacctccttgatagcccctttgggtatttggacgtgctcactgaaaaggagatttttgagtcgtgcgtctgtaagctgatggcaaataagaccagaattcttgtcacttcgaagatggaacatctcaaaaaggccgacaaaattctcatactgcatgaggggtcgtcctacttttacgggactttttcggaacttcaaaaccttcaaccagattttagttcgaagttgatgggttgtgacagcttcgaccaattctcggccgaacgccgcaactcaatactgacggagactctgcacaggttctcccttgaaggagatgccccggtttcatggaccgaaactaagaagcaatcgtttaagcaaactggcgaattcggagagaagagaaagaacagcatcctgaacccaatcaactccatcaggaaattctccattgtccagaaaacccctcttcaaatgaacgggattgaagaggactccgatgagcctctggagagacgactttcgttggtgccagattcagaacagggagaagcaatattgcccagaatctcggtgattagcacgggtccaaccctgcaagcacgcaggagacaaagcgtcctgaacctgatgacccactccgtgaaccaaggacagaacatccatcgtaagaccactgcctccacgcgcaaagtgagcctggcacctcaggcaaatcttaccgaactggacatctattctaggaggctctcgcaagaaactgggctcgaaatttccgaagaaatcaatgaggaagatcttaaggaatgcttctttgacgatatggagtccataccagctgtgactacctggaacacgtatctccgatacatcaccgttcataagtcattgatattcgtgctcatttggtgtctcgtcatttttctggctgaagtagcagcaagcctcgtcgttctgtggctccttggtaacacgccgcttcaggataagggcaatagtacccactcgcggaacaatagttacgcggtgatcataacctcgacctcgtcctactacgtgttctacatttacgtcggtgttgcagataccctcctggcaatggggttctttcgggggctccccctggttcataccctgataactgtctcgaagatacttcatcataagatgctgcatagcgtgctgcaagcccctatgtccactcttaatacccttaaagcgggtgggatccttaaccggttctccaaggatattgcaattctggatgatctccttcctctgactatctttgactttatacaacttctgctcatcgttattggggcaatagcagtggtggccgtattgcagccttacatatttgtggccactgtccctgtgattgttgccttcatcatgcttcgggcatactttcttcaaacctcgcagcagcttaagcagctggaatcggagggaagatcaccaattttcactcatcttgtgacctccctcaaaggtctttggacccttcgcgcattcgggcgccaaccatactttgaaaccctcttccataaggcactcaatcttcacactgcaaattggtttttgtacctgagcaccctccggtggtttcaaatgaggattgaaatgatctttgtgatcttctttatcgcagtgacctttatctcaattctcactactggcgaaggcgagggccgtgtgggaatcattcttactctggcgatgaatatcatgtcgacgctgcagtgggcagtgaactctagcatagatgtcgattcgctcatgaggagtgtgtcacgggtctttaagtttatcgacatgcccactgaaggtaaacccaccaagtcaactaagccatacaaaaacggccaactgtcaaaagtcatgattatcgaaaactcccacgtgaaaaaggatgacatttggccttcaggcggacagatgactgttaaggacctcactgcaaagtacactgagggtggtaacgcgattctggagaatatcagcttctccatctcgccaggccagagagtgggtctgctgggaagaaccggatcgggcaagagcaccttgctttcagcctttctccgacttctgaacactgaaggcgaaatacagatcgatggcgtttcctgggattcaatcaccctccagcagtggagaaaggcctttggggtgattcctcagaaagtgtttatcttttcaggaactttccgaaaaaacctcgatccttacgagcagtggtcggaccaagaaatttggaaggtggcggacgaggtgggcctgcgctcagtgatcgagcagtttcccggcaagctggatttcgtgcttgtcgatggtggatgtgtgctttcccatggacacaaacaacttatgtgcctcgcaaggtccgtgttgtccaaagcaaagatacttctcttggacgagccttcggcacacctggacccggtgacgtatcagattattcggcgtactctgaaacaggcgtttgcagactgcactgtgatcctttgcgaacaccgtattgaagccatgcttgaatgtcagcagtttctggttattgaagagaataaggtgagacaatacgattccattcaaaaacttctgaatgaaagaagccttttccggcaagcaatttccccctccgaccgggtgaaactgttcccccatcggaattcatcgaaatgcaagtcgaagccacaaattgcagcactcaaggaagaaaccgaagaggaagtccaagatacccggttg

SEQ ID NO: 9729 - DNA, 4440 bp, Artificial Sequence
  derived and/or modified sequence
atgcagagaagtcctcttgaaaaagcgagcgtggtatccaaactatttttctcgtggacaaggcccatcctccgcaaaggatatagacaaaggctggagcttagcgacatctaccagatacctagcgtcgatagcgccgataacctgtcagaaaaactggaaagagagtgggacagggaactcgcatccaaaaagaacccgaagctcatcaacgcgttgaggcggtgctttttttggcgcttcatgttctacggaatcttcctgtatctcggcgaagtgacaaaggccgtccagccacttcttttgggaaggataattgccagctatgatcccgacaacaaagaggagcggagcattgccatttacctgggcatcggcctgtgcctgttgttcatagtcagaacccttcttcttcatccagcaatatttggattgcaccatatcggaatgcagatgaggatcgcaatgttttccctgatctacaagaaaaccctgaaactgtccagcagggtactcgataagatctcaatcggacagctggtgtctctgctgtcaaataaccttaataaattcgatgagggactggctctcgcccactttgtgtggatcgccccattgcaagtcgcactcctgatgggcctgatctgggaactgctgcaggcaagcgcattttgtggactgggcttcttgatcgtgttggccctatttcaggctggtcttggcagaatgatgatgaaatatcgggatcagagagcaggaaaaataagcgaaagactggtgatcacatcagaaatgattgaaaatatccagtctgtgaaggcttactgttgggaagaagcgatggaaaaaatgatcgagaatttgaggcaaaccgaactgaaattgacaaggaaggcagcctacgtcaggtactttaatagtagcgcttttttcttttctggtttcttcgtggtgttcttgagcgttctcccttacgctttaattaaggggatcatccttcgtaagatcttcacaactatctctttttgcatcgtgcttcgcatggctgtgacccgacagttcccttgggctgtgcagacatggtacgactccttgggggctattaacaaaattcaagattttctgcagaaacaagagtacaaaacactggaatacaaccttacaacaacggaagtggtgatggagaatgttacagctttctgggaggaggggttcggcgagctgttcgagaaagccaagcagaacaacaacaaccgcaaaacaagtaatggcgatgactccctgttcttctcaaactttagcctgctgggcactcctgtgctgaaggatatcaacttcaagatcgagagaggtcaactgctggcagtggctgggagcaccggcgccggcaagactagcctgctgatggtcattatgggcgaactggagccttccgagggcaagattaaacacagcggtaggatcagcttctgctctcagttcagctggattatgcctgggacaatcaaggagaatatcatttttggagtcagctatgacgaatatagatacagaagcgttataaaagcttgtcagctggaggaggatatcagtaagtttgcagaaaaagataacatcgtcctcggcgagggtggaatcactctcagcggaggacaacgcgcaagaatctcactggctagggccgtatacaaggatgccgacctttatttattggacagtccttttggataccttgatgttctgaccgagaaagagatcttcgaaagctgcgtttgcaaactgatggctaacaagaccaggattctggtaaccagtaaaatggagcacttgaagaaggccgataagatcctgatcctgcatgagggaagctcttacttctacggcacattttccgagttgcagaacctgcaacctgacttttcttcaaaactgatgggctgcgattcattcgaccagttctctgcagagcgcaggaattctattcttacagaaaccttgcacagattcagcctagagggagatgcccctgtgtcgtggaccgaaacaaaaaagcagtcgtttaagcagaccggtgaattcggtgagaaacgcaagaactccattctgaacccaataaactcaataaggaagttcagcatagttcagaagactccactccaaatgaacggtatcgaggaagactccgatgaacccctggagcgtaggctgagtttagtgcccgattcagaacaaggtgaggcaatactgcctcgaatctccgtgatatccactgggccgactctacaagcaaggaggcgtcagtcagtcctcaatcttatgactcatagcgtgaaccagggacaaaacatccaccgcaagacgacagcgagcactagaaaagtcagcctggccccacaggctaacctaaccgaactggacatatatagcaggcgcctcagccaggaaacaggcctagagatttcggaggagataaacgaggaagacctcaaggaatgtttctttgatgatatggagagtatcccagcagtgactacatggaatacctatctgcgctacattaccgtacacaaaagcctaatctttgtcctgatttggtgcttagtgatctttttagctgaggttgctgcatcacttgtcgtcctctggctgctgggaaacacccctttacaggataagggcaacagtacccactctagaaataacagctacgcagtcattataaccagcacaagctcctactacgttttctacatctacgttggcgtagccgacaccctgttggctatgggtttttttagaggccttccgctggtgcatacactgatcaccgtgtctaagatactccaccataaaatgttgcatagcgtgctccaagctccaatgtctacactaaatacattaaaagcggggggaattctgaatcgattcagcaaggacattgcaattctggacgatcttctgcctctgacaatctttgactttattcagctcctgctgattgtgataggcgccatcgctgtggtggcggttctacagccctacatattcgtcgccacggtccctgttatcgtggcattcatcatgctgagagcttactttctgcagaccagccagcaactcaagcagctggaaagcgagggcagatcccccatcttcacacatcttgtgacctctctgaaaggcctttggactcttcgcgcttttggaaggcaaccatacttcgaaaccctgtttcacaaggcgctgaacctgcatacagccaactggttcctgtatttgtcaactcttcgatggtttcagatgaggatcgagatgatcttcgttatcttttttatagccgtgaccttcatttccatcctcaccacaggtgaaggagagggacgggtgggaatcatcctgacgctggctatgaacattatgagcacactgcagtgggcagtgaatagctctatcgatgtcgatagtctgatgaggtccgttagtcgagtcttcaaattcatcgacatgcctacagaaggaaagccgaccaaatccaccaagccgtacaagaacggtcagctttccaaggtcatgataatagagaatagccatgttaagaaggatgacatttggccttccggcggccagatgacagtgaaagatctgactgcgaagtatactgagggagggaacgccatcctcgagaacatttctttctccatctccccgggccagcgagtgggccttctgggacgtacaggcagtggcaagagtacactcctgtcagcttttctcagattgcttaacactgagggcgagattcagatcgacggcgttagctgggattcaataacactgcaacagtggagaaaggcttttggggtcatcccccaaaaggtgttcatcttctccgggacatttcgcaagaacctggacccctacgagcagtggagcgatcaagaaatctggaaggttgctgacgaagtaggattgaggtccgtgatcgagcagttcccagggaaactcgacttcgtgcttgtggacggtgggtgtgtcctgagtcacgggcacaaacaactgatgtgccttgctaggtctgtgctatcaaaagctaaaatacttttactggatgagcctagcgcacacctggaccctgtcacctatcagattatcaggagaactctgaagcaggccttcgcagactgcaccgtcatcctgtgtgaacacagaatagaggcaatgctagaatgtcagcagtttctggtgatagaggaaaacaaagttaggcagtatgacagtattcagaaactcctcaatgagaggtctcttttccgtcaggccatcagtccaagcgacagggtgaagttgttccctcacagaaactcttccaagtgcaagagcaaacctcagattgctgcattgaaggaagaaacagaggaggaggtccaagatacaagactg

SEQ ID NO: 9730 - DNA, 4440 bp, Artificial Sequence
  derived and/or modified sequence
atgcagcggtctccactcgagaaggcatcggttgtgtctaaactgtttttctcctggacccggccaatccttagaaagggatataggcagcgactggaactcagcgatatctatcagattccctctgtggatagtgcggataacctcagcgagaaacttgaaagggagtgggatagggagctggcttcaaaaaagaatcctaagctgatcaacgccctccgcagatgcttcttttggaggtttatgttctatggcatctttttgtacctcggagaggtgaccaaagcggtgcaacctctcctgctgggtaggatcatagctagttacgatcccgataacaaagaggaaaggtccatcgccatttatctcggaattggactgtgtcttttgttcatcgtcagaactctgctcctgcatcctgccatcttcgggttgcaccacattggtatgcagatgcggattgccatgtttagcctcatttacaagaagactcttaagctgagttctcgtgttctggacaagatctcaatcggacagctggtcagcttgcttagcaacaatcttaacaaattcgacgaggggctggcgttggcgcacttcgtctggatcgctccactccaggtcgctttgttaatgggtttgatatgggagcttctgcaagctagcgccttctgtggcctcggattcctgatcgtgctggctctcttccaggcaggattgggcaggatgatgatgaagtacagggatcaaagggctgggaaaattagcgaaagacttgtgatcactagcgagatgatcgaaaatatccagagtgttaaggcctattgctgggaggaagccatggagaagatgatagagaatcttagacaaaccgagcttaagttgaccaggaaagcagcctatgtccgctatttcaactcttctgcctttttttttagcggattcttcgtggtctttcttagcgtcctgccatacgcactgatcaaagggattatcctcagaaagatttttaccactatcagtttttgcatcgtccttaggatggccgtgacccgtcagttcccctgggctgtgcagacatggtacgactctctcggagctatcaacaagatacaggactttcttcaaaaacaagagtataagactctcgaatataacttaaccaccacagaggttgtgatggaaaatgtcaccgccttttgggaggagggcttcggagaactttttgaaaaagcaaagcagaataacaacaacaggaaaacctctaacggtgacgacagccttttcttcagcaacttttcgcttctgggcacaccagttctcaaagatatcaattttaaaatcgaacgcggtcagctcctcgccgtcgcgggaagcactggggctggaaagacaagcctgcttatggtgatcatgggcgagcttgagccttccgaaggaaaaatcaagcacagcggacgcatttcattttgctcacagttttcttggattatgcctggaacaattaaggaaaatattattttcggcgttagctatgacgagtacaggtatagaagcgtgattaaagcgtgccagcttgaggaggacattagcaaatttgctgagaaggacaatattgtcttgggtgaaggtggaattaccctgtctgggggacagcgggctcgaatctccctggccagagccgtatacaaagacgccgatctgtacctgctcgactccccattcggttacctggatgtgctcacagaaaaagaaatctttgaaagctgtgtatgcaagctgatggcgaacaaaaccaggattctcgtgacgtccaagatggaacatctgaagaaagctgataagatacttatcctgcatgagggcagttcttatttctatggtacattttctgagctgcagaatctgcaacccgactttagtagcaaactgatgggatgcgattcattcgatcaatttagcgctgaacgccggaacagcatcctgacagagactttacataggtttagcttagagggcgatgcacctgtgtcctggacggagaccaagaaacaatcatttaagcaaactggagagtttggagagaagaggaagaacagcattctcaaccctatcaactctatacgcaaatttagcattgttcagaaaaccccccttcaaatgaacggaatagaagaggattccgatgaaccactggaacgcagactgtccttggtgcccgacagcgaacaaggagaggccattcttcctcgcatcagcgtaatatctaccggtccaaccttacaggccagaaggagacagagcgtcctgaacctgatgacacatagtgtcaaccaaggtcagaatattcatcgtaagactaccgcatcaacgaggaaggtgagcctggccccacaagctaacctgaccgaattggatatctatagtaggaggctctcacaggagacaggtctcgaaattagcgaggaaataaacgaggaagatctgaaggaatgcttcttcgacgacatggagtcaatcccagccgtgactacgtggaacacataccttcgctacattacagtccataaaagtctgatatttgtccttatctggtgcctcgttatcttcctggcggaggtcgctgcatctcttgtggtcctgtggctgttgggtaatacaccacttcaggacaagggcaatagcacacactcacgcaataatagttacgctgtaatcattacgtccacttcttcatactacgttttctacatctacgtgggcgtcgcagacacactgctcgcgatggggtttttcagaggactgccactcgttcacaccctcattaccgtcagcaagattcttcatcacaagatgcttcacagcgtgctgcaggctcctatgtccaccctgaacaccctcaaagcgggaggaatcctcaacaggtttagcaaggatattgctattctggacgatcttctgccgctgactatttttgactttatacaacttcttctcattgttatcggagcaatcgctgtggtggcagtgttgcaaccgtatatctttgtagccacagtgccagtcattgtagcattcatcatgctgagagcgtattttctccagactagccagcaactgaaacaacttgagtccgaaggaagatccccgattttcacccacctggtgaccagcctcaagggactgtggaccctgcgggcttttggaaggcagccatactttgaaaccctgttccacaaggcgttgaatcttcacacagctaactggttcctgtatctgagcaccctgcgatggttccaaatgcgcatcgaaatgatattcgtgattttcttcatagccgtaacattcatctccatcctcactacaggcgaaggggagggccgtgtaggaatcatactgaccctggcaatgaacatcatgtccacactgcagtgggcagttaacagcagcatcgacgtggacagcctgatgaggtcagtatccagggtgttcaaatttatagatatgccaaccgaaggtaaaccaacaaaaagtacaaaaccgtacaagaacggtcaactctcgaaggtgatgatcatcgaaaacagtcacgtcaaaaaagacgacatttggcctagcggagggcaaatgaccgtgaaggacctcaccgcaaaatacaccgagggtggaaacgccattctggagaacatcagcttctccattagtccaggacagcgagttggcttgcttggcaggaccggctctggaaaatctacacttctcagcgcatttctcaggctgctcaacactgaaggtgagatccagatcgatggcgtaagctgggatagtattactttacagcaatggcggaaggcatttggggtgatcccccagaaagtatttatttttagcgggaccttccgaaaaaacctcgatccatacgaacagtggtctgatcaagagatctggaaagtggctgatgaggtgggcctgagaagtgttattgaacagttccctggcaagctggactttgtgttggttgatgggggctgtgtcctgagtcacgggcataaacagctcatgtgcctggctcggtctgtcttgtctaaggctaagattctgctgctcgatgaaccatcagcacacctcgatcccgtcacataccagattataagaagaacactcaaacaggccttcgcagactgcacagttatcctctgtgagcatcggatcgaagctatgctcgaatgccaacagtttcttgtgattgaagaaaataaggtgcgacaatacgactcaatccaaaaactgctcaacgaacggtcgcttttcagacaggctataagtcctagtgatagggtcaaactgttcccccatcgcaactcttcaaaatgtaagagcaagcctcagatcgccgcattaaaggaggaaaccgaagaagaagtccaggacaccagactg

SEQ ID NO: 9731 - DNA, 4440 bp, Artificial Sequence
  derived and/or modified sequence
atgcagagatcccccctagaaaaagcttccgtcgtatcaaaactgtttttctcttggacacggccaatccttcgaaaagggtataggcagcgccttgaactttcagatatctatcagatcccctcagtcgattcagccgataacctctctgaaaaactcgagagagaatgggatcgggagctggcctctaagaagaaccccaagctaatcaatgctctcaggagatgttttttttggcgatttatgttttacgggatattcttgtacctgggggaagtcactaaagccgtgcagcctcttctcctcgggcgtattatagcctcgtatgatccagataacaaagaagaacgatccattgccatctacctcgggattgggctttgccttttatttatagttagaactctcctgctacatcccgctatttttgggcttcatcacataggaatgcagatgaggatagccatgttttctctgatatataaaaaaacactaaaactgtcttcacgtgtactcgataaaatatccatagggcagcttgtctctctgctctctaacaatcttaacaagtttgacgaaggattggcacttgctcatttcgtttggatcgcccctcttcaggtagcgctgcttatgggactcatttgggagttgctgcaggcctccgctttttgcgggctcgggtttctcatagtgctcgctctgttccaggctggattagggaggatgatgatgaagtaccgcgatcagagggccgggaaaatctctgaaagactggtaatcacaagtgaaatgatcgaaaacatacagtctgtcaaagcctattgctgggaagaagctatggaaaaaatgatcgagaatctaaggcagactgagttaaagctgactaggaaagccgcttatgttagatactttaattcctcagcctttttctttagtgggttttttgttgtgtttctgtccgtcttgccttacgcattaattaaaggaattatactgcgaaaaatctttactactatttctttctgcatcgtgctccggatggccgtaacacggcagttcccatgggctgttcagacgtggtatgattcactgggggctataaacaaaatacaggattttctgcagaaacaggaatataaaactcttgaatataacctcacaacgactgaagtggtaatggaaaatgtcacggcgttctgggaagagggattcggggaacttttcgaaaaagctaaacagaacaataataacagaaaaacatctaacggagatgattctctttttttttctaacttctctctccttgggactccagtactcaaagatatcaacttcaaaatagagcgggggcagttacttgctgtggcaggatctacaggagcagggaagactagtcttctgatggtgatcatgggagaactcgagccctctgaaggaaaaatcaaacattctgggcgcatctctttctgttcacagttttcatggatcatgccaggaacaatcaaagaaaatataatcttcggggtgtcttatgacgaatatcgatataggtccgtgatcaaagcatgccagctcgaagaagatatttccaaattcgctgaaaaagataacatagtcctgggagagggagggattactctatccggagggcagcgagcccgaatctcattggctcgggccgtttataaagatgcggacttatatctgctcgattctccattcgggtatcttgatgtcctcactgaaaaagaaatattcgaatcctgcgtatgcaaacttatggctaataaaactcgaattcttgtaacttcgaaaatggaacacctaaaaaaagccgataagattctcatcctgcatgaggggagtagttatttctatggaactttcagtgaattacagaacctccagcccgactttagttccaagcttatgggatgtgactccttcgatcagttcagtgccgaaaggcgcaattccatattaacagaaactcttcataggttctctttggaaggggatgctcccgtgtcctggacagagactaaaaaacagtccttcaaacagacaggagaattcggagagaaacggaaaaattctattctaaatccaatcaactcgatccggaaattctctatcgtgcagaagactccacttcagatgaacggaatcgaggaagattctgatgaaccactggagcgacgactttctctggtgccagatagtgaacagggagaggccatacttcctaggataagtgtgatttcaactggacctacactccaggcccggcgaagacagtctgtcctaaacttgatgacacattccgtcaatcaggggcagaatatccacaggaaaacaacggcttcaacacgcaaagttagtcttgcaccacaggctaatctgacagagctcgatatttatagtcgcaggctctctcaggaaactggattggagatctccgaagaaataaacgaagaagatctcaaagaatgtttttttgatgatatggaatctataccagctgtaacaacatggaacacatatctccggtatatcactgtgcataaaagtctgatcttcgtactgatatggtgtttggttatctttctggctgaagtcgccgcctcgttggtggtactatggctgctgggaaacacaccactgcaggataaggggaactcgacacacagtcgaaataactcttatgcggtcataatcacatcgacaagttcatattatgtattttatatctacgtgggagttgccgatacactgctcgccatgggattctttaggggattaccactggtgcatactctcataactgtttctaaaatcttgcaccacaaaatgctgcactcagtactacaagctccaatgtctactctcaacacactgaaagcaggaggaatcctaaaccggttttcaaaagatatcgcgatccttgatgatctcctccctctaacaatcttcgatttcatccagctcctactcatagtgataggagccatcgccgtcgtggctgtactgcagccctatatttttgtcgccactgtgcctgtcatagtggcatttattatgctccgggcatattttttacaaacatcccagcagctcaaacagcttgaatctgaaggacggtcccctatattcacgcatttggtaactagtctgaagggactctggacactgcgtgcattcggacgccagccctattttgaaacactgttccacaaagccctaaacctgcacacagccaactggttcttatatctttctactcttcgctggtttcagatgagaattgaaatgattttcgtgatttttttcatagccgttacatttatatctatccttacaacaggagaaggggaaggaagggttggaataattctgactcttgccatgaatataatgagtacactccagtgggccgtgaactcatcaatagatgttgatagtctcatgagatccgtgtccagggtctttaagtttatcgatatgcccactgaaggaaaacctacaaaatccactaaaccctataaaaatggacaactttccaaagtcatgatcatagaaaactcccatgtcaaaaaagacgatatctggccttcaggagggcagatgacagtcaaagatctgactgctaaatacacggaaggggggaacgccatcctggagaacatcagtttttcgatctccccaggacagagggtggggctgctcgggcggactgggtcaggaaaatccacacttctatccgccttcttgcgacttctcaatacagagggggaaattcaaatcgatggagtatcttgggattcaataactctccagcagtggcgcaaagcattcggagtgatccctcagaaagtcttcatcttctctgggacattccggaaaaatctcgacccatacgaacagtggtctgatcaagaaatttggaaggttgccgatgaagttgggcttcggtcagtcatagaacagttccctgggaaactagactttgttctcgtggatggagggtgtgtcctctcgcacggacataaacagttgatgtgcctggcccggtctgtgctctcgaaagctaaaatcctccttctagatgaaccatctgcccacctcgatcctgtcacatatcagatcatccggagaacactcaagcaggcctttgccgattgcacagtaatattgtgtgaacatcgcatcgaagccatgttagaatgccagcagttcctggtgatagaagaaaacaaagtgagacagtacgactccatacagaaactcctcaatgaacgttctctctttagacaagccatcagtccttcagatcgggttaaacttttccctcatcggaactcctcaaaatgcaaatccaaacctcagatagccgcccttaaagaagaaactgaagaagaagtacaggatacaagactg

SEQ ID NO: 9732 - DNA, 4440 bp, Artificial Sequence
  derived and/or modified sequence
atgcagcggagcccattggagaaggctagcgtcgttagtaaactctttttttcctggacccgcccaatacttcgcaagggctaccgccagaggctggaactaagcgacatttaccagatccccagcgtcgatagtgccgacaacttgtccgaaaagctggaacgagagtgggaccgggagctggcctccaaaaagaacccaaaactgataaatgccctgcgtaggtgctttttctggagattcatgttttatggcatctttctgtatctgggcgaggtaaccaaggcagtacaaccattgcttctagggcggattattgcctcctacgaccccgacaataaagaggaaaggagcatcgctatatatctgggaattggtttgtgtctgctctttatcgttagaacactcctcttgcatcctgccatcttcgggttgcaccacatcggaatgcagatgcgcattgcgatgttcagtctgatctacaaaaagaccctgaaactctcatctagggtgctcgacaaaatctcaattgggcagctggtgagcttactctctaacaacctgaacaagtttgacgagggactcgcactggcgcacttcgtctggatcgctccgctgcaggtggctcttctgatgggtctgatatgggaattgttacaggcgagcgctttttgtggcctgggatttctaatagtgcttgcactcttccaggccggattaggccgcatgatgatgaaataccgggaccagcgggcgggaaagattagcgagagattggtcatcacatctgagatgatagaaaatatccagtctgtgaaggcctattgctgggaggaggcaatggaaaaaatgattgaaaacctgcggcagacagaactcaaactgactcgaaaggccgcttatgttaggtattttaactccagcgctttctttttttctggattcttcgtcgtctttttgtccgtactgccatacgccctgattaagggtattatcttgaggaagatcttcactacaatctccttttgtatcgtattgcggatggcagtcacccggcaattcccttgggccgtgcagacctggtatgatagtttgggagctattaataaaattcaagattttcttcagaagcaggaatacaagacccttgagtacaaccttaccaccaccgaagtcgtaatggagaatgtcaccgctttttgggaagaaggttttggagagttatttgaaaaagctaagcagaataataataaccgcaaaaccagtaacggagacgatagcctcttcttctccaattttagcctgctgggtacacccgtgctgaaagatattaactttaagatcgagaggggacaactgctcgctgtggcaggctccacaggagcaggaaaaaccagcctgcttatggtgatcatgggcgagcttgagccatcggaggggaagatcaaacattcgggaagaatctcattctgcagccaattcagctggatcatgcccggcaccatcaaggagaatatcatctttggcgtctcatatgatgagtacaggtataggtccgtcatcaaggcatgtcagttggaggaagatatctcaaaattcgccgaaaaagataatatcgtcctcggcgagggaggtattacactgagcggcgggcaacgcgcacgcatcagtctggctcgggcggtttacaaagatgccgatttgtacttgctagactccccttttgggtacctcgatgttctgactgaaaaggagatattcgaatcttgtgtgtgcaaactgatggctaataaaacgcgcattctggtgactagtaaaatggaacacctgaaaaaagccgacaaaattctgatcctgcatgagggatctagctacttctatgggactttttccgaactgcaaaaccttcagccggacttttcttccaagctgatgggatgcgatagctttgaccagttctctgccgaaagacggaactccatcttaactgagacattgcacaggttctctctggagggcgatgccccagtttcctggaccgagaccaaaaaacagagctttaagcagacaggggagttcggggagaaacgaaaaaactcaatactcaaccctatcaacagcatccggaaattttcgattgtgcaaaaaaccccactccaaatgaacggtattgaggaagactctgacgagccactcgaacgtcgtttgtctctggtgccagactcagagcagggcgaggcaattctgcccagaattagtgtcattagcacaggcccgacactccaagctcggaggcgtcagagtgtactgaatctcatgacccactcggtaaaccaaggtcagaacatccacagaaaaactacagcatccaccaggaaggtcagcttggccccacaagccaaccttaccgagctcgacatctactcccggcgcttatcacaggagaccgggcttgaaatttctgaggagatcaatgaagaagaccttaaagagtgtttcttcgatgatatggaatccatccccgccgttacaacgtggaatacttatctgagatacattacagtccataagtcgctaatattcgtgttgatatggtgcttagtgatcttcctggccgaggtggcggcttccttggtggtgctgtggctgctcgggaatacccccctgcaggacaaggggaattctactcacagccgtaataactcctacgctgtgattatcacctccaccagctcatactacgttttctacatttatgtgggggttgccgatactctgttggctatggggttttttcgcggtctcccattggtacacactctgattacagtctctaaaattctgcatcataaaatgctgcacagcgttcttcaggctcctatgtctactttgaacacactgaaagctggtggcatcctgaataggtttagcaaggacatcgcgatcctggatgatcttctgcctctcacaattttcgattttatacagctgttgctgatcgtgattggcgcgatagccgtcgtagcagtgctccagccctacattttcgtcgctaccgtgcctgtgattgtcgctttcattatgctgagggcttacttcctgcagacttctcagcagttaaagcaattagagtctgaagggcgtagccctatctttacccatctggtgacatcactgaagggcctgtggactttgcgagccttcggccgtcagccgtattttgagacactgttccacaaggctttgaatctgcacacagccaattggtttttgtacctttcaaccctccggtggtttcagatgcgtatcgagatgatcttcgtgattttttttatcgcagttacctttatctcgatcttgaccacgggcgaaggagaaggccgcgtgggaatcatattgacgctggctatgaatatcatgtctacacttcagtgggcggttaactcctccattgacgttgatagcctcatgaggagcgtaagtcgggtctttaaattcattgatatgcctaccgagggaaagcccaccaaatccacaaaaccctacaagaatggacaattgtcaaaagtgatgataattgagaatagtcacgtgaagaaagatgatatctggccaagtgggggacagatgacagtgaaggacctgaccgctaaatacacagaggggggtaacgcaatcctggagaatattagtttttctatctcacctggacagagagtgggactcctgggtaggactggttcgggcaagagtacccttctttccgccttcctgcggctattgaataccgagggtgagatccagatcgacggtgtctcatgggacagcattacgttgcagcagtggaggaaggccttcggggttattccacagaaggtatttatattctctggtaccttcaggaaaaacctggacccatatgagcagtggagcgatcaagaaatttggaaggttgcagatgaggtaggcctcaggagtgtgatcgaacagtttcctggcaaactggactttgtcctggtcgatgggggatgtgtgttatcgcacgggcacaaacagcttatgtgcctggcgagaagcgtactttcgaaagcgaaaatcctcctgctggatgagccatcagcccatttggatccggtcacttaccaaattattaggagaactctcaaacaggcatttgctgattgcacggtgatcctttgcgagcatcggatcgaggctatgctggaatgtcagcagttcttggtgatcgaagagaacaaggtcaggcaatatgattccattcagaaactgctgaacgaacggtctctgtttcgccaagcaatcagtccttctgatcgggtaaaactctttccgcacaggaatagttcaaaatgcaaaagtaagcctcagattgcagccctgaaggaagaaacagaggaagaggtccaagacactcggctg

SEQ ID NO: 9733 - DNA, 4440 bp, Artificial Sequence
  derived and/or modified sequence
atgcagcgcagcccactggagaaggcctccgtggtttctaagctgttcttctcgtggacacgaccgatattaaggaagggttataggcaaagactcgaactgtccgacatatatcagattccatctgtcgattctgccgacaatttatccgagaagttggagcgagaatgggatagggagttggctagcaagaagaatcctaaactgattaatgcgcttagacggtgcttcttttggaggttcatgttctacggcatattcctctatctgggcgaagtgacaaaagccgtgcaacccctgctgcttggccgaatcattgcgagctatgatcctgacaacaaagaggagagatccattgcgatctacctaggaattggcctgtgtctccttttcattgtgcgcacattactgctgcaccccgctatatttggcctgcaccacatcgggatgcaaatgcgcatcgccatgtttagtctgatctacaaaaagaccctaaagctcagttctcgcgtattggacaagatctctataggccagctggtgtctctcctgtctaataatttgaataagttcgatgagggactggctttggcccacttcgtgtggattgcccctttgcaggttgcattgcttatgggactgatttgggagctcttacaagcctcagccttctgtggtctagggttcctcattgtgctggctctgttccaggcaggcctaggcaggatgatgatgaaatacagagatcagagagcaggcaaaatctctgagaggcttgtcataacctcagaaatgattgagaacatacagtccgtcaaggcttactgttgggaggaagccatggagaaaatgatcgaaaatttgcgccagactgagcttaagttgactagaaaagctgcgtatgtgaggtacttcaattcatcagcgttcttctttagcggcttttttgttgtattcctgagtgtgctgccttatgcattgatcaaaggcataatattgcgtaagatctttacaaccatcagcttctgtattgtgctgcgcatggccgtcactcgccaattcccttgggctgttcagacctggtacgacagtctgggtgccattaacaaaattcaggactttcttcaaaagcaggaatataagactctagagtacaatctcacaacaacagaagttgtgatggagaacgtcaccgcgttctgggaagaaggcttcggcgagctattcgaaaaagctaaacagaacaataataaccggaaaacatcaaacggcgatgattctctgttttttagtaacttcagcctgttgggcaccccagttctgaaggacatcaactttaagatcgaaaggggacagctcctagctgtggctggatcaaccggggcagggaaaacctcgttgctaatggttattatgggagaactcgagcccagtgaggggaaaattaagcattcagggcggatctctttttgctcgcagttttcctggatcatgcctgggaccatcaaagagaatatcatctttggggtgtcatacgacgaatatagataccgctcggtcattaaagcatgccaattggaggaggatatttctaagttcgccgagaaagacaacattgttctgggcgaaggcggtatcaccctgagcggtggccagcgcgcaaggatctccctagctagagccgtttacaaagacgctgatctatatctgctggattccccattcggttacctagatgtgcttaccgaaaaagaaatatttgagagctgtgtgtgcaaactgatggccaataagacacgaattcttgtgacctcaaagatggaacacttgaagaaggccgataagatcctcatcctgcacgaggggagttcttacttttatgggaccttcagcgaactgcagaatttgcaacccgactttagctccaaactcatgggatgtgactccttcgaccagttctcagccgaacgccgtaattcaattctcactgaaactttgcataggttttctctcgagggagacgcccccgtctcatggaccgaaaccaagaaacaatccttcaaacagaccggggagttcggagagaaacggaaaaattccatattgaaccctatcaacagcattcggaaattctcgattgttcaaaaaaccccacttcagatgaatggaattgaagaggacagtgatgagcccctcgaacgacggctgtctctggtacctgatagtgagcaaggcgaggctattctgccacggatcagcgtgatctccaccggccccactcttcaggccaggcggagacaatcagtattgaatttgatgacccactccgtgaaccaggggcagaatatacacagaaaaaccactgcctctacccgcaaggtgtccctagccccccaggccaaccttactgaactggatatttactctcgcagactgtcccaggaaaccgggctggaaattagtgaggaaatcaatgaggaggatttaaaagagtgctttttcgacgatatggaatcgatacctgccgtaactacatggaacacctacctgaggtacatcacagtgcacaagtccctgatcttcgtgctcatttggtgtttagtgatcttcctggcagaggtggcagcaagcctcgtagtgttgtggctcctgggaaacacaccactgcaggacaagggaaactccacccattcccgaaataattcttatgcagtgatcatcacctcgacgtcttcatactacgtgttttacatttatgtcggagtcgccgacactctgctggccatgggttttttccgcgggctcccactggtgcatacactaatcacagtgtctaaaatcctgcatcacaagatgcttcactctgtgttgcaggctcccatgtccacactaaacactctcaaggctgggggcatccttaatagatttagcaaggatatcgctatacttgacgaccttctgccgcttacgatctttgatttcattcagctcctgctgatcgtgataggtgccatcgctgtggtggctgttctgcagccctatatattcgtagccacagtacccgttatagtcgccttcattatgctgcgcgcctatttcctgcaaacttcccaacagttaaagcaactcgaaagcgaggggagatctcctatatttacacacctggtgacatcgctgaaaggtctctggacgcttagggcatttggccggcaaccatatttcgagaccttgtttcataaggcgctgaacctccatactgcaaactggtttttgtacctgagtaccctgagatggttccagatgcggatcgaaatgattttcgtgatctttttcatagcagtgacatttatctcaatcttaacgacgggtgagggcgagggcagagtgggcatcatcctgactctggcaatgaatataatgtctaccctccagtgggcagtcaattcgtctatcgatgtggactcgcttatgcgttcagtatctagagtctttaaatttatagacatgcctacagagggaaagcccaccaagagtacaaagccctataaaaatggtcagctgagtaaagtcatgattatagagaatagccacgtgaagaaagacgacatctggccgtcaggtggacagatgacagtgaaggaccttaccgccaagtatactgagggagggaacgcaatcttggagaatataagtttctcaatatcgccgggtcaacgggtgggattgctgggccggaccggctccggaaaatcaacactgctgtccgcctttctccgtctactgaatacagagggagagatacaaatagacggcgtgtcgtgggattccattacacttcagcagtggcgaaaggcgttcggggtcatcccccagaaggtttttatcttcagcgggacgttccgcaagaatcttgatccttacgagcagtggtcagatcaggagatttggaaggttgctgatgaggtgggcctaaggtcagtcatagaacaattccccgggaaactggacttcgttctggtggacggcggctgcgtgctgtcgcatggacacaaacagctgatgtgccttgctcgatcggtgctgtcgaaagcgaagatcctgctgttagatgaaccgtccgctcatttggaccccgtcacgtatcagataataagaaggactttgaagcaggcgttcgctgactgtacggtgatcctctgtgagcaccgaatcgaagctatgttagaatgtcagcagttcctggttatcgaagagaacaaggtgaggcagtacgactccattcagaagctgctgaatgaacgaagtctcttcagacaggcaatttcacctagtgatcgggtcaagttgtttcctcatcggaactcttcaaagtgcaagtccaagcctcaaatcgctgccctaaaagaggaaacagaagaggaggtgcaagacactagatta

SEQ ID NO: 9734 - DNA, 4440 bp, Artificial Sequence
  derived and/or modified sequence
atgcagcgcagccctctggagaaggcctcagtggtgagcaaattgtttttcagctggactaggccaatactgcgcaaggggtacagacaaagacttgaactctccgatatctaccagatcccgtctgtggattccgctgataacctgtcagaaaagctggagcgagaatgggatagagagttggcaagcaagaaaaacccgaaactgatcaatgcactcagaagatgcttcttttggcgcttcatgttttacggaatctttctctacctgggtgaagtcaccaaggcggttcaacctctgctgctggggcgcattattgctagttacgatccagacaacaaagaagaacggtccatagccatttacctgggcattggactttgccttctgtttatagtgagaaccctgctgctgcaccccgcaattttcggacttcatcatatcgggatgcaaatgcgtatcgcaatgttttcgctgatttacaagaaaaccctcaaactgtcctcgcgggtcctcgataagatttctattggacagctggtgagccttctgtccaacaacctgaacaagttcgacgaagggctggcacttgcacacttcgtctggattgcccccctccaagttgcacttctgatgggtctgatttgggagcttcttcaggcctcagcattctgtggtttgggatttctgatagtgctggcactgtttcaggcaggacttggtaggatgatgatgaagtaccgggaccagcgtgccggaaagatctcggaaagactggtgatcacctcagaaatgatcgaaaacatacagtcggtgaaggcctactgttgggaagaagcaatggagaagatgattgaaaatctccgtcaaaccgaattgaaactcacccgcaaggcagcatacgtgaggtactttaactcgtcagcattcttcttttccgggtttttcgtcgtgtttttgtccgtgttgccatatgctctgatcaagggaatcatccttcgtaagattttcacgaccatatcgttttgtatagttctgcgcatggcggttacgcgacagttcccgtgggctgtccagacctggtacgactccctcggggctataaacaaaattcaagattttctgcagaagcaagaatacaagactttggaatacaaccttaccactactgaggtcgtgatggaaaatgtgaccgctttctgggaagagggctttggagaacttttcgagaaggcaaagcagaacaacaacaatcggaaaacctcaaatggagatgactccctgttcttttcgaatttctcgttgctggggacccctgtgcttaaggatatcaatttcaagattgaacgggggcagctgcttgcggtggcaggttcaactggagccggcaagacctcattgttgatggtgataatgggggagcttgagccaagcgaaggcaaaatcaaacactcaggacggatatcgttttgctcgcaattctcctggattatgccagggaccatcaaggagaacatcatttttggcgtgagctacgacgaatatcgctacagaagcgttatcaaggcatgccagctggaagaggatatatcaaagttcgcagaaaaggacaatatagtgctgggtgagggtggaatcaccctttccggtgggcagcgcgcacggatctcgcttgcgagggcggtttacaaagatgcagatctttacctgctcgactcaccatttggttatcttgatgtgttgactgagaaagagattttcgaaagctgtgtgtgcaagctgatggccaacaagacgcgcatcttggtgacctccaaaatggaacacctgaagaaggcagacaaaattctcatccttcacgaaggaagctcatacttctacggtactttttcagaactccaaaacttgcagcccgatttctcatccaagctgatgggatgtgacagcttcgaccaattctccgcagagaggaggaattccattcttaccgaaacgcttcatagattttcgctggaaggcgacgcccccgtgagctggaccgaaaccaagaaacagtcatttaagcaaactggagagtttggggaaaagcgaaagaatagcattcttaacccaattaactcaattcggaagttttccatcgtgcagaaaactcctctgcagatgaatggcattgaagaagatagcgacgaacccctggaacgccgtctctcactggtgcccgactcggagcaaggtgaagcaatcctgcctagaatttctgtaatctccaccggaccaactctgcaggcgagacggagacagtcggtgctgaatctgatgacccattccgtgaaccaaggtcaaaacattcatcgaaagaccactgcctccacccgcaaggtgtcccttgcccctcaggctaatctcactgagcttgacatttactcaagacggctgtcgcaagaaacggggcttgaaatctccgaagagataaacgaggaagatctgaaagagtgtttctttgatgatatggagtccatccctgcggtcactacgtggaacacttacctccgttacatcaccgtgcacaagtcacttatcttcgtgctgatttggtgtcttgtcatttttctcgcagaagtcgcagcgtcgcttgtcgtgttgtggttgctcgggaacactccacttcaggacaaaggcaatagcacccattcgcgcaataactcctacgcggtcatcattaccagcacctcaagctactacgtgttctatatctacgtgggggtagcggatacgctgctcgctatgggcttctttagaggactgccgctcgtgcatactctcataaccgtctcgaagattctccatcacaagatgctgcattccgtgctgcaagcccctatgtctactctgaacactttgaaagcaggcggtatactgaaccgtttttccaaggatatcgcaatcctggatgatcttctgcctttgaccattttcgactttatccagctcctgcttattgttattggagccatcgcagtcgtggcggtgctgcaaccatacatctttgtagcaaccgttccagtgattgtcgcatttatcatgctgagggcttacttcctccaaacctcccaacagttgaaacaactggagtcggaaggacgctccccaatctttactcatctcgtgactagccttaaaggtctttggactctcagggcctttggacgtcaaccttactttgagactctctttcataaggcattgaatctccacaccgcgaattggtttctgtacctgtcgactctcaggtggttccagatgagaatcgaaatgatttttgtgatctttttcatcgcagtgacttttatctcaatcctgactactggcgagggagagggtcgggtgggaatcattctgactcttgcaatgaacattatgagcactctgcaatgggcagtcaactcgtcaatagatgtcgattcactgatgaggtcagttagccgggtgtttaagtttatagatatgccgaccgaaggaaagcctactaagtcaactaagccttacaagaatggacaactttcaaaggtgatgattatagagaattctcatgtgaagaaagatgatatctggcctagcggtggccagatgactgtcaaggatcttaccgctaaatacacggaaggaggaaacgcaattctcgagaacatctcgttttccatatcaccgggacagagggtgggattgctcggtagaactggtagcggcaagagcactcttctttcggcatttctgagactccttaacaccgaaggagagattcaaattgatggtgtctcgtgggactccataacgctccaacaatggagaaaggcatttggcgtgatcccacaaaaggtattcatattctcgggtacgtttagaaagaacttggatccctacgagcaatggtccgatcaggagatctggaaggtggcggatgaagtgggactccggtccgtcattgagcaattccccggcaagctcgacttcgtccttgtcgacggtggctgcgtgctgtcgcatggtcacaagcagctgatgtgtctggcaagatccgtcctctcgaaggcaaagatacttctcttggatgagccttcagcacatctggaccctgtcacttaccaaatcattcggcgtaccctgaagcaagcctttgctgattgtacggtgattctttgtgagcaccgaatcgaggcaatgcttgagtgccagcaatttctggtgattgaagaaaacaaagtgcgacaatatgattcaattcagaagctgctcaacgaacggtcgcttttccggcaggcaatttccccatcagatcgggtgaaactttttccacatcggaattccagcaagtgtaagtcaaagcctcaaatcgccgcattgaaagaagaaaccgaggaagaagtccaagacacccgcctt

SEQ ID NO: 9735 - DNA, 4440 bp, Artificial Sequence
  derived and/or modified sequence
atgcaacggtctcccttagagaaagcatcagtggtgtccaaactgtttttctcctggactagaccaatactgcggaaaggatacagacagcgtctggaactcagcgatatatatcagattccctcagtggactccgctgataatctcagtgaaaagctggaacgggaatgggatcgagagctcgcctccaaaaagaaccccaaactgatcaatgcactgcggcgatgctttttctggcggttcatgttttatggtatttttctttatcttggcgaggtgaccaaagccgttcagccccttctcctcggccgaattattgcatcctatgatccagacaataaggaagaacgatctattgcaatctatctaggaataggtttgtgtttattgttcatcgtgcgaaccttgctcctgcaccccgctattttcggactacatcacattggtatgcagatgcgaattgcgatgttcagtctaatttacaaaaagaccctgaagctgtcctcacgggtgctggataagatctccattggccagctcgttagcctgttatcaaataatctgaataagttcgatgagggactggctctcgcacacttcgtgtggatagccccgctccaagtggcgctgctgatggggttgatctgggagcttttgcaggcatccgctttttgcggactgggattcctcatcgtcctagccttgttccaggccggcttgggccgcatgatgatgaagtatcgggaccagcgggctggcaagatcagcgagagactcgttattactagcgagatgatcgagaacatccagtcggtcaaagcatattgttgggaggaagctatggagaagatgattgagaatcttcgccagaccgagcttaagttaacgaggaaagctgcctacgtgagatacttcaacagttccgcttttttctttagtgggttttttgttgtgttcctgagcgttctgccgtatgcgcttataaaagggattattctgcggaagatcttcacaacgatcagcttttgcattgtgctcagaatggccgtgacgaggcagtttccttgggccgtgcagacatggtacgattctttgggcgcaatcaacaagattcaagacttcctgcagaaacaagaatataagaccctagaatacaacctgaccacaacagaggtcgtgatggaaaatgtcaccgccttctgggaggagggattcggtgaactcttcgagaaagccaaacagaacaataataaccgcaagacctcgaacggtgacgattcactgtttttcagtaacttttcactgttgggcactccagtgctaaaggatatcaattttaaaattgagcgcgggcagttgctggctgtggcaggatctacaggcgcaggcaaaacatcactccttatggttatcatgggcgaactggagccctccgagggcaaaattaagcactctggacgtatatccttctgctcacagttttcctggatcatgccaggaactattaaggagaacatcattttcggcgtcagttatgacgaataccgctaccggagcgtaattaaggcctgtcagcttgaggaagatatctcaaagtttgcggagaaagataatatcgtattgggcgagggggggataacacttagcggcggtcagagggccagaatctccctggccagagccgtgtacaaagacgcagatctgtacctgctggacagccctttcggctatctggatgtcttgaccgaaaaggaaatctttgagagttgcgtctgcaagctcatggcaaacaagactcgtattcttgtgacgtccaaaatggaacacctgaagaaggctgacaaaatactaatccttcacgaaggctcatcctacttttacgggaccttctctgaactgcagaatttgcagcctgacttttctagcaaattgatgggctgtgactcctttgatcagtttagcgctgagagaaggaactcgatcctgacagaaacgctgcatcgcttttccctcgaaggtgacgctccagtgagctggactgagacaaaaaagcagtcattcaagcagaccggtgagtttggggaaaagcgcaagaattctatcctgaatcctatcaatagcatccgaaagttctccatcgtccagaagacgcccctgcaaatgaacggaatcgaggaagatagcgacgagccgttagaacggagactcagcctcgtccccgacagcgaacaaggagaagcaattctgccccggatttcagtaatctcaaccggaccaacgctccaggcacggcgacgtcaaagcgtgctcaacctgatgacccactcagtaaaccagggccaaaacatccataggaaaactactgcgtctacacggaaagtgtccttggccccacaggccaaccttacagaactggacatctactcaagaaggctatctcaggaaacaggactggagatatccgaagagattaatgaagaggatttgaaagagtgtttctttgacgatatggagtctattcccgctgttacaacctggaacacttatctgaggtatatcactgtccacaaatcacttatctttgtgctgatctggtgcttggtgatcttcctggcagaggtggccgcctccttggtagtcctgtggctgctgggaaatacgccgcttcaagacaaaggcaatagcacccacagccggaacaacagttacgctgttatcattacatctacatcttcatactacgtgttctatatttatgtcggcgtggccgacaccctgctggcaatgggattcttccggggcctccccctggtccacactctgatcaccgtgagcaagatcctgcatcataaaatgctccatagcgtcctgcaggcgccgatgtctaccctgaacaccctaaaagccggcggtattctgaatcggtttagtaaggacatagcaattctggacgaccttttacctcttactatctttgacttcattcaactgctcttgattgttattggagctatcgctgtggtcgccgtgctgcaaccctacattttcgtggccaccgttcccgtgattgtggcctttatcatgcttagagcctactttcttcaaacaagccagcaactcaagcagcttgaatcagaagggaggtcgcctatttttacccatctcgtaactagcctcaaagggctctggacattgagggcattcgggcgacagccttacttcgagaccctgttccacaaagcccttaatctacacactgccaattggtttctctatctatctacacttagatggttccagatgcggatagagatgattttcgtcatcttttttattgctgttactttcatctccatcttgacgactggtgagggtgaaggacgcgtaggcataatactgactttagcaatgaatatcatgtctaccctgcagtgggctgtaaacagcagtatagacgtggacagccttatgcggagcgtgtcccgggtttttaaatttattgacatgccaacagagggaaagccgactaagtctaccaagccttataagaatggacagctcagcaaggtgatgataattgaaaactcccacgttaagaaggacgacatatggccttccggtggccagatgacggtgaaagacctgaccgccaaatacactgaaggtggtaacgcaatcctcgagaatatttcattcagtatatccccaggtcagcgggtaggtctgctcggccggactggctccgggaagagcaccctgctgagcgcttttctgaggctgttaaatacagagggcgagattcagatagacggagtgtcttgggacagcatcactctgcagcagtggcgaaaggccttcggagtcatccctcagaaggtgttcattttttctgggacttttaggaaaaatctcgatccatacgaacagtggtccgatcaggaaatttggaaagtagcagacgaggtcggcctgcggtcagtgatcgagcagtttccagggaagctggacttcgtactggtggacgggggctgcgtgttaagtcacggccacaaacaacttatgtgtttagctcgctccgtcctctcgaaggcgaaaattttattgctggatgaaccctctgcacatcttgatccggttacctaccagataattcggagaaccctgaagcaagcttttgccgactgtacggtgatcttgtgcgaacataggatcgaggccatgctcgaatgtcaacagttcctggttatcgaggagaacaaggtgcggcagtacgactcaatccaaaagttgctgaatgagcgttccttgttcaggcaggccatttctcctagtgacagagtgaaactgttccctcatcggaactcttcaaagtgcaagtcaaaaccccagatcgcagcccttaaggaggaaaccgaggaggaggtgcaggacacgaggctg

SEQ ID NO: 9736 - DNA, 4440 bp, Artificial Sequence
  derived and/or modified sequence
atgcagaggagccctctcgagaaggcatccgttgtgagtaaattgttttttagttggacacgccctatcctgcggaaagggtacaggcagcgactggaactgtccgatatctaccaaattccttccgttgattccgctgataacctgagcgagaaactggaacgcgagtgggatagagagttggcttctaagaagaatcccaaattaataaatgctctcaggcgatgttttttttggcgattcatgttttatggaatcttcctgtaccttggtgaggtcactaaggccgtgcaacccctgctgttaggccggatcatcgctagttatgatcctgataacaaggaagaaaggagcattgccatctaccttggtatcgggctatgcctcctgttcatagtacgcacattactactgcaccccgcaatttttgggttgcatcatataggcatgcaaatgagaatcgctatgttttcgctcatctataagaaaacactaaaactcagcagtcgggtgcttgacaaaattagcatcggccagctggtgtctctcctgtcaaacaatctgaataagtttgatgaggggctcgcactcgcacacttcgtgtggattgcccctctccaggtggcattgctcatgggcctgatttgggaactgctacaagcgtctgctttttgcggactgggttttctcatagtcctcgcattattccaggccggactaggccggatgatgatgaaatatcgggaccagagggccgggaagattagtgagcgccttgtgatcacgagcgaaatgattgagaatattcagtcagtgaaggcttattgctgggaagaggcaatggaaaagatgatagaaaacctccgccagacggagctgaaattgacaaggaaggccgcctatgtgcggtatttcaattcatctgccttctttttttcggggttttttgtcgtgttcctgagcgtgttgccctatgccctcattaaagggatcattttgcgcaagatttttactacgatttccttctgtattgtgctgaggatggcggtcacccgtcagttcccctgggctgttcagacatggtacgattcacttggcgcaatcaataagatccaggactttctccagaagcaggagtataaaacacttgaatacaatttaactacaacagaggttgttatggagaacgtcaccgccttttgggaagaaggattcggggagctgtttgagaaggccaagcaaaataataataatcgaaagacatctaacggggatgattcccttttcttttcaaacttttctcttctgggtactccggtgctgaaagatatcaacttcaagatcgaaagagggcagctgctggcggttgccgggagcacgggcgccggcaaaacctcgctattgatggtgatcatgggagaactggaaccctcagaaggcaaaattaaacacagcggcaggattagtttttgttcacagttctcttggatcatgcccggcaccataaaggaaaacataatttttggggtgtcctacgatgagtaccgctacaggagtgtgatcaaggcctgtcaactcgaggaagatatctccaaattcgccgaaaaagacaacatagtgctcggcgaaggaggaatcacactgtccggaggccagagagcgaggatatctctggctagggcagtatacaaagacgccgacctgtatctcttagatagccctttcggctacttagatgtcctcaccgagaaggaaatttttgaatcctgcgtgtgtaaactcatggcgaacaagacaagaatcctcgtgaccagcaagatggaacacctgaaaaaagcggacaaaatcctgatactgcatgagggatcatcttacttttacggaactttctcagagctccaaaacctgcagcccgacttctccagtaagctgatggggtgcgatagctttgatcaattcagcgccgagcgacggaattccattctcacagagacattgcatcgcttctctttggaaggcgacgcgccagtctcctggacagagactaaaaaacagtcatttaagcagacgggagagttcggggagaagcggaagaacagtatcttgaatcctatcaattcgatccggaaattcagcatagtgcagaaaactccccttcagatgaacggaattgaggaagacagtgacgagcccctggaacgacggttatccttggtgcctgatagtgagcagggcgaggccatcctgcccagaatctctgtgatctcaacgggccctacgctacaggctcggcgaaggcagagtgtgctgaatctgatgacgcactcagtgaaccaggggcagaatatccaccggaagacgacggcgagcaccagaaaggtttctttagctccacaggcgaacttaacggagttggatatttattcgcgccgcctcagtcaagagacgggcctcgaaattagtgaagagattaatgaagaagacctgaaagaatgcttcttcgacgatatggagagtattcccgcggtgacgacgtggaatacctatttgaggtacatcaccgtgcacaaatcactcatcttcgtgctgatatggtgcctggttatctttttggccgaggtggctgcttctctggttgtgctgtggctactgggcaatacaccactacaggacaagggcaatagtactcattcccggaacaactcttacgcagtaattatcacatctacatcctcttactacgtcttttacatttatgtgggcgtggctgacacactcctcgccatgggtttcttccgggggctgcccttggtccacactctgattaccgtgtcgaagattttgcaccacaagatgcttcattcagtgctgcaggcccctatgagtaccttaaatactttgaaggctggaggcatcttgaaccgtttttcaaaggacatagcaatcctcgatgacctcctccctctgactatcttcgacttcatccagctattgctgatagtaattggggccatcgctgtagtcgccgtgctgcagccctacatcttcgttgctacagtgcctgtgatcgttgcctttattatgctcagagcgtatttcctccagacttctcagcagctgaagcagctcgaaagtgagggcaggtcccccatcttcacacacctggtcacctctcttaaaggcctctggacccttagggcttttggaaggcagccgtatttcgagacactattccataaggcattaaatctgcacaccgcgaattggtttctttatctgtcgactctgcgctggtttcagatgagaatcgagatgatctttgttattttctttatcgcagtgactttcatctctatactgaccaccggtgagggagagggccgagtgggcatcattctcaccctggctatgaacatcatgagcaccctgcagtgggcagttaacagttcgattgatgtggattctctgatgaggtcagtgagtcgagtgttcaagttcattgatatgcctaccgaaggcaaacctaccaagagcaccaaaccatataagaacggccagctgtctaaagtaatgataatcgagaattcccacgtgaagaaagatgacatttggccgtccgggggccagatgactgtgaaggacctgaccgctaagtacaccgaagggggcaacgccattctggaaaatataagtttcagtatctctcctggccaacgagtgggactgcttggaaggaccggtagcgggaagagtacactgttgagcgcgtttcttaggctgctgaatacggagggggagattcagatagacggggtgagctgggattcaattacattgcaacaatggagaaaggcatttggagttatacctcagaaagtattcatattctcgggcacgttccgcaaaaatctagatccctacgaacaatggtccgaccaagagatttggaaagtcgccgatgaggtgggccttaggtccgtaatcgagcagtttccagggaagttggattttgtcctggtggacggagggtgcgtcctgtcccacggccataagcagttgatgtgtctagcaagatctgtgctatcgaaggcaaaaatcctgttgttggacgagccaagcgcacacttagatcctgtcacttatcagataatcaggcgtactttgaaacaggcgtttgccgattgcaccgtcattttatgcgagcaccgcatcgaagctatgctagaatgccagcagttcctggtgatagaggaaaacaaagtgaggcagtatgacagcatccaaaagttgcttaacgaacgttctctgttccgccaggccatatctccgagcgatcgggttaaactgttccctcatagaaatagttctaaatgcaagtccaaaccacagatagccgccctgaaggaagagacagaagaagaggtgcaagataccaggctc

SEQ ID NO: 9737 - DNA, 4440 bp, Artificial Sequence
  derived and/or modified sequence
atgcaaaggtcccccctggagaaggcgagtgttgtgtccaaacttttcttctcatggactagacctattctcaggaaaggatacaggcaaaggcttgaactttcagacatttatcaaataccctcagtggattcagccgataacctctcagaaaagctggaaagggagtgggatagggaattggcctcgaagaagaatcctaaacttatcaacgctcttcgccgttgtttcttttggaggttcatgttttacggaatcttcttgtaccttggcgaagtgaccaaggcagtccaaccacttttgctgggccgcatcatcgcatcatatgaccctgataacaaggaagagcgctcgattgctatttaccttggtattggactgtgtctcctgtttatcgtgcgcaccctgcttcttcatccagcaattttcggtctgcaccacattggtatgcaaatgcgtatcgccatgttttccctgatatacaagaaaacccttaagctgtcatcgagagtgctggacaagatttcgattggtcagcttgtgtcgctgctttcgaacaatctcaataagtttgatgaaggcctcgccctcgcccactttgtctggattgcaccccttcaggtggcacttcttatgggtcttatatgggagctccttcaggcatcagcattttgcggactggggtttctcattgtgctcgcactctttcaggcaggactgggtaggatgatgatgaagtacagagatcaaagagccgggaaaatcagcgaacggctcgtgattacctcggaaatgatagagaacatacaatccgtgaaggcatactgttgggaagaggcaatggagaagatgattgaaaacctccgccagaccgagctcaagctcactagaaaggcggcttacgtgcggtactttaacagcagcgcgtttttctttagcggatttttcgtggtgtttctgagtgtgctcccctacgccctgattaagggaatcattctgagaaagatctttacgaccatctccttttgcatcgtccttaggatggcagtgactcggcagtttccttgggcagtgcagacctggtacgattccctcggcgccatcaacaaaattcaggatttcctccaaaagcaggagtacaaaactctggaatacaatcttactaccactgaagtggtcatggaaaacgtcactgcattttgggaagaaggattcggggagctgttcgagaaggctaagcaaaacaataacaatcgtaaaacttcgaacggtgatgattcgctgtttttctcaaacttcagcctgctgggcaccccggtgctcaaagacatcaactttaagatagagcgaggacaacttctggcggtggcaggttcaaccggtgcaggcaagacgtcactgcttatggtgattatgggcgagctcgagccctcagaaggtaagattaagcattcagggaggattagcttttgtagccagttttcatggatcatgcctggcactatcaaggaaaacataatcttcggcgtgtcctacgatgagtacagatacagatccgtcatcaaggcatgtcaacttgaagaggacatctccaaattcgcagaaaaggacaatatcgtcctgggagaaggggggattaccctgtcaggcggtcagcgggcacgtatcagcctggcaagagcagtttacaaggacgccgacctgtacctcctggattcgccatttggatacctcgacgtgctcaccgaaaaggagatttttgagagctgcgtgtgcaagctcatggccaacaagactagaatcctcgtgacctcgaaaatggaacacctgaaaaaggcagataagatcctgatacttcatgagggaagctcatacttttacggaaccttctcagaacttcaaaatctgcaacctgatttctccagcaagctgatgggatgtgattcgttcgatcagttttcggcggagagaaggaactccattctgacggagactttgcataggttctcgctcgaaggcgacgcccctgtgtcttggaccgagacgaagaagcaatcttttaagcagactggcgaatttggggagaaacgcaaaaactccattctcaaccctatcaattcgattcgtaagttttcgatcgttcaaaaaactcctctccagatgaacggcattgaagaggactcggacgaaccattggaacggcggctttccctcgtccctgactccgaacaaggtgaagcaatcctgcctaggatctccgtgatttccacgggaccaactctgcaagctcgccgcagacaatccgtcctcaaccttatgactcatagcgtgaaccaggggcaaaacatccatagaaagaccactgcatcgaccagaaaagtgtcactggcacctcaagcaaatcttacggagctggacatatactccagacgactttcccaagaaacgggccttgaaatctcagaagaaatcaatgaagaagatcttaaagagtgcttttttgatgacatggaatccattcctgctgtgactacttggaacacctaccttcggtacataaccgtgcataagtccctcatctttgtgctgatatggtgcctggtgatttttctggccgaagtcgcagcctcacttgtggtgctttggcttctcggaaatactcctcttcaggataagggaaactccacccatagcagaaataactcatacgcagtgatcattacttcgacttcatcctattacgtcttttacatctacgtgggtgtggcagatactcttctggctatgggtttcttccgcggcctcccattggtgcacaccttgataaccgtgagcaagattctgcatcacaaaatgctgcattcagtgctccaagccccaatgtcaacgcttaatactcttaaagcaggaggaattctgaatcggttttcgaaggatatcgccatacttgatgacctccttccactgaccatctttgatttcattcaactgcttctgattgtcattggagccattgcagtggtggcagtgctccaaccgtatatctttgttgccaccgtgcctgttattgtcgcgtttatcatgctgcgcgcgtactttcttcaaactagccagcaactgaagcaacttgaaagcgagggccgaagcccgatctttacccatcttgttacctcactgaaaggtctttggactctgcgtgcctttggacgccaaccatacttcgaaaccctgtttcataaggcactcaacctgcacactgcaaactggttcctgtacctgtcgactcttcgctggttccagatgagaatcgaaatgatatttgtgatcttctttatcgccgtcacgttcatctcaatactgacgaccggcgagggagaaggaagagtgggaattatccttactctggcgatgaacattatgagcaccctccagtgggcagtgaactcaagcatcgacgtggactcactcatgaggtcagtgtccagggtgtttaagtttatagatatgccgactgaaggaaagccgactaagagcactaagccttacaagaacggacaactctcgaaggttatgattatcgagaactcacatgtgaagaaagatgatatctggccttcggggggccagatgacggtgaaggaccttaccgcaaagtacactgaaggaggcaacgctatccttgagaatatctcgttttcgatttcgcctggccagcgcgtgggtctgctcggacggaccggctcaggcaagtcgacccttctgtccgctttccttaggctgctcaacaccgaaggggaaatccagattgatggggtgtcctgggatagcataactctgcagcaatggagaaaggctttcggagtcattccacaaaaggtgtttatcttctcgggtacttttcgcaagaaccttgatccttatgaacaatggtcagatcaggaaatttggaaagtcgcagatgaagtgggtcttaggtccgtgattgaacagtttcctggtaaacttgactttgtccttgtggatggaggctgtgtgctttcccacggtcataagcaactgatgtgtcttgcacggagcgtgttgagcaaagcgaaaattcttctgcttgacgaaccttcggcacatctggacccggttacctaccagattatccgcagaaccctgaagcaagcattcgcagattgtactgttatcctgtgtgaacaccgcatagaagccatgctggaatgccaacagttccttgtgattgaagagaataaggtccggcagtatgactcaattcagaaattgctgaacgagagatccctgtttagacaggcaatctccccaagcgatcgagtgaagctgtttccacatcggaattcgtccaagtgtaagtcaaaaccccaaatcgcagcactcaaagaggaaactgaagaagaggtgcaggataccagactg

SEQ ID NO: 9738 - DNA, 4440 bp, Artificial Sequence
  derived and/or modified sequence
atgcaaagatcgcccctggaaaaggccagcgtggtgagcaagctgttcttttcgtggacgcgccccatcctgcgcaaaggctaccgccaaagactggaattgtccgatatctaccaaattccgtcagtcgattcggctgataatctctccgaaaaacttgaacgcgaatgggaccgggagctcgcttcaaagaagaacccgaaacttatcaacgcactgcggaggtgtttcttctggcgcttcatgttttacgggattttcctctatttgggagaagtgacgaaggcggtgcagccgctgctcctgggacgcatcatcgcctcgtacgacccagacaacaaggaggagaggagcattgccatttacctggggatcggactgtgccttctgttcatcgttcgcaccctgctgctgcacccggcaatcttcggactccaccatatcgggatgcagatgcggattgcgatgttctctcttatttacaagaagaccctgaagctgtcgagccgcgtgcttgataagatctccatcgggcaactcgtgtccctgctgagcaacaacctcaacaaatttgatgaaggactggcactggcccatttcgtgtggatcgctccactccaggttgcacttctcatggggctgatctgggaacttctccaagcctccgccttctgcggactgggcttcttgatcgtgcttgccctgttccaagctgggctgggacggatgatgatgaagtatagggaccagcgggcaggaaagatttccgagaggctcgtgatcacttcggaaatgatcgaaaatatccagtcggtgaaggcgtactgctgggaggaggcaatggagaagatgatcgagaatctgcgacaaaccgagctcaaactcacccgcaaggcggcgtacgtgcggtactttaactcgagcgctttcttctttagcggatttttcgtggtgtttctctcggtgctgccgtacgcccttatcaagggcatcattctccgaaagatcttcactaccatctcgttctgtatcgtcctccgaatggctgtgactagacaattcccgtgggccgtgcagacctggtacgattcgctgggcgcaatcaacaagatccaggatttcctgcagaaacaggagtacaaaaccttggaatacaatctcactaccactgaagtcgtcatggagaacgtcaccgcgttttgggaagaaggcttcggggaactcttcgagaaggctaagcaaaacaataacaaccggaagactagcaatggggacgatagcctgttttttagcaacttctctcttctgggaaccccggtcctgaaggacatcaacttcaaaatcgagcgcggtcagctgctcgccgtggcggggtcgactggcgcgggcaagacttccctgctcatggtgatcatgggagaactggaaccatcggaaggaaagattaaacactccggacggatctcgttttgctcccagttctcgtggatcatgccgggaaccatcaaggaaaacattatcttcggagtttcctacgacgagtacagatatcggagcgtcatcaaagcatgccaactcgaggaagacatatcgaagttcgccgaaaaagataatatcgtgctgggcgagggtggaatcactctgagcggaggacagagagcaagaataagcctcgccagggcagtgtacaaggatgccgacctgtacctgctggactccccgtttggataccttgatgtgttgactgagaaggaaatcttcgaatcctgcgtgtgcaaattgatggccaataagacgagaatccttgtgacctccaagatggagcatttgaagaaggcagataagattctgatcctgcacgaggggtcctcatacttctacggaactttctcagagctccagaacctccaaccagacttctcttcaaagctgatgggctgtgactcctttgaccagttctcagcggaacgacgcaattcgatccttaccgagacgctgcaccgcttctcacttgagggagacgctccggtgtcgtggaccgaaactaagaaacagtccttcaagcaaaccggagagttcggtgaaaaacggaaaaacagcatcctgaatccgatcaactctatccggaagttttccattgtccagaaaactccccttcaaatgaacggaatcgaggaggattcagatgaaccgctcgaacggcggctgtcacttgtgccagactccgaacagggagaagcaattctgccgcgcatctcggtgatctccaccggaccgacccttcaggcccgcagacgccagtcggtgcttaacctcatgactcacagcgtcaaccaaggccaaaatatccaccgcaaaactaccgcatccacgaggaaagtctcgctggcgccgcaggccaacctgactgaactggatatctactcacggaggctttcccaggaaactggtcttgagatctccgaagaaatcaacgaggaggacctcaaggagtgcttcttcgacgatatggaatccatccccgccgtgaccacctggaacacttacctcagatacatcactgtgcacaagagcctgatcttcgtcttgatctggtgtctcgtgatttttctcgccgaggtcgcagcttctctggtcgtgctgtggctgcttggaaacacccctcttcaggacaagggcaattcaacccactcgagaaataactcgtacgccgtgattatcacttcgacttcgtcctactacgtcttctacatctacgtgggtgtcgccgacactctgctcgccatgggatttttccggggcttgccgcttgtccacactctcatcacggtgtcaaagatcctgcaccacaagatgcttcattcagtgctgcaagctcccatgtcgaccctgaatactttgaaggcaggagggatcctgaaccgcttttccaaagacatcgccatccttgatgatctgctgccactgaccatcttcgattttatccagctgctcctgatcgtgattggagccatcgccgtggtggctgtcttgcaaccctacatcttcgtggcaactgtcccggttatcgtggccttcatcatgctgcgggcctactttctgcagacctcgcagcagcttaagcagctggagagcgagggaagatccccgatctttacgcatctggtgaccagccttaagggtctgtggactttgcgcgctttcggccgccaaccctacttcgaaaccctctttcataaagcactgaatttgcacaccgctaactggttcctttacctctcgaccttgcggtggttccagatgagaatcgaaatgattttcgtcatcttcttcatcgctgtgacttttatctcgattctgaccactggagagggcgaaggaagagtcggaatcatccttactttggccatgaatatcatgtcaaccctgcaatgggccgtgaatagttcaatcgacgtcgactcgctcatgcgttccgtgtccagagttttcaagttcattgacatgccgaccgaaggaaagccaactaagtccactaagccgtacaagaatggccaactgtcaaaagtgatgatcatcgagaatagccatgtgaagaaggacgacatctggccgtcaggcggccagatgactgtgaaggacctgaccgccaaatatactgaaggaggaaacgcgatcctggagaacatctctttcagcatttccccgggacaaagagtcggactgcttggtagaactggatcaggcaagtcaaccctgctctcggccttcctccgcctgctgaacactgaaggggaaatccagatcgacggggtttcatgggactcgattacgcttcagcagtggcggaaagcattcggagtgatcccacagaaagtgttcatcttctccggaacgttcagaaagaacttggacccgtacgagcagtggtccgatcaagaaatctggaaggtggcggacgaagtgggcctcagatcggttatcgagcaattccccgggaagctcgacttcgttttggtggacggaggatgcgtgctctcccatggacataagcagctcatgtgcctcgcgcgctcggttctgtcgaaggcgaagattctcctcctggacgaaccgtcggcccacctggatccggtgacttatcagatcatccgacggaccctgaaacaagccttcgcggactgcaccgtgatcctgtgtgagcaccgcatcgaagcgatgctggaatgtcagcagttcctggtgattgaggaaaacaaggttcggcagtacgattccatccagaaactgctcaatgaacggtcactcttcagacaagcgatctccccatcggaccgcgttaagctgttcccacaccggaattcctcgaagtgcaagtcgaagccgcaaatcgcagccctcaaggaggaaaccgaggaagaagtccaagatactcggctc

SEQ ID NO: 9739 - DNA, 4440 bp, Artificial Sequence
  derived and/or modified sequence
atgcaacgttcccctctggaaaaggcctcggtggtatccaagctcttcttctcgtggactcgcccaatccttcgtaaggggtaccgtcaaagattggagctgtcagatatctaccaaattccttcggttgattcggccgataacctttccgaaaagctggaacgagaatgggacagagagctcgcatcaaaaaagaaccctaaattgattaatgcactgagaagatgtttcttttggcgttttatgttctacggcattttcctgtatctgggagaagtcactaaggcagtccaaccgctgcttcttggcaggatcatcgcatcctacgatcccgataacaaagaagagaggtcaattgctatctacttgggtattggtttgtgtcttttgtttatcgtcaggacccttttgctgcaccctgccatttttggtctgcatcacatagggatgcaaatgagaattgcaatgttttcattgatttacaagaaaactcttaagctgagctccagggtccttgataagatttcaatcggacaactggtgtcgctgttgtcaaataaccttaacaaattcgacgaaggtctggctctggcgcactttgtctggattgcacctctccaagtggcgctgctgatgggtctgatttgggaactccttcaagcctcggccttctgtggactggggtttctgatcgtgcttgcattgttccaggcaggactggggcggatgatgatgaagtaccgcgatcaacgcgccggaaagatttcggaacggctcgtgatcacctctgaaatgattgaaaacatccagtcggtgaaagcatactgttgggaggaagccatggagaagatgatagaaaatctgcgtcaaactgaacttaagttgactagaaaggcagcgtacgtgcggtactttaactcgagcgctttctttttctcaggcttttttgtggtattcctctcggtccttccgtacgcacttatcaagggaattatccttcggaagattttcaccactatatccttttgtatcgtgctgagaatggcagtcactaggcaatttccttgggcagtgcagacctggtacgattcactgggagcaattaacaagattcaggactttctgcaaaagcaagaatacaagacccttgagtataacctcaccactaccgaagtcgtcatggaaaacgtgaccgcattttgggaagaaggattcggcgaactgttcgaaaaagcaaaacagaacaacaacaataggaaaactagcaatggagacgactccctgtttttcagcaactttagcctgctcgggacccctgtcctgaaagatatcaacttcaaaatagaaagaggacaacttctggcagtggcaggaagcactggcgcgggaaagacctcgcttcttatggtcatcatgggcgagctggaaccttcagaaggcaagattaaacacagcggacggatcagcttttgttcacaattttcctggattatgcctggtaccattaaggaaaacattatctttggtgtgtcctacgatgagtaccgctacaggagcgtgattaaggcatgccagttggaagaggacataagcaagtttgcagaaaaggataacattgtgcttggagaaggaggtattaccctgagcggaggtcagcgtgctcgcatttccttggcacgggctgtctataaagatgcagatctgtacctccttgatagcccatttgggtacctggatgtcctgactgagaaggaaatctttgagtcgtgcgtgtgtaagctgatggcaaataagaccagaatccttgtcacgtccaagatggagcacctcaaaaaggccgacaagatcctgattctgcatgagggatcatcgtacttctacggaacctttagtgaactgcagaacctgcaaccggattttagctcgaagctcatgggatgtgactcgtttgatcaattttccgctgagaggcgcaactcaatccttactgaaaccctgcatcgcttttccctcgagggcgatgcacccgtctcctggactgaaactaagaagcaatcctttaagcaaaccggggagttcggtgagaagcggaagaactcaattctgaatccgatcaactccataaggaagttttcgattgtccaaaaaactccacttcaaatgaatgggatagaagaggatagcgatgagccacttgaaagaaggctgagcctggttccagattcagaacagggagaagcaattctgccacgaataagcgtgatctcaaccgggcccaccctgcaggcgcggcgcaggcagtcggtgctcaatctgatgacccattcggtcaaccaagggcagaatatccatcgaaaaactactgcctccactcgcaaagtgagtctcgccccacaagcaaatcttaccgagttggacatttactcgagaaggctttcccaagaaaccggacttgaaatctcagaagaaatcaacgaagaagatctgaaagagtgttttttcgatgatatggaatccatccccgctgtgaccacctggaacacttatctgaggtacattaccgtccacaagtcgctcatttttgtgcttatttggtgtctggtgatttttctggccgaggtggccgcctccctggtggtcttgtggcttcttggtaatactcctttgcaggacaagggaaactccacccatagccgtaataactcctacgcagtcatcattacctccacttcgtcctactacgtgttttacatttacgtgggggtggcagatactctgctggccatgggttttttccgtggtctgccgcttgtgcatacgcttattaccgtgtcgaagattctgcatcacaaaatgctgcatagcgtgctgcaagcgccgatgtcaactctgaacacgttgaaggccggcggcattctcaaccggttttccaaggacatcgcaattttggatgatctgctcccactgaccattttcgatttcattcagctgcttctcattgtcatcggtgccatcgcagtggtggcggtcctgcagccttacattttcgtggcaaccgtgcccgtgattgtggcatttatcatgcttcgtgcgtacttcctccaaacttctcagcaacttaaacagctggaatcagaaggaagaagcccaatcttcacccatctcgtgacttcgcttaagggcctctggaccctcagagcctttggacgccaaccttactttgaaactctctttcacaaggcattgaaccttcacacggcaaattggtttctttacctgagcaccctccggtggtttcaaatgaggatagaaatgatctttgtgatcttcttcatcgcggtgacgttcatcagcattcttacgactggtgaaggagaaggcagagtcggaatcattctgactctcgccatgaatatcatgtccactcttcagtgggcagtgaattcctcgatagatgttgatagccttatgcggtcggtgtctcgtgtctttaagttcattgatatgccaactgaaggcaagccaactaagtcgaccaaaccctacaaaaacggacaattgagcaaggtcatgatcattgagaattcgcacgttaagaaagatgacatctggccatcgggcggacagatgaccgtgaaagatctgaccgcgaagtacactgaaggtggtaacgccattcttgaaaacatctcgtttagcatttcacctggccagcgggtcggactgctgggacggactggcagcggtaaaagcacccttctttcggcgtttcttagacttctcaatactgaaggcgaaattcaaatagacggcgtttcgtgggattcaataacgctgcaacagtggcgcaaggccttcggagtcatcccgcagaaggtgttcatcttttcgggtactttcaggaagaaccttgatccttacgaacagtggtccgatcaggaaatttggaaggttgcagatgaggtcggattgcggtccgtgattgagcaatttccagggaaactggacttcgttctggtggatggtggttgtgtgctgtcgcatggacacaagcaactgatgtgcctggcacggtcagtgcttagtaaggccaagattcttcttcttgatgaaccatccgcgcatctggaccccgtgacttaccagatcataagaaggactcttaaacaagccttcgcagattgtaccgtcattctctgcgaacatcgcattgaagccatgctcgaatgccaacaatttctggtgattgaggagaataaggtgagacagtatgacagcatccaaaagttgctcaatgagagatcactgtttaggcaagcaatctctccctccgatagagtgaaactttttccgcatcggaactcctccaaatgcaaatccaaacctcagattgccgcacttaaagaagaaactgaagaggaagtccaagataccaggctc

SEQ ID NO: 9740 - DNA, 4440 bp, Artificial Sequence
  derived and/or modified sequence
atgcagaggtccccccttgagaaagcttctgttgtatccaagcttttcttttcttggactagaccaatcctccgtaaaggttatcgccaaaggctggagctgtctgacatttaccagatcccatcagtagactctgctgataatctctccgaaaaacttgaacgcgaatgggaccgcgaacttgcatccaagaagaaccctaagctgattaacgcactgcgccgctgcttcttctggagattcatgttctatggtattttcctttatctcggagaggtaaccaaggccgtccagccactgctcctgggaagaatcatcgcctcctatgatcccgacaacaaggaggaacgttctatcgccatctatctgggaatcggtctgtgcctgctcttcattgtgcgcactttgcttctgcaccctgctattttcggattgcatcacataggcatgcagatgcgcatcgctatgttttccttgatctacaagaagaccctgaagctctcatcaagggtcctggacaagatttccattggccagcttgtttccttgttgagcaataacctcaataaatttgacgagggccttgccctcgctcatttcgtctggattgctccccttcaggtggcccttttgatgggtctgatatgggagttgctccaggcttccgctttctgtggtctcggctttctcattgtactggccttgttccaagccggcctcggaaggatgatgatgaagtacagagaccaacgcgccggaaagatctctgaacgtctggtcattacctccgagatgattgaaaacatccagtcagtgaaggcctattgctgggaagaggccatggagaaaatgattgagaacctgagacaaaccgaactcaagctgactaggaaggccgcttacgtccgttacttcaattcaagtgctttcttcttctcaggatttttcgtagtgttcctctccgtcctcccttacgctcttattaagggtataatcctccgtaagatattcaccacaatctctttttgcatcgttctgagaatggctgtcacccgtcagttcccttgggcagtacagacttggtacgactctttgggcgcaattaacaagatacaagactttctgcagaagcaggaatacaagacccttgagtacaatctgaccactacagaagtagtgatggagaatgttaccgccttttgggaagagggctttggtgagttgttcgagaaggctaagcaaaataataacaatcgtaagacttccaacggcgatgattctttgtttttctccaactttagtctgctgggtacacctgtactgaaggacattaacttcaaaatagaaaggggccaactgctggccgtcgccggtagcactggtgctggcaagactagccttttgatggtaattatgggtgagcttgagccttcagagggaaagattaaacacagtggaagaatctctttttgttcccagttctcttggatcatgccaggtaccatcaaagagaacatcattttcggcgtttcctacgatgagtataggtacaggtctgtcattaaggcctgccagctcgaggaggatatttctaagtttgctgagaaagacaacatcgtactcggagaaggcggaataactttgtccggaggccaaagggcccgcatctctcttgcacgcgccgtctataaagacgcagacctgtacctgctggacagtccattcggatacctcgatgtgctgaccgagaaagaaatattcgaatcttgtgtgtgcaagctgatggctaacaagacaagaatcctcgtgacttccaagatggagcacctgaagaaagcagataaaatactgatcttgcatgaaggatccagctacttctacggcacttttagtgagctccagaacctgcaaccagatttctcaagcaagctcatgggatgcgatagcttcgaccagttttccgcagagaggagaaactcaattttgacagaaaccctgcatcgtttctctctcgagggtgacgcacctgtctcctggactgaaacaaagaagcagagcttcaagcagacaggcgagttcggcgaaaagcgtaaaaactccatcctgaacccaatcaacagcatcagaaaattctctatcgtccagaagaccccccttcaaatgaacggaatcgaagaggattccgacgagcccctggaaaggagactcagtcttgtgccagacagtgagcaaggtgaagctattctgccccgcatcagcgtgattagcaccggtcctactttgcaggctaggaggcgccagtctgtgcttaatctgatgactcacagcgtgaaccagggccagaatatccaccgcaagaccaccgccagtactagaaaggtgtctctcgcaccacaggctaacctgaccgaattggatatctactctagacgtctttcccaagagactggactggaaatcagtgaggagatcaacgaagaagacctcaaggagtgtttttttgacgatatggaaagtattcctgctgtgactacctggaacacctacctgcgttacatcactgttcataagtctctgatcttcgtcctgatctggtgccttgtcatctttcttgcagaagttgcagcatcccttgttgtcctgtggttgctgggaaataccccactgcaggacaaaggcaacagcactcattcccgtaacaactcctacgctgtcatcatcacctctacatccagctattatgtgttctacatctacgtgggagtggctgacactctccttgcaatgggtttcttccgcggtctgcctctcgttcacacattgatcactgtatctaagatcctgcaccataagatgctccactccgtcctgcaggctcctatgagtactctgaatactctgaaggcaggcggtattctgaaccgcttctcaaaggatattgctattctggatgatttgttgcccctcacaatatttgatttcattcagcttctcctgatcgtgataggcgctatcgcagtggtcgctgtgttgcagccctacatctttgtcgctactgtcccagtaatagtggcattcatcatgcttagggcctactttctccagacctcccagcagctgaagcagctcgagtccgaaggtaggagccctatcttcacccacctcgttacctcacttaaaggcctctggaccttgagagcttttggtagacagccctactttgaaactttgttccataaggccctgaacctccacaccgccaactggttcctttatctttcaacactcagatggttccaaatgcgcatcgagatgatctttgttattttctttatcgcagtcaccttcataagcattcttaccactggagaaggagagggtagagtaggcatcatcttgaccttggccatgaatatcatgtccacccttcagtgggctgtgaactcctctatcgatgtggatagtttgatgcgttctgtgagtcgtgtctttaagttcatcgacatgcccactgagggaaagccaactaagtcaactaagccctacaaaaatggccagctttctaaggttatgatcatcgagaattcacatgtcaagaaggatgatatctggcctagcggcggtcaaatgaccgtgaaagacctgacagctaaatatactgagggaggaaacgcaattctggaaaatatctccttctccattagtcctggacaaagggtcggtctgctgggtagaaccggatctggcaagagcaccctgctgtctgccttcctccgcctcctcaacactgaaggtgaaattcagattgacggagtcagctgggactctataaccttgcagcagtggagaaaggccttcggagtaatccctcaaaaggtgtttatcttcagcggcaccttcagaaagaatctcgacccttatgaacagtggtctgatcaagaaatatggaaggttgccgatgaagttggacttcgttcagttattgaacaatttcccggcaaattggatttcgtcctcgttgacggtggctgcgtgttgtctcatggccataaacaattgatgtgcctcgccaggtctgttctgagcaaggctaagatactgctcctggatgagccttcagcacacttggatccagtcacctaccagatcattcgtaggactcttaagcaggccttcgctgactgcaccgttattctctgcgagcacagaatagaggccatgcttgaatgccaacagttcctcgttattgaggagaacaaggtgaggcagtatgatagcatccagaaactgctgaacgaaaggtccctgtttaggcaagccatcagcccctctgaccgcgtcaaactcttcccccataggaattcctcaaagtgcaaaagcaagccccagattgccgctcttaaggaagagacagaagaggaggtccaggatactcgtctg

SEQ ID NO: 9741 - DNA, 4440 bp, Artificial Sequence
  derived and/or modified sequence
atgcaacgcagccctctggagaaggcgtccgtggtgagcaagctgttcttctcctggaccagaccgatactgcgtaagggctacagacagcggttggagctgtcggatatctaccagatcccgtcggtggactccgctgataacctgtccgaaaagctggaacgggaatgggaccgcgagttggccagcaagaagaatccgaagctcatcaacgcactccgcaggtgcttcttttggcggttcatgttttacggaatcttcctgtacctcggggaagtgaccaaagcggtgcaaccgctgctgcttggtagaatcatcgcctcgtacgacccggataacaaagaggagagatcgatcgctatctacttggggatcggactgtgcctgttgttcattgtccggacgctgttgctccatccggcgatctttggactccatcacattggaatgcagatgaggatcgcgatgttttccctgatttacaagaaaaccctgaaactctcgagcagggtcctggataagatctcgatcggccagttggtgtcgcttctgagcaacaaccttaacaagttcgatgaaggcctcgccctggcgcacttcgtgtggatcgcgcctctgcaagtggcactgctgatgggacttatctgggaactcctgcaggcctccgccttctgtggactgggtttcttgatcgtgctcgcccttttccaggctggcctgggacggatgatgatgaagtaccgggatcagcgcgctggaaagatctccgaacggctggtgatcacgtcggagatgattgagaacatccagtccgtcaaggcctactgctgggaggaagctatggagaagatgatagagaacttgcgtcaaactgagctcaagctcaccagaaaggctgcctacgtgagatatttcaacagcagcgctttcttctttagcggattctttgtcgttttcctgtccgtcctcccgtacgcgttgatcaaggggatcatcctccgcaagatcttcaccaccatctcattttgcattgtgcttcgcatggccgtcactcggcaattcccatgggcagtgcagacttggtacgactcgctgggcgcaattaacaaaatccaggattttcttcagaagcaggaatacaagactctcgaatacaacctcaccactactgaagttgtgatggagaatgtgacggccttctgggaagaaggattcggagagcttttcgagaaggccaagcagaataacaataacagaaaaacctcgaacggggacgactcgctcttcttttccaacttttcgctcctgggaaccccggtgcttaaagatatcaacttcaagatcgagcgcggacagctgctggccgtcgcgggctccactggcgcaggcaagaccagcctgctcatggtgatcatgggagaactggaaccgagcgagggtaagatcaagcacagcggacggatctcattctgttcccaattctcgtggattatgccaggtaccatcaaggagaacatcatctttggcgtgtcctatgatgagtaccggtaccgatcggtgatcaaggcgtgccagctggaagaagatattagcaaattcgccgaaaaggataacatcgtcctcggtgagggcggaataactctttccgggggacagagggcacggatctcgctcgccagagctgtgtacaaagacgcggacctctacttgttggactcgcccttcggatacctggacgtgctgaccgaaaaggaaatcttcgaatcatgcgtgtgcaagctgatggcaaacaagacccgcattctggtgacctcgaagatggagcacctgaaaaaggcggacaaaatcctcattttgcacgagggtagctcgtacttttacggaactttctcagaactccagaacctccagccggacttcagctcaaagctcatggggtgcgactccttcgaccagttctccgctgagagaagaaactcaatcctgaccgaaaccctccaccgcttctcactcgaaggagacgctcctgtgtcgtggaccgagacgaaaaaacagagcttcaaacagaccggcgagttcggagaaaagagaaagaactcgatcctgaatccaatcaacagcatcagaaagttttcaatcgtgcagaaaactccgctccagatgaacggtatcgaagaggactcggacgagcctctggaaaggcgcctctcgctggtcccggactccgaacagggagaagccatcctgccgcgcatcagcgtcatctccactggccctaccctgcaggcacgcagacggcaatcggtgctgaacctgatgacccattccgtcaaccaaggacagaatatccaccgcaaaaccaccgcatcgaccagaaaagtgagcctcgcgccgcaagcgaacttgaccgagctcgacatctactcacgtcgtctctcgcaagaaactggactcgagatctccgaggaaatcaatgaagaggaccttaaggaatgctttttcgatgacatggagtcgattccagccgtgaccacgtggaacacctatctgcgctacatcaccgtgcacaagtcgctcatatttgtcctgatctggtgcttggtcatctttctggccgaagtggcggcctcgctggtggtgctgtggctgttgggcaacacgccactgcaggacaaggggaactcaacccatagccggaataactcgtacgcggtcatcatcaccagcacttcctcctactacgtgttctacatttatgtcggtgtggccgatacgctgctggccatggggttttttcgcggcctgccgctggtgcataccctgatcacggtgtccaagatcctgcaccacaaaatgctccactcggtgctgcaggcaccgatgtcgactcttaatactctcaaggccggaggaatcctcaaccgcttctcgaaggacatcgccatcctggacgacctcctgcctctgacgatctttgacttcatccagctgcttctcattgtgatcggagcaatcgccgtggtggccgtcctgcagccttacattttcgtggctactgtgccggtgatagtggcctttatcatgctgcgggcgtatttcctccaaacctcccagcaactgaagcagttggaaagcgaaggccggtcaccaatctttactcacctcgtcacctcgcttaagggcctgtggacgctccgcgcgttcggacggcaaccatacttcgaaaccctctttcacaaggctctgaatctgcacactgccaactggttcttgtacctgtcgaccctgaggtggtttcaaatgcggatcgaaatgatcttcgttatcttcttcattgccgtcacttttatcagcattctgactactggcgagggagaaggacgcgtgggaatcattctcaccttggcgatgaacatcatgtccaccctgcagtgggccgtgaattcctccatcgatgtggactcgctcatgcgctcagtcagcagagtgttcaaattcatcgacatgccgaccgagggaaagccgaccaaatccactaagccctacaaaaatgggcaactctccaaggtcatgatcatcgagaatagtcacgtcaagaaagatgacatctggccgagcggtggccaaatgaccgtgaaggaccttaccgccaaatacaccgaaggaggaaacgcgattctggagaacatctcatttagcatctcccctgggcaaagggtcggattgctcggtcgcactggatccggaaaatcaactctgctgagcgccttcctgaggttgcttaacaccgaaggcgagattcagatcgacggagtgtcatgggactcaattaccctgcagcaatggaggaaggcattcggggtgatacctcagaaggtgttcatcttttcagggaccttcagaaaaaacctggacccgtacgaacaatggagcgatcaggaaatctggaaggtggcggacgaagtgggtctgcggagcgtgatcgaacaattccctgggaaacttgattttgtcttggtggatggcggctgcgtgctgtcacacggccacaaacaactgatgtgcttggcccgctcggtcctgtccaaggctaagatcctgctgctggatgaaccgtcggcgcacctggaccctgtgacctaccagatcatccggcggaccctgaagcaagcattcgccgattgtactgtgatcctgtgtgaacatagaatcgaagcgatgctggaatgtcaacagttcctggtgatcgaagagaacaaggtgagacagtacgacagcatccaaaagctgctgaatgagcgaagcctttttagacaggccatctcgccgtctgaccgggtgaagctcttcccgcatcgcaatagctccaagtgcaaatcgaagcctcaaatcgccgccctcaaggaggagactgaggaagaagtgcaagacactcggctg

SEQ ID NO: 9742 - DNA, 4440 bp, Artificial Sequence
  derived and/or modified sequence
atgcagcgctccccacttgagaaggcgagcgtggtgagcaagctcttcttttcctggaccagaccgattctgagaaaaggttacagacagagacttgaactctcggatatctaccaaattccgagcgtggactccgccgataacctgtccgagaaacttgaaagggagtgggaccgggaattggcctcaaagaagaatccaaagctgatcaatgcactccgtaggtgcttcttctggcgatttatgttttacggaattttcctctatctgggagaggtcaccaaagctgtccagccgctgctcctggggcgcatcatcgcgtcctacgaccccgacaataaggaggagcggagcatcgcgatctacctggggatcggactgtgtctgctgttcatcgtgcggactctcctgctgcaccccgcgatcttcggtctgcatcacatcggaatgcaaatgcggatcgcaatgttctcgcttatctacaaaaagacccttaaacttagctcaagagtgctggacaagattagcatcggtcagctggtgagccttctctcaaataacctgaacaagttcgacgagggactggccctggcccatttcgtgtggatcgccccactccaggtggcactcctcatgggactgatctgggagttgttgcaagcgagcgccttctgtggattgggcttcctgatagttctcgcactgttccaggcgggcttggggcggatgatgatgaagtaccgggaccagcgcgcgggaaagatttcagagcgcctcgtcatcacttcggaaatgatagagaatattcagtccgtcaaagcctactgctgggaggaagccatggagaaaatgatagaaaacctgcgccaaactgagctcaagttgactaggaaggccgcatacgtgagatacttcaacagctcggcattcttcttcagcggatttttcgtggtattcctctctgtactgccgtacgccctgatcaaaggaatcatcctgaggaagatcttcaccaccatctcattctgtattgtcttgcgcatggcggtgacgagacagttcccatgggcggttcaaacttggtacgactcattgggagcaatcaacaaaatccaggactttctccagaaacaagagtacaagactctggaatacaacttgaccactactgaagtggtgatggagaatgtcactgcattttgggaagagggcttcggagagcttttcgagaaggcaaagcagaataacaataatcggaaaacctcaaacggagacgacagcctctttttctcgaacttctcgctcctgggaactccggtcctcaaagatatcaacttcaagatcgagcggggccagcttcttgcagtagccggaagcaccggagcaggcaagacctccctgctgatggtcatcatgggagagttggaaccgtcggaaggaaagatcaaacattcgggacggatcagcttttgctctcaattctcatggattatgcccggcaccatcaaagagaacatcatcttcggagtgtcgtacgatgagtaccgctacagatccgtgatcaaggcctgccagttggaagaggacatctcgaagttcgcggaaaaggacaatatagtactgggtgaagggggaatcaccttgtccggcggccagagagcccgtatctcgctggcacgcgctgtctacaaggatgcggatctgtacctcctcgattcaccgttcggctatctcgacgttcttacggagaaggagatctttgaatcgtgcgtctgcaaactgatggctaacaaaacccggattctggtcacgagcaaaatggagcacctgaagaaagccgataagatcctgatcctgcatgaaggatcatcatatttctacggaactttctccgaactgcaaaacctgcagcccgacttctcgtcgaagctgatgggatgcgattcgttcgatcaattctcggctgaacgacgcaactcaatcctcaccgaaacgcttcataggttctcgctggaaggtgacgccccagtcagttggaccgaaaccaagaagcaatcatttaagcaaactggtgaattcggagaaaagcgaaagaactcgatccttaacccgatcaactcaatcagaaagttctcgatcgtccagaaaactccactgcaaatgaacggaatcgaagaggacagcgatgagccgctggagaggagactgtcattggtcccggactccgagcagggcgaagccattctgcccagaatttccgtgatctccacgggaccgaccctccaggcgaggcggcggcaatcggtgctgaacctgatgacccattccgtgaaccagggccagaatatccatcgcaaaactaccgcttctaccagaaaggtcagcctggctcctcaggcaaatctgactgagctcgacatttactcccgcagattgtcccaggaaaccggactggaaatttcagaggagatcaatgaagaggacctgaaggagtgcttctttgacgacatggaatccatccctgcggtgaccacttggaacacctacctgcgctacatcactgtgcacaaatcactgatctttgtcctgatctggtgcctggtgatcttcctcgcagaagtagccgcctccctggtcgtgctctggctcctgggaaatactccacttcaagacaaggggaacagtactcactcgcgcaacaattcgtacgcagtgatcatcacgtctaccagcagttactacgtattctacatctatgtcggtgtggcggacaccctgttggctatggggtttttccgggggcttccgctggtgcacaccctcattaccgtgtccaagatcctgcatcacaagatgcttcacagcgtgctgcaggccccaatgagcaccctcaacaccctgaaggccggcggaatcctcaatcggttctccaaggacatcgctatcctcgatgatttgctgcctctcactatcttcgacttcatccaactcctgctgatcgtcattggggccatagccgtggtggctgtgctgcagccgtacattttcgtggctacggtgcctgtgatcgtggcctttatcatgctgcgggcctacttcctccagacttcccagcagttgaaacaactggagagcgagggtcgctcgccaatctttacccacctggtgacttcgctgaaggggctctggaccctgagggccttcggcaggcaaccctacttcgaaaccctgtttcataaagccctgaacttgcacaccgccaactggtttctttacttgtccactctgcggtggttccagatgcgcatcgaaatgattttcgttatctttttcatcgcggtgacctttatctctatcctcactaccggagagggcgaaggccgcgtcggtatcattctgactctcgcgatgaatatcatgtccaccctccagtgggcagtgaattctagcatcgacgtggactcactcatgcgcagcgtctcccgggtgttcaagttcatcgacatgccgacggaaggcaagccgaccaagagcactaagccttacaagaacggccaactctccaaggtcatgatcatcgaaaactcccatgtgaaaaaggatgatatttggccttccgggggccaaatgactgtgaaagacctcaccgctaaatacaccgaaggagggaacgccatcctcgaaaacatctcttttagtatctcgccgggccaacgggttggacttctcggacgcactggttccggaaaatccacgctgctttcagcctttctccgactcctcaacactgaaggagaaatccaaatcgacggcgtgtcctgggattccataaccctgcaacaatggcgaaaggcgttcggcgtgataccacaaaaggtgtttatcttctccggaactttccgcaagaatttggatccttacgaacagtggagcgatcaggaaatctggaaggtggccgatgaagtggggctccgctcagtcattgagcaatttccaggtaagctggatttcgtccttgtcgacggagggtgcgtgctgtcgcacgggcacaagcagcttatgtgtctggcgcgctcggtgctgagcaaagctaagatcctgctgctggatgaaccgtcggctcacctggaccctgtgacctatcagatcattcgccggactttgaagcaggcttttgctgactgtaccgtcatcctttgcgaacaccgcattgaagcaatgctggaatgccagcagttccttgtgatcgaggaaaacaaggtcagacagtacgattcaattcagaagttgctcaatgagcgctcgctctttcggcaggccatctcgccgtccgacagagtgaagttgttcccacaccggaactcgtcaaaatgcaagtcaaagccgcagatcgccgccctgaaggaagaaacggaagaggaggtgcaggatactcggctc

SEQ ID NO: 9743 - DNA, 4440 bp, Artificial Sequence
  derived and/or modified sequence
atgcaaaggtccccgctggagaaggccagtgtcgtgagtaagctcttcttcagttggacccgccctatactgcgaaaggggtacagacagagattggagctgtccgatatctaccaaattccatcagtggactccgccgataacttgtctgagaaacttgaaagagaatgggacagggagctggcctctaaaaagaaccccaaactgataaacgccctccgacgatgctttttctggagattcatgttctatggcatctttctgtatctcggagaagtcaccaaagccgtgcagccactgctgctgggcaggatcatcgccagctacgacccagacaataaagaggagcgttcgatcgctatctatctgggcatcggcttatgtctgctgttcatcgtgagaactttgctactgcatcctgctattttcggccttcaccacattgggatgcaaatgaggattgcaatgttctcgttgatttacaagaagaccttaaaactgagctcccgagtactggataagattagcatcggtcagctggtgtcactgttgtccaacaatctaaacaagttcgacgaaggtctggccctggcacacttcgtgtggatcgcccccctccaggtcgctttactaatgggcctaatttgggaattactgcaggcttctgccttctgcggtctggggttcctcatcgtgctcgccctgtttcaagctggcctcggaagaatgatgatgaagtatcgggaccaaagagctggaaaaattagcgaaagacttgtaattactagcgagatgattgagaatattcagtccgtcaaagcctactgttgggaagaggctatggaaaagatgatcgaaaatcttcgacaaaccgaactgaagcttactcgaaaggcagcttatgtgcgatatttcaacagtagcgctttcttcttctccggtttttttgttgtgttcttgtccgtcctaccttacgcgttgatcaagggcattatcctgcgaaagatattcaccaccataagtttttgtatcgttctcaggatggctgtcacacgacaatttccttgggccgtccaaacatggtatgattctctaggagcaattaataagatccaggatttcctgcagaagcaggaatacaagacactcgaatacaatctgactaccactgaagtagtgatggaaaacgtgaccgccttttgggaagagggatttggagaactgttcgagaaagccaagcagaacaacaataataggaaaacttcaaacggggatgattccctattctttagtaacttttcgctgcttgggacacctgtactgaaggatataaacttcaagattgagagaggacagctgctggcagtagcaggctctaccggagccggtaaaacaagcctgttgatggtgatcatgggagaactggaacctagcgaggggaagataaagcactccgggagaatttctttttgctcacagttttcctggattatgcccggcaccattaaggaaaatataatctttggggttagctacgacgagtatcgttacaggagtgtgatcaaagcctgtcagctggaagaggatattagcaagttcgctgaaaaagataacattgtcctgggtgaaggcggaataactttgtccggagggcagcgggcgagaatttccctggcacgtgccgtctacaaggacgcagatctctacctcctggattcccctttcggctatctcgatgtgttgaccgagaaggaaatatttgagtcttgcgtgtgtaagctcatggcaaacaaaacaagaattttggtaaccagcaaaatggagcatttgaaaaaagccgataagatacttatactacacgaaggctcttcctacttctacgggacctttagcgagctgcagaacctacaacccgatttttctagcaaactgatgggctgtgacagttttgatcagtttagtgcggaaaggaggaatagcatacttacagaaaccttacaccggttcagcctagagggagacgctcctgtgtcttggactgagactaaaaagcagtccttcaaacagaccggcgaattcggggaaaagaggaagaattccatcctcaatcctataaacagcattcggaaattctctattgtgcagaaaacgccgctgcaaatgaatggcatcgaagaagatagcgacgaacctcttgagagaaggttgtcccttgttcccgacagtgagcagggcgaggccatattgccgcgaatttcagtgatcagcaccggtcctacgttgcaagcgcgaagaagacagtccgtgctgaatctcatgacgcattctgtcaaccaaggtcagaacattcatcgaaaaaccacagcttctacaagaaaagtctctctggcgccacaagccaatcttaccgagctggacatatatagtcgtcgcctgagccaggagaccggtctcgagatatccgaagagataaatgaagaagacctcaaggagtgcttttttgatgacatggagtccattcctgcggtaaccacatggaacacttacttgagatacataacagtgcataagagcctcatattcgtccttatctggtgtctggtcatcttcctcgccgaagtggcagcctccttggtggtcctctggctcctgggaaatacaccactgcaggacaagggtaacagtacccatagccgaaataactcatacgccgtgattataacctctacttcttcatattatgtgttctatatttacgttggggtcgcagataccctgctggctatgggcttttttcgagggttgccactggtccacaccctcatcacagtttccaagatcctgcaccacaaaatgctccattctgtactacaggcccccatgagcactcttaacacgttgaaagctggaggtatcttgaaccgattcagcaaggacatcgctattctggacgacttgcttccgcttacaatttttgatttcatacagctgttactgattgtgatcggcgccattgcggttgttgccgtcttgcagccatatatctttgtggcaaccgtgccggtgatcgtggctttcatcatgctgagagcgtatttcctgcagacgtcccagcagttgaagcagctggaaagtgagggtcgttccccgatttttacgcacttggtgacaagcctgaaaggcctgtggaccctgagggcgtttggacgacagccctacttcgagacacttttccacaaggctcttaatctgcacacagcgaattggttcttgtatctgagtacacttaggtggtttcagatgagaatcgagatgatatttgtcatctttttcatcgcggtcaccttcatttctatcttgacgacaggagagggtgaaggaagagtagggatcattctgaccttggctatgaatatcatgagtaccctccagtgggcagtgaattcaagtattgatgtggactcactcatgcgtagtgtgagtagagttttcaaatttattgacatgcccaccgaggggaagcctactaaaagcacaaaaccatataaaaacggccagttatccaaggtaatgatcatagaaaacagccatgtgaagaaagatgatatctggccaagcggaggacagatgactgtgaaagacctgaccgccaagtatactgagggtggaaacgccatcctggaaaacatctccttctctatatccccgggtcagagagtgggccttttaggtcgtacaggatctggaaaatctaccctcttgagcgcattcttaagactgctcaataccgaaggcgagatccagatcgatggcgtttcctgggacagtattactctgcagcagtggaggaaagcttttggagtgatcccacaaaaggtgttcattttctccggcacttttaggaaaaatctggacccttatgagcagtggagtgaccaggaaatctggaaggttgcagacgaagtcgggctgcgatcggtgattgagcagttccccggcaaactggattttgtgctggttgatggcggctgcgtcctcagccacggccacaagcagctgatgtgcctcgctcggtctgtccttagtaaagctaagatcctactgttagatgaaccctctgcccatctggacccagtcacctaccaaatcatccgaagaacccttaagcaggccttcgccgattgtactgtgatcttgtgcgagcacaggatagaagccatgttagagtgtcagcaattcctggtgattgaagaaaataaggttcgacagtacgacagtatacagaagcttctgaatgagagaagtctgttcagacaggccattagcccttccgaccgagtgaaacttttccctcaccgcaatagctcgaagtgcaaatccaagccacagatcgccgcattgaaggaggaaaccgaagaggaggtgcaggacaccagactg

SEQ ID NO: 9744 - DNA, 4440 bp, Artificial Sequence
  derived and/or modified sequence
atgcagagaagcccgctcgagaaggctagcgtcgtgtccaaactgttttttagctggaccagaccgatcctgagaaagggttaccggcagcgcctcgagctgtcggacatctaccagataccgagcgtcgattccgctgacaacctgtcagaaaagctggaacgggaatgggatcgagagcttgcaagtaagaaaaacccaaagctcatcaacgcacttagacggtgcttcttctggcgcttcatgttctacggaattttcctgtacctgggtgaggtcactaaagccgtgcaaccgctgctcctgggacgcatcatcgcatcatacgatccggataataaggaagaacggagcatcgcgatttacttggggattggactttgccttctgttcatcgtcagaactcttctgctccatcccgccatcttcggtttgcaccacatcgggatgcagatgcggatcgcgatgttctcgctcatctataagaaaactctcaaactgtccagccgggtcttggataaaatctcaatcggtcaactggtcagcctgctgtccaacaatctgaacaagtttgacgaaggccttgcactggcgcatttcgtgtggatcgcccccctgcaagtggccttgctgatgggactgatctgggaactgttgcaggcatcggcgttctgcggattggggttcctcatcgtactggctctgttccaggctggactcggaagaatgatgatgaagtaccgcgaccaacgcgcaggaaagatctcagagcgcctcgtcatcacgtccgaaatgattgagaatatccagtccgtcaaggcgtactgttgggaggaagcgatggagaagatgatcgaaaatctccgccaaaccgagctcaaactcactcgcaaggccgcctacgtgcggtactttaactcgtccgcctttttctttagcggattctttgtggtgttcttgtccgtgctcccatacgcgctgatcaagggaatcatcctgcggaagatttttactaccatcagtttttgcattgtcctgcgcatggccgtgactaggcagtttccgtgggctgtgcaaacgtggtacgactcactgggcgccatcaataagatccaggatttccttcaaaagcaggaatacaagaccctggagtacaacctcaccaccactgaagtagtgatggaaaacgtgaccgccttctgggaagaggggttcggagagttgtttgaaaaggcgaaacagaacaacaacaaccggaaaacttccaacggggatgacagcttgttcttctccaacttctccctcctcggcactccggtgctgaaggacatcaatttcaagatcgaaagaggtcagctgctcgccgtggccggatcgactggagccggtaaaacctccctgctgatggtgatcatgggggagctggagccatcagagggaaaaatcaaacactccggtcggatctccttttgcagccagttctcctggatcatgccaggcactatcaaggagaacattatcttcggcgtgagctacgacgaatacagatatcgcagcgttatcaaggcgtgtcagctggaggaggatatttccaagttcgccgagaaggacaacattgtgctcggagaaggaggcatcaccctgtcgggaggccagcgggcgcgcatctcgctggcacgggcagtgtataaggacgcagacctctatctgctcgactccccgtttggatacctggacgtgctcactgagaaggagatcttcgagtcgtgcgtgtgcaagctcatggccaacaagaccagaatcttggtcacctcgaagatggaacacctcaagaaggctgacaagatcctgatcctgcacgagggatcgtcgtacttctacggtaccttctcagaactgcagaatctgcagccagatttctcgagtaagttgatggggtgcgactccttcgaccaattctccgccgaaagacgcaactcaatcctcactgaaactctccacaggttttcactggaaggcgatgcacctgtgagctggactgagactaagaagcaatcgttcaagcaaacgggggaattcggggagaagagaaagaactcgatcctgaatccgatcaacagcatccgtaaattcagcatcgtccaaaagactcccttgcagatgaacggaatcgaagaggattccgatgaaccgcttgaacggcggctgtcgctcgtgcccgattccgaacagggagaggctattctgcctaggatctcagtcatctccacgggacctactctccaggcccgccgccgccagagcgtgctgaacctgatgacccattcagtgaaccagggccagaatatacaccgcaaaactaccgcctctactagaaaggtgtcactcgctccacaggcgaatttgaccgagctcgacatttactcgcggaggctgtcacaagaaactggactcgagatttctgaggaaatcaacgaggaggacctgaaagaatgcttcttcgacgacatggagtcgatcccagccgtgaccacctggaatacctacctgcgctatatcacggtgcacaaatcgcttatcttcgtgctgatctggtgcctggtcatcttcctcgcggaagtcgccgcgtccctggtggtgctgtggctccttggaaacaccccattgcaggacaagggaaattcaacccactcgaggaacaactcgtacgcggtcattatcaccagcaccagctcctactacgtgttctacatctacgtcggcgttgcagacaccctccttgctatgggcttttttagaggactgccgctcgtgcatactctgatcactgtctccaaaatactgcatcataaaatgctccatagtgttttgcaagcccctatgtccaccttgaacaccctcaaggccgggggcattctgaaccgtttcagcaaagacatcgccatcctggatgacctgctcccgcttactatctttgacttcattcagctgctgctgatcgtcatcggagccatcgctgtggtggccgtgctgcagccgtacatcttcgtggcaacggtgccggtcatcgtggcattcatcatgctgcgggcgtacttcctgcagacctcccagcagctcaagcagctggaatcggagggtcgctcaccgatcttcacccatctcgtgacctccctcaagggcctgtggactctgcgggcctttggacgccaaccgtactttgaaacgctgttccataaggccctcaatcttcacaccgctaactggttcctgtacttgtcgaccctcagatggttccagatgagaatagaaatgatcttcgtcatcttcttcatcgcggtgaccttcattagcatccttactacgggcgaaggggaaggacgcgtgggcatcatcctgactcttgcgatgaatatcatgtccacgctccaatgggccgtgaattcgtcgattgacgtggattctctgatgcggtcggtgagccgcgtgttcaaattcatcgacatgccgactgaaggcaagcccaccaaatctactaagccgtacaaaaatggacagctctcaaaggtcatgatcatcgaaaactcacacgtcaaaaaagatgacatttggccatcaggcggacagatgacggttaaggatctgaccgcaaagtacaccgaaggcggcaatgcaatcctggagaatatcagcttctctattagccctggccaaagggtgggactgctgggtaggaccggttccggaaagtcgaccttgctgagcgcctttctccggctgctgaataccgaaggagaaatccagatcgacggagtgtcgtgggattcgattaccctgcagcagtggcgcaaggcgttcggagtcatccctcaaaaggtgtttatcttttcaggcactttccgaaagaatctggatccatacgagcaatggtcagaccaagagatctggaaggtggctgatgaggtcggacttcgatcagtgatcgaacaattccctggaaagttggacttcgtcctggttgacggaggatgtgtgctgagccacgggcacaaacaactgatgtgcctcgctagatcggtcctgtcaaaagcaaaaatcctgctccttgatgagccatcggcgcacttggatcctgtgacttaccagatcattcggcggaccctcaagcaggccttcgcagactgtactgtcatcctgtgtgaacatcgcatcgaagccatgctcgaatgccaacagtttctggtgatcgaagagaacaaggtgaggcaatacgacagcattcagaaactgctgaacgaacgcagcctctttcgccaagccatctccccgtcggaccgggttaagctgttccctcaccgcaactcgtccaaatgcaagtcgaagccccaaattgccgctctgaaggaagaaactgaggaagaggtgcaggataccaggctt

SEQ ID NO: 9745 - DNA, 4440 bp, Artificial Sequence
  derived and/or modified sequence
atgcagagatcgccactagaaaaggcctctgtggtgtccaaattattctttagctggacacgccccatcctacggaaagggtacagacagcgtctggagttgtctgacatctaccagatcccctccgtcgatagcgccgataatctctcggaaaaactcgagcgtgaatgggaccgcgagttggcctccaaaaagaaccccaagctgatcaatgccttgcgcagatgttttttttggagattcatgttttacggcatttttttgtacctaggcgaggtcaccaaggctgttcagcctttgctcctcggacggatcatcgcctcttatgacccagacaacaaggaagagaggtctatagctatctatctgggcatcggcctgtgcctactgtttatcgtgcggactctgctcctgcatccagctatcttcggcctgcaccatattgggatgcagatgcgcattgcaatgttcagccttatttataaaaaaacgctcaaattgagtagccgcgtacttgacaaaatctcaattggccagctcgttagcctgctttccaataacctgaataagtttgacgagggtctggctctcgctcattttgtgtggattgctccccttcaggtcgccctcctgatgggcctgatatgggaactgctgcaggctagcgctttttgcggcctcgggttcctgattgttctggctcttttccaggccggactggggaggatgatgatgaaatatcgtgaccaaagggcggggaaaatctctgagcgcctggtgataacgagcgagatgatcgaaaacattcaaagcgtgaaggcctactgctgggaggaagccatggaaaaaatgattgagaaccttcggcagacagaactgaaacttactcgcaaggctgcctatgttagatactttaattcatcggccttttttttcagcggatttttcgtggtgtttctgtctgtccttccatatgcccttattaagggcattattttacgcaagatctttacgacaatcagtttctgcattgtcctgagaatggccgttacccgacagttcccctgggcagtgcagacctggtacgactcactgggggctattaataagattcaggactttctacagaagcaggagtacaaaacactggagtacaacctgactaccactgaggtggtcatggagaacgtgaccgcattctgggaagagggcttcggcgaactattcgaaaaggcgaagcagaacaacaataatcgtaagacatcgaacggtgatgatagtttattcttctccaacttttcactgcttgggaccccagtgctcaaggacatcaacttcaagattgagcgaggccagttgctggcagtagccgggtccacaggggctgggaagacctcactactgatggtgatcatgggcgagctcgagccatccgagggtaagattaagcacagcggccggattagcttttgcagccaattctcctggattatgccgggaaccataaaggaaaatatcatcttcggggtgtcctatgacgagtaccggtataggagcgtaattaaggcatgccaactggaagaagatatatctaaattcgccgagaaagacaatatagtgctaggcgaggggggtataactttatccggtggtcaaagagctcggatctccctggctagagccgtttataaagatgccgacctttacctgctcgattctccctttggttatctcgatgtactgacagagaaagagatcttcgagtcttgcgtgtgtaagctgatggccaataagacccgtatcctggtgacatcaaagatggagcacctgaagaaagcagacaaaatccttatcctgcacgaaggctcatcgtacttttacggaacattctcggaacttcagaacctgcagcccgatttttccagcaagctgatgggctgcgactccttcgaccaattttcagctgaaaggcgcaactccatcctgactgaaacattgcatagatttagcctggagggagacgcaccagttagctggaccgaaacaaagaaacaatcgtttaagcaaactggcgagtttggcgagaaacgaaagaattccatcctcaatccaatcaacagtatcagaaagttctcgattgttcagaagacacccttacagatgaacgggatagaggaagattcagatgagccactagaacgaaggctttccttggtcccagacagtgaacaaggagaagctatcctgcctaggatcagcgtcatctctacgggaccaaccctacaggctaggcgcagacagtccgtgctcaacctaatgacccatagtgtgaatcagggccaaaacatccataggaaaaccaccgcttccactcgtaaggttagcttggctccccaggcgaatctgaccgaactggatatctacagtaggagattgtcgcaagaaactggattggagatcagtgaggagattaatgaggaggatctgaaagaatgtttttttgatgatatggaaagcattcctgctgtgacaacctggaacacctatctccggtacataacagttcataaaagtctaattttcgtgctgatatggtgcctggtaattttcctggccgaagtggctgcttctctggtcgtcctgtggctcctgggcaacaccccactacaggataaggggaattccacccatagtagaaataattcttatgctgtcatcattacatctacatctagctattatgtcttttacatttacgtgggcgtggctgacacattgctggcaatggggtttttcagggggctccctctagtccacacactgattaccgtctcgaaaattttacaccacaaaatgctgcactccgtgctccaggcccctatgagtacactgaatacactgaaagccggtgggattctgaaccgattctctaaagacatagcaatactggacgatttgttgccgctaaccattttcgattttatacagttattactaatcgtcattggtgcaatcgccgtcgtggcggttttgcagccctacatctttgtcgctactgtaccggtcattgtggcttttataatgctgcgagcttatttcttgcagacctctcaacagcttaagcagcttgagtctgagggcaggtctccgattttcacacacttggtgacctcgctcaaggggctttggaccttacgggccttcggcaggcagccttatttcgaaaccctgttccacaaggcccttaatcttcacacggcgaactggttcctctatttaagtaccctccggtggttccaaatgagaattgagatgatattcgttatcttttttatagccgtgacgttcattagcatccttaccacgggcgaaggtgaaggacgagtcggcataattctgactttagccatgaacataatgtccaccttgcaatgggctgtgaatagcagcatcgacgtggattccttgatgcggtcggtgagtagagtctttaaattcattgatatgccgacagaggggaaacccacaaagtctaccaaaccctataaaaacgggcagctgtcaaaggtgatgatcatcgagaatagtcacgtaaaaaaggatgacatctggccctcaggaggacaaatgaccgtgaaagatctgaccgccaagtataccgagggggggaatgccattctggagaatatctcctttagcattagccctggccagcgggttggtctcctgggccgaaccggatccggcaaatctaccctcctgtctgcctttctgcggctgcttaacacagaaggagaaatccaaatcgatggagtctcgtgggacagcataactcttcaacagtggaggaaggcctttggcgtgatcccccagaaagtcttcatattctcgggaacgttcagaaagaatcttgacccgtacgaacagtggtcagatcaagagatttggaaggtggccgatgaggtggggttgcgcagcgtgatcgagcaattcccaggcaagctggacttcgtcctggtggacggaggctgcgtgctgtcacacgggcataagcagctcatgtgcctggcccgcagtgtgcttagtaaagccaaaatccttctcctcgacgagcctagcgcccacctggaccctgtgacataccagattatccgacgcacccttaaacaggcctttgcagattgcactgtgatactgtgtgaacaccggatcgaggccatgttagaatgtcagcaatttcttgtcattgaagaaaacaaggtgcgacagtatgacagcattcagaaacttctcaatgagaggagcttgtttcgccaggccatcagtccttcggaccgtgtgaaactttttccacatagaaactccagtaaatgcaagtctaagcctcagatcgctgcattgaaagaagagaccgaagaagaggtccaagacacacgttta

SEQ ID NO: 9746 - DNA, 4440 bp, Artificial Sequence
  derived and/or modified sequence
atgcaacgcagccctctggaaaaggcttcggtggtgtccaaactgtttttctcatggactcgcccaatactgcggaaaggctatcgccagagactcgaactgtccgatatctaccaaatcccaagcgtggattcagcggacaacctcagcgaaaagctcgagcgggagtgggatagggagttggcttcgaagaaaaatccgaagctgatcaatgccttgcggcggtgcttcttctggcgtttcatgttttacggaatcttcctgtatctgggggaggtgaccaaggccgttcaacccttgttgttgggccggatcatcgcgtcgtacgacccagataacaaggaagagaggtccatcgccatctatctggggattggactttgtctgctgttcatcgtccgcaccctgttgctccaccccgccatttttgggctgcatcacatcggtatgcaaatgcggatcgcgatgttctccctgatctacaaaaagactctgaagctgtcctcgcgggtgctcgacaaaatctcgattggacaattggtgtccctgctttcgaacaatctcaataagttcgatgagggcctcgctctggcccactttgtctggattgcgccgcttcaggtggcactcttgatgggactgatctgggagctgttgcaggcatctgccttctgcgggctcgggttcctgatcgtcttggcattgttccaggctggcctgggacggatgatgatgaagtaccgcgaccagagagctggtaaaatctccgaaagactcgtcatcactagcgaaatgattgagaacatccagagcgtgaaggcatactgctgggaagaagcaatggaaaagatgatagagaacctcagacaaacggaactgaagctcacccgcaaagccgcttatgtcaggtactttaactcaagcgccttcttcttctcgggttttttcgtggtgttcctgtcggtgctcccgtacgccctgatcaaggggattatccttcgaaagatcttcacgaccatcagcttctgcatcgtgctgcggatggccgtcaccagacagtttccttgggccgtgcagacttggtacgactctctgggagccattaacaaaatccaggacttcctccaaaagcaagaatacaagaccctcgagtacaacctcaccacgactgaggtggtcatggaaaacgtcacggcattctgggaagagggattcggagaactttttgaaaaagccaaacagaacaataacaacaggaaaacctcgaatggagacgattcactgttcttttcgaactttagcctgctcggtactccggtgttgaaagatatcaacttcaaaatcgaacgcggtcaactgcttgcagtcgctggaagcaccggagcaggcaaaacctcgctgcttatggtgatcatgggtgaactcgaaccgtccgaaggaaagattaagcattccggccggatctccttttgctctcaattctcgtggattatgccgggaactatcaaggaaaacattatcttcggggttagctacgacgagtacaggtacagaagcgtcattaaggcctgccagctggaggaggacatctccaagttcgcagaaaaggacaacattgttcttggtgaggggggcatcaccttgagcggaggacagagagcccggatctcactggcgcgggctgtgtacaaggatgcagacctctacctcttggactcgccattcgggtaccttgatgtgttgactgagaaagagatttttgagtcatgtgtctgcaagctcatggctaataagacgcgcatcctggtgacttcgaaaatggagcatcttaagaaggccgacaaaatcctgattctgcatgaaggctcctcctacttctacggtactttttcggaactgcagaatctgcagccggatttctcatcaaaactgatggggtgcgatagcttcgaccagttttcggcggaaagacgcaactcaattcttaccgagactctccaccgcttcagccttgagggagatgcacccgtgtcgtggactgaaaccaaaaagcagtcattcaagcagaccggagagtttggggagaagcgcaagaactcgattctgaatccgatcaattccattcggaagttctccatcgtgcaaaaaacgccgctccagatgaacggcatcgaagaagatagcgatgaaccgctggaacggcggttgtccctcgttccagactccgagcaaggtgaggcaattctgcctcgcatctcggtgatctccactggacctacgctgcaggctcgccgccggcagtccgtcctgaacctgatgactcactcggtcaatcagggacagaacatccaccgaaaaaccactgctagcacccgcaaggtcagcctggcgcctcaagccaatctcactgaactggatatctatagccgccgccttagccaagaaaccgggctcgagatttccgaggaaatcaatgaggaagatctcaaggaatgctttttcgatgacatggagtcaatcccagccgtgactacctggaatacttatctcagatacatcaccgtgcataagtcactcatcttcgtgttgatctggtgcctggtgatcttcctcgctgaggtcgccgccagcctcgtggtcctgtggctcctgggcaacactccgctccaggacaagggtaacagcactcactcgagaaacaattcctacgccgtgattatcacttcgaccagctcatactatgtgttttacatctacgtcggcgtggcggacactttgttggcgatgggattcttccgcggactgccactggtgcacactctcatcactgtgtcgaagatcctgcatcacaaaatgctccactccgttcttcaagcaccgatgtcaactctgaatactctgaaggcgggaggcatcctgaacaggttctcaaaggacatcgcaattctggacgacttgctgccgctcactatattcgacttcatccagcttcttttgattgtgatcggagcgatcgcggtggttgccgtgcttcaaccctacatcttcgtggcaacggtgccggtcatcgtcgcgtttatcatgctccgggcgtacttcctccagacttcgcaacagctgaagcagctggaatcggagggacggtccccaatctttacgcatctggtcacttctctgaagggactgtggacgctgcgggctttcgggcggcagccgtacttcgaaaccctgttccataaggctctgaatctgcacactgccaactggttcctctacctctcgaccctccgctggttccagatgagaattgaaatgatttttgtgatcttcttcatcgctgtcaccttcatctcgatcttgactaccggagaaggagagggtcgcgtgggaatcatacttactctcgccatgaacattatgagcaccctgcagtgggctgtgaactcatccatcgacgtggattcgctgatgaggtccgtctctcgcgtctttaagtttatcgacatgccgactgaaggtaagccaactaagtcaaccaaaccgtacaaaaatggccaactgtccaaagtgatgatcatagagaactcccacgtgaagaaagacgatatctggccgagcggcgggcagatgactgtgaaagatctgactgccaaatacaccgaaggaggcaatgccatcttggaaaacatctcgttcagcatctcaccgggacaaagagtgggactcctggggcggactggctcgggaaagtccacgctgctctcggcattcctgcgactgttgaataccgaaggtgagatccaaatcgatggcgtgtcttgggactcaatcaccttgcaacagtggcggaaggcgtttggcgtgattccacagaaggtgttcatcttctcgggaacttttaggaagaacctggacccctacgaacagtggtctgatcaggagatctggaaggtggcggacgaagtgggcctccgatctgtgatcgaacagtttcctggtaagctcgacttcgtgcttgttgacggtggatgtgtgctgtcgcacggtcacaagcaactgatgtgcctcgccaggtctgttctgagcaaggcaaagatcctcctgctcgacgaaccgtcggctcacctggaccctgtcacgtatcagatcatccgccggaccctgaaacaggcgttcgccgattgcaccgtgatcctgtgcgagcataggatcgaagcgatgctggagtgtcagcagttccttgtcatcgaggagaacaaggtgagacaatacgactcgatccaaaagctgctcaacgagaggtcactgtttagacaggcgatctccccttcggatcgcgtgaaactctttccgcacaggaactcgtcgaagtgtaagagcaaaccacagatcgcagcgctcaaggaagaaactgaggaagaagtgcaggatacccgcttg

SEQ ID NO: 9747 - DNA, 4440 bp, Artificial Sequence
  derived and/or modified sequence
atgcagcgctcgcctttggagaaggcatccgttgtgagcaaactgtttttctcatggacccggccgatcctgcgtaagggatacaggcaacgactggaactcagcgacatttaccaaatcccttcggtcgatagcgcagataacctctccgaaaagctcgaaagagaatgggacagagaactggcatcaaagaagaaccctaaacttatcaacgcacttcgaagatgttttttctggagatttatgttttacggtattttcctgtacctgggagaagtgaccaaggctgtccaacctctgcttctcggaaggataattgcctcctacgatcctgataacaaggaagaacgcagcattgcaatttacctgggaatcggactgtgtctgttgtttatcgtgcgcactcttcttctccacccagccatattcggactgcaccatatcgggatgcaaatgcgaattgctatgttttccctgatatacaagaaaactcttaagctcagctccagagtcctcgataagatatcaataggtcaactggtgtcactgctctcgaataatctgaacaagttcgatgagggtcttgccctggctcattttgtctggattgcaccactccaagtcgcacttctgatgggacttatttgggaactgcttcaggcctctgccttctgtgggcttgggtttctcatcgtgctggcactttttcaagccggactcgggaggatgatgatgaagtaccgggatcaacgcgcagggaagatctcggaacgactggtgattacttcggagatgatcgagaatattcagagcgtgaaggcctattgctgggaagaagctatggagaagatgatcgaaaatcttcgtcagaccgagctgaagctcaccagaaaagcagcatacgtccgctactttaacagctccgcgttcttctttagtggattctttgtggtgtttctttcagtgctcccgtatgctctgattaagggcattattctgcggaagatcttcactaccatcagcttctgcattgtcctcagaatggcagtgaccagacagtttccctgggctgtgcagacctggtacgactcgctgggcgcaatcaataagatccaggacttccttcagaagcaagagtacaagaccctggaatacaacctgaccaccactgaagtggtcatggaaaacgtgacggcattttgggaagaaggattcggggaactttttgagaaagcaaaacagaacaataacaacagaaagacctccaatggtgatgattcactgttcttctcgaacttttcccttcttggtactccagtgctcaaggacatcaatttcaagattgaacggggacaactcctcgcggtggcagggtcaaccggagccggtaaaacttccctgctgatggtcatcatgggtgaacttgaaccctccgagggcaagatcaaacattccggccgcatttcgttttgttcacagttctcgtggatcatgcccggcaccattaaagagaatatcatattcggagtctcgtatgacgaatatcggtacagatcggtcatcaaggcctgtcagcttgaagaagatatttcgaagttcgccgaaaaggacaatatagtgctgggtgagggagggattactctttctggaggacagagggcccgcatatcgctggcaagagcagtgtacaaagacgcggacctgtatctgctggattccccatttgggtaccttgatgtgcttaccgaaaaggagatttttgaatcctgcgtgtgtaagctgatggcgaataagactcgtattttggtgacctccaaaatggaacatcttaagaaggccgataagatacttatcttgcacgaaggttcgagctacttctacggaaccttttcagaacttcaaaatctgcagcctgatttctcatctaagctgatgggatgcgattcctttgatcagttctcggcagagaggagaaactcgatacttaccgaaaccttgcaccgcttctcgcttgaaggtgacgcacccgtgtcttggactgaaactaagaaacagtcttttaagcagaccggagagttcggagaaaaacggaagaattccatcctgaacccaattaactcgattcgcaagtttagcatagtccaaaagaccccactgcagatgaatggaatcgaagaggatagcgatgaacctcttgaaaggcgactttcactggtgccggactccgaacagggagaagcaattcttcctcgcattagcgtgatttcgactggtcctactctgcaggcacgccgcaggcagtcggtccttaaccttatgacgcatagcgtgaaccaaggacagaatattcatagaaagaccaccgcatcaacccggaaagtgtcgcttgcacctcaggcaaacttgaccgaactggatatctactcacggagactttcccaagagactggtctggagatttccgaagagatcaacgaagaagatctgaaagagtgcttctttgacgacatggaatccatccctgcggtcactacctggaacacctacctgcggtacatcaccgtgcacaaaagccttatctttgtgctcatttggtgtctggtgatttttcttgcagaggtggcggcctctcttgtcgtgctgtggctcctgggcaacactcccctccaggataagggtaactccactcattctcgtaacaattcgtacgcagtgatcataacctcgacctccagttactacgtgttctatatctacgtcggagtggcagataccctgctggcgatgggtttctttcgtggacttcccctcgtgcatacccttatcaccgtgtcgaagatcctccaccataagatgctgcatagcgtgttgcaggcccccatgagcaccttgaacaccctcaaggcaggtggcatcttgaaccggttttcgaaggatatagcaattcttgatgatctgcttccactgactattttcgatttcatccagcttctccttattgtgattggagccatcgcagtggtggcagtgcttcagccttacatctttgtggcaacggtgcctgtgattgtggcgtttatcatgctcagagcgtacttcctccaaacctcgcagcagctgaaacaactggagtctgagggccgaagccctatctttacgcatctggtgacctccttgaaggggctgtggactcttcgcgcctttggtagacagccttactttgaaaccctttttcataaggcactcaaccttcatactgcaaactggtttctgtacctttccacgctgcgctggtttcaaatgcgcattgaaatgattttcgtgattttcttcattgcagtgacgttcattagcatccttactaccggtgagggtgaaggcagagtcggcataatcttgactctggcaatgaatatcatgtcaacgcttcaatgggcagtgaacagctctatcgatgtcgactcactgatgaggtccgtgagccgggtgttcaaattcatcgacatgcccaccgaggggaaacctaccaagagcactaagccttacaaaaacggacagttgagcaaagtgatgataatcgagaattcccacgtgaagaaggatgacatttggccatcaggaggacaaatgactgtgaaggatcttaccgcaaagtacactgaaggcgggaacgcgatactggaaaacatctcattttcgattagccccggacaacgcgtgggactgctcggtagaaccggcagcggcaagtcaactcttctctcagcattcttgagactgcttaatactgaaggggagatccagattgatggagtctcctgggactcgatcacgctgcaacagtggagaaaggcatttggagtgataccccagaaagtgtttatcttctcgggcacttttagaaagaacttggacccttacgaacagtggtcggaccaggaaatttggaaggtggcagatgaagtgggactcagatcagtgatcgaacaatttccaggtaaactggactttgtgcttgtggatggaggatgcgtcctgtcacatggccacaagcaactcatgtgtttggctcgatcggtgctctccaaggctaagatcctgcttcttgatgaaccttcagcacacctggatcctgttacctatcagattatcagacgcactttgaagcaagcattcgccgactgcaccgtgatcctctgtgaacaccgcatcgaggctatgctggaatgccaacagtttctggtgattgaggagaataaggtgagacaatacgactcgatccaaaagctcctcaacgagagaagtttgtttaggcaggccatctccccgagcgatcgcgtcaagctctttccacatagaaatagcagcaagtgcaagtcgaagcctcaaattgcagccctcaaagaagagacggaagaagaggtccaagacactagactg

SEQ ID NO: 9748 - DNA, 4440 bp, Artificial Sequence
  derived and/or modified sequence
atgcagcgctcccctcttgagaaagcttcagtagtttccaagctgttcttcagctggactagaccaatcctcagaaaaggatataggcagagactggagctctcagacatctaccagatccctagcgtggatagcgcagacaacctgtcagaaaaactggaacgcgagtgggatcgcgagctggccagcaaaaagaacccgaagctgattaacgcactgagacggtgctttttctggaggtttatgttctacggaatcttcctatacttgggggaagtaacgaaagctgtacagccactcctgcttgggcggattatcgcctcgtacgatcctgacaataaagaggagcgatcaattgcaatctacctagggatcggactgtgcctgctgtttatcgttcgtaccctcctgctgcaccccgcaatttttggcctgcatcatattgggatgcaaatgagaatcgccatgttctcattgatttacaagaagacattaaaactcagctcacgggtgctcgataaaattagcatcgggcagctggtaagcttgcttagcaataatctcaacaagttcgatgaagggctggctctcgcacattttgtgtggatcgccccactgcaagtagctctcctgatggggctcatctgggaactccttcaggcatcagctttctgtggccttggattcctcattgtgttggccctgtttcaagctgggttgggtaggatgatgatgaagtatcgcgaccagcgtgctggaaagatcagtgagcgcctggtcattaccagcgagatgatagaaaacatccagtccgtaaaagcttattgctgggaggaggcgatggaaaaaatgatcgagaacttacggcagacagaactcaaactgaccaggaaagccgcgtacgtgagatatttcaatagtagcgcattcttcttttccggcttcttcgtcgttttcttgagtgtgctcccctacgcactcataaaaggtatcattctccgaaaaatttttacaaccatatccttctgtatagtgctgagaatggcagtgacgcgccagtttccctgggccgtgcagacttggtacgacagcctgggcgccatcaacaaaatccaggactttcttcaaaaacaagagtataaaacactggaatacaatttaacaaccaccgaagtcgttatggagaacgtgacggccttctgggaggagggtttcggggaattgtttgagaaagctaagcagaataataataacagaaaaacctctaatggcgacgattccttgttcttttcgaatttttctctgctggggacgcctgtgctcaaggatatcaacttcaagatcgaaaggggtcagctcctagcagtggcagggagcacaggcgctggtaagacctcactgctgatggtgatcatgggggaactagagccttccgagggcaagataaaacattcgggacgcatcagcttctgtagtcaattcagctggatcatgcccggaaccatcaaagaaaacatcatcttcggagtgtcttacgacgaataccgctaccggtctgtgattaaggcgtgccagctagaagaggatatttcaaagttcgctgagaaggataatattgtgttgggcgaaggcgggatcaccttgtctggcgggcaacgcgctagaatttccctcgccagggcagtctataaggatgctgacctctacctcctggactccccttttggctacttggacgttcttaccgaaaaggaaatattcgagagctgcgtgtgtaagctcatggccaacaagacacggatattggtgacatccaaaatggagcacctcaagaaggcggacaagattctgattctgcacgaaggatcctcatatttttacgggacattcagcgagctacagaacctccagcccgacttcagtagcaagctcatggggtgtgactcattcgatcagttctccgccgaaaggagaaactccattttgacagaaacattgcatcgcttttccctggagggggacgctccagtttcctggacagagactaaaaaacagtcatttaaacagactggagagttcggcgaaaaacgcaaaaactctatactcaacccaatcaattctatcaggaagtttagtatcgtgcagaagacccctctccagatgaatggaatagaggaagactcggatgagccacttgaacgccgtctgtccttggttcctgattccgagcagggcgaggccatcctcccccgcattagcgtaatatctaccgggcccactttgcaagcccggcgccgccaaagtgtcttgaatctgatgacacattctgtgaatcaaggccagaatattcacagaaaaacaaccgcctccacccgcaaagtcagcctggctccccaagcaaacctcacggagttagacatctattcacggcgattgtctcaggagactggtctcgagatatcagaggaaatcaatgaggaggatctgaaagagtgctttttcgacgacatggagtcaattcccgcagtgacgacgtggaatacatatttacgatacatcaccgtccataagtccctcattttcgtgctgatctggtgtctggtgatatttttggccgaagtagcagcttctcttgtagtgctctggttattagggaacacgcctttgcaggacaagggaaatagcacccactcccgtaacaactcctatgccgtcataattacctccacctctagctattatgtcttctacatatatgtcggcgtagctgatactctcctggcaatgggctttttcagaggacttcctttggtacataccttgattacagttagcaaaattttacatcataaaatgctgcatagcgttctgcaggcccccatgtccaccttgaatacactgaaggcgggcgggatcctcaacagatttagcaaggacatcgctattctggatgatctgctcccgctcactatcttcgacttcattcagttgctgctgatcgttattggcgcaatcgctgtggtggcagtcttgcagccatacatttttgtcgctaccgtgcccgtaattgtggccttcatcatgctgcgggcatatttccttcaaacttcccagcagctgaagcaactcgaaagtgaggggcggtcgccgatatttactcacttagtcacttcattgaagggcctttggacccttcgcgcattcggccgacagccctattttgagaccctgtttcataaggccctcaacttgcatacagcgaattggtttctgtacctcagcacgttacggtggtttcaaatgcgaattgagatgattttcgtaattttcttcatcgccgtgaccttcataagtatactgacaacaggcgagggggagggtagagtggggataattttaactctggccatgaacataatgtccacactgcagtgggcagtcaattcttcaatcgatgttgattccctgatgcgttccgttagcagagtgttcaaattcatcgacatgcccacagaggggaagccgacaaagagcactaaaccctacaagaacggccagctgtccaaggtgatgatcatcgaaaactcccatgtgaagaaagacgacatttggcccagcggcggacagatgacagtcaaggatctcaccgctaagtacacggaaggaggtaatgccattctggagaacatatcattttccataagcccaggtcagagggtcgggctgctcgggaggaccggtagtggtaagagcaccctcctaagcgcttttctgaggctccttaacactgaaggcgaaatccaaatcgacggcgtttcctgggactctatcacccttcaacaatggcgaaaggcgttcggggtgattcctcagaaggtgtttatcttcagcggcacctttcgtaagaacctcgatccatatgagcaatggagcgatcaggaaatttggaaggtagctgatgaagtggggctcaggagcgtaatagagcagttccccggcaagctggacttcgttctggtcgatggcgggtgcgtattgtcacacggacataagcagctgatgtgtctggcccgatccgtgttaagcaaggctaaaatcttgcttctcgatgaacccagtgcccatctggacccagttacttatcagatcatccgtagaaccctaaagcaggcttttgccgattgtaccgttattttatgcgaacatcgaattgaggctatgctcgaatgccaacagttcctcgtcatcgaggaaaataaagtgcggcagtatgacagcatccaaaaactccttaacgagaggtctctgttcagacaggccatatccccctctgaccgggttaagctgttcccccaccgcaacagctctaagtgcaagtcaaaaccccagattgctgccctcaaggaggagaccgaggaagaggttcaggacacccgcttg

SEQ ID NO: 9749 - DNA, 4440 bp, Artificial Sequence
  derived and/or modified sequence
atgcagcgcagccccctggagaaggccagcgtggtgagcaagctgttcttcagctggacccgccccatcctgcgcaagggctaccgccagcgcctggagctgagcgacatctaccagatccccagcgtggacagcgccgacaacctgagcgagaagctggagcgcgagtgggaccgcgagctggccagcaagaagaaccccaagctgatcaacgccctgcgccgctgcttcttctggcgcttcatgttctacggcatcttcctgtacctgggcgaggtgaccaaggccgtgcagcccctgctgctgggccgcatcatcgccagctacgaccccgacaacaaggaggagcgcagcatcgccatctacctgggcatcggcctgtgcctgctgttcatcgtgcgcaccctgctgctgcaccccgccatcttcggcctgcaccacatcggcatgcagatgcgcatcgccatgttcagcctgatctacaagaagaccctgaagctgagcagccgcgtgctggacaagatcagcatcggccagctggtgagcctgctgagcaacaacctgaacaagttcgacgagggcctggccctggcccacttcgtgtggatcgcccccctgcaggtggccctgctgatgggcctgatctgggagctgctgcaggccagcgccttctgcggcctgggcttcctgatcgtgctggccctgttccaggccggcctgggccgcatgatgatgaagtaccgcgaccagcgcgccggcaagatcagcgagcgcctggtgatcaccagcgagatgatcgagaacatccagagcgtgaaggcctactgctgggaggaggccatggagaagatgatcgagaacctgcgccagaccgagctgaagctgacccgcaaggccgcctacgtgcgctacttcaacagcagcgccttcttcttcagcggcttcttcgtggtgttcctgagcgtgctgccctacgccctgatcaagggcatcatcctgcgcaagatcttcaccaccatcagcttctgcatcgtgctgcgcatggccgtgacccgccagttcccctgggccgtgcagacctggtacgacagcctgggcgccatcaacaagatccaggacttcctgcagaagcaggagtacaagaccctggagtacaacctgaccaccaccgaggtggtgatggagaacgtgaccgccttctgggaggagggcttcggcgagctgttcgagaaggccaagcagaacaacaacaaccgcaagaccagcaacggcgacgacagcctgttcttcagcaacttcagcctgctgggcacccccgtgctgaaggacatcaacttcaagatcgagcgcggccagctgctggccgtggccggcagcaccggcgccggcaagaccagcctgctgatggtgatcatgggcgagctggagcccagcgagggcaagatcaagcacagcggccgcatcagcttctgcagccagttcagctggatcatgcccggcaccatcaaggagaacatcatcttcggcgtgagctacgacgagtaccgctaccgcagcgtgatcaaggcctgccagctggaggaggacatcagcaagttcgccgagaaggacaacatcgtgctgggcgagggcggcatcaccctgagcggcggccagcgcgcccgcatcagcctggcccgcgccgtgtacaaggacgccgacctgtacctgctggacagccccttcggctacctggacgtgctgaccgagaaggagatcttcgagagctgcgtgtgcaagctgatggccaacaagacccgcatcctggtgaccagcaagatggagcacctgaagaaggccgacaagatcctgatcctgcacgagggcagcagctacttctacggcaccttcagcgagctgcagaacctgcagcccgacttcagcagcaagctgatgggctgcgacagcttcgaccagttcagcgccgagcgccgcaacagcatcctgaccgagaccctgcaccgcttcagcctggagggcgacgcccccgtgagctggaccgagaccaagaagcagagcttcaagcagaccggcgagttcggcgagaagcgcaagaacagcatcctgaaccccatcaacagcatccgcaagttcagcatcgtgcagaagacccccctgcagatgaacggcatcgaggaggacagcgacgagcccctggagcgccgcctgagcctggtgcccgacagcgagcagggcgaggccatcctgccccgcatcagcgtgatcagcaccggccccaccctgcaggcccgccgccgccagagcgtgctgaacctgatgacccacagcgtgaaccagggccagaacatccaccgcaagaccaccgccagcacccgcaaggtgagcctggccccccaggccaacctgaccgagctggacatctacagccgccgcctgagccaggagaccggcctggagatcagcgaggagatcaacgaggaggacctgaaggagtgcttcttcgacgacatggagagcatccccgccgtgaccacctggaacacctacctgcgctacatcaccgtgcacaagagcctgatcttcgtgctgatctggtgcctggtgatcttcctggccgaggtggccgccagcctggtggtgctgtggctgctgggcaacacccccctgcaggacaagggcaacagcacccacagccgcaacaacagctacgccgtgatcatcaccagcaccagcagctactacgtgttctacatctacgtgggcgtggccgacaccctgctggccatgggcttcttccgcggcctgcccctggtgcacaccctgatcaccgtgagcaagatcctgcaccacaagatgctgcacagcgtgctgcaggcccccatgagcaccctgaacaccctgaaggccggcggcatcctgaaccgcttcagcaaggacatcgccatcctggacgacctgctgcccctgaccatcttcgacttcatccagctgctgctgatcgtgatcggcgccatcgccgtggtggccgtgctgcagccctacatcttcgtggccaccgtgcccgtgatcgtggccttcatcatgctgcgcgcctacttcctgcagaccagccagcagctgaagcagctggagagcgagggccgcagccccatcttcacccacctggtgaccagcctgaagggcctgtggaccctgcgcgccttcggccgccagccctacttcgagaccctgttccacaaggccctgaacctgcacaccgccaactggttcctgtacctgagcaccctgcgctggttccagatgcgcatcgagatgatcttcgtgatcttcttcatcgccgtgaccttcatcagcatcctgaccaccggcgagggcgagggccgcgtgggcatcatcctgaccctggccatgaacatcatgagcaccctgcagtgggccgtgaacagcagcatcgacgtggacagcctgatgcgcagcgtgagccgcgtgttcaagttcatcgacatgcccaccgagggcaagcccaccaagagcaccaagccctacaagaacggccagctgagcaaggtgatgatcatcgagaacagccacgtgaagaaggacgacatctggcccagcggcggccagatgaccgtgaaggacctgaccgccaagtacaccgagggcggcaacgccatcctggagaacatcagcttcagcatcagccccggccagcgcgtgggcctgctgggccgcaccggcagcggcaagagcaccctgctgagcgccttcctgcgcctgctgaacaccgagggcgagatccagatcgacggcgtgagctgggacagcatcaccctgcagcagtggcgcaaggccttcggcgtgatcccccagaaggtgttcatcttcagcggcaccttccgcaagaacctggacccctacgagcagtggagcgaccaggagatctggaaggtggccgacgaggtgggcctgcgcagcgtgatcgagcagttccccggcaagctggacttcgtgctggtggacggcggctgcgtgctgagccacggccacaagcagctgatgtgcctggcccgcagcgtgctgagcaaggccaagatcctgctgctggacgagcccagcgcccacctggaccccgtgacctaccagatcatccgccgcaccctgaagcaggccttcgccgactgcaccgtgatcctgtgcgagcaccgcatcgaggccatgctggagtgccagcagttcctggtgatcgaggagaacaaggtgcgccagtacgacagcatccagaagctgctgaacgagcgcagcctgttccgccaggccatcagccccagcgaccgcgtgaagctgttcccccaccgcaacagcagcaagtgcaagagcaagccccagatcgccgccctgaaggaggagaccgaggaggaggtgcaggacacccgcctg

SEQ ID NO: 9750 - DNA, 4314 bp, Artificial Sequence
  derived and/or modified sequence
atgcagcgcagccccctggagaaggccagcgtggtgagcaagctgttcttcagctggacccgccccatcctgcgcaagggctaccgccagcgcctggagctgagcgacatctaccagatccccagcgtggacagcgccgacaacctgagcgagaagctggagcgcgagtgggaccgcgagctggccagcaagaagaaccccaagctgatcaacgccctgcgccgctgcttcttctggcgcttcatgttctacggcatcttcctgtacctgggcgaggtgaccaaggccgtgcagcccctgctgctgggccgcatcatcgccagctacgaccccgacaacaaggaggagcgcagcatcgccatctacctgggcatcggcctgtgcctgctgttcatcgtgcgcaccctgctgctgcaccccgccatcttcggcctgcaccacatcggcatgcagatgcgcatcgccatgttcagcctgatctacaagaagggcctggccctggcccacttcgtgtggatcgcccccctgcaggtggccctgctgatgggcctgatctgggagctgctgcaggccagcgccttctgcggcctgggcttcctgatcgtgctggccctgttccaggccggcctgggccgcatgatgatgaagtaccgcgaccagcgcgccggcaagatcagcgagcgcctggtgatcaccagcgagatgatcgagaacatccagagcgtgaaggcctactgctgggaggaggccatggagaagatgatcgagaacctgcgccagaccgagctgaagctgacccgcaaggccgcctacgtgcgctacttcaacagcagcgccttcttcttcagcggcttcttcgtggtgttcctgagcgtgctgccctacgccctgatcaagggcatcatcctgcgcaagatcttcaccaccatcagcttctgcatcgtgctgcgcatggccgtgacccgccagttcccctgggccgtgcagacctggtacgacagcctgggcgccatcaacaagatccaggacttcctgcagaagcaggagtacaagaccctggagtacaacctgaccaccaccgaggtggtgatggagaacgtgaccgccttctgggaggagggcttcggcgagctgttcgagaaggccaagcagaacaacaacaaccgcaagaccagcaacggcgacgacagcctgttcttcagcaacttcagcctgctgggcacccccgtgctgaaggacatcaacttcaagatcgagcgcggccagctgctggccgtggccggcagcaccggcgccggcaagaccagcctgctgatggtgatcatgggcgagctggagcccagcgagggcaagatcaagcacagcggccgcatcagcttctgcagccagttcagctggatcatgcccggcaccatcaaggagaacatcatcttcggcgtgagctacgacgagtaccgctaccgcagcgtgatcaaggcctgccagctggaggaggacatcagcaagttcgccgagaaggacaacatcgtgctgggcgagggcggcatcaccctgagcggcggccagcgcgcccgcatcagcctggcccgcgccgtgtacaaggacgccgacctgtacctgctggacagccccttcggctacctggacgtgctgaccgagaaggagatcttcgagagctgcgtgtgcaagctgatggccaacaagacccgcatcctggtgaccagcaagatggagcacctgaagaaggccgacaagatcctgatcctgcacgagggcagcagctacttctacggcaccttcagcgagctgcagaacctgcagcccgacttcagcagcaagctgatgggctgcgacagcttcgaccagttcagcgccgagcgccgcaacagcatcctgaccgagaccctgcaccgcttcagcctggagggcgacgcccccgtgagctggaccgagaccaagaagcagagcttcaagcagaccggcgagttcggcgagaagcgcaagaacagcatcctgaaccccatcaacagcatccgcaagttcagcatcgtgcagaagacccccctgcagatgaacggcatcgaggaggacagcgacgagcccctggagcgccgcctgagcctggtgcccgacagcgagcagggcgaggccatcctgccccgcatcagcgtgatcagcaccggccccaccctgcaggcccgccgccgccagagcgtgctgaacctgatgacccacagcgtgaaccagggccagaacatccaccgcaagaccaccgccagcacccgcaaggtgagcctggccccccaggccaacctgaccgagctggacatctacagccgccgcctgagccaggagaccggcctggagatcagcgaggagatcaacgaggaggacctgaaggagtgcttcttcgacgacatggagagcatccccgccgtgaccacctggaacacctacctgcgctacatcaccgtgcacaagagcctgatcttcgtgctgatctggtgcctggtgatcttcctggccgaggtggccgccagcctggtggtgctgtggctgctgggcaacacccccctgcaggacaagggcaacagcacccacagccgcaacaacagctacgccgtgatcatcaccagcaccagcagctactacgtgttctacatctacgtgggcgtggccgacaccctgctggccatgggcttcttccgcggcctgcccctggtgcacaccctgatcaccgtgagcaagatcctgcaccacaagatgctgcacagcgtgctgcaggcccccatgagcaccctgaacaccctgaaggccggcggcatcctgaaccgcttcagcaaggacatcgccatcctggacgacctgctgcccctgaccatcttcgacttcatccagctgctgctgatcgtgatcggcgccatcgccgtggtggccgtgctgcagccctacatcttcgtggccaccgtgcccgtgatcgtggccttcatcatgctgcgcgcctacttcctgcagaccagccagcagctgaagcagctggagagcgagggccgcagccccatcttcacccacctggtgaccagcctgaagggcctgtggaccctgcgcgccttcggccgccagccctacttcgagaccctgttccacaaggccctgaacctgcacaccgccaactggttcctgtacctgagcaccctgcgctggttccagatgcgcatcgagatgatcttcgtgatcttcttcatcgccgtgaccttcatcagcatcctgaccaccggcgagggcgagggccgcgtgggcatcatcctgaccctggccatgaacatcatgagcaccctgcagtgggccgtgaacagcagcatcgacgtggacagcctgatgcgcagcgtgagccgcgtgttcaagttcatcgacatgcccaccgagggcaagcccaccaagagcaccaagccctacaagaacggccagctgagcaaggtgatgatcatcgagaacagccacgtgaagaaggacgacatctggcccagcggcggccagatgaccgtgaaggacctgaccgccaagtacaccgagggcggcaacgccatcctggagaacatcagcttcagcatcagccccggccagcgcgtgggcctgctgggccgcaccggcagcggcaagagcaccctgctgagcgccttcctgcgcctgctgaacaccgagggcgagatccagatcgacggcgtgagctgggacagcatcaccctgcagcagtggcgcaaggccttcggcgtgatcccccagaaggtgttcatcttcagcggcaccttccgcaagaacctggacccctacgagcagtggagcgaccaggagatctggaaggtggccgacgaggtgggcctgcgcagcgtgatcgagcagttccccggcaagctggacttcgtgctggtggacggcggctgcgtgctgagccacggccacaagcagctgatgtgcctggcccgcagcgtgctgagcaaggccaagatcctgctgctggacgagcccagcgcccacctggaccccgtgacctaccagatcatccgccgcaccctgaagcaggccttcgccgactgcaccgtgatcctgtgcgagcaccgcatcgaggccatgctggagtgccagcagttcctggtgatcgaggagaacaaggtgcgccagtacgacagcatccagaagctgctgaacgagcgcagcctgttccgccaggccatcagccccagcgaccgcgtgaagctgttcccccaccgcaacagcagcaagtgcaagagcaagccccagatcgccgccctgaag

SEQ ID NO: 9751 - DNA, 4257 bp, Artificial Sequence
  derived and/or modified sequence
atgcagcgcagccccctggagaaggccagcgtggtgagcaagctgttcttcagctggacccgccccatcctgcgcaagggctaccgccagcgcctggagctgagcgacatctaccagatccccagcgtggacagcgccgacaacctgagcgagaagctggagcgcgagtgggaccgcgagctggccagcaagaagaaccccaagctgatcaacgccctgcgccgctgcttcttctggcgcttcatgttctacggcatcttcctgtacctgggcgaggtgaccaaggccgtgcagcccctgctgctgggccgcatcatcgccagctacgaccccgacaacaaggaggagcgcagcatcgccatctacctgggcatcggcctgtgcctgctgttcatcgtgcgcaccctgctgctgcaccccgccatcttcggcctgcaccacatcggcatgcagatgcgcatcgccatgttcagcctgatctacaagaagaccctgaagctgagcagccgcgtgctggacaagatcagcatcggccagctggtgagcctgctgagcaacaacctgaacaagttcgacgagggcctggccctggcccacttcgtgtggatcgcccccctgcaggtggccctgctgatgggcctgatctgggagctgctgcaggccagcgccttctgcggcctgggcttcctgatcgtgctggccctgttccaggccggcctgggccgcatgatgatgaagtaccgcgaccagcgcgccggcaagatcagcgagcgcctggtgatcaccagcgagatgatcgagaacatccagagcgtgaaggcctactgctgggaggaggccatggagaagatgatcgagaacctgcgccagaccgagctgaagctgacccgcaaggccgcctacgtgcgctacttcaacagcagcgccttcttcttcagcggcttcttcgtggtgttcctgagcgtgctgccctacgccctgatcaagggcatcatcctgcgcaagatcttcaccaccatcagcttctgcatcgtgctgcgcatggccgtgacccgccagttcccctgggccgtgcagacctggtacgacagcctgggcgccatcaacaagatccaggacttcctgcagaagcaggagtacaagaccctggagtacaacctgaccaccaccgaggtggtgatggagaacgtgaccgccttctgggaggagaccagcctgctgatggtgatcatgggcgagctggagcccagcgagggcaagatcaagcacagcggccgcatcagcttctgcagccagttcagctggatcatgcccggcaccatcaaggagaacatcatcttcggcgtgagctacgacgagtaccgctaccgcagcgtgatcaaggcctgccagctggaggaggacatcagcaagttcgccgagaaggacaacatcgtgctgggcgagggcggcatcaccctgagcggcggccagcgcgcccgcatcagcctggcccgcgccgtgtacaaggacgccgacctgtacctgctggacagccccttcggctacctggacgtgctgaccgagaaggagatcttcgagagctgcgtgtgcaagctgatggccaacaagacccgcatcctggtgaccagcaagatggagcacctgaagaaggccgacaagatcctgatcctgcacgagggcagcagctacttctacggcaccttcagcgagctgcagaacctgcagcccgacttcagcagcaagctgatgggctgcgacagcttcgaccagttcagcgccgagcgccgcaacagcatcctgaccgagaccctgcaccgcttcagcctggagggcgacgcccccgtgagctggaccgagaccaagaagcagagcttcaagcagaccggcgagttcggcgagaagcgcaagaacagcatcctgaaccccatcaacagcatccgcaagttcagcatcgtgcagaagacccccctgcagatgaacggcatcgaggaggacagcgacgagcccctggagcgccgcctgagcctggtgcccgacagcgagcagggcgaggccatcctgccccgcatcagcgtgatcagcaccggccccaccctgcaggcccgccgccgccagagcgtgctgaacctgatgacccacagcgtgaaccagggccagaacatccaccgcaagaccaccgccagcacccgcaaggtgagcctggccccccaggccaacctgaccgagctggacatctacagccgccgcctgagccaggagaccggcctggagatcagcgaggagatcaacgaggaggacctgaaggagtgcttcttcgacgacatggagagcatccccgccgtgaccacctggaacacctacctgcgctacatcaccgtgcacaagagcctgatcttcgtgctgatctggtgcctggtgatcttcctggccgaggtggccgccagcctggtggtgctgtggctgctgggcaacacccccctgcaggacaagggcaacagcacccacagccgcaacaacagctacgccgtgatcatcaccagcaccagcagctactacgtgttctacatctacgtgggcgtggccgacaccctgctggccatgggcttcttccgcggcctgcccctggtgcacaccctgatcaccgtgagcaagatcctgcaccacaagatgctgcacagcgtgctgcaggcccccatgagcaccctgaacaccctgaaggccggcggcatcctgaaccgcttcagcaaggacatcgccatcctggacgacctgctgcccctgaccatcttcgacttcatccagctgctgctgatcgtgatcggcgccatcgccgtggtggccgtgctgcagccctacatcttcgtggccaccgtgcccgtgatcgtggccttcatcatgctgcgcgcctacttcctgcagaccagccagcagctgaagcagctggagagcgagggccgcagccccatcttcacccacctggtgaccagcctgaagggcctgtggaccctgcgcgccttcggccgccagccctacttcgagaccctgttccacaaggccctgaacctgcacaccgccaactggttcctgtacctgagcaccctgcgctggttccagatgcgcatcgagatgatcttcgtgatcttcttcatcgccgtgaccttcatcagcatcctgaccaccggcgagggcgagggccgcgtgggcatcatcctgaccctggccatgaacatcatgagcaccctgcagtgggccgtgaacagcagcatcgacgtggacagcctgatgcgcagcgtgagccgcgtgttcaagttcatcgacatgcccaccgagggcaagcccaccaagagcaccaagccctacaagaacggccagctgagcaaggtgatgatcatcgagaacagccacgtgaagaaggacgacatctggcccagcggcggccagatgaccgtgaaggacctgaccgccaagtacaccgagggcggcaacgccatcctggagaacatcagcttcagcatcagccccggccagcgcgtgggcctgctgggccgcaccggcagcggcaagagcaccctgctgagcgccttcctgcgcctgctgaacaccgagggcgagatccagatcgacggcgtgagctgggacagcatcaccctgcagcagtggcgcaaggccttcggcgtgatcccccagaaggtgttcatcttcagcggcaccttccgcaagaacctggacccctacgagcagtggagcgaccaggagatctggaaggtggccgacgaggtgggcctgcgcagcgtgatcgagcagttccccggcaagctggacttcgtgctggtggacggcggctgcgtgctgagccacggccacaagcagctgatgtgcctggcccgcagcgtgctgagcaaggccaagatcctgctgctggacgagcccagcgcccacctggaccccgtgacctaccagatcatccgccgcaccctgaagcaggccttcgccgactgcaccgtgatcctgtgcgagcaccgcatcgaggccatgctggagtgccagcagttcctggtgatcgaggagaacaaggtgcgccagtacgacagcatccagaagctgctgaacgagcgcagcctgttccgccaggccatcagccccagcgaccgcgtgaagctgttcccccaccgcaacagcagcaagtgcaagagcaagccccagatcgccgccctgaaggaggagaccgaggaggaggtgcaggacacccgcctg

SEQ ID NO: 9752 - DNA, 4586 bp, Artificial Sequence
  derived and/or modified sequence
gggaaataagagagaaaagaagagtaagaagaaatataagagccaccatgcagaggtcaccgctcgagaaagcgtcagtggtgtcgaaactcttcttctcatggacgcggcctatcttgcggaaagggtaccgacagcggcttgagctcagcgatatctaccaaatccctagcgtggactcggcggataatctgagcgagaagctcgagagagaatgggaccgggagttggcttccaaaaagaaccctaagctcattaacgcgctccgccggtgcttcttctggcggtttatgttctacgggatttttctctatctcggagaagtcactaaagccgtccagccgctccttttgggacggatcattgcgtcgtacgatcctgataacaaagaggaacgctcgatcgccatctacctcgggatcgggttgtgccttctgtttatcgtaagaacgcttttgttgcaccccgccattttcgggctgcatcacatcggaatgcagatgcgaatcgcgatgttctcccttatctacaagaagacccttaaactgtcgtccagagtgctcgataaaatctcaatcggccaactcgtgtcgctcttgtccaataaccttaacaagttcgatgagggccttgcgctggcacactttgtgtggatcgcaccactccaagtggcgttgctgatgggcctgatttgggaactgttgcaagcgtcagcgttctgtggtcttggattccttattgtccttgcattgtttcaagcggggctgggacgcatgatgatgaaataccgcgaccaacgggcagggaagatctccgaaagacttgtgatcacgtcggagatgatcgagaatattcagtccgtgaaggcatattgttgggaagaggccatggagaagatgattgaaaacctcaggcagacagaactcaaactcacaagaaaagcggcatatgtccgctacttcaactcgtccgcattctttttcagcggcttcttcgtagtgtttctttcagtacttccttatgcattgatcaaaggaattattctccggaagatcttcaccactatctcgttctgcatcgtgcttcgcatggccgtaacccgacagttcccctgggcagtacaaacgtggtacgatagcttgggggctatcaataagatccaggatttcttgcaaaagcaagagtataaaacgttggaatataacttgacaactacggaagtggtcatggagaatgtcacagcattttgggaagaaggttttggagagctgtttgagaaagccaaacagaacaacaacaaccgcaaaacctcgaatggtgatgactcgttgttcttctcgaacttctcgttgctcggaacacccgtattgaaagacatcaacttcaaaatcgagagaggacagctgctggcggtcgcggggagcacgggggcgggaaaaaccagcctgttgatggtgattatgggggagctcgagcccagcgaagggaagattaaacatagcggtcgcatctcgttttgctcgcagttcagctggattatgccgggaactatcaaggaaaacatcatttttggagtatcatacgacgagtaccggtatcgatcagtcattaaggcgtgtcagctcgaggaagatatttcgaaatttgcggagaaagataacattgtgttgggagaaggcgggattaccttgtcgggcggtcaacgagcgagaatcagcctggctagagcggtctataaggatgcagatttgtacttgcttgactcgccatttggttatctcgatgtgttgacggaaaaggagatctttgaaagctgcgtgtgtaagcttatggcgaacaagaccaggatcctcgtcacttccaagatggagcatttgaagaaggctgacaagatcctcattcttcacgaaggtagcagctacttttatggaacgttctcagagctgcagaatctccagcctgacttttcatccaaactcatggggtgcgattcgtttgatcagttctccgccgaaagaaggaacagcattctgacagaaacactgcatcgcttcagccttgagggtgacgctcccgtgtcgtggacggagacaaagaaacagtcgtttaagcagacgggggagttcggagagaagcggaagaattcaatcttgaatcccatcaattccattcggaagttcagcatcgtgcagaaaacgccgctgcagatgaatgggatcgaagaagattcagacgaacccctggagcgccgattgagcttggtgccagattcagagcagggtgaggccattttgcccagaatcagcgtcatctcaacgggtccgacgttgcaggcgagaaggcgccagtcggtgctcaatttgatgacccacagcgtaaaccaaggtcagaacatccatcgaaaaacaactgcgtcgaccaggaaggtgtcgttggcgcctcaggcaaatctcacggaattggacatctattccagacgcctgagccaggagacagggctcgaaatttccgaggagatcaacgaagaggatttgaaggagtgctttttcgacgatatggaatccatcccggcagtgacgacgtggaatacgtacttgcgctacattaccgtccacaaatccttgatctttgtcctcatctggtgtctcgtcatcttccttgcggaagtggcggcatcattggtggtgctctggttgttgggcaacacacctctccaagataagggtaactcgacgcactcccgcaacaactcgtatgccgtaatcatcacatcaacatcgtcgtactacgtcttttacatctacgtaggcgtggccgacactttgctggccatgggatttttccgcggactgccattggtgcatacgcttatcacggtatccaaaattctccaccacaaaatgctccactcggtcctccaagcgcccatgtcgacactgaacacacttaaggccgggggtatcctcaataggttctcgaaggacatcgcaattcttgatgacttgttgcccctcacgatcttcgatttcattcagcttctcttgatcgtgattggggccattgcggtggtagcggtgcttcagccgtacattttcgtcgccaccgtccccgtaattgtcgcgtttatcatgctcagagcgtactttctccagacgtcgcaacagcttaagcaattggagtcggaaggtagatcacccatcttcacacatctggtaacatcgctcaagggactctggacccttagagcgttcgggagacagccgtattttgagacactctttcacaaggccctgaaccttcatacggcgaattggttcttgtacttgtcgacgctcagatggtttcagatgcggatcgaaatgatcttcgtgattttcttcatcgccgtcacgttcatctccatcctcaccacaggggaaggcgagggacgcgtagggattatcttgacacttgcgatgaacatcatgtcgacacttcaatgggccgtgaattcgagcattgatgtagactcactgatgagatcggtgtcgcgcgtgttcaagttcatcgacatgcccaccgaggggaagcctacaaagagcaccaaaccgtacaagaatggacagttgtccaaagtcatgatcattgagaattcgcacgtcaagaaggatgatatctggccgagcggagggcaaatgactgtcaaagacctcacagcgaagtacaccgaagggggaaacgcgattttggagaatatctccttctcaatctcaccagggcaacgggtaggacttttgggccggacggggtcgggaaaatcaactctgctgtcggcttttctgaggttgctcaacaccgagggtgaaatccagattgacggcgtgtcatgggactccattacacttcagcagtggagaaaggcgtttggagtcatcccccagaaagtgtttatcttctcgggcactttccggaagaacctcgacccctatgagcagtggtcagatcaggaaatttggaaagtggcggatgaagtcgggctgcgctcagtgatcgaacagtttccggggaagctggactttgtccttgtcgatggcggatgtgtcctttcgcacggtcacaaacagctcatgtgcctggcgagatcggtcctctccaaagccaaaatcctgctgttggatgagccctcggcgcacttggatcccgtaacgtaccagattatcagaagaactctgaagcaggcgtttgccgactgcaccgtgatcctctgtgaacaccgaattgaggcaatgctggagtgccagcaattcctggtcattgaggagaacaaggtgcgacagtatgactccattcagaaacttttgaacgaacgatcccttttcagacaagccatctcaccatccgaccgcgtgaaactctttcctcatcggaattcgtcgaagtgcaagtcgaaacctcaaatcgcggcacttaaggaagaaacggaagaagaagtacaggacacccgactgtgaagcgctgccttctgcggggcttgccttctggccatgcccttcttctctcccttgcacctgtacctcttggtctttgaataaagcctgagtaggaag

SEQ ID NO: 9753 - DNA, 4443 bp, Artificial Sequence
  derived and/or modified sequence
atgcagagaagccccctggagaaggccagcgtggtgagcaagctgttcttcagctggaccagacccatcctgagaaagggctacagacagagactggagctgagcgacatctaccagatccccagcgtggacagcgccgacaacctgagcgagaagctggagagagagtgggacagagagctggccagcaagaagaaccccaagctgatcaacgccctgagaagatgcttcttctggagattcatgttctacggcatcttcctgtacctgggcgaggtgaccaaggccgtgcagcccctgctgctgggcagaatcatcgccagctacgaccccgacaacaaggaggagagaagcatcgccatctacctgggcatcggcctgtgcctgctgttcatcgtgagaaccctgctgctgcaccccgccatcttcggcctgcaccacatcggcatgcagatgagaatcgccatgttcagcctgatctacaagaagaccctgaagctgagcagcagagtgctggacaagatcagcatcggccagctggtgagcctgctgagcaacaacctgaacaagttcgacgagggcctggccctggcccacttcgtgtggatcgcccccctgcaggtggccctgctgatgggcctgatctgggagctgctgcaggccagcgccttctgcggcctgggcttcctgatcgtgctggccctgttccaggccggcctgggcagaatgatgatgaagtacagagaccagagagccggcaagatcagcgagagactggtgatcaccagcgagatgatcgagaacatccagagcgtgaaggcctactgctgggaggaggccatggagaagatgatcgagaacctgagacagaccgagctgaagctgaccagaaaggccgcctacgtgagatacttcaacagcagcgccttcttcttcagcggcttcttcgtggtgttcctgagcgtgctgccctacgccctgatcaagggcatcatcctgagaaagatcttcaccaccatcagcttctgcatcgtgctgagaatggccgtgaccagacagttcccctgggccgtgcagacctggtacgacagcctgggcgccatcaacaagatccaggacttcctgcagaagcaggagtacaagaccctggagtacaacctgaccaccaccgaggtggtgatggagaacgtgaccgccttctgggaggagggcttcggcgagctgttcgagaaggccaagcagaacaacaacaacagaaagaccagcaacggcgacgacagcctgttcttcagcaacttcagcctgctgggcacccccgtgctgaaggacatcaacttcaagatcgagagaggccagctgctggccgtggccggcagcaccggcgccggcaagaccagcctgctgatggtgatcatgggcgagctggagcccagcgagggcaagatcaagcacagcggcagaatcagcttctgcagccagttcagctggatcatgcccggcaccatcaaggagaacatcatcttcggcgtgagctacgacgagtacagatacagaagcgtgatcaaggcctgccagctggaggaggacatcagcaagttcgccgagaaggacaacatcgtgctgggcgagggcggcatcaccctgagcggcggccagagagccagaatcagcctggccagagccgtgtacaaggacgccgacctgtacctgctggacagccccttcggctacctggacgtgctgaccgagaaggagatcttcgagagctgcgtgtgcaagctgatggccaacaagaccagaatcctggtgaccagcaagatggagcacctgaagaaggccgacaagatcctgatcctgcacgagggcagcagctacttctacggcaccttcagcgagctgcagaacctgcagcccgacttcagcagcaagctgatgggctgcgacagcttcgaccagttcagcgccgagagaagaaacagcatcctgaccgagaccctgcacagattcagcctggagggcgacgcccccgtgagctggaccgagaccaagaagcagagcttcaagcagaccggcgagttcggcgagaagagaaagaacagcatcctgaaccccatcaacagcatcagaaagttcagcatcgtgcagaagacccccctgcagatgaacggcatcgaggaggacagcgacgagcccctggagagaagactgagcctggtgcccgacagcgagcagggcgaggccatcctgcccagaatcagcgtgatcagcaccggccccaccctgcaggccagaagaagacagagcgtgctgaacctgatgacccacagcgtgaaccagggccagaacatccacagaaagaccaccgccagcaccagaaaggtgagcctggccccccaggccaacctgaccgagctggacatctacagcagaagactgagccaggagaccggcctggagatcagcgaggagatcaacgaggaggacctgaaggagtgcttcttcgacgacatggagagcatccccgccgtgaccacctggaacacctacctgagatacatcaccgtgcacaagagcctgatcttcgtgctgatctggtgcctggtgatcttcctggccgaggtggccgccagcctggtggtgctgtggctgctgggcaacacccccctgcaggacaagggcaacagcacccacagcagaaacaacagctacgccgtgatcatcaccagcaccagcagctactacgtgttctacatctacgtgggcgtggccgacaccctgctggccatgggcttcttcagaggcctgcccctggtgcacaccctgatcaccgtgagcaagatcctgcaccacaagatgctgcacagcgtgctgcaggcccccatgagcaccctgaacaccctgaaggccggcggcatcctgaacagattcagcaaggacatcgccatcctggacgacctgctgcccctgaccatcttcgacttcatccagctgctgctgatcgtgatcggcgccatcgccgtggtggccgtgctgcagccctacatcttcgtggccaccgtgcccgtgatcgtggccttcatcatgctgagagcctacttcctgcagaccagccagcagctgaagcagctggagagcgagggcagaagccccatcttcacccacctggtgaccagcctgaagggcctgtggaccctgagagccttcggcagacagccctacttcgagaccctgttccacaaggccctgaacctgcacaccgccaactggttcctgtacctgagcaccctgagatggttccagatgagaatcgagatgatcttcgtgatcttcttcatcgccgtgaccttcatcagcatcctgaccaccggcgagggcgagggcagagtgggcatcatcctgaccctggccatgaacatcatgagcaccctgcagtgggccgtgaacagcagcatcgacgtggacagcctgatgagaagcgtgagcagagtgttcaagttcatcgacatgcccaccgagggcaagcccaccaagagcaccaagccctacaagaacggccagctgagcaaggtgatgatcatcgagaacagccacgtgaagaaggacgacatctggcccagcggcggccagatgaccgtgaaggacctgaccgccaagtacaccgagggcggcaacgccatcctggagaacatcagcttcagcatcagccccggccagagagtgggcctgctgggcagaaccggcagcggcaagagcaccctgctgagcgccttcctgagactgctgaacaccgagggcgagatccagatcgacggcgtgagctgggacagcatcaccctgcagcagtggagaaaggccttcggcgtgatcccccagaaggtgttcatcttcagcggcaccttcagaaagaacctggacccctacgagcagtggagcgaccaggagatctggaaggtggccgacgaggtgggcctgagaagcgtgatcgagcagttccccggcaagctggacttcgtgctggtggacggcggctgcgtgctgagccacggccacaagcagctgatgtgcctggccagaagcgtgctgagcaaggccaagatcctgctgctggacgagcccagcgcccacctggaccccgtgacctaccagatcatcagaagaaccctgaagcaggccttcgccgactgcaccgtgatcctgtgcgagcacagaatcgaggccatgctggagtgccagcagttcctggtgatcgaggagaacaaggtgagacagtacgacagcatccagaagctgctgaacgagagaagcctgttcagacaggccatcagccccagcgacagagtgaagctgttcccccacagaaacagcagcaagtgcaagagcaagccccagatcgccgccctgaaggaggagaccgaggaggaggtgcaggacaccagactgtag

SEQ ID NO: 9754 - DNA, 4317 bp, Artificial Sequence
  derived and/or modified sequence
atgcagagaagccccctggagaaggccagcgtggtgagcaagctgttcttcagctggaccagacccatcctgagaaagggctacagacagagactggagctgagcgacatctaccagatccccagcgtggacagcgccgacaacctgagcgagaagctggagagagagtgggacagagagctggccagcaagaagaaccccaagctgatcaacgccctgagaagatgcttcttctggagattcatgttctacggcatcttcctgtacctgggcgaggtgaccaaggccgtgcagcccctgctgctgggcagaatcatcgccagctacgaccccgacaacaaggaggagagaagcatcgccatctacctgggcatcggcctgtgcctgctgttcatcgtgagaaccctgctgctgcaccccgccatcttcggcctgcaccacatcggcatgcagatgagaatcgccatgttcagcctgatctacaagaagggcctggccctggcccacttcgtgtggatcgcccccctgcaggtggccctgctgatgggcctgatctgggagctgctgcaggccagcgccttctgcggcctgggcttcctgatcgtgctggccctgttccaggccggcctgggcagaatgatgatgaagtacagagaccagagagccggcaagatcagcgagagactggtgatcaccagcgagatgatcgagaacatccagagcgtgaaggcctactgctgggaggaggccatggagaagatgatcgagaacctgagacagaccgagctgaagctgaccagaaaggccgcctacgtgagatacttcaacagcagcgccttcttcttcagcggcttcttcgtggtgttcctgagcgtgctgccctacgccctgatcaagggcatcatcctgagaaagatcttcaccaccatcagcttctgcatcgtgctgagaatggccgtgaccagacagttcccctgggccgtgcagacctggtacgacagcctgggcgccatcaacaagatccaggacttcctgcagaagcaggagtacaagaccctggagtacaacctgaccaccaccgaggtggtgatggagaacgtgaccgccttctgggaggagggcttcggcgagctgttcgagaaggccaagcagaacaacaacaacagaaagaccagcaacggcgacgacagcctgttcttcagcaacttcagcctgctgggcacccccgtgctgaaggacatcaacttcaagatcgagagaggccagctgctggccgtggccggcagcaccggcgccggcaagaccagcctgctgatggtgatcatgggcgagctggagcccagcgagggcaagatcaagcacagcggcagaatcagcttctgcagccagttcagctggatcatgcccggcaccatcaaggagaacatcatcttcggcgtgagctacgacgagtacagatacagaagcgtgatcaaggcctgccagctggaggaggacatcagcaagttcgccgagaaggacaacatcgtgctgggcgagggcggcatcaccctgagcggcggccagagagccagaatcagcctggccagagccgtgtacaaggacgccgacctgtacctgctggacagccccttcggctacctggacgtgctgaccgagaaggagatcttcgagagctgcgtgtgcaagctgatggccaacaagaccagaatcctggtgaccagcaagatggagcacctgaagaaggccgacaagatcctgatcctgcacgagggcagcagctacttctacggcaccttcagcgagctgcagaacctgcagcccgacttcagcagcaagctgatgggctgcgacagcttcgaccagttcagcgccgagagaagaaacagcatcctgaccgagaccctgcacagattcagcctggagggcgacgcccccgtgagctggaccgagaccaagaagcagagcttcaagcagaccggcgagttcggcgagaagagaaagaacagcatcctgaaccccatcaacagcatcagaaagttcagcatcgtgcagaagacccccctgcagatgaacggcatcgaggaggacagcgacgagcccctggagagaagactgagcctggtgcccgacagcgagcagggcgaggccatcctgcccagaatcagcgtgatcagcaccggccccaccctgcaggccagaagaagacagagcgtgctgaacctgatgacccacagcgtgaaccagggccagaacatccacagaaagaccaccgccagcaccagaaaggtgagcctggccccccaggccaacctgaccgagctggacatctacagcagaagactgagccaggagaccggcctggagatcagcgaggagatcaacgaggaggacctgaaggagtgcttcttcgacgacatggagagcatccccgccgtgaccacctggaacacctacctgagatacatcaccgtgcacaagagcctgatcttcgtgctgatctggtgcctggtgatcttcctggccgaggtggccgccagcctggtggtgctgtggctgctgggcaacacccccctgcaggacaagggcaacagcacccacagcagaaacaacagctacgccgtgatcatcaccagcaccagcagctactacgtgttctacatctacgtgggcgtggccgacaccctgctggccatgggcttcttcagaggcctgcccctggtgcacaccctgatcaccgtgagcaagatcctgcaccacaagatgctgcacagcgtgctgcaggcccccatgagcaccctgaacaccctgaaggccggcggcatcctgaacagattcagcaaggacatcgccatcctggacgacctgctgcccctgaccatcttcgacttcatccagctgctgctgatcgtgatcggcgccatcgccgtggtggccgtgctgcagccctacatcttcgtggccaccgtgcccgtgatcgtggccttcatcatgctgagagcctacttcctgcagaccagccagcagctgaagcagctggagagcgagggcagaagccccatcttcacccacctggtgaccagcctgaagggcctgtggaccctgagagccttcggcagacagccctacttcgagaccctgttccacaaggccctgaacctgcacaccgccaactggttcctgtacctgagcaccctgagatggttccagatgagaatcgagatgatcttcgtgatcttcttcatcgccgtgaccttcatcagcatcctgaccaccggcgagggcgagggcagagtgggcatcatcctgaccctggccatgaacatcatgagcaccctgcagtgggccgtgaacagcagcatcgacgtggacagcctgatgagaagcgtgagcagagtgttcaagttcatcgacatgcccaccgagggcaagcccaccaagagcaccaagccctacaagaacggccagctgagcaaggtgatgatcatcgagaacagccacgtgaagaaggacgacatctggcccagcggcggccagatgaccgtgaaggacctgaccgccaagtacaccgagggcggcaacgccatcctggagaacatcagcttcagcatcagccccggccagagagtgggcctgctgggcagaaccggcagcggcaagagcaccctgctgagcgccttcctgagactgctgaacaccgagggcgagatccagatcgacggcgtgagctgggacagcatcaccctgcagcagtggagaaaggccttcggcgtgatcccccagaaggtgttcatcttcagcggcaccttcagaaagaacctggacccctacgagcagtggagcgaccaggagatctggaaggtggccgacgaggtgggcctgagaagcgtgatcgagcagttccccggcaagctggacttcgtgctggtggacggcggctgcgtgctgagccacggccacaagcagctgatgtgcctggccagaagcgtgctgagcaaggccaagatcctgctgctggacgagcccagcgcccacctggaccccgtgacctaccagatcatcagaagaaccctgaagcaggccttcgccgactgcaccgtgatcctgtgcgagcacagaatcgaggccatgctggagtgccagcagttcctggtgatcgaggagaacaaggtgagacagtacgacagcatccagaagctgctgaacgagagaagcctgttcagacaggccatcagccccagcgacagagtgaagctgttcccccacagaaacagcagcaagtgcaagagcaagccccagatcgccgccctgaagtag

SEQ ID NO: 9755 - DNA, 4260 bp, Artificial Sequence
  derived and/or modified sequence
atgcagagaagccccctggagaaggccagcgtggtgagcaagctgttcttcagctggaccagacccatcctgagaaagggctacagacagagactggagctgagcgacatctaccagatccccagcgtggacagcgccgacaacctgagcgagaagctggagagagagtgggacagagagctggccagcaagaagaaccccaagctgatcaacgccctgagaagatgcttcttctggagattcatgttctacggcatcttcctgtacctgggcgaggtgaccaaggccgtgcagcccctgctgctgggcagaatcatcgccagctacgaccccgacaacaaggaggagagaagcatcgccatctacctgggcatcggcctgtgcctgctgttcatcgtgagaaccctgctgctgcaccccgccatcttcggcctgcaccacatcggcatgcagatgagaatcgccatgttcagcctgatctacaagaagaccctgaagctgagcagcagagtgctggacaagatcagcatcggccagctggtgagcctgctgagcaacaacctgaacaagttcgacgagggcctggccctggcccacttcgtgtggatcgcccccctgcaggtggccctgctgatgggcctgatctgggagctgctgcaggccagcgccttctgcggcctgggcttcctgatcgtgctggccctgttccaggccggcctgggcagaatgatgatgaagtacagagaccagagagccggcaagatcagcgagagactggtgatcaccagcgagatgatcgagaacatccagagcgtgaaggcctactgctgggaggaggccatggagaagatgatcgagaacctgagacagaccgagctgaagctgaccagaaaggccgcctacgtgagatacttcaacagcagcgccttcttcttcagcggcttcttcgtggtgttcctgagcgtgctgccctacgccctgatcaagggcatcatcctgagaaagatcttcaccaccatcagcttctgcatcgtgctgagaatggccgtgaccagacagttcccctgggccgtgcagacctggtacgacagcctgggcgccatcaacaagatccaggacttcctgcagaagcaggagtacaagaccctggagtacaacctgaccaccaccgaggtggtgatggagaacgtgaccgccttctgggaggagaccagcctgctgatggtgatcatgggcgagctggagcccagcgagggcaagatcaagcacagcggcagaatcagcttctgcagccagttcagctggatcatgcccggcaccatcaaggagaacatcatcttcggcgtgagctacgacgagtacagatacagaagcgtgatcaaggcctgccagctggaggaggacatcagcaagttcgccgagaaggacaacatcgtgctgggcgagggcggcatcaccctgagcggcggccagagagccagaatcagcctggccagagccgtgtacaaggacgccgacctgtacctgctggacagccccttcggctacctggacgtgctgaccgagaaggagatcttcgagagctgcgtgtgcaagctgatggccaacaagaccagaatcctggtgaccagcaagatggagcacctgaagaaggccgacaagatcctgatcctgcacgagggcagcagctacttctacggcaccttcagcgagctgcagaacctgcagcccgacttcagcagcaagctgatgggctgcgacagcttcgaccagttcagcgccgagagaagaaacagcatcctgaccgagaccctgcacagattcagcctggagggcgacgcccccgtgagctggaccgagaccaagaagcagagcttcaagcagaccggcgagttcggcgagaagagaaagaacagcatcctgaaccccatcaacagcatcagaaagttcagcatcgtgcagaagacccccctgcagatgaacggcatcgaggaggacagcgacgagcccctggagagaagactgagcctggtgcccgacagcgagcagggcgaggccatcctgcccagaatcagcgtgatcagcaccggccccaccctgcaggccagaagaagacagagcgtgctgaacctgatgacccacagcgtgaaccagggccagaacatccacagaaagaccaccgccagcaccagaaaggtgagcctggccccccaggccaacctgaccgagctggacatctacagcagaagactgagccaggagaccggcctggagatcagcgaggagatcaacgaggaggacctgaaggagtgcttcttcgacgacatggagagcatccccgccgtgaccacctggaacacctacctgagatacatcaccgtgcacaagagcctgatcttcgtgctgatctggtgcctggtgatcttcctggccgaggtggccgccagcctggtggtgctgtggctgctgggcaacacccccctgcaggacaagggcaacagcacccacagcagaaacaacagctacgccgtgatcatcaccagcaccagcagctactacgtgttctacatctacgtgggcgtggccgacaccctgctggccatgggcttcttcagaggcctgcccctggtgcacaccctgatcaccgtgagcaagatcctgcaccacaagatgctgcacagcgtgctgcaggcccccatgagcaccctgaacaccctgaaggccggcggcatcctgaacagattcagcaaggacatcgccatcctggacgacctgctgcccctgaccatcttcgacttcatccagctgctgctgatcgtgatcggcgccatcgccgtggtggccgtgctgcagccctacatcttcgtggccaccgtgcccgtgatcgtggccttcatcatgctgagagcctacttcctgcagaccagccagcagctgaagcagctggagagcgagggcagaagccccatcttcacccacctggtgaccagcctgaagggcctgtggaccctgagagccttcggcagacagccctacttcgagaccctgttccacaaggccctgaacctgcacaccgccaactggttcctgtacctgagcaccctgagatggttccagatgagaatcgagatgatcttcgtgatcttcttcatcgccgtgaccttcatcagcatcctgaccaccggcgagggcgagggcagagtgggcatcatcctgaccctggccatgaacatcatgagcaccctgcagtgggccgtgaacagcagcatcgacgtggacagcctgatgagaagcgtgagcagagtgttcaagttcatcgacatgcccaccgagggcaagcccaccaagagcaccaagccctacaagaacggccagctgagcaaggtgatgatcatcgagaacagccacgtgaagaaggacgacatctggcccagcggcggccagatgaccgtgaaggacctgaccgccaagtacaccgagggcggcaacgccatcctggagaacatcagcttcagcatcagccccggccagagagtgggcctgctgggcagaaccggcagcggcaagagcaccctgctgagcgccttcctgagactgctgaacaccgagggcgagatccagatcgacggcgtgagctgggacagcatcaccctgcagcagtggagaaaggccttcggcgtgatcccccagaaggtgttcatcttcagcggcaccttcagaaagaacctggacccctacgagcagtggagcgaccaggagatctggaaggtggccgacgaggtgggcctgagaagcgtgatcgagcagttccccggcaagctggacttcgtgctggtggacggcggctgcgtgctgagccacggccacaagcagctgatgtgcctggccagaagcgtgctgagcaaggccaagatcctgctgctggacgagcccagcgcccacctggaccccgtgacctaccagatcatcagaagaaccctgaagcaggccttcgccgactgcaccgtgatcctgtgcgagcacagaatcgaggccatgctggagtgccagcagttcctggtgatcgaggagaacaaggtgagacagtacgacagcatccagaagctgctgaacgagagaagcctgttcagacaggccatcagccccagcgacagagtgaagctgttcccccacagaaacagcagcaagtgcaagagcaagccccagatcgccgccctgaaggaggagaccgaggaggaggtgcaggacaccagactgtag

SEQ ID NO: 9756 - DNA, 4443 bp, Artificial Sequence
  derived and/or modified sequence
atgcaacggagcccactcgaaaaggcatctgttgtcagcaaactctttttttcttggaccaggcctattttaagaaagggctatcgccaacgcctggagttaagcgatatatatcaaattccatctgtggatagtgctgataatctgtccgagaagttggagagggagtgggacagggaactggcaagtaagaagaatcccaaactaattaacgctctccgaagatgctttttctggcggtttatgttctacggaatctttctctaccttggtgaagtgacaaaagctgtccagccgttactgctaggacggatcatcgcctcctacgatcccgacaacaaggaggaacggagcatagctatatatctggggattggcctttgccttttatttatcgttcgcaccctgctgcttcaccccgcaatattcggactgcaccatatcggaatgcagatgagaatagcgatgttctccttaatctataagaagaccttaaaactctcttcccgggtgctggataagattagtatcgggcagctggtatcactactgtccaataacctcaacaagttcgatgagggactcgctttggcccactttgtatggattgcccccctgcaagtggccctgctaatgggcctcatctgggaactcctgcaggcatccgcattctgtggccttggttttctgatcgttctcgctctgtttcaggcagggctggggcggatgatgatgaagtacagggatcagagggcagggaaaatcagtgaacgcctggtcatcacgtctgagatgatagagaacatccagagtgtaaaagcctactgctgggaagaagccatggaaaaaatgattgagaacctgcgccagacggagttgaaactgacacggaaggcagcttacgtaaggtattttaactcttcagcttttttcttttcaggattcttcgtcgtgttcctgagtgtacttccttatgccttgatcaagggcataatcctgaggaagatattcactaccatttccttttgtattgtgctcagaatggccgttacaagacagtttccttgggctgttcaaacgtggtatgactccctgggagccatcaataagattcaggacttcctccagaaacaggaatacaagaccctcgagtataatcttacaacgacagaggtcgttatggaaaacgtcacagcattttgggaggagggattcggcgagctgttcgagaaagcaaaacagaataataacaacagaaagacttccaatggcgacgacagtctgttcttttctaattttagcctgttgggcacaccagtacttaaggatatcaactttaagatagaacgggggcaattgctggcggtggctggaagcactggagctggaaaaacctcactcctgatggtcatcatgggagaattggaaccttccgaaggaaaaatcaaacactccggcagaatctccttttgctcccagttttcatggatcatgccgggaaccatcaaagagaacattatttttggggtgtcttatgacgagtataggtacaggtccgtgataaaggcttgtcaactggaggaggatatttccaagtttgcagagaaagacaacatcgtgttgggggaaggggggatcacgctgtccggcgggcaacgcgcccgaatttctctggcaagggcagtgtacaaggacgcggatttgtacttacttgacagtcccttcgggtacctcgatgtcttaaccgaaaaagaaattttcgagagctgtgtgtgcaagttgatggcaaataaaaccagaattttggtgacatccaaaatggaacacctgaaaaaagccgataagatcctgattctccatgagggatcctcgtatttttacgggaccttctcagagcttcagaaccttcagccggatttttcctccaagttaatgggctgtgattcgtttgaccagtttagcgcggagcggcggaattccatcctgacggagacactacatcgctttagtctggagggcgacgctccggtctcttggaccgaaaccaaaaagcagtccttcaagcagactggcgagttcggcgagaaaagaaagaacagcatcctcaatcctattaactctatcaggaaattttctattgtgcaaaaaacccctctccagatgaacggcatcgaggaggacagcgacgagcctcttgagaggcgcctgagcctcgtgccagattctgagcagggagaagctattttgcccaggataagtgtcatttctactggccctacattacaggctaggagaagacagagcgttttgaacctgatgacacacagcgtgaatcagggccagaatatccatagaaagaccactgcaagcacacgcaaagtgagcctggctccacaggcgaacctgacagaactggatatctacagtaggagactgagccaggaaacaggtctggaaattagcgaagagatcaatgaagaggatctgaaggaatgtttcttcgacgacatggaatcaatcccagcagtaaccacatggaacacataccttcgatatattaccgttcataaaagtctgatttttgtgttgatttggtgtctggtcatatttctggccgaagttgccgcttctctggttgtcctgtggctcctggggaatacccccttgcaggacaaagggaactctactcacagcaggaacaatagttatgccgtgatcattacaagcaccagctcctattacgtgttttatatctacgtcggagtggccgacactctcctggctatgggattttttcgtggcctgccactcgtgcataccctgatcacagttagtaagattttgcatcacaagatgctccattccgttctccaggcgcccatgtccacgctgaacaccctgaaggcagggggcatcttgaacagattctccaaagatatcgctattcttgatgatctgctacccctgactatttttgactttatccagttacttctgatcgttataggggccattgcagtagtggctgtgcttcaaccatatatcttcgttgcgactgtccctgtgatcgtcgcttttataatgctgcgggcctatttcctccagacatcccagcagctgaaacaacttgagtctgaagggaggagcccaatctttacgcacttggttaccagcctgaagggactctggaccttgcgtgccttcggtcggcagccctattttgagacgctgttccacaaggccctaaacctgcataccgcgaactggttcctctatctgagcaccttacggtggttccagatgagaatcgagatgattttcgtcatcttctttattgcagtgacctttatatctatcttaaccaccggcgagggcgaagggagagtgggtataatcttgaccctggctatgaatatcatgtccacactacagtgggccgtcaactcctcgattgacgtggactctctgatgcggtcagtatcgagggtctttaagtttatcgacatgcctactgaaggcaagccgactaagtctaccaaaccatacaagaacggacagctgtcaaaagtgatgatcatcgagaactcacacgttaagaaggatgatatatggccatctgggggccagatgacagtcaaagatctcactgccaagtatactgagggagggaatgctatcctggagaatatatccttttcaatcagccccgggcagcgagtgggcctcttaggtcgtacaggaagcggaaaaagtacattgctgagcgcctttctccggttactcaacactgagggtgagatacaaatcgacggcgtgtcatgggatagcataactcttcagcagtggcggaaggctttcggcgtgattcctcagaaggtttttatctttagtggcacattccggaagaaccttgacccttacgaacaatggtctgatcaagaaatttggaaggtggcggacgaagtggggctaaggagcgtgatcgaacagtttccagggaaattggacttcgttttagtggacggcgggtgtgtactgagccacggacacaagcagttaatgtgtctagccaggtccgtgctctcgaaagctaaaatccttctcctcgatgaacccagtgcccatctggaccctgtgacctaccagattattaggcgaactcttaagcaggccttcgccgactgcacagttatactgtgcgaacaccgcattgaagccatgctcgagtgccagcagttcctggtgatcgaggagaacaaggtccggcaatacgacagtatccagaagctgcttaacgaacgcagtttgtttaggcaggctatatcaccgtcggatcgggtgaaactgtttccccacagaaattcttcaaagtgtaagtctaagccccagattgctgccttgaaagaggaaaccgaggaagaggtccaggacacccgtctttag

SEQ ID NO: 9757 - DNA, 4317 bp, Artificial Sequence
  derived and/or modified sequence
atgcagagaagcccgctggagaaggcttcagttgtgtccaaattgttcttcagctggactcgacctatcctgcgaaaaggctaccggcagcggctcgaactgtcagatatctatcagattcccagtgtggactccgctgacaatttatcagagaagcttgaacgagagtgggaccgcgaattggcatcgaaaaagaaccctaaactgattaatgcacttcggagatgctttttttggcgattcatgttctacggcatcttcctctacctgggtgaagtgacgaaagccgtgcagccccttctgctgggccgcattattgccagttacgatccagacaataaggaggaaaggtccattgccatctatctcgggatcgggctgtgcctgttgtttattgttcgaacccttcttttgcaccctgccatattcggactgcaccacattggaatgcagatgaggatcgcaatgttctccctcatctataaaaaaggactggctctggcacacttcgtgtggatagcacccctgcaggtggccctcttgatgggcctgatctgggagctgctccaggcaagcgcgttttgcggactagggtttctgatcgtactcgctctgtttcaagcaggacttggcagaatgatgatgaagtatagagaccaacgcgctgggaagatctccgaaagattggtgatcacctctgagatgattgaaaatatacagagcgtcaaggcctattgttgggaagaggccatggagaaaatgatcgagaatctcaggcagaccgaactcaaattgacaagaaaagctgcttatgtaagatattttaactctagcgcctttttcttttccggttttttcgtggtatttttatcggtgttgccttatgcgctgataaagggaatcatactccgcaaaatattcacgactataagcttctgcatagtgttgaggatggccgtcacccgacagttcccgtgggctgtccagacatggtatgatagcttgggcgccataaacaaaattcaggactttttacaaaagcaggagtataaaaccctggagtacaatttaaccaccactgaggtcgtcatggaaaacgtgaccgccttctgggaggagggcttcggcgaattgttcgaaaaggccaagcaaaacaacaacaaccggaagaccagcaatggggacgattccctgttcttttcaaacttttctctgctgggcacgccagtgctcaaggatataaatttcaagatcgagcgcggacagctgttggccgtcgccggcagcaccggagcaggcaagacctctttgctgatggtcataatgggggagctcgaaccaagcgagggtaagatcaaacactctggacggatctcattctgcagccagttttcctggatcatgccaggcactatcaaggaaaacattatatttggtgtttcatacgatgagtacaggtaccgcagcgtcatcaaagcctgccaactcgaggaagacataagtaaattcgccgaaaaagataacatcgtgttaggggaaggtggaatcacattatctggggggcagcgtgcccggattagtctggcccgtgcagtctacaaggatgctgatctgtacctcctcgacagcccattcggatatctagatgttctgactgaaaaagagatctttgagtcctgtgtttgcaagctaatggctaacaagaccagaattttagtgacaagcaagatggaacaccttaagaaagcggataaaatcctgatcctgcacgagggcagtagctatttttatggcacattttccgagctacagaacctccaacctgattttagtagtaaattaatgggttgtgatagctttgaccaattctctgctgaaaggcgaaatagcattcttacagagactttgcaccgtttctctctcgagggagacgctcccgtttcctggaccgagaccaaaaagcagtcctttaagcagactggagagtttggcgagaagcggaagaattcaatactgaacccgatcaactcaattcgcaagttctccattgtgcaaaaaacgccactccaaatgaacggaattgaggaagactctgatgagcccctggaaagaagactgtccctagtgcctgattctgaacagggggaggccatcctgccccgcattagcgtaatttcaactggtccaactctgcaggcccggaggcgtcagtctgttctgaatctgatgactcactccgtaaaccaaggccaaaatattcataggaagaccacagcctccacacgtaaggtgtcgctggccccgcaagccaatctaacagagctagacatctattccagaagattatcacaggagacagggctggagatatcagaagagatcaatgaggaagacctgaaggagtgtttctttgacgatatggaatctattcccgctgtgacaacgtggaatacatatttacggtacataacggttcacaaatcattaatctttgttctgatctggtgtctggtgattttccttgcagaagtggccgcgagcctggtggttctgtggctcctgggaaataccccattacaggacaaaggtaattccacccacagtaggaacaacagttacgccgttatcataacatctacttcatcctattatgttttctacatatatgtgggggtcgctgacacattgctggctatgggcttcttcaggggactgcctctggtacacaccctgattacagtcagtaagatcctccaccacaagatgctacacagcgtactccaggcgccaatgtctacactcaatacactgaaggcgggcggtatactaaatcgcttcagcaaggatatcgctatactggacgatcttctcccgctcacaatcttcgattttatacaactattactgatagtcatcggcgccatcgctgtggttgccgtactgcagccctacattttcgtggccacagtgccggtgattgtggcctttattatgcttcgcgcatatttccttcagacatcacagcagttaaagcaactggagagcgagggccggtcccccatctttactcacctggtaacttcgctcaaggggctctggactctccgcgcattcggccgccagccatatttcgagaccctatttcacaaggcactaaacctgcacacggccaactggttcctgtacctaagtaccctcaggtggttccagatgcggatagagatgatttttgttatctttttcatcgccgtgaccttcatttccatcctgaccacaggagagggcgaagggagagtggggatcatcctgaccctggctatgaacattatgtccacactgcagtgggccgtaaattcttccattgacgttgactctttaatgcgctccgtcagtcgggtgttcaagttcatagatatgcctaccgagggaaaaccgacaaaatccaccaaaccatacaaaaacgggcagctgagcaaagttatgatcattgagaattcacacgtgaaaaaggatgacatctggcctagtggcggtcagatgacagtgaaggaccttaccgccaagtacactgaagggggcaacgccattctggagaatatttccttttctatctctcctgggcaacgggtgggccttttggggcgtacaggaagtgggaagtctactctcttatctgcctttctgcgcctcctcaatactgaaggagagatccagatcgacggggtgagctgggacagcatcaccctgcagcagtggaggaaagccttcggtgtcatacctcaaaaagtcttcatattcagcgggacttttcgtaagaatctagatccctacgagcagtggagtgaccaggagatctggaaggttgctgacgaagtgggcctaaggtcagttatcgagcagttccccggtaagttagacttcgttctggtagacggaggttgtgttttgtctcacggacataagcagctgatgtgcttggctcgctcagtgctcagcaaagcaaaaattcttctcttggacgagccttccgcccacctcgacccagtcacatatcagatcatccgtaggacacttaagcaggcgtttgccgactgtacagtgatcttgtgcgagcacagaatcgaggccatgctcgagtgccaacagtttctcgttattgaggagaataaggtgcggcagtatgactcaattcagaagttgctgaacgagaggtcactgttcaggcaggctatctccccttccgaccgtgtgaagctgttcccacatcggaactccagcaagtgtaagagcaagccacaaatcgctgctttgaagtag

SEQ ID NO: 9758 - DNA, 4260 bp, Artificial Sequence
  derived and/or modified sequence
atgcagcgaagtccgctggaaaaggcaagtgtcgtgagtaagctctttttctcttggacaagacccattttaaggaagggatatagacagagattggaactgtctgacatctaccagattccctcagttgatagcgcggataacctctcagaaaaactcgaaagggagtgggaccgggaactggcctccaaaaagaaccccaagttgatcaacgccctccggagatgctttttctggcggttcatgttttacggcatctttctctatctaggcgaagtcacaaaggctgtgcagccactactgctcggcaggatcattgcatcttacgaccctgataataaggaagagcgctccatagccatctatcttggtattggcctgtgcttgctcttcatcgtgcgcacgctccttttacatccggccattttcggactccatcacattggaatgcaaatgcgcatcgcaatgttctctttgatttacaagaagacacttaaactgagcagccgcgtgctcgacaaaatcagcattgggcagctcgtatccctgttgtctaataatctgaacaagtttgatgaaggcttagctctggcccactttgtctggatcgctccattgcaggtcgctctccttatgggcttaatttgggaactgcttcaagcctccgccttttgtggactgggcttcctgatcgttctggccctgtttcaggctggactaggcaggatgatgatgaaatatagagatcagcgggctggcaaaatctccgaacgcctcgtcatcaccagcgaaatgatcgagaatattcaatctgtgaaggcatattgttgggaggaagccatggagaagatgatcgaaaatctcagacagactgagctgaagctgacacgaaaggctgcctacgtgcggtatttcaattcatccgccttctttttttctggcttctttgtcgtgttcctcagtgtgctgccttatgccctgattaagggaattatattgaggaaaatcttcacaactattagtttctgtattgtcctccgaatggctgtaacaagacagtttccatgggcggtacaaacctggtatgattcacttggggcgatcaacaaaattcaagactttttgcaaaagcaggaatataaaaccctggagtataacttaacgaccactgaggtagtcatggagaacgtcaccgccttctgggaagagacatcgctactgatggtaattatgggggaactagagccctctgagggaaagattaaacattctggacgcattagcttttgcagccagttctcctggatcatgccaggtaccattaaggagaatattatttttggggtatcctacgatgaatatcgttatcgtagcgttatcaaggcctgccagctcgaggaggacataagtaaattcgcggagaaggacaacatagtgcttggggagggaggaatcactctgagtggggggcagagagcacggatcagtctggcaagagccgtttataaagatgcggatctctacctgctggactcaccatttggatatctggacgtgctcaccgagaaggagatcttcgagtcttgcgtttgcaagctgatggctaataagaccagaatcctagtgactagtaagatggagcatctgaaaaaggcggacaaaattctgattctccacgagggctccagctatttctacggaaccttctccgaactgcagaatctccaacccgatttttcttctaagctgatgggctgcgatagcttcgatcagttttctgcagaacgaagaaacagcattttgaccgaaacgctacatcggttttcattggagggagatgcccccgtatcatggactgagacaaagaagcagtcctttaaacagacaggtgaatttggggaaaagagaaagaactccatcctaaatccaatcaactccataagaaaattcagtattgtgcaaaaaactcccctgcaaatgaatgggatagaggaggatagtgatgagccactggagcgccgactgtccctcgtgccggacagtgagcagggcgaagcaatcctgcccaggatctctgtcatttctaccgggcctacgctccaagcacgtcgcagacagtcggtgcttaatctcatgacgcattccgtgaaccaagggcaaaacattcaccgaaaaacaacggcctcaacaaggaaggtctctctggctcctcaggctaacttgactgaattagacatctattctcgtcgcttgagtcaggagactggcctcgaaatctctgaggagattaatgaagaggacctaaaagaatgtttctttgacgacatggaaagtatccctgctgtgaccacatggaatacctacctcaggtacattaccgtgcacaagtcgcttatttttgtgcttatctggtgtctcgtgatattcctggctgaggtcgcagccagtctggtggttctttggctacttgggaacactccgctccaggataaagggaattcaacgcattctaggaacaactcgtacgctgtgatcatcacatctacttccagttattacgtgttctatatttatgtgggtgtggccgatactctgctggccatgggattcttccgaggcctccccttggtccacaccctgatcacagtctcaaagattctccatcataagatgttgcatagcgtactgcaggcgcctatgtctacactaaataccctcaaagcaggaggtatactgaaccgtttctctaaggatattgcaatcctcgacgacttactgccactgaccatcttcgattttatccagttgttgctgatcgttattggcgccatcgctgtcgtggcggtcctgcaaccttacatcttcgtggccactgtacccgtgatcgtcgcctttatcatgttaagagcctactttctacagactagtcaacagctaaaacagctcgagtctgagggtcgatctcccatttttacccatttggtgacatctctgaaaggcctctggacactacgggcgttcggcagacagccttactttgaaactttatttcataaagcattgaaccttcacaccgctaactggtttctgtatttatcgaccttgcgttggtttcagatgcggattgagatgattttcgtgatattctttatcgcagtgacattcatttcgattcttacgaccggagaaggggaaggcagggtggggatcatcctaaccctggcaatgaacatcatgagcaccctgcagtgggccgtgaactcaagcatagacgtcgactctcttatgaggtctgttagccgcgtgtttaagttcatcgacatgcccaccgaaggaaagcctacaaaatctaccaaaccctataagaacggtcaactgtcaaaagtcatgattatcgagaattcacatgtgaaaaaggacgatatctggccctcaggcggccagatgacagttaaggatctgacagccaagtatacagaaggggggaatgcaatcctggaaaacattagcttctcaattagtccggggcagcgcgtaggcctcctcggacgcacaggaagtggaaagagtaccctcctctccgccttcctgcgcttgctcaataccgaaggggagattcagatcgacggggtgagttgggacagtattaccctacagcagtggcgcaaggcttttggtgtgattccacagaaagtctttatcttctcggggacctttcggaaaaatcttgacccttacgaacaatggtcagatcaggagatttggaaggtcgcagacgaggtgggcctccggagcgtgatcgagcagtttccaggcaaactggactttgtcctggtggacggggggtgcgtgctgtcccacggacataaacaactgatgtgcctggcaaggagcgtgttgtcaaaagctaaaattcttctcttagacgagccgtctgcgcacctcgacccggtaacataccaaataattcggaggacactcaaacaggctttcgctgactgcacagttattctgtgcgagcataggattgaggcaatgttagaatgtcagcagttcctggtcatcgaagagaacaaggtcagacagtatgactctattcagaaactattaaatgaacggtctttgttccgccaggctatctctccgtctgacagggtgaagctgttcccacacaggaatagttctaaatgcaagagcaagccacagatagcggctctcaaagaagaaaccgaggaggaggtgcaggatactcggctctag

SEQ ID NO: 9759 - DNA, 4443 bp, Artificial Sequence
  derived and/or modified sequence
atgcagaggagccccctggagaaggcctctgtggtgtccaagctgttcttctcctggacccggcccatcctgaggaagggctaccggcagaggctggagctgagtgacatctaccagatccccagcgtggacagcgctgacaacctgtctgagaagctggagcgggagtgggaccgggagctggccagcaagaagaaccccaagctgatcaatgccctgcggcgctgcttcttctggaggttcatgttctacggcatcttcctgtacctgggggaggtgaccaaggctgtgcagcccctgctgctgggccgcatcatcgccagctatgaccctgacaacaaggaggagaggagcatcgccatctacctgggcatcggcctgtgcctgctcttcatcgtgaggaccctgctgctgcacccagccatcttcggcctgcaccacatcggcatgcagatgagaattgccatgttcagcctcatctacaagaagaccctgaagctgagcagccgggtgctggacaagatcagcatcggccagctggtgtccctgctgagcaacaacctgaacaagtttgatgagggcctggccctggcccactttgtgtggatcgcccccctgcaggtggccctgctgatgggcctcatctgggagctgctgcaggccagcgccttctgtggcctgggcttcctgattgtgctggccctcttccaggccggcctgggccgcatgatgatgaagtacagagaccagagagctgggaagatcagcgagcggctggtgatcaccagcgagatgattgagaacatccagagcgtgaaggcctactgctgggaggaggccatggagaagatgattgagaacctgcggcagacagagctgaagctgaccaggaaggccgcctacgtgcgctacttcaacagcagcgccttcttcttcagcggcttctttgtggtgttcctgtctgtgctgccctatgccctgatcaagggcatcatcctgaggaagatcttcaccaccatctccttctgcatcgtgctgaggatggctgtgacccggcagttcccctgggccgtgcagacctggtatgacagcctgggcgccatcaacaagatccaggacttcctgcagaagcaggagtacaagaccctggagtacaacctgaccaccacagaggtggtgatggagaatgtgacagccttctgggaggagggctttggagagctgtttgagaaggccaagcagaacaacaacaacaggaagaccagcaatggagatgacagcctcttcttcagcaacttcagcctgctgggcacccctgtgctgaaggacatcaacttcaagattgaaagaggccagctgctggccgtggccggcagcactggagctgggaagaccagcctgctgatggtgatcatgggagagctggagcccagcgagggcaagatcaagcacagcggccgcatctccttctgcagccagttctcctggatcatgcctggcaccatcaaggagaacatcatcttcggcgtgtcctatgatgagtaccgctacagaagtgtcatcaaggcctgccagctggaggaggacatcagcaagtttgctgagaaggacaacatcgtgctgggggagggcggcatcaccctgagcggcggccagagggcccgcatcagcctggcccgggctgtgtacaaggatgctgacctgtacctgctggacagccccttcggctacctggatgtgctgacagagaaggagatctttgagagctgtgtgtgcaagctgatggccaacaagacccgcatcctggtgaccagcaagatggagcacctgaagaaggctgacaagatcctgatcctgcacgagggcagcagctacttctacggcaccttcagcgagctgcagaacctgcagcctgacttcagcagcaagctgatgggctgtgacagctttgaccagttctctgctgagaggaggaacagcatcctgacagagaccctgcaccgcttcagcctggagggagatgcccctgtgtcctggacagagaccaagaagcagagcttcaagcagacaggagaatttggagagaagaggaagaacagcatcctgaaccccatcaacagcatcaggaagttcagcatcgtgcagaagacccccctgcagatgaatggcatcgaggaggacagtgatgagcccctggagcggcggctgagcctggtgcctgacagcgagcagggcgaggccatcctgccccgcatcagcgtcatcagcacaggccccaccctgcaggcccggcggcggcagagcgtgctgaacctgatgacccacagcgtgaaccagggccagaacatccacaggaagaccacagccagcaccaggaaggtgtccctggccccccaggccaacctgacagagctggacatctacagccggcggctgagccaggagaccggcctggagatcagcgaggagatcaatgaggaggacctgaaggagtgcttctttgatgacatggagagcatcccagctgtgaccacctggaacacctacctgcgctacatcaccgtgcacaagagcctcatctttgtgctgatctggtgcctggtgatcttcctggccgaggtggccgccagcctggtggtgctgtggctgctgggcaacacccccctgcaggacaagggcaacagcacccacagcaggaacaacagctatgctgtgatcatcaccagcaccagcagctactacgtgttctacatctacgtgggcgtggccgacaccctgctggccatgggcttcttccggggcctgcccctggtgcacaccctcatcaccgtgtccaagatcctgcaccacaagatgctgcacagcgtgctgcaggcccccatgagcaccctgaacaccctgaaggccggcggcatcctgaaccgcttcagcaaggacatcgccatcctggatgacctgctgcccctgaccatctttgacttcatccagctgctgctgattgtcatcggggccatcgctgtggtggccgtgctgcagccctacatctttgtggccaccgtgcctgtgattgtggccttcatcatgctgcgggcctacttcctgcagaccagccagcagctgaagcagctggagagcgagggccgcagccccatcttcacccacctggtgaccagcctgaagggcctgtggaccctgcgggccttcggccggcagccctactttgagaccctcttccacaaggccctgaacctgcacacagccaactggttcctgtacctgagcaccctgcgctggttccagatgagaattgagatgatctttgtgatcttcttcatcgctgtgaccttcatcagcatcctgaccaccggggagggggagggccgggtgggcatcatcctgaccctggccatgaacatcatgagcaccctgcagtgggccgtgaacagcagcattgatgtggacagcctgatgaggtctgtgtccagggtcttcaagttcatcgacatgcccacagagggcaagcccaccaagagcaccaagccctacaagaatggccagctgagcaaggtgatgatcatcgagaacagccacgtgaagaaggatgacatctggcccagcggcggccagatgacagtgaaggacctgacagccaagtacacagagggcggcaatgccatcctggagaacatctccttcagcatcagccctggccagagggtgggcctgctgggccgcacaggcagcggcaagagcaccctgctgagcgccttcctgcggctgctgaacacagaaggagagatccagattgatggagtgtcctgggacagcatcaccctgcagcagtggaggaaggccttcggggtcatcccccagaaggtgttcatcttcagcggcaccttcaggaagaacctggacccctatgagcagtggagcgaccaggagatctggaaggtggctgatgaggtgggcctgcggagcgtcatcgagcagtttcctgggaagctggactttgtgctggtggatggcggctgtgtgctgagccacggccacaagcagctgatgtgcctggcccggtctgtgctgagcaaggccaagatcctgctgctggatgagcccagcgcccacctggaccctgtgacctaccagatcatccggaggaccctgaagcaggcctttgctgactgcaccgtcatcctgtgtgagcaccgcatcgaggccatgctggagtgccagcagttcctggtgattgaggagaacaaggtgcggcagtatgacagcatccagaagctgctgaatgaaagaagcctcttccggcaggccatcagccccagcgacagagtgaagctgttcccccacaggaacagcagcaagtgcaagagcaagccccagattgctgccctgaaggaggagacagaggaggaggtgcaggacacccggctgtag

SEQ ID NO: 9760 - DNA, 4317 bp, Artificial Sequence
  derived and/or modified sequence
atgcagaggagccccctggagaaggcctctgtggtgtccaagctgttcttctcctggacccggcccatcctgaggaagggctaccggcagaggctggagctgagtgacatctaccagatccccagcgtggacagcgctgacaacctgtctgagaagctggagcgggagtgggaccgggagctggccagcaagaagaaccccaagctgatcaatgccctgcggcgctgcttcttctggaggttcatgttctacggcatcttcctgtacctgggggaggtgaccaaggctgtgcagcccctgctgctgggccgcatcatcgccagctatgaccctgacaacaaggaggagaggagcatcgccatctacctgggcatcggcctgtgcctgctcttcatcgtgaggaccctgctgctgcacccagccatcttcggcctgcaccacatcggcatgcagatgagaattgccatgttcagcctcatctacaagaagggcctggccctggcccactttgtgtggatcgcccccctgcaggtggccctgctgatgggcctcatctgggagctgctgcaggccagcgccttctgtggcctgggcttcctgattgtgctggccctcttccaggccggcctgggccgcatgatgatgaagtacagagaccagagagctgggaagatcagcgagcggctggtgatcaccagcgagatgattgagaacatccagagcgtgaaggcctactgctgggaggaggccatggagaagatgattgagaacctgcggcagacagagctgaagctgaccaggaaggccgcctacgtgcgctacttcaacagcagcgccttcttcttcagcggcttctttgtggtgttcctgtctgtgctgccctatgccctgatcaagggcatcatcctgaggaagatcttcaccaccatctccttctgcatcgtgctgaggatggctgtgacccggcagttcccctgggccgtgcagacctggtatgacagcctgggcgccatcaacaagatccaggacttcctgcagaagcaggagtacaagaccctggagtacaacctgaccaccacagaggtggtgatggagaatgtgacagccttctgggaggagggctttggagagctgtttgagaaggccaagcagaacaacaacaacaggaagaccagcaatggagatgacagcctcttcttcagcaacttcagcctgctgggcacccctgtgctgaaggacatcaacttcaagattgaaagaggccagctgctggccgtggccggcagcactggagctgggaagaccagcctgctgatggtgatcatgggagagctggagcccagcgagggcaagatcaagcacagcggccgcatctccttctgcagccagttctcctggatcatgcctggcaccatcaaggagaacatcatcttcggcgtgtcctatgatgagtaccgctacagaagtgtcatcaaggcctgccagctggaggaggacatcagcaagtttgctgagaaggacaacatcgtgctgggggagggcggcatcaccctgagcggcggccagagggcccgcatcagcctggcccgggctgtgtacaaggatgctgacctgtacctgctggacagccccttcggctacctggatgtgctgacagagaaggagatctttgagagctgtgtgtgcaagctgatggccaacaagacccgcatcctggtgaccagcaagatggagcacctgaagaaggctgacaagatcctgatcctgcacgagggcagcagctacttctacggcaccttcagcgagctgcagaacctgcagcctgacttcagcagcaagctgatgggctgtgacagctttgaccagttctctgctgagaggaggaacagcatcctgacagagaccctgcaccgcttcagcctggagggagatgcccctgtgtcctggacagagaccaagaagcagagcttcaagcagacaggagaatttggagagaagaggaagaacagcatcctgaaccccatcaacagcatcaggaagttcagcatcgtgcagaagacccccctgcagatgaatggcatcgaggaggacagtgatgagcccctggagcggcggctgagcctggtgcctgacagcgagcagggcgaggccatcctgccccgcatcagcgtcatcagcacaggccccaccctgcaggcccggcggcggcagagcgtgctgaacctgatgacccacagcgtgaaccagggccagaacatccacaggaagaccacagccagcaccaggaaggtgtccctggccccccaggccaacctgacagagctggacatctacagccggcggctgagccaggagaccggcctggagatcagcgaggagatcaatgaggaggacctgaaggagtgcttctttgatgacatggagagcatcccagctgtgaccacctggaacacctacctgcgctacatcaccgtgcacaagagcctcatctttgtgctgatctggtgcctggtgatcttcctggccgaggtggccgccagcctggtggtgctgtggctgctgggcaacacccccctgcaggacaagggcaacagcacccacagcaggaacaacagctatgctgtgatcatcaccagcaccagcagctactacgtgttctacatctacgtgggcgtggccgacaccctgctggccatgggcttcttccggggcctgcccctggtgcacaccctcatcaccgtgtccaagatcctgcaccacaagatgctgcacagcgtgctgcaggcccccatgagcaccctgaacaccctgaaggccggcggcatcctgaaccgcttcagcaaggacatcgccatcctggatgacctgctgcccctgaccatctttgacttcatccagctgctgctgattgtcatcggggccatcgctgtggtggccgtgctgcagccctacatctttgtggccaccgtgcctgtgattgtggccttcatcatgctgcgggcctacttcctgcagaccagccagcagctgaagcagctggagagcgagggccgcagccccatcttcacccacctggtgaccagcctgaagggcctgtggaccctgcgggccttcggccggcagccctactttgagaccctcttccacaaggccctgaacctgcacacagccaactggttcctgtacctgagcaccctgcgctggttccagatgagaattgagatgatctttgtgatcttcttcatcgctgtgaccttcatcagcatcctgaccaccggggagggggagggccgggtgggcatcatcctgaccctggccatgaacatcatgagcaccctgcagtgggccgtgaacagcagcattgatgtggacagcctgatgaggtctgtgtccagggtcttcaagttcatcgacatgcccacagagggcaagcccaccaagagcaccaagccctacaagaatggccagctgagcaaggtgatgatcatcgagaacagccacgtgaagaaggatgacatctggcccagcggcggccagatgacagtgaaggacctgacagccaagtacacagagggcggcaatgccatcctggagaacatctccttcagcatcagccctggccagagggtgggcctgctgggccgcacaggcagcggcaagagcaccctgctgagcgccttcctgcggctgctgaacacagaaggagagatccagattgatggagtgtcctgggacagcatcaccctgcagcagtggaggaaggccttcggggtcatcccccagaaggtgttcatcttcagcggcaccttcaggaagaacctggacccctatgagcagtggagcgaccaggagatctggaaggtggctgatgaggtgggcctgcggagcgtcatcgagcagtttcctgggaagctggactttgtgctggtggatggcggctgtgtgctgagccacggccacaagcagctgatgtgcctggcccggtctgtgctgagcaaggccaagatcctgctgctggatgagcccagcgcccacctggaccctgtgacctaccagatcatccggaggaccctgaagcaggcctttgctgactgcaccgtcatcctgtgtgagcaccgcatcgaggccatgctggagtgccagcagttcctggtgattgaggagaacaaggtgcggcagtatgacagcatccagaagctgctgaatgaaagaagcctcttccggcaggccatcagccccagcgacagagtgaagctgttcccccacaggaacagcagcaagtgcaagagcaagccccagattgctgccctgaagtag

SEQ ID NO: 9761 - DNA, 4260 bp, Artificial Sequence
  derived and/or modified sequence
atgcagaggagccccctggagaaggcctctgtggtgtccaagctgttcttctcctggacccggcccatcctgaggaagggctaccggcagaggctggagctgagtgacatctaccagatccccagcgtggacagcgctgacaacctgtctgagaagctggagcgggagtgggaccgggagctggccagcaagaagaaccccaagctgatcaatgccctgcggcgctgcttcttctggaggttcatgttctacggcatcttcctgtacctgggggaggtgaccaaggctgtgcagcccctgctgctgggccgcatcatcgccagctatgaccctgacaacaaggaggagaggagcatcgccatctacctgggcatcggcctgtgcctgctcttcatcgtgaggaccctgctgctgcacccagccatcttcggcctgcaccacatcggcatgcagatgagaattgccatgttcagcctcatctacaagaagaccctgaagctgagcagccgggtgctggacaagatcagcatcggccagctggtgtccctgctgagcaacaacctgaacaagtttgatgagggcctggccctggcccactttgtgtggatcgcccccctgcaggtggccctgctgatgggcctcatctgggagctgctgcaggccagcgccttctgtggcctgggcttcctgattgtgctggccctcttccaggccggcctgggccgcatgatgatgaagtacagagaccagagagctgggaagatcagcgagcggctggtgatcaccagcgagatgattgagaacatccagagcgtgaaggcctactgctgggaggaggccatggagaagatgattgagaacctgcggcagacagagctgaagctgaccaggaaggccgcctacgtgcgctacttcaacagcagcgccttcttcttcagcggcttctttgtggtgttcctgtctgtgctgccctatgccctgatcaagggcatcatcctgaggaagatcttcaccaccatctccttctgcatcgtgctgaggatggctgtgacccggcagttcccctgggccgtgcagacctggtatgacagcctgggcgccatcaacaagatccaggacttcctgcagaagcaggagtacaagaccctggagtacaacctgaccaccacagaggtggtgatggagaatgtgacagccttctgggaggagaccagcctgctgatggtgatcatgggagagctggagcccagcgagggcaagatcaagcacagcggccgcatctccttctgcagccagttctcctggatcatgcctggcaccatcaaggagaacatcatctttggagtgtcctatgatgagtaccgctaccgcagcgtcatcaaggcctgccagctggaggaggacatcagcaagtttgctgagaaggacaacatcgtgctgggggagggcggcatcaccctgagcggcggccagagggcccgcatcagcctggcccgggctgtgtacaaggatgctgacctgtacctgctggacagccccttcggctacctggatgtgctgacagagaaggagatctttgagagctgtgtgtgcaagctgatggccaacaagacccgcatcctggtgaccagcaagatggagcacctgaagaaggctgacaagatcctgatcctgcacgagggcagcagctacttctacggcaccttcagcgagctgcagaacctgcagcctgacttcagcagcaagctgatgggctgtgacagctttgaccagttctctgctgagaggagaaattccatcctgacagagaccctgcaccgcttcagcctggagggagatgcccctgtgtcctggacagagaccaagaagcagagcttcaagcagacaggagaatttggagagaagaggaagaacagcatcctgaaccccatcaacagcatcaggaagttcagcatcgtgcagaagacccccctgcagatgaatggaattgaagaagattctgatgagcccctggagcggcggctgagcctggtgcctgattctgagcagggcgaggccatcctgccccgcatcagcgtcatcagcacaggccccaccctgcaggcccggcggcggcagagcgtgctgaacctgatgacccacagcgtgaaccagggccagaacatccacaggaagaccacagccagcaccaggaaggtgtccctggccccccaggccaacctgacagagctggacatctacagccggcggctgagccaggagaccggcctggagatcagcgaggagatcaatgaggaggacctgaaggagtgcttctttgatgacatggagagcatcccagctgtgaccacctggaacacctacctgcgctacatcaccgtgcacaagagcctcatctttgtgctgatctggtgcctggtgatcttcctggccgaggtggccgccagcctggtggtgctgtggctgctgggcaacacccccctgcaggacaagggcaacagcacccacagcaggaacaacagctatgctgtgatcatcaccagcaccagcagctactacgtgttctacatctacgtgggcgtggccgacaccctgctggccatgggcttcttccggggcctgcccctggtgcacaccctcatcaccgtgtccaagatcctgcaccacaagatgctgcacagcgtgctgcaggcccccatgagcaccctgaacaccctgaaggccggcggcatcctgaaccgcttcagcaaggacatcgccatcctggatgacctgctgcccctgaccatctttgacttcatccagctgctgctgattgtgattggagccatcgctgtggtggccgtgctgcagccctacatctttgtggccaccgtgcctgtgattgtggccttcatcatgctgcgggcctacttcctgcagaccagccagcagctgaagcagctggagagcgagggccgcagccccatcttcacccacctggtgaccagcctgaagggcctgtggaccctgcgggccttcggccggcagccctactttgagaccctcttccacaaggccctgaacctgcacacagccaactggttcctgtacctgagcaccctgcgctggttccagatgagaattgagatgatcttcgtcatcttcttcatcgctgtgaccttcatcagcatcctgaccactggagagggggagggccgggtgggcatcatcctgaccctggccatgaacatcatgagcaccctgcagtgggccgtgaacagcagcattgatgtggacagcctgatgaggtctgtgtccagggtcttcaagttcatcgacatgcccacagagggcaagcccaccaagagcaccaagccctacaagaatggccagctgagcaaggtgatgatcatcgagaacagccacgtgaagaaggatgacatctggcccagcggcggccagatgacagtgaaggacctgacagccaagtacacagaaggaggaaatgccatcctggagaacatctccttcagcatcagccctggccagagggtgggcctgctgggccgcactggaagtggcaagagcaccctgctgagcgccttcctgcggctgctgaacacagaaggagagatccagattgatggagtgtcctgggacagcatcaccctgcagcagtggaggaaggcctttggagtcatcccccagaaggtgttcatcttcagcggcaccttcaggaagaacctggacccctatgagcagtggagcgaccaggagatctggaaggtggctgatgaggtgggcctgcggtctgtgattgagcagtttcctgggaagctggactttgtgctggtggatggcggctgtgtgctgagccacggccacaagcagctgatgtgcctggcccggtctgtgctgagcaaggccaagatcctgctgctggatgagcccagcgcccacctggaccctgtgacctaccagatcatccggaggaccctgaagcaggcctttgctgactgcaccgtcatcctgtgtgagcacagaattgaggccatgctggagtgccagcagttcctggtgattgaggagaacaaggtgcggcagtatgacagcatccagaagctgctgaatgaaagaagcctcttccggcaggccatcagccccagcgacagagtgaagctgttcccccacaggaacagcagcaagtgcaagagcaagccccagattgctgccctgaaggaggagacagaggaggaggtgcaggacacccggctgtag

SEQ ID NO: 9762 - DNA, 6128 bp, Artificial Sequence
  derived and/or modified sequence
aattggaagcaaatgacatcacagcaggtcagagaaaaagggttgagcggcaggcacccagagtagtaggtctttggcattaggagcttgagcccagacggccctagcagggaccccagcgcccgagagaccatgcagaggtcgcctctggaaaaggccagcgttgtctccaaactttttttcagctggaccagaccaattttgaggaaaggatacagacagcgcctggaattgtcagacatataccaaatcccttctgttgattctgctgacaatctatctgaaaaattggaaagagaatgggatagagagctggcttcaaagaaaaatcctaaactcattaatgcccttcggcgatgttttttctggagatttatgttctatggaatctttttatatttaggggaagtcaccaaagcagtacagcctctcttactgggaagaatcatagcttcctatgacccggataacaaggaggaacgctctatcgcgatttatctaggcataggcttatgccttctctttattgtgaggacactgctcctacacccagccatttttggccttcatcacattggaatgcagatgagaatagctatgtttagtttgatttataagaagactttaaagctgtcaagccgtgttctagataaaataagtattggacaacttgttagtctcctttccaacaacctgaacaaatttgatgaaggacttgcattggcacatttcgtgtggatcgctcctttgcaagtggcactcctcatggggctaatctgggagttgttacaggcgtctgccttctgtggacttggtttcctgatagtccttgccctttttcaggctgggctagggagaatgatgatgaagtacagagatcagagagctgggaagatcagtgaaagacttgtgattacctcagaaatgattgaaaatatccaatctgttaaggcatactgctgggaagaagcaatggaaaaaatgattgaaaacttaagacaaacagaactgaaactgactcggaaggcagcctatgtgagatacttcaatagctcagccttcttcttctcagggttctttgtggtgtttttatctgtgcttccctatgcactaatcaaaggaatcatcctccggaaaatattcaccaccatctcattctgcattgttctgcgcatggcggtcactcggcaatttccctgggctgtacaaacatggtatgactctcttggagcaataaacaaaatacaggatttcttacaaaagcaagaatataagacattggaatataacttaacgactacagaagtagtgatggagaatgtaacagccttctgggaggagggatttggggaattatttgagaaagcaaaacaaaacaataacaatagaaaaacttctaatggtgatgacagcctcttcttcagtaatttctcacttcttggtactcctgtcctgaaagatattaatttcaagatagaaagaggacagttgttggcggttgctggatccactggagcaggcaagacttcacttctaatggtgattatgggagaactggagccttcagagggtaaaattaagcacagtggaagaatttcattctgttctcagttttcctggattatgcctggcaccattaaagaaaatatcatctttggtgtttcctatgatgaatatagatacagaagcgtcatcaaagcatgccaactagaagaggacatctccaagtttgcagagaaagacaatatagttcttggagaaggtggaatcacactgagtggaggtcaacgagcaagaatttctttagcaagagcagtatacaaagatgctgatttgtatttattagactctccttttggatacctagatgttttaacagaaaaagaaatatttgaaagctgtgtctgtaaactgatggctaacaaaactaggattttggtcacttctaaaatggaacatttaaagaaagctgacaaaatattaattttgcatgaaggtagcagctatttttatgggacattttcagaactccaaaatctacagccagactttagctcaaaactcatgggatgtgattctttcgaccaatttagtgcagaaagaagaaattcaatcctaactgagaccttacaccgtttctcattagaaggagatgctcctgtctcctggacagaaacaaaaaaacaatcttttaaacagactggagagtttggggaaaaaaggaagaattctattctcaatccaatcaactctatacgaaaattttccattgtgcaaaagactcccttacaaatgaatggcatcgaagaggattctgatgagcctttagagagaaggctgtccttagtaccagattctgagcagggagaggcgatactgcctcgcatcagcgtgatcagcactggccccacgcttcaggcacgaaggaggcagtctgtcctgaacctgatgacacactcagttaaccaaggtcagaacattcaccgaaagacaacagcatccacacgaaaagtgtcactggcccctcaggcaaacttgactgaactggatatatattcaagaaggttatctcaagaaactggcttggaaataagtgaagaaattaacgaagaagacttaaaggagtgcttttttgatgatatggagagcataccagcagtgactacatggaacacataccttcgatatattactgtccacaagagcttaatttttgtgctaatttggtgcttagtaatttttctggcagaggtggctgcttctttggttgtgctgtggctccttggaaacactcctcttcaagacaaagggaatagtactcatagtagaaataacagctatgcagtgattatcaccagcaccagttcgtattatgtgttttacatttacgtgggagtagccgacactttgcttgctatgggattcttcagaggtctaccactggtgcatactctaatcacagtgtcgaaaattttacaccacaaaatgttacattctgttcttcaagcacctatgtcaaccctcaacacgttgaaagcaggtgggattcttaatagattctccaaagatatagcaattttggatgaccttctgcctcttaccatatttgacttcatccagttgttattaattgtgattggagctatagcagttgtcgcagttttacaaccctacatctttgttgcaacagtgccagtgatagtggcttttattatgttgagagcatatttcctccaaacctcacagcaactcaaacaactggaatctgaaggcaggagtccaattttcactcatcttgttacaagcttaaaaggactatggacacttcgtgccttcggacggcagccttactttgaaactctgttccacaaagctctgaatttacatactgccaactggttcttgtacctgtcaacactgcgctggttccaaatgagaatagaaatgatttttgtcatcttcttcattgctgttaccttcatttccattttaacaacaggagaaggagaaggaagagttggtattatcctgactttagccatgaatatcatgagtacattgcagtgggctgtaaactccagcatagatgtggatagcttgatgcgatctgtgagccgagtctttaagttcattgacatgccaacagaaggtaaacctaccaagtcaaccaaaccatacaagaatggccaactctcgaaagttatgattattgagaattcacacgtgaagaaagatgacatctggccctcagggggccaaatgactgtcaaagatctcacagcaaaatacacagaaggtggaaatgccatattagagaacatttccttctcaataagtcctggccagagggtgggcctcttgggaagaactggatcagggaagagtactttgttatcagcttttttgagactactgaacactgaaggagaaatccagatcgatggtgtgtcttgggattcaataactttgcaacagtggaggaaagcctttggagtgataccacagaaagtatttattttttctggaacatttagaaaaaacttggatccctatgaacagtggagtgatcaagaaatatggaaagttgcagatgaggttgggctcagatctgtgatagaacagtttcctgggaagcttgactttgtccttgtggatgggggctgtgtcctaagccatggccacaagcagttgatgtgcttggctagatctgttctcagtaaggcgaagatcttgctgcttgatgaacccagtgctcatttggatccagtaacataccaaataattagaagaactctaaaacaagcatttgctgattgcacagtaattctctgtgaacacaggatagaagcaatgctggaatgccaacaatttttggtcatagaagagaacaaagtgcggcagtacgattccatccagaaactgctgaacgagaggagcctcttccggcaagccatcagcccctccgacagggtgaagctctttccccaccggaactcaagcaagtgcaagtctaagccccagattgctgctctgaaagaggagacagaagaagaggtgcaagatacaaggctttagagagcagcataaatgttgacatgggacatttgctcatggaattggagctcgtgggacagtcacctcatggaattggagctcgtggaacagttacctctgcctcagaaaacaaggatgaattaagtttttttttaaaaaagaaacatttggtaaggggaattgaggacactgatatgggtcttgataaatggcttcctggcaatagtcaaattgtgtgaaaggtacttcaaatccttgaagatttaccacttgtgttttgcaagccagattttcctgaaaacccttgccatgtgctagtaattggaaaggcagctctaaatgtcaatcagcctagttgatcagcttattgtctagtgaaactcgttaatttgtagtgttggagaagaactgaaatcatacttcttagggttatgattaagtaatgataactggaaacttcagcggtttatataagcttgtattcctttttctctcctctccccatgatgtttagaaacacaactatattgtttgctaagcattccaactatctcatttccaagcaagtattagaataccacaggaaccacaagactgcacatcaaaatatgccccattcaacatctagtgagcagtcaggaaagagaacttccagatcctggaaatcagggttagtattgtccaggtctaccaaaaatctcaatatttcagataatcacaatacatcccttacctgggaaagggctgttataatctttcacaggggacaggatggttcccttgatgaagaagttgatatgccttttcccaactccagaaagtgacaagctcacagacctttgaactagagtttagctggaaaagtatgttagtgcaaattgtcacaggacagcccttctttccacagaagctccaggtagagggtgtgtaagtagataggccatgggcactgtgggtagacacacatgaagtccaagcatttagatgtataggttgatggtggtatgttttcaggctagatgtatgtacttcatgctgtctacactaagagagaatgagagacacactgaagaagcaccaatcatgaattagttttatatgcttctgttttataattttgtgaagcaaaattttttctctaggaaatatttattttaataatgtttcaaacatatataacaatgctgtattttaaaagaatgattatgaattacatttgtataaaataatttttatatttgaaatattgactttttatggcactagtatttctatgaaatattatgttaaaactgggacaggggagaacctagggtgatattaaccaggggccatgaatcaccttttggtctggagggaagccttggggctgatgcagttgttgcccacagctgtatgattcccagccagcacagcctcttagatgcagttctgaagaagatggtaccaccagtctgactgtttccatcaagggtacactgccttctcaactccaaactgactcttaagaagactgcattatatttattactgtaagaaaatatcacttgtcaataaaatccatacatttgtgt

SEQ ID NO: 9763 - DNA, 4316 bp, Artificial Sequence
  derived and/or modified sequence
atgcagaggtcgcctctggaaaaggccagcgttgtctccaaactttttttcagctggaccagaccaattttgaggaaaggatacagacagcgcctggaattgtcagacatataccaaatcccttctgttgattctgctgacaatctatctgaaaaattggaaagagaatgggatagagagctggcttcaaagaaaaatcctaaactcattaatgcccttcggcgatgttttttctggagatttatgttctatggaatctttttatatttaggggaagtcaccaaagcagtacagcctctcttactgggaagaatcatagcttcctatgacccggataacaaggaggaacgctctatcgcgatttatctaggcataggcttatgccttctctttattgtgaggacactgctcctacacccagccatttttggccttcatcacattggaatgcagatgagaatagctatgtttagtttgatttataagaagggacttgcattggcacatttcgtgtggatcgctcctttgcaagtggcactcctcatggggctaatctgggagttgttacaggcgtctgccttctgtggacttggtttcctgatagtccttgccctttttcaggctgggctagggagaatgatgatgaagtacagagatcagagagctgggaagatcagtgaaagacttgtgattacctcagaaatgattgaaaatatccaatctgttaaggcatactgctgggaagaagcaatggaaaaaatgattgaaaacttaagacaaacagaactgaaactgactcggaaggcagcctatgtgagatacttcaatagctcagccttcttcttctcagggttctttgtggtgtttttatctgtgcttccctatgcactaatcaaaggaatcatcctccggaaaatattcaccaccatctcattctgcattgttctgcgcatggcggtcactcggcaatttccctgggctgtacaaacatggtatgactctcttggagcaataaacaaaatacaggatttcttacaaaagcaagaatataagacattggaatataacttaacgactacagaagtagtgatggagaatgtaacagccttctgggaggagggatttggggaattatttgagaaagcaaaacaaaacaataacaatagaaaaacttctaatggtgatgacagcctcttcttcagtaatttctcacttcttggtactcctgtcctgaaagatattaatttcaagatagaaagaggacagttgttggcggttgctggatccactggagcaggcaagacttcacttctaatggtgattatgggagaactggagccttcagagggtaaaattaagcacagtggaagaatttcattctgttctcagttttcctggattatgcctggcaccattaaagaaaatatcatctttggtgtttcctatgatgaatatagatacagaagcgtcatcaaagcatgccaactagaagaggacatctccaagtttgcagagaaagacaatatagttcttggagaaggtggaatcacactgagtggaggtcaacgagcaagaatttctttagcaagagcagtatacaaagatgctgatttgtatttattagactctccttttggatacctagatgttttaacagaaaaagaaatatttgaaagctgtgtctgtaaactgatggctaacaaaactaggattttggtcacttctaaaatggaacatttaaagaaagctgacaaaatattaattttgcatgaaggtagcagctatttttatgggacattttcagaactccaaaatctacagccagactttagctcaaaactcatgggatgtgattctttcgaccaatttagtgcagaaagaagaaattcaatcctaactgagaccttacaccgtttctcattagaaggagatgctcctgtctcctggacagaaacaaaaaaacaatcttttaaacagactggagagtttggggaaaaaaggaagaattctattctcaatccaatcaactctatacgaaaattttccattgtgcaaaagactcccttacaaatgaatggcatcgaagaggattctgatgagcctttagagagaaggctgtccttagtaccagattctgagcagggagaggcgatactgcctcgcatcagcgtgatcagcactggccccacgcttcaggcacgaaggaggcagtctgtcctgaacctgatgacacactcagttaaccaaggtcagaacattcaccgaaagacaacagcatccacacgaaaagtgtcactggcccctcaggcaaacttgactgaactggatatatattcaagaaggttatctcaagaaactggcttggaaataagtgaagaaattaacgaagaagacttaaaggagtgcttttttgatgatatggagagcataccagcagtgactacatggaacacataccttcgatatattactgtccacaagagcttaatttttgtgctaatttggtgcttagtaatttttctggcagaggtggctgcttctttggttgtgctgtggctccttggaaacactcctcttcaagacaaagggaatagtactcatagtagaaataacagctatgcagtgattatcaccagcaccagttcgtattatgtgttttacatttacgtgggagtagccgacactttgcttgctatgggattcttcagaggtctaccactggtgcatactctaatcacagtgtcgaaaattttacaccacaaaatgttacattctgttcttcaagcacctatgtcaaccctcaacacgttgaaagcaggtgggattcttaatagattctccaaagatatagcaattttggatgaccttctgcctcttaccatatttgacttcatccagttgttattaattgtgattggagctatagcagttgtcgcagttttacaaccctacatctttgttgcaacagtgccagtgatagtggcttttattatgttgagagcatatttcctccaaacctcacagcaactcaaacaactggaatctgaaggcaggagtccaattttcactcatcttgttacaagcttaaaaggactatggacacttcgtgccttcggacggcagccttactttgaaactctgttccacaaagctctgaatttacatactgccaactggttcttgtacctgtcaacactgcgctggttccaaatgagaatagaaatgatttttgtcatcttcttcattgctgttaccttcatttccattttaacaacaggagaaggagaaggaagagttggtattatcctgactttagccatgaatatcatgagtacattgcagtgggctgtaaactccagcatagatgtggatagcttgatgcgatctgtgagccgagtctttaagttcattgacatgccaacagaaggtaaacctaccaagtcaaccaaaccatacaagaatggccaactctcgaaagttatgattattgagaattcacacgtgaagaaagatgacatctggccctcagggggccaaatgactgtcaaagatctcacagcaaaatacacagaaggtggaaatgccatattagagaacatttccttctcaataagtcctggccagagggtgggcctcttgggaagaactggatcagggaagagtactttgttatcagcttttttgagactactgaacactgaaggagaaatccagatcgatggtgtgtcttgggattcaataactttgcaacagtggaggaaagcctttggagtgataccacagaaagtatttattttttctggaacatttagaaaaaacttggatccctatgaacagtggagtgatcaagaaatatggaaagttgcagatgaggttgggctcagatctgtgatagaacagtttcctgggaagcttgactttgtccttgtggatgggggctgtgtcctaagccatggccacaagcagttgatgtgcttggctagatctgttctcagtaaggcgaagatcttgctgcttgatgaacccagtgctcatttggatccagtaacataccaaataattagaagaactctaaaacaagcatttgctgattgcacagtaattctctgtgaacacaggatagaagcaatgctggaatgccaacaatttttggtcatagaagagaacaaagtgcggcagtacgattccatccagaaactgctgaacgagaggagcctcttccggcaagccatcagcccctccgacagggtgaagctctttccccaccggaactcaagcaagtgcaagtctaagccccagattgctgctctgaaaga

SEQ ID NO: 9764 - DNA, 5949 bp, Artificial Sequence
  derived and/or modified sequence
aattggaagcaaatgacatcacagcaggtcagagaaaaagggttgagcggcaggcacccagagtagtaggtctttggcattaggagcttgagcccagacggccctagcagggaccccagcgcccgagagaccatgcagaggtcgcctctggaaaaggccagcgttgtctccaaactttttttcagctggaccagaccaattttgaggaaaggatacagacagcgcctggaattgtcagacatataccaaatcccttctgttgattctgctgacaatctatctgaaaaattggaaagagaatgggatagagagctggcttcaaagaaaaatcctaaactcattaatgcccttcggcgatgttttttctggagatttatgttctatggaatctttttatatttaggggaagtcaccaaagcagtacagcctctcttactgggaagaatcatagcttcctatgacccggataacaaggaggaacgctctatcgcgatttatctaggcataggcttatgccttctctttattgtgaggacactgctcctacacccagccatttttggccttcatcacattggaatgcagatgagaatagctatgtttagtttgatttataagaagactttaaagctgtcaagccgtgttctagataaaataagtattggacaacttgttagtctcctttccaacaacctgaacaaatttgatgaaggacttgcattggcacatttcgtgtggatcgctcctttgcaagtggcactcctcatggggctaatctgggagttgttacaggcgtctgccttctgtggacttggtttcctgatagtccttgccctttttcaggctgggctagggagaatgatgatgaagtacagagatcagagagctgggaagatcagtgaaagacttgtgattacctcagaaatgattgaaaatatccaatctgttaaggcatactgctgggaagaagcaatggaaaaaatgattgaaaacttaagacaaacagaactgaaactgactcggaaggcagcctatgtgagatacttcaatagctcagccttcttcttctcagggttctttgtggtgtttttatctgtgcttccctatgcactaatcaaaggaatcatcctccggaaaatattcaccaccatctcattctgcattgttctgcgcatggcggtcactcggcaatttccctgggctgtacaaacatggtatgactctcttggagcaataaacaaaatacaggatttcttacaaaagcaagaatataagacattggaatataacttaacgactacagaagtagtgatggagaatgtaacagccttctgggaggagacttcacttctaatggtgattatgggagaactggagccttcagagggtaaaattaagcacagtggaagaatttcattctgttctcagttttcctggattatgcctggcaccattaaagaaaatatcatctttggtgtttcctatgatgaatatagatacagaagcgtcatcaaagcatgccaactagaagaggacatctccaagtttgcagagaaagacaatatagttcttggagaaggtggaatcacactgagtggaggtcaacgagcaagaatttctttagcaagagcagtatacaaagatgctgatttgtatttattagactctccttttggatacctagatgttttaacagaaaaagaaatatttgaaagctgtgtctgtaaactgatggctaacaaaactaggattttggtcacttctaaaatggaacatttaaagaaagctgacaaaatattaattttgcatgaaggtagcagctatttttatgggacattttcagaactccaaaatctacagccagactttagctcaaaactcatgggatgtgattctttcgaccaatttagtgcagaaagaagaaattcaatcctaactgagaccttacaccgtttctcattagaaggagatgctcctgtctcctggacagaaacaaaaaaacaatcttttaaacagactggagagtttggggaaaaaaggaagaattctattctcaatccaatcaactctatacgaaaattttccattgtgcaaaagactcccttacaaatgaatggcatcgaagaggattctgatgagcctttagagagaaggctgtccttagtaccagattctgagcagggagaggcgatactgcctcgcatcagcgtgatcagcactggccccacgcttcaggcacgaaggaggcagtctgtcctgaacctgatgacacactcagttaaccaaggtcagaacattcaccgaaagacaacagcatccacacgaaaagtgtcactggcccctcaggcaaacttgactgaactggatatatattcaagaaggttatctcaagaaactggcttggaaataagtgaagaaattaacgaagaagacttaaaggagtgcttttttgatgatatggagagcataccagcagtgactacatggaacacataccttcgatatattactgtccacaagagcttaatttttgtgctaatttggtgcttagtaatttttctggcagaggtggctgcttctttggttgtgctgtggctccttggaaacactcctcttcaagacaaagggaatagtactcatagtagaaataacagctatgcagtgattatcaccagcaccagttcgtattatgtgttttacatttacgtgggagtagccgacactttgcttgctatgggattcttcagaggtctaccactggtgcatactctaatcacagtgtcgaaaattttacaccacaaaatgttacattctgttcttcaagcacctatgtcaaccctcaacacgttgaaagcaggtgggattcttaatagattctccaaagatatagcaattttggatgaccttctgcctcttaccatatttgacttcatccagttgttattaattgtgattggagctatagcagttgtcgcagttttacaaccctacatctttgttgcaacagtgccagtgatagtggcttttattatgttgagagcatatttcctccaaacctcacagcaactcaaacaactggaatctgaaggcaggagtccaattttcactcatcttgttacaagcttaaaaggactatggacacttcgtgccttcggacggcagccttactttgaaactctgttccacaaagctctgaatttacatactgccaactggttcttgtacctgtcaacactgcgctggttccaaatgagaatagaaatgatttttgtcatcttcttcattgctgttaccttcatttccattttaacaacaggagaaggagaaggaagagttggtattatcctgactttagccatgaatatcatgagtacattgcagtgggctgtaaactccagcatagatgtggatagcttgatgcgatctgtgagccgagtctttaagttcattgacatgccaacagaaggtaaacctaccaagtcaaccaaaccatacaagaatggccaactctcgaaagttatgattattgagaattcacacgtgaagaaagatgacatctggccctcagggggccaaatgactgtcaaagatctcacagcaaaatacacagaaggtggaaatgccatattagagaacatttccttctcaataagtcctggccagagggtgggcctcttgggaagaactggatcagggaagagtactttgttatcagcttttttgagactactgaacactgaaggagaaatccagatcgatggtgtgtcttgggattcaataactttgcaacagtggaggaaagcctttggagtgataccacagaaagtatttattttttctggaacatttagaaaaaacttggatccctatgaacagtggagtgatcaagaaatatggaaagttgcagatgaggttgggctcagatctgtgatagaacagtttcctgggaagcttgactttgtccttgtggatgggggctgtgtcctaagccatggccacaagcagttgatgtgcttggctagatctgttctcagtaaggcgaagatcttgctgcttgatgaacccagtgctcatttggatccagtaacataccaaataattagaagaactctaaaacaagcatttgctgattgcacagtaattctctgtgaacacaggatagaagcaatgctggaatgccaacaatttttggtcatagaagagaacaaagtgcggcagtacgattccatccagaaactgctgaacgagaggagcctcttccggcaagccatcagcccctccgacagggtgaagctctttccccaccggaactcaagcaagtgcaagtctaagccccagattgctgctctgaaagaggagacagaagaagaggtgcaagatacaaggctttagagagcagcataaatgttgacatgggacatttgctcatggaattggagctcgtgggacagtcacctcatggaattggagctcgtggaacagttacctctgcctcagaaaacaaggatgaattaagtttttttttaaaaaagaaacatttggtaaggggaattgaggacactgatatgggtcttgataaatggcttcctggcaatagtcaaattgtgtgaaaggtacttcaaatccttgaagatttaccacttgtgttttgcaagccagattttcctgaaaacccttgccatgtgctagtaattggaaaggcagctctaaatgtcaatcagcctagttgatcagcttattgtctagtgaaactcgttaatttgtagtgttggagaagaactgaaatcatacttcttagggttatgattaagtaatgataactggaaacttcagcggtttatataagcttgtattcctttttctctcctctccccatgatgtttagaaacacaactatattgtttgctaagcattccaactatctcatttccaagcaagtattagaataccacaggaaccacaagactgcacatcaaaatatgccccattcaacatctagtgagcagtcaggaaagagaacttccagatcctggaaatcagggttagtattgtccaggtctaccaaaaatctcaatatttcagataatcacaatacatcccttacctgggaaagggctgttataatctttcacaggggacaggatggttcccttgatgaagaagttgatatgccttttcccaactccagaaagtgacaagctcacagacctttgaactagagtttagctggaaaagtatgttagtgcaaattgtcacaggacagcccttctttccacagaagctccaggtagagggtgtgtaagtagataggccatgggcactgtgggtagacacacatgaagtccaagcatttagatgtataggttgatggtggtatgttttcaggctagatgtatgtacttcatgctgtctacactaagagagaatgagagacacactgaagaagcaccaatcatgaattagttttatatgcttctgttttataattttgtgaagcaaaattttttctctaggaaatatttattttaataatgtttcaaacatatataacaatgctgtattttaaaagaatgattatgaattacatttgtataaaataatttttatatttgaaatattgactttttatggcactagtatttctatgaaatattatgttaaaactgggacaggggagaacctagggtgatattaaccaggggccatgaatcaccttttggtctggagggaagccttggggctgatgcagttgttgcccacagctgtatgattcccagccagcacagcctcttagatgcagttctgaagaagatggtaccaccagtctgactgtttccatcaagggtacactgccttctcaactccaaactgactcttaagaagactgcattatatttattactgtaagaaaatatcacttgtcaataaaatccatacatttgtgtgaaa

SEQ ID NO: 9765 - DNA, 4443 bp, Artificial Sequence
  derived and/or modified sequence
atgcagcggagccccctggagaaggccagcgtggtgagcaagctgttctttagctggacacgtcccattctccgcaaaggctacagacaaaggctggagctcagtgatatctaccaaatcccctctgtcgactccgctgacaacctgtcagaaaaactcgagagagaatgggaccgcgaactcgcctccaagaagaacccaaagttgataaacgcccttcgacggtgtttcttctggaggttcatgttctatgggattttcttgtatctgggagaggtaacaaaggccgtccagcctctgctcctgggtcgcatcatcgcgagctacgatcctgataataaagaggagagaagcattgccatatatcttggaatcggcctttgcctcctgtttatcgtaagaacactattactccaccccgccattttcgggttacatcatattggtatgcaaatgcggatcgccatgttctcgctcatatacaaaaagactcttaagctgtcctcccgggtgctggataagatatccataggacaactggtgagcctgctatctaacaatctgaataaatttgacgaaggtctggcgctggcccatttcgtgtggattgcacccctccaagtggccctgttgatggggttgatctgggagttgcttcaggcctctgccttttgtgggctggggttcttaatcgttctggccctgttccaagcggggttgggtcgtatgatgatgaagtaccgggaccagcgggccgggaagatctcagaaaggctggtgattactagcgagatgattgagaatattcaaagtgtcaaagcatattgctgggaagaagccatggaaaaaatgattgagaatctgcgccagaccgaactgaaactcacaaggaaggcagcttatgtccgctatttcaattcaagcgccttcttcttcagcggattcttcgtggtgttcttgtcagtcctgccatacgccctcataaagggaatcattctgcgcaaaatcttcacaaccatatcgttttgcatagtgttacgaatggcggtgacacgtcaattcccttgggcagtgcagacttggtacgattctctgggcgccattaataaaatacaggacttcctacaaaagcaggaatacaagaccttggaatacaatctcactactaccgaggtcgtaatggaaaacgtgaccgctttttgggaagaagggtttggcgagctgttcgagaaggccaagcagaacaacaacaaccggaagaccagtaacggggacgattcattattcttttcaaacttctccctgctgggaaccccagtgctgaaggatatcaattttaaaattgagagggggcaattgctcgcggtcgcgggttcaacaggggctggcaaaacctcattactgatggttataatgggcgaactcgaacctagtgaaggtaaaattaagcactccggcagaattagcttttgtagtcagttcagctggatcatgcctggaacaattaaggaaaacattatcttcggagtcagctatgacgaatatcggtacagaagcgtcattaaggcctgccagctggaagaggacatctccaaatttgctgaaaaagataacatcgtgctcggcgaaggggggattacactttctggcggccagagagcacgtatttcactagcccgggctgtgtataaggatgcagacttgtacctgctggactcccctttcggctatctcgacgtgcttactgagaaggagatctttgaatcgtgtgtgtgtaaactgatggctaacaaaacaaggattctggtgacgagcaaaatggagcacctgaagaaagcagacaagattctcatcttacatgaaggaagcagctacttttacggaaccttctcagagctgcagaacctgcagcccgactttagcagcaaactaatgggctgtgatagtttcgatcagttctcagccgagcgccgaaattcaatcctgactgagactctccaccgtttctcgcttgaaggggacgctcctgtcagttggactgagacgaaaaagcagagctttaaacaaactggtgaattcggggaaaaaaggaaaaattctattcttaatcccatcaactctattaggaaattttcaattgttcagaagacgccactgcaaatgaatggaatcgaagaagattccgatgagccactggagcgccgtctgtcgctcgtgccagattcagaacaaggggaggctatcttgcctaggatcagcgtgatctccactgggcccactctgcaggcaaggaggcgccaatccgtcctcaatctgatgacacatagcgtgaaccaaggacagaatatccatcgcaagactaccgcgagcacaaggaaggtgagccttgccccacaggcgaatctgactgagctggacatttatagcaggagattgtcccaggaaactggattggaaatttcagaggagatcaacgaagaggacctgaaggagtgtttctttgacgatatggagagtattccggccgtaacaacatggaatacataccttagatacatcacagtacacaagtctctaatttttgtattaatttggtgcttggtgatcttccttgcggaggtagcagcctcactcgtcgtgctttggcttttaggcaatacaccactccaagataagggaaattccacccactcaaggaacaacagctatgccgtgattattacaagcacgtccagctattatgtgttctacatatatgtgggtgtggccgatacgcttctggcaatggggttctttagaggcttgcccttggtgcacaccttaatcacagtttccaaaatcctgcaccataaaatgctgcatagcgtgctccaggcaccaatgagtaccctcaacacactgaaggccggcggaatccttaatcggttcagcaaagacatagctatcctggatgatctgctgccactcaccattttcgactttattcaactgcttctaatcgtcatcggcgctattgctgtggtggccgttctgcaaccgtatatttttgttgccactgttccagtgattgttgcctttatcatgcttagagcttactttctgcaaactagtcagcagctgaagcagctcgagtccgaagggcggagtcccatatttacgcacctggtgacctccttgaaggggctgtggactttgcgcgctttcggacgccagccctacttcgagaccctgttccataaggcattaaacctgcatacagccaattggttcctctatttgagcaccctgaggtggtttcagatgaggatagaaatgatctttgtgatttttttcatcgccgtgaccttcatttcgattttaacaactggtgagggcgagggacgtgttgggatcatccttacccttgccatgaatataatgtccacgctgcagtgggccgtcaatagttcgattgatgttgacagtctcatgagatccgtgtcgagagtgtttaaatttatcgatatgccaacagagggaaagccaaccaagtctactaagccctataaaaatggccagctgagtaaggtgatgatcatcgagaactcccacgtgaagaaggatgacatctggccaagcggcggccagatgacagtcaaagacctgaccgctaaatacaccgagggtggcaacgcgatcctggagaacatttcattcagtatttcccctggccaacgtgtcgggttactgggccgaacaggaagtggaaagtcgaccctcctcagtgcctttctcagattactgaataccgagggcgaaatccagatcgatggtgtctcctgggactctattacattacagcagtggaggaaagcctttggcgtgatccctcaaaaagtttttatcttttccggaacattccggaagaacttagatccgtatgaacagtggtccgatcaagagatttggaaagtggccgatgaagtgggtctacgttcagtaatagaacagttccccgggaagttggattttgtgcttgtggacggtggatgcgtgctctcccatgggcacaagcagttgatgtgcttggctcgctccgtcctgtcgaaagccaaaatcttgctgctggacgaaccctcagcccacttggaccccgtgacatatcagataataaggcggaccctcaaacaagcttttgctgattgcacggtgattctatgtgaacatcgaatcgaggccatgctggaatgccagcagttcctggtcattgaggagaataaggttcgccagtacgatagcattcagaaactattgaacgagcgcagcctgtttaggcaggctataagtccttctgatcgggttaagctattccctcacagaaacagctcaaaatgcaagtccaagccacagatcgctgctctgaaggaagagactgaggaggaggtgcaggacaccaggttatag

SEQ ID NO: 9766 - DNA, 4317 bp, Artificial Sequence
  derived and/or modified sequence
atgcagcggagccccctggagaaggccagcgtggtgagcaagctgttcttttcttggaccagacccatactgcgcaagggctaccgacagagactggaactgtcagacatttaccagattcctagtgtagatagcgcggacaacttatctgagaagttagagagagagtgggacagagagctggcctctaaaaagaaccccaagctgattaatgccctaaggcgctgttttttctggagattcatgttctacggcatttttctgtacctcggggaagtaactaaggctgtgcaacccctattgctaggccggatcatcgcatcctatgacccagataacaaagaggaacgttccattgcgatctacctgggaatcgggctatgcctgcttttcattgttcggactctcttactccatcccgcgattttcggtctacatcatatcggcatgcagatgagaatcgcgatgttctccctgatctacaaaaaaggcctcgctctcgcccacttcgtgtggatcgcacctctgcaggtagccctgctgatgggtctgatctgggagctgcttcaggccagcgcattctgcggccttggcttcctcattgtgttagccctttttcaagctgggcttggacggatgatgatgaagtatcgcgaccagcgcgctggaaagattagtgagagacttgtgataacatcagagatgattgagaacattcagagtgtgaaggcctattgctgggaggaagcgatggagaaaatgatcgagaatctacgccaaaccgagctgaagctcacacgcaaagctgcatacgtgcgctactttaatagctcagcttttttctttagtggattcttcgtggtgttcctttcagtgctcccttatgccctgatcaaaggaataatcctccgaaagatctttacaaccatctcgttttgcatcgtcttgaggatggccgtcacgcgtcagtttccatgggctgtccaaacctggtacgacagcctcggagctataaataagatccaggacttccttcagaaacaggagtacaagacgctggaatacaatctgacgactactgaggtcgtaatggagaatgtgactgcattttgggaagaaggcttcggtgagttgtttgaaaaggctaagcaaaataataataaccgcaagaccagtaacggcgacgactccctattcttttccaacttttccctgctcggtacccccgttctcaaggacataaacttcaagatcgagcggggacaactactcgcagtggcagggagtacaggcgcggggaaaacgtccctcctcatggtgattatgggcgaacttgagccctctgaaggtaagattaagcattctggccgaataagtttctgctcacagttcagctggataatgcctggcacaataaaagagaatatcatcttcggagtatcttacgacgagtatcgatataggagcgttataaaagcatgtcagctggaagaggatatctcaaaattcgcagaaaaggacaatatcgtcctgggagagggcggtatcacactgtccggcggacagagagcacggatatccctagcccgcgctgtttataaggacgcagatctgtatctgttggacagccctttcgggtacctggacgtgctcacagagaaagagatcttcgagtcatgcgtctgtaaattaatggctaacaagacacgaatccttgtcacatcaaaaatggagcacctgaaaaaggctgataagatcctcattctgcatgaggggtcctcgtacttttacggtactttcagtgagctccagaacttacaacccgacttctcatcaaaactcatggggtgtgactccttcgaccagttttccgccgagagaagaaactccatccttaccgagaccctgcaccgtttcagcttggaaggtgatgctccagtttcatggactgagaccaagaaacagagcttcaagcagacaggggagttcggtgaaaagcgcaaaaattctattttaaatccgattaacagcatcagaaagttttctatcgtccagaagactcctctccagatgaacggcattgaagaggattcagatgagcccctggaaaggcggttgagcctggtaccggatagtgaacaaggcgaggccattcttcctcgcatcagtgtgatctctaccggccccactctccaagccagaagacggcagtccgtgctgaatctgatgacacactcagtcaatcaggggcaaaatattcatcgaaaaacaaccgcaagcacgcgtaaagtatccttggccccccaggctaacctgactgagctggatatctacagtcgaaggctttctcaggaaacgggactggaaatatctgaggagataaacgaagaggaccttaaggaatgctttttcgatgacatggagtccattcccgcagttacaacgtggaatacatacctgcgctatataacggtgcacaagagtctgatcttcgtgctgatctggtgtctggtcatctttctcgccgaggttgcagcaagtcttgtggttttatggctgctcggcaataccccactacaagataaagggaattcaacgcacagcaggaataacagttatgcagtaatcattactagcacaagctcatactacgtgttttatatctatgtcggcgtggcggacacccttctagccatgggtttcttcaggggactgccactggtgcatacactgatcaccgtgagtaaaatactccatcataaaatgttgcacagcgtgctgcaggcacctatgagcactctcaatactcttaaagctggcggtatcctgaatcgcttctccaaagatattgccattctggacgacctgctgccactgactatctttgactttattcaactgcttctcattgtgattggagccatagcagttgtggccgttcttcagccgtatatattcgtggccaccgtcccagtaatcgtggccttcataatgctgcgtgcttacttcttgcagactagccagcagctgaagcagctggagtctgagggacgctctccaatctttacgcacctcgtgaccagtctcaagggactgtggacactgcgggcattcggtaggcaaccatattttgagaccctcttccacaaggcactaaacctacacaccgcaaactggtttttgtatctgtctactctcaggtggtttcagatgcggatcgagatgatcttcgttattttcttcatcgcggtcaccttcatcagcatcctgacaactggcgaaggagagggacgggtcggaattatcctgacactagccatgaacattatgtccacacttcaatgggccgtaaactctagcattgatgtggattccctgatgaggtcagttagcagggtgttcaagttcatagatatgcccactgaggggaaaccgacaaagagcacgaagccctacaagaatggccagttgtccaaggtcatgattatcgaaaatagtcacgtgaaaaaggatgatatatggccttcaggaggccagatgacagtgaaggacctcaccgccaagtacactgaggggggtaatgccatacttgaaaatatttcattttccatctctcctggacagagggtcggtctcctggggcgtacgggttcaggcaagagcaccttactgagcgcctttctccgactgctgaatactgagggcgaaatccaaattgacggcgtctcatgggactcaatcacactgcaacagtggcgtaaggcatttggcgtgatcccccagaaggtctttatatttagcgggacctttcgtaagaacctggacccctatgagcagtggtctgatcaggaaatctggaaagtggctgatgaggtggggcttcggtcagtgattgagcaattccctggcaaacttgactttgtgctggtggacggtggatgcgtactaagccacgggcacaagcagctgatgtgcctggcacgttccgtgctgtccaaggccaaaatactactgctggacgagccgagcgcccacctggaccccgttacataccagattatccggagaactctgaaacaggctttcgccgattgcactgtcattctctgcgagcacaggatcgaagccatgctggagtgccagcagttcctagttatagaagagaataaagtaagacagtacgactcaatacagaaactcctcaacgagcgctccctcttccgtcaggccattagcccatctgaccgagtcaaactgttcccgcatcgtaacagtagcaaatgcaagagtaaaccccagatcgccgccctcaaatag

SEQ ID NO: 9767 - DNA, 4260 bp, Artificial Sequence
  derived and/or modified sequence
atgcagcggagccccctggagaaggccagcgtggtgagcaagctgttcttcagctggacgaggccaatactacggaaaggctaccgtcagcggctcgagctgtcggatatttaccaaatcccaagcgtggactctgctgataatttatcagaaaaactggagcgggagtgggacagagaactggcgtcaaagaaaaatccaaagctgattaacgcactcaggcgctgtttcttttggaggtttatgttttatggcatttttctctaccttggggaggtgacaaaagcagtgcagcctctcctgctgggccgtataatcgcgtcctatgacccagacaacaaggaggagcgctccatcgccatatacctgggtatcgggctctgcttactgtttatagtgcgcaccctgttgttacaccccgccatcttcggacttcaccacattggaatgcagatgcgcatcgccatgttttctttgatctacaaaaaaaccttaaagctttccagccgagtgctcgacaaaatatcgatcggtcaactggtttctctgctctccaacaaccttaataagtttgacgagggactggccttagcccactttgtttggatcgcacctctgcaagtggccctgctaatggggcttatttgggaactgctgcaggcctccgccttctgtggcctcgggtttctcatcgtgttagcactgttccaggccgggctcggaagaatgatgatgaagtacagggaccagcgggctggtaaaatttctgaaaggctcgttattacgagcgagatgatcgagaacatacagtccgtgaaggcgtactgctgggaggaagccatggagaagatgatcgaaaacctgcgccagaccgagctcaaactgacccgtaaggctgcgtacgtgaggtacttcaactccagtgcatttttcttttcaggctttttcgtcgtgtttctgagcgttcttccctacgcactgatcaagggaatcattctgcgaaaaattttcactaccatctcgttctgcattgtcctcaggatggctgtgacaaggcagttcccttgggctgtccaaacctggtatgatagtcttggggccattaacaagattcaggactttcttcagaagcaggaatacaaaacactggaatataatttgactactacagaggtggttatggagaatgttaccgcattctgggaagaaacttcactgctcatggttatcatgggagagctagaaccttccgaaggcaagataaaacattctggcagaattagcttttgctcgcagttttcttggatcatgcctggtactataaaggaaaatatcatcttcggagtgtcatacgacgagtaccgatacaggagtgttattaaggcatgccagctggaggaagatatctctaagttcgccgaaaaagacaatattgtgctgggcgagggggggatcaccctgtccggcggtcagagggctagaatctcgctcgccagggccgtgtacaaggatgctgacttatatttgttggacagcccattcgggtatctggacgtactcaccgaaaaggagatcttcgagagctgtgtctgcaaactgatggccaataagaccagaatactagtgactagtaagatggagcacctaaaaaaagcagataagatacttattctccacgagggttctagttacttttacggcacattctccgagctccaaaacctgcagccagacttctcttctaagctaatgggatgcgatagtttcgaccagtttagcgcagaaaggaggaattctattctgaccgaaaccctccaccgatttagtctggaaggtgatgcaccagtaagctggacagagacaaaaaagcaatctttcaagcaaacaggcgagttcggcgaaaaacgcaaaaatagtatcctgaatccaataaacagcattagaaagttcagtatcgtacaaaagacaccgttacagatgaatggaatagaagaggactcagacgagcccctcgagcggagactttcactggttcctgactccgaacagggagaagctatattgccacgcatctctgtgatctctactggacccaccctgcaggcccgccgacgacagagtgttctgaacctaatgacacattcagtgaaccaggggcaaaacatccaccgtaaaaccaccgcttctacccgcaaagtctcactagctcctcaggctaatcttacagaactcgatatctacagcagacgcttaagccaggaaacaggtctggagatctccgaagaaatcaacgaggaagatctgaaagaatgcttctttgacgatatggagtcgataccggccgtgactacatggaatacttatctacggtatatcacagttcacaaatccctgatcttcgtgctgatatggtgccttgttatttttctcgctgaagtagccgcgtccctcgtcgttctttggttgcttggaaacaccccactacaggacaaaggtaactccacccactcccgcaacaatagctacgctgtgattattacatccacctcaagctattacgtgttttatatctatgtgggagtggcagatacgttgctcgccatgggcttttttcgcggcctgcccctcgtgcacaccctcataactgtcagcaagatcctgcaccataagatgctccacagcgtactgcaggctccaatgagtactttaaataccctgaaagccggcggcattttaaacagatttagcaaagacattgccatccttgatgatttgcttcccttgactatattcgactttatacagctcttgctgatcgtcattggagccattgcagtggtagcagtgctccagccctatattttcgtggccacagtacctgtgatcgtggcattcataatgctacgcgcatatttccttcaaacctcccagcagctaaagcagctggagtcagagggtaggtcaccaatttttacacacctcgtgacttctctgaagggtctgtggaccctgcgcgcctttggtcgccaaccttatttcgagaccctgttccacaaggccctgaacctgcacaccgctaactggtttctatatctgagcaccctgcgctggtttcagatgagaatagaaatgatctttgttatcttctttatcgccgtaactttcataagcattctcactactggcgagggggagggacgcgttggaattatcctcaccttggcgatgaacataatgtccaccttgcagtgggccgtgaactctagtatagacgtggattccctgatgaggtcagtttcccgcgtattcaaattcatcgacatgccaacagaaggtaagcctacaaaaagtaccaagccctacaagaacggccagctgtctaaagtaatgattatagaaaacagccatgtgaagaaggacgatatctggccgtctggtgggcagatgactgttaaagatctgacggcgaaatacactgagggcgggaacgcaatcttggagaatatcagtttcagcattagccctggccaacgggtcggcctgttaggacgtactggctctggaaagtcaaccctccttagcgcattcctgcgactgctcaatactgaaggcgagatccagatcgatggagtgtcttgggatagtatcaccttacagcagtggagaaaagcctttggagtcatcccccagaaggttttcatctttagtggaacgttcaggaaaaacctggatccctatgagcaatggagtgatcaagagatttggaaggtggccgatgaagtgggcctgaggtccgtcatcgaacagtttcctggcaagctcgacttcgtacttgtcgacggaggatgcgtgctgtcacacggacacaaacagctgatgtgccttgcacggagtgttttgagtaaggccaagatactgttgctggatgaaccttccgcccatctggatcccgtcacttaccagattatccgaaggactctgaaacaggctttcgccgattgcacagtgattctttgtgagcacaggattgaggctatgctggagtgccagcaattcctagtgatagaagaaaataaagtccggcagtacgacagtattcagaaactgttgaacgagagatcactgtttagacaggctatttcccccagcgatcgagtcaaattattcccacaccgtaactcttccaagtgtaagtcaaaaccccagattgctgcgctcaaagaggagactgaggaggaagtccaggacactcgactgtag

SEQ ID NO: 9768 - DNA, 4443 bp, Artificial Sequence
  derived and/or modified sequence
atgcagcggagtcccctcgaaaaggcatctgtggtttcgaagctgttcttttcctggacccgcccaatactcaggaagggttaccggcagagattggagctgagcgatatttatcagatcccaagcgtggactctgccgacaatctttccgagaagcttgagagggaatgggatcgggagctcgctagcaaaaagaacccaaagctaataaacgctctacggcgatgtttcttttggaggtttatgttctacggaatattcctctacctcggcgaagtgactaaagccgtgcagcccctactgctgggacgcattatcgcttcatatgaccctgataacaaggaggaacggagcatcgccatctacttagggatcggactctgcctgctcttcattgtccgaactctgttacttcatcccgcaatctttggtctgcatcacattgggatgcaaatgaggattgctatgttttcgctgatttacaaaaagacgctaaaactttcaagcagggtcctcgacaagattagcataggacagctggtcagccttctgtcgaacaacctgaacaaattcgatgagggactagccctggctcacttcgtgtggatagcgcctctgcaggtggcccttctgatggggttgatatgggaactactgcaggccagcgcgttttgtggcttgggctttctgatagtacttgccttatttcaagctggtctgggacgcatgatgatgaaatatcgggaccagcgagccggtaagatcagcgaacgactggttatcacctctgaaatgatagaaaatatccagagcgttaaagcttactgctgggaggaagcaatggagaagatgatcgaaaacctacgccagacagaattgaagctgacccgtaaggccgcttacgtgaggtacttcaattcgtccgccttttttttttcaggctttttcgtggtcttcttaagtgtattgccttacgccctgattaaggggatcatcttaagaaagatctttactactatttctttttgtattgtcctaaggatggctgttactaggcagttcccctgggctgttcagacctggtatgatagcctcggagcaattaataagattcaggatttcctgcagaaacaggagtacaaaactttagaatacaaccttactacaacagaagtagtgatggagaacgtcacagctttttgggaagagggattcggtgaactctttgagaaggcaaaacagaacaataataatcgaaaaacctcaaacggtgatgattctctgttcttcagcaacttctctctgctcgggactccagtactgaaggatatcaattttaagatcgaacgtgggcaactgcttgccgtagcaggctccactggtgctggcaagacctccttgcttatggtgattatgggagaactagaaccgtccgagggcaagataaagcattccgggaggatatcattttgtagtcagttcagctggatcatgcctggtactataaaggaaaacatcattttcggggtttcttacgatgagtaccgatacaggagcgtgattaaagcgtgccagctggaggaggatatatcaaagtttgccgagaaagataatatcgtcctcggcgaaggcggtatcaccctgtcagggggtcaacgggcacggatcagtctagcacgcgctgtttacaaggacgctgatctgtatctgctggactcgcctttcggctatctggatgtgctcacagagaaggagatattcgagtcctgcgtgtgtaagctgatggctaacaagacacggattctcgtgacgtccaagatggaacacctgaagaaggcagataagatcctcatattacacgagggtagcagttacttctatggaaccttcagcgagctgcagaatctgcagccagactttagctctaagctgatgggatgcgactcctttgaccagttctctgccgagcgccgaaattccatactgaccgagacacttcacaggttttcactggaaggagacgctcctgtctcctggactgagactaaaaagcagagctttaaacagactggggagttcggcgaaaagaggaaaaatagcatcttgaatcccattaacagtatacggaaatttagcatcgtccagaagacccctctgcagatgaatggcatagaggaagattcagatgagccacttgagagacggctgtcgctggtaccagactccgaacaaggcgaggccatactgccccgaatctccgttatctccactggtcccacattgcaggcacggaggagacaatccgttttgaacctgatgacacattcagtgaaccagggccagaatatacatcgaaagacaacggccagcaccagaaaggtgagcctggctccgcaggcaaatttaaccgagctcgatatatattcccgtcgtttgtcccaggagactgggcttgaaatcagcgaagaaatcaacgaggaggatctgaaagaatgctttttcgacgatatggaatccattcccgctgtaactacctggaacacctacctgcgctatattaccgtgcacaaatcacttattttcgtgctgatctggtgcctggtcatctttctggctgaagtcgccgcttcacttgttgtgctttggctgcttggaaacaccccccttcaggataagggcaatagtactcatagtcggaacaactcctacgctgtaatcatcacttctacatcatcttactatgtattctacatatacgtaggtgtggctgacactttattggccatggggtttttccggggattaccactggtgcacacactcatcaccgtgtctaaaatactccatcataagatgctgcacagtgtgctgcaagcccctatgtcaactcttaacaccctcaaagccggagggatactgaatcgtttctctaaggacattgctattctggacgatctgttgcctcttaccatctttgactttattcagctcctgctgatcgtgatcggagcaattgcagtggtagctgtgctgcagccatatatctttgtcgctacagtgccagtcatcgtggccttcattatgttaagagcgtatttcttgcaaacatcccagcagctcaagcaactggaaagtgaaggcaggtcacctatcttcacacatttggtgacaagtctgaaaggcctctggacgctgagagcctttggcagacagccatattttgagacccttttccataaagcgttaaatctacacaccgctaactggtttctgtatctcagcactctccgttggtttcagatgcggatcgaaatgatctttgtgatcttttttatagcagtaacctttatctccatcttgaccaccggcgagggtgagggccgtgttggtattatcctgacattggctatgaatataatgtctacccttcagtgggccgtaaatagcagcatcgacgtcgacagtttaatgagatcagtgtcccgggttttcaagtttatcgatatgcctacagaaggcaaacccacgaaatccaccaagccatacaaaaacggtcagttatccaaggtgatgatcatagagaattcccacgttaagaaggacgacatctggccttcgggcggacaaatgactgtgaaggacctcacggctaagtacacagagggcggtaatgccatcctcgaaaacataagtttcagcataagtccaggacagagggtgggcctcctcggtcgaaccggaagcgggaaatccacgcttctgagtgctttcctccgcctgctcaacaccgaaggagagatccagattgatggagtgtcatgggacagcatcacactgcagcagtggcggaaagctttcggggtaatccctcaaaaggtgtttatcttttcaggaaccttcaggaaaaacctggatccgtatgagcagtggagtgatcaggaaatttggaaagttgcggacgaagtgggactcaggtctgtgatcgagcagtttccgggaaagctggactttgtgctggtagacgggggttgtgtgctatcccatggacacaagcagctaatgtgcttagcgcgatccgtgctcagcaaagccaagattcttcttctggacgagccaagcgcacacctggaccccgtcacttatcagatcattagacggacactaaaacaggcttttgccgactgtacggttatcctatgcgagcaccggatcgaggccatgctggagtgtcagcagttcctggtaatcgaagagaataaggtacgccaatacgattcaattcagaaactcctcaacgagcggtcattgttccggcaagccatcagtcctagtgaccgggtcaagctttttcctcatcgcaactctagcaaatgtaagagcaagccccagatcgccgcacttaaggaggagactgaagaggaagtacaagacacgcgtttgtag

SEQ ID NO: 9769 - DNA, 4317 bp, Artificial Sequence
  derived and/or modified sequence
atgcagcgctcacctctggaaaaggcttcggttgtaagtaaactgttcttttcctggacccgacctatactccggaagggataccggcagagactcgaactatccgacatttatcagatcccaagcgttgactcggcagacaacctgtctgaaaaactcgaacgtgaatgggacagggaactcgcgagtaaaaagaatcctaagctcattaatgctttgcgccgttgttttttctggcggttcatgttctacgggatctttttgtatcttggagaagtcacgaaggctgtgcagccactcctgctgggcaggatcatagcgagttacgaccctgacaataaggaggagaggtccatcgccatttacctaggaataggcctgtgtctgctgtttatagtgagaacattgcttctgcatcccgcaatctttggcctacaccatattgggatgcagatgaggattgccatgttctctctgatctacaagaaggggctggctcttgctcatttcgtgtggatcgcccctttgcaggttgccctgctcatgggtctgatctgggagctgctgcaggcaagcgctttctgtgggctgggttttctgatagtcctggctctctttcaagcgggactgggccgtatgatgatgaaatatcgggatcagcgggctggtaaaatcagcgaacgtctggtgataacttctgagatgatcgagaatattcagagtgtgaaagcttactgctgggaagaagccatggaaaagatgatcgagaatctccgacaaacagaactgaagctcactagaaaagctgcctacgttagatattttaacagcagtgccttctttttctctggtttctttgttgtgttcttaagcgtgcttccatacgcattaatcaagggcatcatcttgcggaaaatcttcaccactatttctttttgcatcgtcttgcgcatggctgtaacacggcagttcccctgggccgttcaaacatggtacgattccctgggtgcaatcaataaaatccaggacttcttgcagaagcaggagtacaaaactctcgaatacaatcttacaaccactgaggtcgtgatggaaaacgtgacagccttctgggaagaaggattcggggaattatttgagaaagcgaagcagaacaacaataatagaaagacatcgaacggcgacgattcgctatttttctcaaacttctccctgctgggtacccccgtcctcaaggacattaatttcaaaatcgagcggggtcaactgctggccgtcgctgggtccacaggcgctggcaaaacatcgctgttgatggtgatcatgggggagctggagccaagcgagggtaaaatcaagcactcaggcagaattagcttctgctcccagttttcttggattatgcctggcacaataaaggaaaacataattttcggtgtgagctatgatgaataccgctataggtccgtaatcaaggcgtgtcagcttgaggaagacataagcaaattcgctgagaaagataacattgttcttggggaaggaggcatcacattgtccgggggacagagagctcgaatttctctggctcgggctgtctacaaggatgctgacctgtacttactggattctcccttcggctacttggatgtgctgaccgaaaaggaaattttcgagtcttgcgtctgtaaactgatggccaataagacgagaatcctcgtgacctctaagatggaacacctcaagaaggcggataagattctcattctgcacgagggctcctcctacttctacggcacattctcggagctgcagaatttgcaaccagatttctcctcaaaattaatggggtgcgatagcttcgaccaattttccgcagaaaggcggaactccatactgactgagactttgcaccggttttcgctagaaggagacgcaccggtgtcctggacggagacaaagaaacaatctttcaagcaaacaggtgaatttggcgagaagcggaaaaacagcatcctgaaccccatcaactctattcgcaagttcagtatagtccagaagacccccttacagatgaacgggattgaggaggacagcgatgagccgctcgaacggaggctaagcttagtgcctgacagcgaacagggagaggctatcctcccgaggatatctgttatatctacaggccctacattacaagcacggagaaggcaatcagtgctgaatttgatgacccactccgtgaaccaagggcagaacatacatcggaaaactacagctagcactcgcaaggtgagtcttgcgccacaggctaatctgaccgagttggatatctactcacgcagattaagccaggagactggtctagagatctccgaagagataaacgaagaggatctgaaagaatgtttttttgatgatatggaatctatccccgctgtaacgacatggaacacctacctccgctacattaccgtccacaagagcctcatctttgttctcatatggtgtctggttatttttctggctgaagttgccgcatccttagtggtcttgtggttactaggtaatactcccctgcaggataaaggaaactccacacattctaggaataactcttatgcagtgatcataacatccacatcttcttattacgtgttttatatttatgtgggtgtggctgataccctgctggccatgggatttttcagaggactacccttagttcatactctgatcaccgtctctaagattctgcatcataaaatgctgcattccgtgctccaagctcctatgagcactctgaacaccctcaaggctgggggtatcctcaatcgattctcaaaggacatcgcaatccttgatgacctcctgcctctgaccatctttgacttcatacagctcctgctgatcgtaatcggcgctatagccgtggtggctgtcctccagccctacatattcgtagctaccgtgcctgtgattgtggctttcattatgttgcgcgcttactttctgcagacatcacagcagttgaaacagctagaatcagagggtaggagccccatctttacccatctcgttacaagtttaaagggcctctggactctccgggcttttgggaggcaaccgtacttcgaaacacttttccataaggctctaaatctgcacaccgcaaactggttcttgtatctgtctacactgagatggtttcagatgcggatcgagatgatattcgttatctttttcattgctgtaaccttcatctctatcctgactactggtgaaggggaggggagagtgggcatcatcctaactttggccatgaacatcatgtcaacactgcagtgggctgtaaacagctcgattgacgttgatagcctaatgcggtctgtatctagggtgtttaagtttatcgacatgcctacagagggaaagcctacaaagtcgactaaaccctataaaaacgggcagttatccaaggtgatgattatcgagaattcccacgtaaaaaaagacgatatttggccatccggtggtcagatgacggtgaaggacctgacagctaagtacaccgagggcggaaacgccatcttagagaacatttcattttctatctcacccggtcaacgggtcggactcctcgggaggaccgggtcaggcaagtctacactattgtccgccttcctgaggctccttaacacggaaggcgaaatccagatcgacggagtttcctgggactccatcaccctgcagcagtggcgcaaagcctttggtgtgattcctcagaaagtgttcatatttagtggcacctttcggaagaatctcgatccctatgaacagtggtccgatcaagaaatctggaaggtcgccgacgaagttggcctacgctctgttatagaacagtttcctggcaagctagacttcgtgcttgtagacgggggttgtgttttgagccatggccataaacagttaatgtgtctggcccgatctgtccttagcaaggctaaaatcctgctcctggacgagccgagcgcccacctggaccccgtgacgtatcagatcattcgaaggactctgaaacaggccttcgcggattgtactgtcatactgtgtgaacatagaatcgaagctatgctcgagtgccaacagtttttagttatagaggagaacaaagtcaggcagtatgactctattcagaaactgcttaatgagaggagtctgttccgccaagctatcagtccgtccgatagggtaaagctctttcctcataggaacagttcaaagtgtaaaagcaaaccacagatcgccgcactcaagtag

SEQ ID NO: 9770 - DNA, 4260 bp, Artificial Sequence
  derived and/or modified sequence
atgcagagatccccattggaaaaagcaagcgtggtgagtaagttattcttctcatggactcgaccaatcttgagaaaaggatatcggcagaggctggagctgagtgatatataccaaattccatccgtggatagtgccgacaacctctctgaaaaactggagcgggagtgggaccgcgagctggcaagtaagaagaaccctaagcttatcaacgctttgcgcagatgcttcttctggaggtttatgttttacgggatctttttgtatctgggtgaggttaccaaagctgtacagccactgttgctgggcagaatcatagcatcctatgatcctgacaacaaggaagagagaagcatcgcaatctacctggggattggcctctgcttactgtttatagtgcgcaccctgctgctacatccagcaatctttggtttacatcatatcggaatgcagatgcgcattgctatgttctccttgatttacaaaaagactttaaaactctccagtagagtcctcgacaaaatttcaatcggccagctcgtttccctgctgtctaataacctgaataagtttgacgagggtcttgccttggcacacttcgtctggattgcacccctgcaggtagctctgttaatgggccttatctgggagcttctccaagcctctgccttctgtggcctaggatttctgattgtgctggctctctttcaagccggtctcggtcggatgatgatgaaataccgtgaccaaagagcaggcaaaattagcgaacggctcgtgatcacaagcgagatgatcgaaaatatccagtccgttaaagcatattgttgggaggaggcgatggaaaagatgattgagaacctgcgccagaccgagctgaagctgacaagaaaagccgcatacgtcagatatttcaacagttctgcttttttcttctccggctttttcgtggtcttcctgtctgtactgccgtacgccttgatcaaagggattattctgaggaaaatcttcacaaccataagtttctgcatagttctgcggatggccgttacgcgccagttcccgtgggcggtgcaaacctggtacgattcactcggcgctatcaacaagatacaagatttcttgcagaaacaggaatacaaaacactcgagtataatctgaccacaaccgaagtcgtgatggaaaacgtcacggccttttgggaagagacctcccttctgatggtgataatgggcgagttagagcctagcgaaggaaagattaagcattcaggacgcattagcttttgcagccaattttcttggatcatgccaggtacaattaaggagaatattatctttggggtgtcatacgatgagtacaggtataggtcagttatcaaggcgtgccagctggaggaggatatatccaaattcgctgagaaggacaacattgtcctgggcgagggcggtatcacactcagcggcggacaacgtgcgcgtatcagtctcgcccgtgccgtctacaaagacgcggatctgtatctgctggacagcccttttgggtatctggatgtcttgaccgagaaggagatttttgaatcctgcgtgtgcaagctcatggccaacaaaactcgcatcctggtgacctccaaaatggaacacctgaagaaggccgataagatactgattctgcacgaagggagcagctacttctatggaacgttcagcgaacttcaaaatttgcagccggactttagcagcaaattaatgggctgtgacagtttcgaccagttctccgccgagagaaggaacagcatcctgacggaaaccctccacagatttagtctggagggagacgcacctgtgtcctggaccgaaacaaagaaacagtctttcaagcagaccggcgagtttggagaaaaacgaaaaaattctatcctaaatcccatcaatagcattcgcaaattcagcattgtacagaaaacaccgctccagatgaacggcatcgaggaagactcggatgagcccctcgagcggagactgtccctagtaccggatagcgaacaaggtgaagccatcttgccgaggattagcgtcatctccactggccctacactccaagctcgccgaagacaatccgtccttaaccttatgacacattccgtcaatcaagggcaaaatatccacagaaagacaaccgcctccacaagaaaagtctctctagcgcctcaggcgaatctcacagagctggatatttattccagaaggcttagtcaggaaacaggcctggaaatttccgaggaaatcaatgaagaggacctcaaagaatgcttctttgatgatatggaatctatcccggctgttacgacctggaacacgtacctgcggtatattaccgtgcataagtcacttatatttgtgcttatttggtgcctggttatcttcctggccgaggtggccgcatcattggttgtcctatggcttctaggcaatacaccgctgcaggacaaaggaaactctacacatagtaggaacaacagttacgctgtcatcattaccagcacctcttcctattatgtgttttacatctacgtgggggtagctgacaccttgctagcaatgggctttttcagaggtcttccccttgtacatactctgattaccgtcagcaagattttacaccacaagatgcttcattccgtcctgcaggccccaatgtcaacactaaatacgcttaaggcaggcggtatcctgaaccgttttagtaaggacattgcaatactggatgacctgctgcccctgacaatctttgactttatacagctacttctgattgtgatcggggcaatcgccgtggttgctgttctccagccgtacatcttcgtggctaccgtacctgtaattgtggcttttattatgctacgcgcttactttcttcagaccagccagcagttgaagcaactcgagtcagaaggacgctccccgatctttacacatctggtgacaagcttgaagggactatggacattgagggcatttggtagacagccgtactttgagaccttgttccacaaggcccttaaccttcacacagccaactggttcttgtacctctcgactctccgttggttccagatgagaattgagatgatctttgtcattttcttcatcgcagtcacgtttatctcaatactgacaacgggagagggagaaggtcgggtcggcattatactcacactggctatgaatattatgtctaccttgcagtgggccgttaacagctccatcgatgtcgactcccttatgcggagtgtttctagggtttttaagttcatcgacatgcccaccgagggaaaacccacgaaatccacaaagccttataaaaacggccagctgtctaaggtgatgattattgagaacagtcatgtaaagaaggatgacatttggccttcaggcggacagatgaccgtgaaggatctgacagcaaaatacaccgaggggggtaatgccatccttgaaaacatttcattctctataagccctggtcaacgtgtcggcctgctcgggagaacgggtagcggaaaatcaaccctactctcagcattccttcgtctgttaaatacagaaggggaaattcagatcgatggtgtttcatgggacagcattaccctgcaacagtggagaaaagctttcggggtcatcccacagaaggtcttcatcttctcgggcaccttccgcaaaaacctcgacccttatgagcagtggtctgatcaggaaatctggaaggtggctgatgaggtgggcctcaggagtgtcatcgagcagttccccggaaaactggatttcgtgctggtcgatggtggatgtgtcctcagccacgggcacaagcagctgatgtgtctggctcgctccgtgctgtctaaggccaagatcctgcttttagacgagccctccgcccatcttgaccccgtgacgtatcagattatacgccgaactctcaaacaggcattcgcagactgcactgttattctatgcgagcatcggatcgaggccatgctcgagtgccagcagttcttagtgattgaggagaacaaggtgcggcaatacgacagtatccaaaagcttctgaacgagcgctcccttttcaggcaagctatttcccctagcgaccgggtcaaactgtttccccatcggaactccagtaaatgtaaatctaaaccacagatcgcagctctcaaggaagagacagaggaggaagtgcaggacacacgcttatag

SEQ ID NO: 9771 - DNA, 4443 bp, Artificial Sequence
  derived and/or modified sequence
atgcagcgctccccgctggaaaaagcctcggtcgtatcaaaactgttcttctcatggacacggcctatcctgcggaagggataccgccaaaggctcgagctgagtgatatctaccagatacccagcgtagacagtgccgacaatctctccgaaaaactagaaagggaatgggatcgtgaactcgctagtaagaaaaaccctaaattgatcaatgccttgcgaagatgctttttttggcgatttatgttctatgggatctttctgtacctcggcgaagttactaaggccgtgcagcctctgcttttgggacggatcatcgcctcatacgaccctgataacaaagaagagaggtcaattgctatttacttgggaattggcctgtgtcttctttttatagttcgaacgttgcttttacacccagccatcttcgggctgcaccacattggcatgcagatgaggatcgctatgttctcactgatctacaaaaagacccttaaattgagtagtagagtactggacaagatctctatcggtcagctggttagcctcttgtctaacaatctcaataaattcgacgagggcctggctctggcacacttcgtgtggattgcccccctgcaggtggccttgctcatgggtctaatttgggaacttctgcaggcttcagctttctgcgggctgggattcctgatcgtgctcgccttatttcaagcgggcctaggtaggatgatgatgaagtaccgggatcagagagccggaaaaattagtgagcgcctggtgattacttcggaaatgattgaaaatatacagagtgtcaaggcatactgttgggaggaggctatggaaaagatgatagagaacctgcggcagactgaattgaaactgacacggaaagcagcctatgtccggtactttaacagctctgcctttttcttcagtggttttttcgtggtgttcttgtccgttctgccttacgccctgattaagggtataatattaagaaagattttcactactataagcttttgtatcgtgctccgaatggcggtcacgcgtcagttcccttgggcagtacagacatggtacgattcgctgggcgctatcaataagatccaggatttcctccagaaacaggaatataaaacactcgagtataatctgaccactacggaagtggtgatggagaacgtgacggcattttgggaagaaggctttggggagcttttcgagaaggccaagcagaataacaataatcgtaagacatccaacggtgacgactccctgttcttctccaacttcagcttactgggcacgcctgtgctcaaagatattaatttcaagattgaaaggggccagctgctagcagtcgccggttccacaggggcaggtaaaacatcactgcttatggtgattatgggcgaattggaaccgtctgaaggcaagatcaagcactccggacggatcagcttctgcagccaattctcgtggatcatgcctgggacaatcaaggaaaacattatctttggcgttagctatgacgagtatcgatacagatccgtgattaaggcctgccaactggaggaagacatatcaaaatttgctgaaaaagacaatatcgtgctaggggaaggagggatcacactcagtggtggtcagcgcgcccgaatctcacttgcgcgggcagtctacaaagatgccgatctgtacttgcttgatagtcccttcgggtacctggacgtccttacagaaaaagagatctttgagtcttgcgtgtgtaaattgatggccaacaaaactaggattttggtcacttcgaagatggaacatctgaagaaggccgacaaaattttaatcctccacgagggttcttcctacttttatggaacatttagcgagctccagaaccttcaacccgatttttcaagcaagctgatgggatgcgattcattcgatcagttcagcgccgagcggagaaactcaatcctcacagaaactctccaccggttctctcttgaaggggatgcccctgttagttggactgagaccaagaagcagagcttcaagcagactggcgagtttggagaaaagagaaaaaacagtatcctgaatccaatcaatagcatccggaagttcagcatagtgcagaagacgcccctgcagatgaatggtatcgaagaggatagcgatgagcctctggaacgccggctttctttggtcccagactctgagcaaggcgaagcaatcttgcccagaataagtgtcattagcacaggcccgacgttacaagcacgccgtcgacaatcggtgctcaatctaatgacccattcagtcaaccaaggccagaacatccacaggaaaactactgcatccacgcggaaggtgtcgctggcaccacaggccaaccttacagaattggatatctatagccggagactgtcgcaggagactggcctggaaatctccgaggaaattaatgaggaagacctgaaggagtgcttttttgacgacatggagagtattcccgctgtgaccacctggaacacttacctgaggtacatcaccgtgcacaaatcacttatcttcgtgctcatctggtgcctcgtgatattcttggcagaggtggcggcctccctcgtggtgctttggctgttagggaacaccccactgcaagataaaggaaatagtactcatagtcgcaataactcttacgctgtgattattacctctacatcctcatattatgtcttttatatatatgttggcgtggcagatacgcttttggccatgggattctttcggggcctccctcttgtgcacactctgattaccgtttccaaaattctgcatcataaaatgctgcattcagtcctgcaggcgcccatgtctacactcaacactctaaaagctggaggaattcttaacagatttagtaaggatatcgccatactcgacgacttgttacccttaactattttcgacttcatccagttgcttctaatcgttataggcgctatcgctgttgtagctgtcctgcagccctatatctttgttgcaactgtcccagtaattgtagccttcatcatgttgcgtgcgtattttctgcagaccagccaacagctcaagcaacttgagtcagaaggaaggagtcccatttttacccacctcgtgacctccctgaagggtctttggactctccgcgctttcggccgtcagccctatttcgagacactgttccacaaggccctcaacctgcatactgcgaactggtttctgtacctcagcacgctgagatggtttcagatgcgtatagagatgatctttgtgatatttttcatcgccgtcaccttcattagcattttaactaccggagagggggaggggagagttggaatcatcctgactctagccatgaatattatgtcaaccctccagtgggcggtcaatagttccatcgatgtagactcactaatgaggtcggtcagcagggtgtttaagtttatcgacatgcctactgaggggaaaccgacaaagagtacaaagccttataaaaatggccagctgagtaaagtgatgattatcgaaaattcccatgtgaaaaaggacgacatctggccctccggaggccaaatgacggtcaaggacctcaccgctaaatacacagaaggcgggaatgccatcctggagaatatatccttctcaatctcgcctggccagagggtgggtttgctggggaggaccggcagcgggaagagtacactgctgagcgctttcctcaggctactcaacaccgaaggtgaaatccagatcgatggagtgagctgggactctatcaccttacaacagtggaggaaggccttcggcgtgataccgcaaaaagtcttcattttctccggaacatttaggaagaacctagacccttacgaacagtggtccgaccaggaaatctggaaagtggccgatgaggtgggactgagaagcgtcatcgaacagttccctgggaagttggatttcgtcctggtggacggcggttgtgttctgtctcacggccacaagcagctcatgtgcctcgccagatcagtactatccaaggctaaaatactattgttggacgagccttcagctcacctggaccctgtaacttaccagattataaggaggactttaaaacaggcattcgcagactgtactgtcatcctctgcgagcaccgtatcgaggcgatgttagagtgtcagcaattcctggtgatagaagaaaacaaagtcagacaatacgatagcatccagaaactcttgaacgaacgcagcctattcagacaggccattagtccttccgatcgtgtgaaactgtttccccatagaaactcatccaagtgtaagtcaaagccacagattgctgcactgaaggaggaaaccgaggaggaagtacaggatacaaggctatag

SEQ ID NO: 9772 - DNA, 4317 bp, Artificial Sequence
  derived and/or modified sequence
atgcagagatcaccacttgaaaaggcaagcgtagtgagcaagctgtttttctcttggactagacctattctgaggaaaggctatcgacagcggttagaactgtctgatatctaccaaattccctctgttgattctgccgataatctctctgagaagttggaaagggagtgggacagagagctggcatctaaaaaaaaccccaagctgatcaacgcacttaggcgctgtttcttctggagattcatgttttacggtatatttttgtaccttggtgaggtaactaaggccgtgcagccccttcttttggggcgtattatcgcgagctatgatcccgacaacaaggaagaacggagcatcgcgatctatttggggattggtttgtgtctgcttttcattgtccgtacactcctcctgcaccccgccatcttcggactccatcatatcggaatgcaaatgagaattgccatgttcagtttgatatataaaaaaggactggcacttgcccacttcgtgtggatcgcccccctccaggtggccttgctgatgggcctgatttgggagttgttgcaggccagtgctttctgtgggctgggttttctgatcgtgctcgccctcttccaggcaggcctgggcagaatgatgatgaagtatcgggaccagagggctgggaagatttcggaacgtttagtaatcacctccgagatgatagagaatattcaatctgtgaaagcctactgttgggaggaagccatggagaagatgattgagaatttgcggcaaacggaactcaaactgactcgaaaagctgcatatgtcaggtattttaattccagtgctttcttcttctctgggtttttcgtagtgtttctctccgtactcccctatgcactcataaaagggatcatattgagaaaaatatttactactattagcttttgcattgtgctgcggatggcagtgacccgacagtttccttgggctgtccagacttggtatgacagtctcggcgctatcaacaaaatccaggactttttgcagaaacaggaatataagacgctcgagtacaacctgactaccacagaggtggtgatggaaaatgtgacagcattctgggaggagggattcggagaactctttgaaaaagctaaacagaacaacaacaaccgtaagactagtaacggcgacgattctctttttttctccaatttctcgctgcttggcacgcccgtcctaaaagatataaatttcaaaatcgaacgcggtcagctgctggcagtcgcaggcagtaccggtgccgggaaaacctcgctgctcatggtgataatgggagaactggaaccctccgaggggaagatcaaacattcaggcaggatctcgttctgctctcagtttagctggataatgcctggcaccatcaaggagaatattatcttcggtgtctcatatgatgagtacagatatcgcagcgtgataaaggcctgccagctcgaggaagatatatctaagtttgccgagaaagacaacattgtgctgggagaagggggcataacactgagtgggggtcagagagccaggatcagtctggccagagcggtctataaagatgccgacctgtacctgctggactccccttttggctatctggatgtgctcactgagaaggaaatcttcgaatcttgcgtgtgtaaactgatggcaaataaaacccgaattctggtgacatctaagatggagcacttaaagaaagcagataagatactgatactgcatgaagggagctcttatttttatgggacatttagtgaactccagaacctccaacctgatttcagctccaagttgatgggctgtgattccttcgatcaattctctgcagagagaagaaactcgatactgaccgaaactctgcacagattttcgctggagggggacgccccggtgagttggacggagacgaagaagcagagctttaagcaaacaggagaattcggcgagaagcgaaagaacagcatactgaaccctataaattcaatacgcaagttttccatcgtgcagaaaaccccactccagatgaatggcattgaagaggacagtgatgaacctctagaacggcggctcagtctggttcctgatagcgagcaaggcgaggctatcttgccccgaatctccgtgattagcactggtccaacactgcaggccagaagacgccagtcggtgttgaatctgatgacacactctgtcaatcagggacagaatatccacaggaaaacaactgccagcacaaggaaggtcagtcttgcaccacaagccaatctgactgaactggatatatactcgagaaggctgagccaggaaaccggactcgagataagcgaggagatcaacgaggaagatttgaaagagtgcttcttcgatgatatggagtctatcccggcagtgactacctggaatacctatctcagatatatcaccgtacacaaaagcttgatttttgttctaatctggtgcctggtcattttcttagctgaggttgcagcttcacttgtggtcctttggctgcttggcaacaccccattacaggacaagggaaattctacacattccaggaataactcatacgcagtgatcatcaccagcaccagttcttactacgtcttttacatctatgtcggggtcgctgacactctgttggcaatgggatttttccgaggcttgcctctggttcacacactcatcactgtatccaaaattcttcaccacaagatgctgcactctgttctgcaggctcctatgtctaccctgaatacgttgaaagctggaggcatcttgaatcgcttttcaaaggacatcgcaatcctggacgatctgctccctcttaccatcttcgattttattcagcttcttctcatagtcatcggagctatcgcagtggtcgccgttcttcaaccgtatatcttcgtagcaaccgtccccgtgatcgtggcatttatcatgctgcgcgcctactttctccaaactagccagcagctcaaacagctggagtcagaagggaggtcacctatttttactcacctggtcacatccctgaagggtttgtggactctaagagccttcggtcgacaaccctatttcgagacgctgttccacaaagccctgaacctccacaccgcaaattggttcttgtacctgtctacactcaggtggtttcagatgcggatcgagatgatcttcgttatcttcttcatcgctgtgacatttatctctatcctgacgaccggcgagggcgaaggccgggtgggcatcatcctaaccctggctatgaacattatgtccacactgcagtgggccgtgaatagttccattgacgtcgattctttgatgcgcagcgtttccagagtcttcaaatttattgatatgcctaccgaggggaaacccactaaaagcaccaagccctataagaacggtcaactgtccaaggtgatgatcatagagaattctcatgttaagaaagacgatatatggccctccgggggacagatgacagttaaggatctgactgcaaagtacacagaggggggcaatgccattctcgaaaatatatcattttccatctcgcctggacagcgtgtgggcctgctcggccgaaccgggagtggcaaatccaccctcctctccgcttttttaagactcctgaatactgaaggggaaatccagatagatggggtgagctgggattctatcaccctccagcagtggcgcaaagcgtttggggtgatcccgcagaaggtgtttatcttctcagggacgttcaggaagaatctggacccttacgagcagtggagcgatcaggagatctggaaagtggccgatgaggtcgggctccgcagcgtaattgagcagtttccaggaaaattggactttgtactggttgacggcggttgcgtactgagtcatggccacaaacagttaatgtgtttggctagatctgtcctatctaaggctaaaatcctgctcctggatgagcccagtgcccatttagaccccgtgacctatcagataatacgccgaaccttgaagcaagcatttgccgactgtacggtgattctgtgtgaacaccgaattgaggccatgctggagtgccaacaatttctagtgattgaggaaaacaaagtgcgacagtacgattctatccaaaaactccttaacgaacggagtctttttcgtcaggccatctcaccctccgaccgtgtgaaattattccctcaccggaacagttccaaatgtaagtcgaaaccccagatcgccgctctcaaatag

SEQ ID NO: 9773 - DNA, 4260 bp, Artificial Sequence
  derived and/or modified sequence
atgcaaagatcgcctttggagaaagcatccgtcgtgagcaagttgttcttctcatggaccagaccaatcctgcgcaaaggctatcgccagagactggagttatccgatatatatcagatcccttccgtcgactccgcggataaccttagcgagaaactcgagcgtgaatgggacagagagctcgcatccaaaaaaaatcccaaactgatcaacgcactgaggcgatgcttcttctggaggttcatgttttatgggattttcttgtatctcggtgaagtaacaaaggcagtgcaaccgctgcttctcggccgtattatcgcaagctacgatccagacaataaggaagagcgctccatcgcaatttatctgggtataggtctatgtctcctgttcatcgttaggaccctgctgctccaccccgccattttcggcctgcaccacattggcatgcagatgcgcatagccatgttctctctcatctacaagaaaactctcaagctgtcttcccgggtgctagataagataagcattggccagcttgtatcacttctgtccaacaatttaaataaattcgatgagggactcgctcttgcacactttgtttggatcgcgcccctgcaagtggctctgctgatgggactaatctgggaactgctgcaggccagcgctttctgcggtctaggtttcttaatcgtgctagcactgtttcaggccgggctagggaggatgatgatgaagtaccgcgaccagagggcagggaagatctccgaaagattggtgattacatccgaaatgatcgaaaatatacagtcagtgaaagcttactgttgggaagaagcaatggaaaagatgatagaaaatctccgacagacagagctaaagctcaccagaaaggcagcttatgttcgctactttaacagctctgcctttttctttagcggatttttcgtcgtctttctctcagtgctaccctacgccttgataaaggggatcatcctgcgcaaaatctttacaacaatatccttttgcatcgtgctgagaatggccgttacgcgtcaatttccttgggccgttcagacgtggtacgatagtctgggtgctattaacaagatacaagactttttgcagaaacaggagtataagacattggagtataatttgaccacaacagaggtggtgatggagaatgtgactgccttttgggaagaaacatctctcttgatggtgattatgggggagctggagccctctgaaggcaagataaagcactcaggtagaatatcattttgctcgcaatttagctggatcatgcctggcaccatcaaagagaacatcatcttcggcgtgtcttacgacgagtaccgatatcgctccgtcatcaaagcatgtcaacttgaagaagacatctcaaaattcgctgagaaagataatatcgtcctcggagagggcggtatcactctctctggtggccagcgagcccggatctctctggctcgtgcggtgtacaaggacgctgacctgtaccttctcgattctccttttggctatcttgatgtgctgaccgagaaagagattttcgagagctgcgtttgtaagttgatggcgaataaaactcgaatcctcgtcacctctaaaatggagcacctgaagaaagccgacaagatactaattctgcatgagggatcatcttacttctacgggaccttctcggagctgcagaatctgcaaccagacttttcaagcaaactgatgggatgcgattcctttgaccagttttcagccgaacgccggaatagtattttgactgagaccttgcatagattttctctcgaaggcgatgcaccggttagctggacggaaactaaaaagcaatccttcaagcagacgggggaatttggagaaaaacggaaaaactcgatcttgaaccccatcaacagcattcgaaagttttctatcgttcagaaaacgccgctgcagatgaatggtatcgaagaggactctgacgaacctttggagagacgactgtcactggtccccgactctgagcagggagaggcgatcctgccacgtatcagtgtcataagcaccggcccgaccttacaggcccgccgccgacaatcagttcttaatcttatgactcacagtgtaaatcaaggccaaaacatccatagaaagaccaccgcctccacacgaaaggtcagcctcgccccacaagcaaatctcactgaattggatatctactctcgcagactgtcacaggagaccggattagagatctccgaggagataaatgaagaagatctgaaggagtgcttctttgacgatatggagtctattcccgccgtcacaacctggaacacctatcttcgctacataacagtacacaagtctttgatattcgtgctgatttggtgcctggtaatttttctggccgaggtggcagcctcgctggtggtgctgtggctgctaggaaatacccctctgcaggacaagggcaatagcacgcacagtcgaaataatagttatgccgttattatcacatctacctcttcttactatgttttctatatatatgtcggcgtcgcagatacacttctggctatgggcttttttcgcggactccccctcgtccataccctgatcactgtgagtaaaatcctacatcacaaaatgctgcactcagttctccaagctcccatgagcacactgaacacactgaaagccggtggcatattaaaccggttctccaaagacatcgccattctcgacgacctgcttcctctgaccatattcgactttattcagcttctccttatagttatcggtgctattgctgtggtggccgtactgcaaccctacatctttgttgccactgtgcccgtgatcgtggccttcatcatgctgcgcgcttactttttacaaacgtcacagcagctgaaacagctggagagcgaaggacggtctccaatattcactcaccttgtgacctcgttaaagggactctggacattgagagcattcggccggcaaccctacttcgagacattatttcataaggctctgaaccttcacaccgccaattggttcctgtatctttcaacactccggtggttccagatgagaattgagatgattttcgtgattttttttatcgccgtgactttcatcagcatcttaaccacaggggaaggagagggccgtgtggggatcattctcactctcgccatgaacatcatgtcgaccctgcagtgggctgtgaatagctctatcgacgtcgattcacttatgcgttccgtctcccgcgtgtttaagtttatagatatgccaaccgagggaaagcccacaaaaagtacgaagccctacaagaacggccagctctctaaggtgatgattattgaaaatagccatgtgaaaaaggacgatatatggccatccggcgggcaaatgacagtgaaggatctgacagccaagtacaccgagggtgggaatgcaatcttggagaatatttcgttctctatctcaccaggtcagcgcgtgggtttgctaggcaggactggctcaggcaagtcaaccctactgtctgctttcctgagactgctcaatacggagggagaaattcagattgacggcgtgtcgtgggacagcatcacgcttcagcagtggcggaaggcctttggggtgatccctcagaaggtgttcatcttcagtggcactttcagaaagaatctggacccatatgagcagtggagtgaccaagagatctggaaggtggcggatgaggtggggcttcgcagtgtgatcgagcagtttcctggtaagttggactttgtcctggtagatggcggctgtgtcctgtcccatggccataagcagttgatgtgcctggctcgctctgtacttagtaaagcgaaaatcctgctgttggacgaaccaagtgctcacctggatccggttacgtatcagataatcaggagaactctgaagcaggccttcgcagattgtacagttatcctgtgtgagcatagaatcgaggctatgctagaatgccagcagtttctggttatcgaagagaacaaagttcgacaatatgattctattcagaaactgctaaatgaacgcagcctgtttcgccaggcaatctccccttccgatcgcgtcaaattgttcccacatcgcaattcttccaagtgcaaaagcaaaccacaaatcgccgctctgaaagaagagacagaagaagaagttcaagatacccgcctctag

SEQ ID NO: 9774 - DNA, 4443 bp, Artificial Sequence
  derived and/or modified sequence
atgcagcggtcccctttagagaaggctagcgtggtttctaagttatttttctcatggacaagacctattctccggaaagggtatagacagcgactcgaattgagtgacatttaccagataccttctgtagactcagctgataatcttagtgaaaagttagaaagagaatgggaccgcgagttagcctcgaagaaaaatcctaaactgatcaatgccttgaggcggtgcttcttctggcgatttatgttctacggcatctttttgtacctgggcgaagtaacaaaagccgtccaaccgcttctgctcggtcgtatcattgcaagctacgatccggacaataaggaagaacggagcattgctatttacttgggaataggcctgtgtctgctgttcatcgtacggactctcctcctccatccagccattttcggcctgcaccatatcggcatgcaaatgaggattgccatgttttctctgatctacaaaaaaacccttaagctgagctctcgcgttctggacaaaatctccattggacagttagttagcctgctttccaacaatctaaataaattcgacgagggcctcgccttggcccattttgtgtggattgcacccctccaagtcgccctgctgatgggactgatctgggagttactccaggcaagtgcattttgcggacttgggttcctgattgtgctggcattgttccaagccggactaggaaggatgatgatgaagtatcgagatcagcgagctggcaaaatctcagaaaggctcgtgattaccagtgaaatgatcgagaatatccagagcgtgaaggcttattgctgggaagaggccatggaaaagatgattgagaacttacgacaaactgagttgaaactcactcggaaagctgcctatgtcaggtatttcaactctagcgctttcttcttttctgggttttttgttgtctttttgtctgtcctgccatatgctcttattaagggtatcattttgcgaaaaatctttacgacaatttctttttgcatagtcctcagaatggccgtgacccgccaatttccttgggctgtccagacttggtacgattccctcggcgcaataaacaaaatacaggattttctgcagaagcaggagtacaaaactctagagtacaatcttaccactaccgaggttgttatggagaatgtgaccgctttttgggaagaagggttcggcgaactgttcgaaaaggccaaacagaataataataacagaaagacctctaacggagacgattcactctttttttccaatttctctttgttgggaacgcccgtcctgaaagatatcaacttcaaaattgaacgtggtcagctcctggctgtggctggaagtacaggagctggtaaaacatccctgcttatggtgattatgggagagcttgaaccttctgagggcaaaattaaacattccgggcggatcagtttctgctctcaattttcatggatcatgcctggtacaatcaaggaaaacattatctttggcgttagctatgacgagtatcgatacagatccgtgattaaggcctgccaactggaggaagacatatcaaaatttgctgaaaaagacaatatcgtgctaggggaaggagggatcacactcagtggtggtcagcgcgcccgaatctcacttgcgcgggcagtctacaaagatgccgatctgtacttgcttgatagtcccttcgggtacctggacgtccttacagaaaaagagatctttgagtcttgcgtgtgtaaattgatggccaacaaaactaggatactggtaacctctaagatggagcacctgaaaaaagctgacaagatcttgattcttcacgaggggagttcgtatttttatggcacattctctgaattgcaaaatcttcagccggacttttcatcaaaactcatgggttgtgactcattcgatcaattcagcgccgaacgtagaaattctattttgaccgaaaccttgcatcggtttagcctcgaaggagacgcgcctgtgtcctggacggagacaaagaaacagtcgttcaagcagaccggagaatttggcgaaaaaaggaagaattctatcttaaacccaatcaattctattcggaaatttagcatagtgcagaagacgcctttacaaatgaatggtattgaggaggattccgatgaaccattagagcgaagattatctctcgtgcctgatagcgaacagggcgaagcaatcctcccccggataagcgtgatctcaactggacccacgctgcaggccagacgccgacagagcgttctcaacttaatgacacattccgtgaatcaaggacagaatatacatagaaaaaccacagcctctacaagaaaggtttctctggctcctcaggccaacttgacagaattagacatatactcaagaaggctgtctcaggagactggattggaaatatccgaagaaattaatgaggaggatctgaaggagtgtttctttgacgacatggagtcgattcccgctgttaccacctggaatacgtacctgaggtacatcactgtacataagtcattaatattcgtgcttatatggtgcctagtgatattcctagctgaagtcgccgcctctcttgttgtcctatggctacttggcaacactccattacaagacaagggaaattccacacattcacgaaacaacagttacgccgtcatcatcacaagtacaagtagctattacgtgttttatatctatgtcggagtcgccgatactctcctcgccatgggattcttccgcgggttgccattggtccatacccttatcactgtctcaaagattctccaccataaaatgctacatagtgtgcttcaagcgcccatgtcaaccctgaacaccctgaaagctgggggcatcttaaatcgattctccaaggacatcgctattctggacgacctgcttcctcttacgatttttgatttcatccaactcttgctcatagtcataggcgcaatagccgtagtagctgtgttacaaccatatatattcgtagccaccgttcctgtaattgtcgcttttatcatgctgcgggcatactttcttcagacaagccagcagctaaaacaactggagtcagagggtcgatctcctatatttacacacctggttacaagcctcaagggattatggacacttcgggcattcggacgtcagccatattttgaaacccttttccacaaagccctgaacctccacacagctaattggtttctgtatctctctaccttgcgttggtttcagatgagaatcgaaatgatctttgttatattttttatcgccgttacatttatcagtatcctgacaaccggtgagggagaagggagagttgggataattctaacgcttgcgatgaacatcatgagtactctgcagtgggccgtaaattcatctattgacgtcgactctcttatgcggagtgtctcaagagtctttaaattcattgatatgccaacagaaggcaagcctactaaaagcacaaagccctataagaatggacaacttagtaaagtcatgatcatcgaaaatagccacgttaagaaagatgatatttggccctccggcggacaaatgacggtcaaggatcttacggccaaatacaccgagggcgggaacgcgatccttgaaaatatttcatttagtatttcaccagggcaaagggtcgggcttttagggcgaacaggcagcggcaagtctacactattatccgcctttttaagactgctcaataccgaaggtgaaattcagattgacggcgtgagctgggattctataacactacagcagtggcgaaaagcgttcggcgtgattcctcaaaaggtatttatctttagcggaacatttcgcaagaaccttgatccatacgaacaatggagcgatcaggaaatttggaaagtcgccgacgaagtgggtctacgtagcgtgattgagcagttccccggaaagctggactttgtcttagtggatgggggatgtgtattatcccacggacacaagcaactcatgtgcttggcaaggagtgttcttagcaaagccaaaatactgcttctcgacgaaccgagtgcccacctggaccccgtcacctatcagattattcgcagaacattgaaacaagctttcgccgactgcactgtcattctctgtgagcatagaatagaagcaatgctggagtgtcagcagttcctggtcatcgaagaaaacaaggtacggcaatatgatagtatccaaaaacttctcaatgagcgtagtctcttccgtcaggccatctcaccatctgatagggttaagctcttcccccaccgtaactcctctaaatgtaagtctaagccacagatcgcagccttaaaagaagaaacagaggaagaggttcaggataccagactctag

SEQ ID NO: 9775 - DNA, 4317 bp, Artificial Sequence
  derived and/or modified sequence
atgcagcgctcaccacttgagaaagccagcgttgtttccaaattatttttttcctggaccagacctatactgcgaaaagggtaccgacaaaggctggagttatctgatatctaccagattccctctgtggactccgcagacaacctttctgaaaaacttgaacgcgagtgggatagggaattggcatcaaaaaaaaacccaaaactgataaatgcactgcgaagatgcttcttctggaggttcatgttctacggcatctttctgtacttgggcgaggtgacaaaagccgtgcagcccctgttgcttggacggatcatcgccagctatgatcccgataacaaagaggaacgctctatagccatatatctgggcatcggcctgtgtctgctctttatcgtcaggactctgctactccacccagccattttcggccttcatcatatcgggatgcagatgcgaatagcaatgttcagcctcatatacaaaaagggactcgccctcgcacatttcgtctggattgcccctctgcaggtcgctctattgatgggcctcatatgggaacttcttcaagctagtgccttttgcgggctaggttttcttattgtgctggcactctttcaggcaggcttgggcagaatgatgatgaagtacagagaccagcgagcgggcaagattagtgaacggctggtgattacaagcgagatgatcgagaatatacagtccgtgaaggcttactgttgggaagaggcgatggagaaaatgatcgaaaatctgcgacagactgaactaaagctgaccagaaaggctgcctacgtccgctactttaactcaagcgctttcttctttagcggcttcttcgtggtgttcctttccgttctcccctatgcgctgatcaaaggcattatcctgcgcaaaatctttacaactatatcgttttgtatcgttttgagaatggctgttacccgacagtttccatgggcagtgcagacatggtatgattcactaggcgccattaataaaatccaagactttctccagaagcaggaatataaaaccttagaatataatttaacaaccacagaggtagtcatggaaaatgtgacagccttctgggaggagggattcggagagctgttcgagaaagctaaacaaaacaataataaccgcaaaaccagcaacggcgacgatagcctcttcttcagtaatttcagcctcctcgggactcccgtactgaaagacatcaacttcaagattgaacgcgggcagttgctggccgtggcggggagcacaggcgcgggaaagacctctttgttgatggttattatgggcgaactggaaccaagcgaagggaagatcaagcattccggacgcataagcttctgctcacagtttagttggattatgcctgggactatcaaggagaacattattttcggcgtgagttacgacgagtacagatatagaagcgtgatcaaagcttgtcaactcgaagaagacatcagcaagtttgccgagaaagataatattgtacttggggagggcggcattaccttaagtgggggacagcgggcgcgcatctctttggcaagagccgtgtacaaggacgcagatctctacctgctcgactcgccctttgggtatctggatgtgctcacggaaaaagagatttttgagtcatgtgtgtgcaaactgatggctaataaaacgagaattctggttacaagcaaaatggagcacttgaagaaagcggacaagattctaatattacacgaaggtagttcatatttttatggcacatttagcgagctgcagaatctgcaaccagacttctcatccaaactgatgggttgcgacagcttcgatcaatttagtgcagaacggcgaaatagtatccttacagagacactgcataggttcagtttagagggagacgctcctgtctcatggacggagactaaaaagcagtcttttaagcagactggggaatttggcgaaaaacggaagaactcaattttgaatcctatcaattctattagaaaattttcgatagtccaaaaaactccacttcagatgaatggcatcgaggaggacagcgatgagccactagaacggagactgagcctcgtgcctgactccgagcagggagaggcaatattacctcggatttccgtgatttctactggccccaccctgcaggctaggagaagacaaagcgtcttgaacttgatgacacactctgtaaaccagggtcagaacatacaccggaagactacagctagcacacgaaaggtttcactggctccacaggcaaatctcaccgagctcgacatatattccagacggctgtctcaagaaaccggactggagatcagtgaagaaataaatgaagaagacctaaaggaatgcttttttgacgatatggaatcaatacccgccgtcactacatggaacacatacctaaggtacattaccgtgcataagagcctcatctttgtattgatttggtgcctcgtaatttttctcgccgaagttgcagcaagtcttgttgtcctgtggctcctcggtaataccccacttcaggataagggaaactccacacactctaggaacaattcttacgcagtcattatcacctccacatcaagttactatgttttttacatctatgtgggcgttgcagacacactgctcgccatgggtttcttccggggcctcccactggtgcacactcttattaccgtttccaaaattcttcatcataagatgctccatagtgtgcttcaggctcctatgtcaaccctgaacaccctcaaggctggagggattctcaatagattctccaaggatatcgcaatattagacgatttgctgcctttaacaatattcgatttcattcaactgcttctcatcgtgatcggagccattgccgtagtcgccgtgcttcaaccctacatattcgttgctaccgttccggtgatagtcgctttcataatgctgagggcctattttctacagacatctcaacaactgaagcagctggagtcagagggaagatccccaattttcacacatttggtgacatccctaaaaggactgtggactctccgtgccttcggccggcagccatactttgaaacactgttccataaagcccttaatcttcacaccgccaactggtttctatatcttagcacactgcgttggttccagatgcgaattgaaatgatcttcgttatttttttcatcgccgtgacattcattagtatcctgacaactggggaaggcgaaggccgagtcgggattattttgacacttgctatgaacattatgtcaacacttcaatgggccgtcaattcctcgatcgatgttgactctttgatgcgctccgtcagtcgagtgttcaagttcatcgacatgccaacagagggcaaaccaacgaaatccactaaaccgtacaaaaatggacaactgagcaaggtcatgattatcgagaacagccatgtgaaaaaggatgatatttggccctccggagggcagatgacagttaaagaccttacagccaagtacacagaaggggggaacgcgattttggagaacatctctttctcaattagtccgggacagcgcgtgggattgcttggaaggactgggagtggcaagagcaccttgctgtcagcatttcttcggttattgaacacagagggggaaatccaaatcgacggagtgagttgggacagcattacgctccagcagtggcgaaaggccttcggggtgataccccagaaagttttcatttttagcgggacatttaggaaaaatctggatccgtacgagcaatggagcgatcaggaaatttggaaagtcgcggatgaggtcgggctacgctctgtgatcgagcagtttccgggcaagctggattttgtgttagtagacggaggttgcgtgttatcgcacggacataagcagctcatgtgcctggcaagatccgtgctctccaaggccaagattctccttctggacgaaccttcagctcacttagatcctgtcacatatcagattattagaagaaccctaaagcaggcattcgccgattgcaccgtgatactttgcgaacaccggattgaagctatgttagagtgccagcagttcctggtgatcgaagagaacaaggtgcgtcaatacgattccatccaaaagttgctgaacgaaagaagtctttttcggcaagctatcagccctagtgacagagtgaaattattcccccatcgtaactcaagtaagtgcaaaagcaagccccagatcgccgccctcaaatag

SEQ ID NO: 9776 - DNA, 4260 bp, Artificial Sequence
  derived and/or modified sequence
atgcagcggtcccctttggagaaagccagtgttgtcagcaaactgtttttcagttggacacgacctatactgcggaaaggctaccggcagagactggaacttagtgacatctatcagatccccagtgtagattctgccgataatttaagcgaaaaactggaaagggaatgggatagagaattggcgagcaaaaagaacccaaaactgatcaacgcattaaggcgctgttttttttggaggttcatgttttatggaatcttcttatacctcggcgaagtcacgaaagccgtccaaccccttcttttaggccgaattatagccagttatgaccccgacaataaggaagagagatccatagccatttacttgggaattggtttatgtctgttatttatagtccgcactctgctcctgcaccccgccatcttcggcttacaccacattggaatgcaaatgagaattgctatgtttagcctgatttataagaagacattgaagctatcatctcgagtgctggacaaaatttcaattgggcagctggtgtcattgttgtctaataaccttaacaagtttgacgaaggcctcgcactcgcccatttcgtttggatcgcacctttgcaagtagctcttctgatgggtttgatctgggagctgttacaggcttcagccttttgcggtctcgggttcctgatcgtgcttgctttattccaagcagggctgggacggatgatgatgaaatatagggaccagcgtgccggcaagatatccgagaggctcgttattacctctgaaatgatcgaaaatatacagtctgtaaaagcgtattgttgggaggaagcaatggagaaaatgattgagaatcttaggcaaacagaactgaaactgactcggaaagcagcctacgttcggtactttaactcttccgctttttttttctcaggcttcttcgtggtgttcctatcggtgctgccctacgccctgattaaaggcatcatcttacggaaaatttttaccaccatctctttctgtatcgttctcagaatggcagtgacccgtcagttcccgtgggcagtccagacctggtacgactcgcttggcgctattaataaaatacaggatttcctccaaaaacaagaatacaagactctcgagtataacctgacaacaaccgaagtcgtaatggaaaacgtgaccgcattctgggaggagactagcctccttatggttattatgggagagctcgaaccatccgaaggcaagattaagcattctggacggataagtttttgcagccagttctcctggatcatgcctgggaccataaaagagaatataattttcggagtctcctacgatgaatacaggtaccgaagtgtgatcaaggcttgccaattggaggaagatatttcaaaatttgctgaaaaagacaacatagtacttggggagggtggaatcacactgagtggcggacagcgagcccgaatcagtctagcaagggccgtttacaaggacgctgacctctatctcctggattctccctttggctatttagatgtgctaactgagaaagaaattttcgaatcctgcgtgtgtaagctgatggcgaataagacccgaatcttagttacttctaaaatggaacaccttaagaaagccgacaaaatcctgattttgcacgaaggcagcagctatttttacggcactttctctgagcttcagaatttgcaacctgacttctcttcaaaactaatgggatgtgattcgtttgatcagttcagcgcagaacggagaaattcaatactaacggaaaccctccacagatttagcctcgaaggcgatgcgcccgtctcatggaccgagactaagaagcagagtttcaagcagacaggtgagttcggtgaaaaaagaaaaaattccatactgaaccctataaactctattcgcaagtttagcatcgtacagaagaccccacttcaaatgaacggaatagaagaggactccgatgagcccttagaaagacgcttgagcttggtgccagattctgaacagggggaagccattctaccaaggataagcgtaatcagcaccggccccactcttcaggcccgccgccgacaatcagttcttaatcttatgactcacagtgtaaatcaaggccaaaacatccatagaaagaccaccgcctccacacgaaaggtcagcctcgccccacaagcaaatctcactgaattggatatctactctcgcagactgtcacaggagaccggattagagatctccgaggagataaatgaagaagatctgaaggagtgcttctttgacgatatggagtctattcccgccgtcacaacctggaacacctatcttcgctacataacagtacacaagtctttgatattcgtgctaatttggtgcttagtaattttcctggcagaggtcgcagctagtctcgtcgttctctggttactcgggaatacacccttgcaggacaaaggcaactctacacacagcagaaacaactcctatgcagtcatcatcacaagcacttcatcctactacgtcttttacatctacgtcggcgtggctgatacccttctggcgatgggcttcttccgtggtctgcccttagtgcacaccctaatcactgtgtcaaagatactgcatcacaaaatgctgcactctgtcctccaagccccaatgtccaccctaaacactctgaaagcaggcggcatactcaaccggtttagtaaagacatcgccatcctcgatgatctgcttccattaacaatatttgattttattcagctgctcctaattgtcattggtgcgatcgcagtagtcgccgtactacagccgtatatatttgttgccactgtaccagtcatcgttgctttcatcatgctccgcgcctactttttacagacctcacagcaactgaaacagttggagagtgaaggccggtcacctatcttcacgcaccttgttacaagtttaaaaggcctttggactctccgagcctttggtcgacagccatatttcgagacacttttccacaaggccctcaatttacacacagccaactggtttctttatctgtcaacactccgctggttccagatgaggattgagatgattttcgttatcttctttattgccgttaccttcatctctatactgaccactggggagggagagggacgcgtcggaatcatccttacccttgccatgaacataatgtcaactttgcagtgggctgtcaattctagcattgatgtcgatagccttatgcggtctgtaagtcgggtgtttaagttcatcgacatgcctacagagggcaagcctactaaatctacaaaaccttacaaaaatggacagttgtctaaggtgatgattatagaaaacagtcatgtgaagaaggacgatatttggccaagcgggggacaaatgacagtgaaggacttaaccgcaaagtatactgaagggggcaacgcaattctcgaaaatatctcgttcagtatctcgccaggacagcgagtcggactgctaggacggacagggtccggtaaatcaacacttctgagcgcttttttgagactgctgaacacagagggcgagatccagattgacggagtgagttgggactctataacattacagcagtggagaaaagcctttggagtgattccacaaaaggttttcatcttctccggtacatttcgcaagaacctagatccatacgaacagtggagtgatcaggagatctggaaggtagccgacgaagtgggccttagatcagtgattgagcagtttcctgggaagttggactttgttctggtggacgggggatgtgtgctttctcacggccacaagcaattaatgtgtttagcacggtcagttctgtctaaagccaaaatcctgttgttagatgagccttccgctcatttggatccagttacgtatcagatcatccgaagaactctaaaacaggctttcgcagactgcacagttatattatgtgagcatcgcatcgaggccatgttggagtgccagcagtttttagtcatcgaagagaataaggtgcggcagtatgatagtattcagaaacttcttaatgagcgcagcctgttcagacaagcaataagtccctccgaccgcgtcaagctgttccctcatcgcaattctagtaaatgtaagtccaaacctcagatcgccgcactgaaagaagaaactgaagaagaggtccaagataccagattatag

SEQ ID NO: 9777 - RNA, 4586 nt, Artificial Sequence
  derived and/or modified sequence
gggaaauaagagagaaaagaagaguaagaagaaauauaagagccaccaugcagaggucaccgcucgagaaagcgucaguggugucgaaacucuucuucucauggacgcggccuaucuugcggaaaggguaccgacagcggcuugagcucagcgauaucuaccaaaucccuagcguggacucggcggauaaucugagcgagaagcucgagagagaaugggaccgggaguuggcuuccaaaaagaacccuaagcucauuaacgcgcuccgccggugcuucuucuggcgguuuauguucuacgggauuuuucucuaucucggagaagucacuaaagccguccagccgcuccuuuugggacggaucauugcgucguacgauccugauaacaaagaggaacgcucgaucgccaucuaccucgggaucggguugugccuucuguuuaucguaagaacgcuuuuguugcaccccgccauuuucgggcugcaucacaucggaaugcagaugcgaaucgcgauguucucccuuaucuacaagaagacccuuaaacugucguccagagugcucgauaaaaucucaaucggccaacucgugucgcucuuguccaauaaccuuaacaaguucgaugagggccuugcgcuggcacacuuuguguggaucgcaccacuccaaguggcguugcugaugggccugauuugggaacuguugcaagcgucagcguucuguggucuuggauuccuuauuguccuugcauuguuucaagcggggcugggacgcaugaugaugaaauaccgcgaccaacgggcagggaagaucuccgaaagacuugugaucacgucggagaugaucgagaauauucaguccgugaaggcauauuguugggaagaggccauggagaagaugauugaaaaccucaggcagacagaacucaaacucacaagaaaagcggcauauguccgcuacuucaacucguccgcauucuuuuucagcggcuucuucguaguguuucuuucaguacuuccuuaugcauugaucaaaggaauuauucuccggaagaucuucaccacuaucucguucugcaucgugcuucgcauggccguaacccgacaguuccccugggcaguacaaacgugguacgauagcuugggggcuaucaauaagauccaggauuucuugcaaaagcaagaguauaaaacguuggaauauaacuugacaacuacggaaguggucauggagaaugucacagcauuuugggaagaagguuuuggagagcuguuugagaaagccaaacagaacaacaacaaccgcaaaaccucgaauggugaugacucguuguucuucucgaacuucucguugcucggaacacccguauugaaagacaucaacuucaaaaucgagagaggacagcugcuggcggucgcggggagcacgggggcgggaaaaaccagccuguugauggugauuaugggggagcucgagcccagcgaagggaagauuaaacauagcggucgcaucucguuuugcucgcaguucagcuggauuaugccgggaacuaucaaggaaaacaucauuuuuggaguaucauacgacgaguaccgguaucgaucagucauuaaggcgugucagcucgaggaagauauuucgaaauuugcggagaaagauaacauuguguugggagaaggcgggauuaccuugucgggcggucaacgagcgagaaucagccuggcuagagcggucuauaaggaugcagauuuguacuugcuugacucgccauuugguuaucucgauguguugacggaaaaggagaucuuugaaagcugcguguguaagcuuauggcgaacaagaccaggauccucgucacuuccaagauggagcauuugaagaaggcugacaagauccucauucuucacgaagguagcagcuacuuuuauggaacguucucagagcugcagaaucuccagccugacuuuucauccaaacucauggggugcgauucguuugaucaguucuccgccgaaagaaggaacagcauucugacagaaacacugcaucgcuucagccuugagggugacgcucccgugucguggacggagacaaagaaacagucguuuaagcagacgggggaguucggagagaagcggaagaauucaaucuugaaucccaucaauuccauucggaaguucagcaucgugcagaaaacgccgcugcagaugaaugggaucgaagaagauucagacgaaccccuggagcgccgauugagcuuggugccagauucagagcagggugaggccauuuugcccagaaucagcgucaucucaacggguccgacguugcaggcgagaaggcgccagucggugcucaauuugaugacccacagcguaaaccaaggucagaacauccaucgaaaaacaacugcgucgaccaggaaggugucguuggcgccucaggcaaaucucacggaauuggacaucuauuccagacgccugagccaggagacagggcucgaaauuuccgaggagaucaacgaagaggauuugaaggagugcuuuuucgacgauauggaauccaucccggcagugacgacguggaauacguacuugcgcuacauuaccguccacaaauccuugaucuuuguccucaucuggugucucgucaucuuccuugcggaaguggcggcaucauugguggugcucugguuguugggcaacacaccucuccaagauaaggguaacucgacgcacucccgcaacaacucguaugccguaaucaucacaucaacaucgucguacuacgucuuuuacaucuacguaggcguggccgacacuuugcuggccaugggauuuuuccgcggacugccauuggugcauacgcuuaucacgguauccaaaauucuccaccacaaaaugcuccacucgguccuccaagcgcccaugucgacacugaacacacuuaaggccggggguauccucaauagguucucgaaggacaucgcaauucuugaugacuuguugccccucacgaucuucgauuucauucagcuucucuugaucgugauuggggccauugcggugguagcggugcuucagccguacauuuucgucgccaccguccccguaauugucgcguuuaucaugcucagagcguacuuucuccagacgucgcaacagcuuaagcaauuggagucggaagguagaucacccaucuucacacaucugguaacaucgcucaagggacucuggacccuuagagcguucgggagacagccguauuuugagacacucuuucacaaggcccugaaccuucauacggcgaauugguucuuguacuugucgacgcucagaugguuucagaugcggaucgaaaugaucuucgugauuuucuucaucgccgucacguucaucuccauccucaccacaggggaaggcgagggacgcguagggauuaucuugacacuugcgaugaacaucaugucgacacuucaaugggccgugaauucgagcauugauguagacucacugaugagaucggugucgcgcguguucaaguucaucgacaugcccaccgaggggaagccuacaaagagcaccaaaccguacaagaauggacaguuguccaaagucaugaucauugagaauucgcacgucaagaaggaugauaucuggccgagcggagggcaaaugacugucaaagaccucacagcgaaguacaccgaagggggaaacgcgauuuuggagaauaucuccuucucaaucucaccagggcaacggguaggacuuuugggccggacggggucgggaaaaucaacucugcugucggcuuuucugagguugcucaacaccgagggugaaauccagauugacggcgugucaugggacuccauuacacuucagcaguggagaaaggcguuuggagucaucccccagaaaguguuuaucuucucgggcacuuuccggaagaaccucgaccccuaugagcaguggucagaucaggaaauuuggaaaguggcggaugaagucgggcugcgcucagugaucgaacaguuuccggggaagcuggacuuuguccuugucgauggcggauguguccuuucgcacggucacaaacagcucaugugccuggcgagaucgguccucuccaaagccaaaauccugcuguuggaugagcccucggcgcacuuggaucccguaacguaccagauuaucagaagaacucugaagcaggcguuugccgacugcaccgugauccucugugaacaccgaauugaggcaaugcuggagugccagcaauuccuggucauugaggagaacaaggugcgacaguaugacuccauucagaaacuuuugaacgaacgaucccuuuucagacaagccaucucaccauccgaccgcgugaaacucuuuccucaucggaauucgucgaagugcaagucgaaaccucaaaucgcggcacuuaaggaagaaacggaagaagaaguacaggacacccgacugugaagcgcugccuucugcggggcuugccuucuggccaugcccuucuucucucccuugcaccuguaccucuuggucuuugaauaaagccugaguaggaag

SEQ ID NO: 9778 - RNA, 4443 nt, Artificial Sequence
  derived and/or modified sequence
augcagcgcuccccgcuggaaaaagccucggucguaucaaaacuguucuucucauggacacggccuauccugcggaagggauaccgccaaaggcucgagcugagugauaucuaccagauacccagcguagacagugccgacaaucucuccgaaaaacuagaaagggaaugggaucgugaacucgcuaguaagaaaaacccuaaauugaucaaugccuugcgaagaugcuuuuuuuggcgauuuauguucuaugggaucuuucuguaccucggcgaaguuacuaaggccgugcagccucugcuuuugggacggaucaucgccucauacgacccugauaacaaagaagagaggucaauugcuauuuacuugggaauuggccugugucuucuuuuuauaguucgaacguugcuuuuacacccagccaucuucgggcugcaccacauuggcaugcagaugaggaucgcuauguucucacugaucuacaaaaagacccuuaaauugaguaguagaguacuggacaagaucucuaucggucagcugguuagccucuugucuaacaaucucaauaaauucgacgagggccuggcucuggcacacuucguguggauugccccccugcagguggccuugcucaugggucuaauuugggaacuucugcaggcuucagcuuucugcgggcugggauuccugaucgugcucgccuuauuucaagcgggccuagguaggaugaugaugaaguaccgggaucagagagccggaaaaauuagugagcgccuggugauuacuucggaaaugauugaaaauauacagagugucaaggcauacuguugggaggaggcuauggaaaagaugauagagaaccugcggcagacugaauugaaacugacacggaaagcagccuauguccgguacuuuaacagcucugccuuuuucuucagugguuuuuucgugguguucuuguccguucugccuuacgcccugauuaaggguauaauauuaagaaagauuuucacuacuauaagcuuuuguaucgugcuccgaauggcggucacgcgucaguucccuugggcaguacagacaugguacgauucgcugggcgcuaucaauaagauccaggauuuccuccagaaacaggaauauaaaacacucgaguauaaucugaccacuacggaaguggugauggagaacgugacggcauuuugggaagaaggcuuuggggagcuuuucgagaaggccaagcagaauaacaauaaucguaagacauccaacggugacgacucccuguucuucuccaacuucagcuuacugggcacgccugugcucaaagauauuaauuucaagauugaaaggggccagcugcuagcagucgccgguuccacaggggcagguaaaacaucacugcuuauggugauuaugggcgaauuggaaccgucugaaggcaagaucaagcacuccggacggaucagcuucugcagccaauucucguggaucaugccugggacaaucaaggaaaacauuaucuuuggcguuagcuaugacgaguaucgauacagauccgugauuaaggccugccaacuggaggaagacauaucaaaauuugcugaaaaagacaauaucgugcuaggggaaggagggaucacacucagugguggucagcgcgcccgaaucucacuugcgcgggcagucuacaaagaugccgaucuguacuugcuugauagucccuucggguaccuggacguccuuacagaaaaagagaucuuugagucuugcguguguaaauugauggccaacaaaacuaggauuuuggucacuucgaagauggaacaucugaagaaggccgacaaaauuuuaauccuccacgaggguucuuccuacuuuuauggaacauuuagcgagcuccagaaccuucaacccgauuuuucaagcaagcugaugggaugcgauucauucgaucaguucagcgccgagcggagaaacucaauccucacagaaacucuccaccgguucucucuugaaggggaugccccuguuaguuggacugagaccaagaagcagagcuucaagcagacuggcgaguuuggagaaaagagaaaaaacaguauccugaauccaaucaauagcauccggaaguucagcauagugcagaagacgccccugcagaugaaugguaucgaagaggauagcgaugagccucuggaacgccggcuuucuuuggucccagacucugagcaaggcgaagcaaucuugcccagaauaagugucauuagcacaggcccgacguuacaagcacgccgucgacaaucggugcucaaucuaaugacccauucagucaaccaaggccagaacauccacaggaaaacuacugcauccacgcggaaggugucgcuggcaccacaggccaaccuuacagaauuggauaucuauagccggagacugucgcaggagacuggccuggaaaucuccgaggaaauuaaugaggaagaccugaaggagugcuuuuuugacgacauggagaguauucccgcugugaccaccuggaacacuuaccugagguacaucaccgugcacaaaucacuuaucuucgugcucaucuggugccucgugauauucuuggcagagguggcggccucccucguggugcuuuggcuguuagggaacaccccacugcaagauaaaggaaauaguacucauagucgcaauaacucuuacgcugugauuauuaccucuacauccucauauuaugucuuuuauauauauguuggcguggcagauacgcuuuuggccaugggauucuuucggggccucccucuugugcacacucugauuaccguuuccaaaauucugcaucauaaaaugcugcauucaguccugcaggcgcccaugucuacacucaacacucuaaaagcuggaggaauucuuaacagauuuaguaaggauaucgccauacucgacgacuuguuacccuuaacuauuuucgacuucauccaguugcuucuaaucguuauaggcgcuaucgcuguuguagcuguccugcagcccuauaucuuuguugcaacugucccaguaauuguagccuucaucauguugcgugcguauuuucugcagaccagccaacagcucaagcaacuugagucagaaggaaggagucccauuuuuacccaccucgugaccucccugaagggucuuuggacucuccgcgcuuucggccgucagcccuauuucgagacacuguuccacaaggcccucaaccugcauacugcgaacugguuucuguaccucagcacgcugagaugguuucagaugcguauagagaugaucuuugugauauuuuucaucgccgucaccuucauuagcauuuuaacuaccggagagggggaggggagaguuggaaucauccugacucuagccaugaauauuaugucaacccuccagugggcggucaauaguuccaucgauguagacucacuaaugaggucggucagcaggguguuuaaguuuaucgacaugccuacugaggggaaaccgacaaagaguacaaagccuuauaaaaauggccagcugaguaaagugaugauuaucgaaaauucccaugugaaaaaggacgacaucuggcccuccggaggccaaaugacggucaaggaccucaccgcuaaauacacagaaggcgggaaugccauccuggagaauauauccuucucaaucucgccuggccagaggguggguuugcuggggaggaccggcagcgggaagaguacacugcugagcgcuuuccucaggcuacucaacaccgaaggugaaauccagaucgauggagugagcugggacucuaucaccuuacaacaguggaggaaggccuucggcgugauaccgcaaaaagucuucauuuucuccggaacauuuaggaagaaccuagacccuuacgaacagugguccgaccaggaaaucuggaaaguggccgaugaggugggacugagaagcgucaucgaacaguucccugggaaguuggauuucguccugguggacggcgguuguguucugucucacggccacaagcagcucaugugccucgccagaucaguacuauccaaggcuaaaauacuauuguuggacgagccuucagcucaccuggacccuguaacuuaccagauuauaaggaggacuuuaaaacaggcauucgcagacuguacugucauccucugcgagcaccguaucgaggcgauguuagagugucagcaauuccuggugauagaagaaaacaaagucagacaauacgauagcauccagaaacucuugaacgaacgcagccuauucagacaggccauuaguccuuccgaucgugugaaacuguuuccccauagaaacucauccaaguguaagucaaagccacagauugcugcacugaaggaggaaaccgaggaggaaguacaggauacaaggcuauag

SEQ ID NO: 9779 - RNA, 4317 nt, Artificial Sequence
  derived and/or modified sequence
augcagagaucaccacuugaaaaggcaagcguagugagcaagcuguuuuucucuuggacuagaccuauucugaggaaaggcuaucgacagcgguuagaacugucugauaucuaccaaauucccucuguugauucugccgauaaucucucugagaaguuggaaagggagugggacagagagcuggcaucuaaaaaaaaccccaagcugaucaacgcacuuaggcgcuguuucuucuggagauucauguuuuacgguauauuuuuguaccuuggugagguaacuaaggccgugcagccccuucuuuuggggcguauuaucgcgagcuaugaucccgacaacaaggaagaacggagcaucgcgaucuauuuggggauugguuugugucugcuuuucauuguccguacacuccuccugcaccccgccaucuucggacuccaucauaucggaaugcaaaugagaauugccauguucaguuugauauauaaaaaaggacuggcacuugcccacuucguguggaucgccccccuccagguggccuugcugaugggccugauuugggaguuguugcaggccagugcuuucugugggcuggguuuucugaucgugcucgcccucuuccaggcaggccugggcagaaugaugaugaaguaucgggaccagagggcugggaagauuucggaacguuuaguaaucaccuccgagaugauagagaauauucaaucugugaaagccuacuguugggaggaagccauggagaagaugauugagaauuugcggcaaacggaacucaaacugacucgaaaagcugcauaugucagguauuuuaauuccagugcuuucuucuucucuggguuuuucguaguguuucucuccguacuccccuaugcacucauaaaagggaucauauugagaaaaauauuuacuacuauuagcuuuugcauugugcugcggauggcagugacccgacaguuuccuugggcuguccagacuugguaugacagucucggcgcuaucaacaaaauccaggacuuuuugcagaaacaggaauauaagacgcucgaguacaaccugacuaccacagagguggugauggaaaaugugacagcauucugggaggagggauucggagaacucuuugaaaaagcuaaacagaacaacaacaaccguaagacuaguaacggcgacgauucucuuuuuuucuccaauuucucgcugcuuggcacgcccguccuaaaagauauaaauuucaaaaucgaacgcggucagcugcuggcagucgcaggcaguaccggugccgggaaaaccucgcugcucauggugauaaugggagaacuggaacccuccgaggggaagaucaaacauucaggcaggaucucguucugcucucaguuuagcuggauaaugccuggcaccaucaaggagaauauuaucuucggugucucauaugaugaguacagauaucgcagcgugauaaaggccugccagcucgaggaagauauaucuaaguuugccgagaaagacaacauugugcugggagaagggggcauaacacugagugggggucagagagccaggaucagucuggccagagcggucuauaaagaugccgaccuguaccugcuggacuccccuuuuggcuaucuggaugugcucacugagaaggaaaucuucgaaucuugcguguguaaacugauggcaaauaaaacccgaauucuggugacaucuaagauggagcacuuaaagaaagcagauaagauacugauacugcaugaagggagcucuuauuuuuaugggacauuuagugaacuccagaaccuccaaccugauuucagcuccaaguugaugggcugugauuccuucgaucaauucucugcagagagaagaaacucgauacugaccgaaacucugcacagauuuucgcuggagggggacgccccggugaguuggacggagacgaagaagcagagcuuuaagcaaacaggagaauucggcgagaagcgaaagaacagcauacugaacccuauaaauucaauacgcaaguuuuccaucgugcagaaaaccccacuccagaugaauggcauugaagaggacagugaugaaccucuagaacggcggcucagucugguuccugauagcgagcaaggcgaggcuaucuugccccgaaucuccgugauuagcacugguccaacacugcaggccagaagacgccagucgguguugaaucugaugacacacucugucaaucagggacagaauauccacaggaaaacaacugccagcacaaggaaggucagucuugcaccacaagccaaucugacugaacuggauauauacucgagaaggcugagccaggaaaccggacucgagauaagcgaggagaucaacgaggaagauuugaaagagugcuucuucgaugauauggagucuaucccggcagugacuaccuggaauaccuaucucagauauaucaccguacacaaaagcuugauuuuuguucuaaucuggugccuggucauuuucuuagcugagguugcagcuucacuugugguccuuuggcugcuuggcaacaccccauuacaggacaagggaaauucuacacauuccaggaauaacucauacgcagugaucaucaccagcaccaguucuuacuacgucuuuuacaucuaugucggggucgcugacacucuguuggcaaugggauuuuuccgaggcuugccucugguucacacacucaucacuguauccaaaauucuucaccacaagaugcugcacucuguucugcaggcuccuaugucuacccugaauacguugaaagcuggaggcaucuugaaucgcuuuucaaaggacaucgcaauccuggacgaucugcucccucuuaccaucuucgauuuuauucagcuucuucucauagucaucggagcuaucgcaguggucgccguucuucaaccguauaucuucguagcaaccguccccgugaucguggcauuuaucaugcugcgcgccuacuuucuccaaacuagccagcagcucaaacagcuggagucagaagggaggucaccuauuuuuacucaccuggucacaucccugaaggguuuguggacucuaagagccuucggucgacaacccuauuucgagacgcuguuccacaaagcccugaaccuccacaccgcaaauugguucuuguaccugucuacacucaggugguuucagaugcggaucgagaugaucuucguuaucuucuucaucgcugugacauuuaucucuauccugacgaccggcgagggcgaaggccgggugggcaucauccuaacccuggcuaugaacauuauguccacacugcagugggccgugaauaguuccauugacgucgauucuuugaugcgcagcguuuccagagucuucaaauuuauugauaugccuaccgaggggaaacccacuaaaagcaccaagcccuauaagaacggucaacuguccaaggugaugaucauagagaauucucauguuaagaaagacgauauauggcccuccgggggacagaugacaguuaaggaucugacugcaaaguacacagaggggggcaaugccauucucgaaaauauaucauuuuccaucucgccuggacagcgugugggccugcucggccgaaccgggaguggcaaauccacccuccucuccgcuuuuuuaagacuccugaauacugaaggggaaauccagauagauggggugagcugggauucuaucacccuccagcaguggcgcaaagcguuuggggugaucccgcagaagguguuuaucuucucagggacguucaggaagaaucuggacccuuacgagcaguggagcgaucaggagaucuggaaaguggccgaugaggucgggcuccgcagcguaauugagcaguuuccaggaaaauuggacuuuguacugguugacggcgguugcguacugagucauggccacaaacaguuaauguguuuggcuagaucuguccuaucuaaggcuaaaauccugcuccuggaugagcccagugcccauuuagaccccgugaccuaucagauaauacgccgaaccuugaagcaagcauuugccgacuguacggugauucugugugaacaccgaauugaggccaugcuggagugccaacaauuucuagugauugaggaaaacaaagugcgacaguacgauucuauccaaaaacuccuuaacgaacggagucuuuuucgucaggccaucucacccuccgaccgugugaaauuauucccucaccggaacaguuccaaauguaagucgaaaccccagaucgccgcucucaaauag

SEQ ID NO: 9780 - RNA, 4260 nt, Artificial Sequence
  derived and/or modified sequence
augcaaagaucgccuuuggagaaagcauccgucgugagcaaguuguucuucucauggaccagaccaauccugcgcaaaggcuaucgccagagacuggaguuauccgauauauaucagaucccuuccgucgacuccgcggauaaccuuagcgagaaacucgagcgugaaugggacagagagcucgcauccaaaaaaaaucccaaacugaucaacgcacugaggcgaugcuucuucuggagguucauguuuuaugggauuuucuuguaucucggugaaguaacaaaggcagugcaaccgcugcuucucggccguauuaucgcaagcuacgauccagacaauaaggaagagcgcuccaucgcaauuuaucuggguauaggucuaugucuccuguucaucguuaggacccugcugcuccaccccgccauuuucggccugcaccacauuggcaugcagaugcgcauagccauguucucucucaucuacaagaaaacucucaagcugucuucccgggugcuagauaagauaagcauuggccagcuuguaucacuucuguccaacaauuuaaauaaauucgaugagggacucgcucuugcacacuuuguuuggaucgcgccccugcaaguggcucugcugaugggacuaaucugggaacugcugcaggccagcgcuuucugcggucuagguuucuuaaucgugcuagcacuguuucaggccgggcuagggaggaugaugaugaaguaccgcgaccagagggcagggaagaucuccgaaagauuggugauuacauccgaaaugaucgaaaauauacagucagugaaagcuuacuguugggaagaagcaauggaaaagaugauagaaaaucuccgacagacagagcuaaagcucaccagaaaggcagcuuauguucgcuacuuuaacagcucugccuuuuucuuuagcggauuuuucgucgucuuucucucagugcuacccuacgccuugauaaaggggaucauccugcgcaaaaucuuuacaacaauauccuuuugcaucgugcugagaauggccguuacgcgucaauuuccuugggccguucagacgugguacgauagucugggugcuauuaacaagauacaagacuuuuugcagaaacaggaguauaagacauuggaguauaauuugaccacaacagagguggugauggagaaugugacugccuuuugggaagaaacaucucucuugauggugauuaugggggagcuggagcccucugaaggcaagauaaagcacucagguagaauaucauuuugcucgcaauuuagcuggaucaugccuggcaccaucaaagagaacaucaucuucggcgugucuuacgacgaguaccgauaucgcuccgucaucaaagcaugucaacuugaagaagacaucucaaaauucgcugagaaagauaauaucguccucggagagggcgguaucacucucucugguggccagcgagcccggaucucucuggcucgugcgguguacaaggacgcugaccuguaccuucucgauucuccuuuuggcuaucuugaugugcugaccgagaaagagauuuucgagagcugcguuuguaaguugauggcgaauaaaacucgaauccucgucaccucuaaaauggagcaccugaagaaagccgacaagauacuaauucugcaugagggaucaucuuacuucuacgggaccuucucggagcugcagaaucugcaaccagacuuuucaagcaaacugaugggaugcgauuccuuugaccaguuuucagccgaacgccggaauaguauuuugacugagaccuugcauagauuuucucucgaaggcgaugcaccgguuagcuggacggaaacuaaaaagcaauccuucaagcagacgggggaauuuggagaaaaacggaaaaacucgaucuugaaccccaucaacagcauucgaaaguuuucuaucguucagaaaacgccgcugcagaugaaugguaucgaagaggacucugacgaaccuuuggagagacgacugucacugguccccgacucugagcagggagaggcgauccugccacguaucagugucauaagcaccggcccgaccuuacaggcccgccgccgacaaucaguucuuaaucuuaugacucacaguguaaaucaaggccaaaacauccauagaaagaccaccgccuccacacgaaaggucagccucgccccacaagcaaaucucacugaauuggauaucuacucucgcagacugucacaggagaccggauuagagaucuccgaggagauaaaugaagaagaucugaaggagugcuucuuugacgauauggagucuauucccgccgucacaaccuggaacaccuaucuucgcuacauaacaguacacaagucuuugauauucgugcugauuuggugccugguaauuuuucuggccgagguggcagccucgcugguggugcuguggcugcuaggaaauaccccucugcaggacaagggcaauagcacgcacagucgaaauaauaguuaugccguuauuaucacaucuaccucuucuuacuauguuuucuauauauaugucggcgucgcagauacacuucuggcuaugggcuuuuuucgcggacucccccucguccauacccugaucacugugaguaaaauccuacaucacaaaaugcugcacucaguucuccaagcucccaugagcacacugaacacacugaaagccgguggcauauuaaaccgguucuccaaagacaucgccauucucgacgaccugcuuccucugaccauauucgacuuuauucagcuucuccuuauaguuaucggugcuauugcugugguggccguacugcaacccuacaucuuuguugccacugugcccgugaucguggccuucaucaugcugcgcgcuuacuuuuuacaaacgucacagcagcugaaacagcuggagagcgaaggacggucuccaauauucacucaccuugugaccucguuaaagggacucuggacauugagagcauucggccggcaacccuacuucgagacauuauuucauaaggcucugaaccuucacaccgccaauugguuccuguaucuuucaacacuccggugguuccagaugagaauugagaugauuuucgugauuuuuuuuaucgccgugacuuucaucagcaucuuaaccacaggggaaggagagggccguguggggaucauucucacucucgccaugaacaucaugucgacccugcagugggcugugaauagcucuaucgacgucgauucacuuaugcguuccgucucccgcguguuuaaguuuauagauaugccaaccgagggaaagcccacaaaaaguacgaagcccuacaagaacggccagcucucuaaggugaugauuauugaaaauagccaugugaaaaaggacgauauauggccauccggcgggcaaaugacagugaaggaucugacagccaaguacaccgagggugggaaugcaaucuuggagaauauuucguucucuaucucaccaggucagcgcguggguuugcuaggcaggacuggcucaggcaagucaacccuacugucugcuuuccugagacugcucaauacggagggagaaauucagauugacggcgugucgugggacagcaucacgcuucagcaguggcggaaggccuuuggggugaucccucagaagguguucaucuucaguggcacuuucagaaagaaucuggacccauaugagcaguggagugaccaagagaucuggaagguggcggaugagguggggcuucgcagugugaucgagcaguuuccugguaaguuggacuuuguccugguagauggcggcuguguccugucccauggccauaagcaguugaugugccuggcucgcucuguacuuaguaaagcgaaaauccugcuguuggacgaaccaagugcucaccuggauccgguuacguaucagauaaucaggagaacucugaagcaggccuucgcagauuguacaguuauccugugugagcauagaaucgaggcuaugcuagaaugccagcaguuucugguuaucgaagagaacaaaguucgacaauaugauucuauucagaaacugcuaaaugaacgcagccuguuucgccaggcaaucuccccuuccgaucgcgucaaauuguucccacaucgcaauucuuccaagugcaaaagcaaaccacaaaucgccgcucugaaagaagagacagaagaagaaguucaagauacccgccucuag

SEQ ID NO: 9781 - RNA, 4443 nt, Artificial Sequence
  derived and/or modified sequence
augcagcgguccccuuuagagaaggcuagcgugguuucuaaguuauuuuucucauggacaagaccuauucuccggaaaggguauagacagcgacucgaauugagugacauuuaccagauaccuucuguagacucagcugauaaucuuagugaaaaguuagaaagagaaugggaccgcgaguuagccucgaagaaaaauccuaaacugaucaaugccuugaggcggugcuucuucuggcgauuuauguucuacggcaucuuuuuguaccugggcgaaguaacaaaagccguccaaccgcuucugcucggucguaucauugcaagcuacgauccggacaauaaggaagaacggagcauugcuauuuacuugggaauaggccugugucugcuguucaucguacggacucuccuccuccauccagccauuuucggccugcaccauaucggcaugcaaaugaggauugccauguuuucucugaucuacaaaaaaacccuuaagcugagcucucgcguucuggacaaaaucuccauuggacaguuaguuagccugcuuuccaacaaucuaaauaaauucgacgagggccucgccuuggcccauuuuguguggauugcaccccuccaagucgcccugcugaugggacugaucugggaguuacuccaggcaagugcauuuugcggacuuggguuccugauugugcuggcauuguuccaagccggacuaggaaggaugaugaugaaguaucgagaucagcgagcuggcaaaaucucagaaaggcucgugauuaccagugaaaugaucgagaauauccagagcgugaaggcuuauugcugggaagaggccauggaaaagaugauugagaacuuacgacaaacugaguugaaacucacucggaaagcugccuaugucagguauuucaacucuagcgcuuucuucuuuucuggguuuuuuguugucuuuuugucuguccugccauaugcucuuauuaaggguaucauuuugcgaaaaaucuuuacgacaauuucuuuuugcauaguccucagaauggccgugacccgccaauuuccuugggcuguccagacuugguacgauucccucggcgcaauaaacaaaauacaggauuuucugcagaagcaggaguacaaaacucuagaguacaaucuuaccacuaccgagguuguuauggagaaugugaccgcuuuuugggaagaaggguucggcgaacuguucgaaaaggccaaacagaauaauaauaacagaaagaccucuaacggagacgauucacucuuuuuuuccaauuucucuuuguugggaacgcccguccugaaagauaucaacuucaaaauugaacguggucagcuccuggcuguggcuggaaguacaggagcugguaaaacaucccugcuuauggugauuaugggagagcuugaaccuucugagggcaaaauuaaacauuccgggcggaucaguuucugcucucaauuuucauggaucaugccugguacaaucaaggaaaacauuaucuuuggcguuagcuaugacgaguaucgauacagauccgugauuaaggccugccaacuggaggaagacauaucaaaauuugcugaaaaagacaauaucgugcuaggggaaggagggaucacacucagugguggucagcgcgcccgaaucucacuugcgcgggcagucuacaaagaugccgaucuguacuugcuugauagucccuucggguaccuggacguccuuacagaaaaagagaucuuugagucuugcguguguaaauugauggccaacaaaacuaggauacugguaaccucuaagauggagcaccugaaaaaagcugacaagaucuugauucuucacgaggggaguucguauuuuuauggcacauucucugaauugcaaaaucuucagccggacuuuucaucaaaacucauggguugugacucauucgaucaauucagcgccgaacguagaaauucuauuuugaccgaaaccuugcaucgguuuagccucgaaggagacgcgccuguguccuggacggagacaaagaaacagucguucaagcagaccggagaauuuggcgaaaaaaggaagaauucuaucuuaaacccaaucaauucuauucggaaauuuagcauagugcagaagacgccuuuacaaaugaaugguauugaggaggauuccgaugaaccauuagagcgaagauuaucucucgugccugauagcgaacagggcgaagcaauccucccccggauaagcgugaucucaacuggacccacgcugcaggccagacgccgacagagcguucucaacuuaaugacacauuccgugaaucaaggacagaauauacauagaaaaaccacagccucuacaagaaagguuucucuggcuccucaggccaacuugacagaauuagacauauacucaagaaggcugucucaggagacuggauuggaaauauccgaagaaauuaaugaggaggaucugaaggaguguuucuuugacgacauggagucgauucccgcuguuaccaccuggaauacguaccugagguacaucacuguacauaagucauuaauauucgugcuuauauggugccuagugauauuccuagcugaagucgccgccucucuuguuguccuauggcuacuuggcaacacuccauuacaagacaagggaaauuccacacauucacgaaacaacaguuacgccgucaucaucacaaguacaaguagcuauuacguguuuuauaucuaugucggagucgccgauacucuccucgccaugggauucuuccgcggguugccauugguccauacccuuaucacugucucaaagauucuccaccauaaaaugcuacauagugugcuucaagcgcccaugucaacccugaacacccugaaagcugggggcaucuuaaaucgauucuccaaggacaucgcuauucuggacgaccugcuuccucuuacgauuuuugauuucauccaacucuugcucauagucauaggcgcaauagccguaguagcuguguuacaaccauauauauucguagccaccguuccuguaauugucgcuuuuaucaugcugcgggcauacuuucuucagacaagccagcagcuaaaacaacuggagucagagggucgaucuccuauauuuacacaccugguuacaagccucaagggauuauggacacuucgggcauucggacgucagccauauuuugaaacccuuuuccacaaagcccugaaccuccacacagcuaauugguuucuguaucucucuaccuugcguugguuucagaugagaaucgaaaugaucuuuguuauauuuuuuaucgccguuacauuuaucaguauccugacaaccggugagggagaagggagaguugggauaauucuaacgcuugcgaugaacaucaugaguacucugcagugggccguaaauucaucuauugacgucgacucucuuaugcggagugucucaagagucuuuaaauucauugauaugccaacagaaggcaagccuacuaaaagcacaaagcccuauaagaauggacaacuuaguaaagucaugaucaucgaaaauagccacguuaagaaagaugauauuuggcccuccggcggacaaaugacggucaaggaucuuacggccaaauacaccgagggcgggaacgcgauccuugaaaauauuucauuuaguauuucaccagggcaaagggucgggcuuuuagggcgaacaggcagcggcaagucuacacuauuauccgccuuuuuaagacugcucaauaccgaaggugaaauucagauugacggcgugagcugggauucuauaacacuacagcaguggcgaaaagcguucggcgugauuccucaaaagguauuuaucuuuagcggaacauuucgcaagaaccuugauccauacgaacaauggagcgaucaggaaauuuggaaagucgccgacgaagugggucuacguagcgugauugagcaguuccccggaaagcuggacuuugucuuaguggaugggggauguguauuaucccacggacacaagcaacucaugugcuuggcaaggaguguucuuagcaaagccaaaauacugcuucucgacgaaccgagugcccaccuggaccccgucaccuaucagauuauucgcagaacauugaaacaagcuuucgccgacugcacugucauucucugugagcauagaauagaagcaaugcuggagugucagcaguuccuggucaucgaagaaaacaagguacggcaauaugauaguauccaaaaacuucucaaugagcguagucucuuccgucaggccaucucaccaucugauaggguuaagcucuucccccaccguaacuccucuaaauguaagucuaagccacagaucgcagccuuaaaagaagaaacagaggaagagguucaggauaccagacucuag

SEQ ID NO: 9782 - RNA, 4317 nt, Artificial Sequence
  derived and/or modified sequence
augcagcgcucaccacuugagaaagccagcguuguuuccaaauuauuuuuuuccuggaccagaccuauacugcgaaaaggguaccgacaaaggcuggaguuaucugauaucuaccagauucccucuguggacuccgcagacaaccuuucugaaaaacuugaacgcgagugggauagggaauuggcaucaaaaaaaaacccaaaacugauaaaugcacugcgaagaugcuucuucuggagguucauguucuacggcaucuuucuguacuugggcgaggugacaaaagccgugcagccccuguugcuuggacggaucaucgccagcuaugaucccgauaacaaagaggaacgcucuauagccauauaucugggcaucggccugugucugcucuuuaucgucaggacucugcuacuccacccagccauuuucggccuucaucauaucgggaugcagaugcgaauagcaauguucagccucauauacaaaaagggacucgcccucgcacauuucgucuggauugccccucugcaggucgcucuauugaugggccucauaugggaacuucuucaagcuagugccuuuugcgggcuagguuuucuuauugugcuggcacucuuucaggcaggcuugggcagaaugaugaugaaguacagagaccagcgagcgggcaagauuagugaacggcuggugauuacaagcgagaugaucgagaauauacaguccgugaaggcuuacuguugggaagaggcgauggagaaaaugaucgaaaaucugcgacagacugaacuaaagcugaccagaaaggcugccuacguccgcuacuuuaacucaagcgcuuucuucuuuagcggcuucuucgugguguuccuuuccguucuccccuaugcgcugaucaaaggcauuauccugcgcaaaaucuuuacaacuauaucguuuuguaucguuuugagaauggcuguuacccgacaguuuccaugggcagugcagacaugguaugauucacuaggcgccauuaauaaaauccaagacuuucuccagaagcaggaauauaaaaccuuagaauauaauuuaacaaccacagagguagucauggaaaaugugacagccuucugggaggagggauucggagagcuguucgagaaagcuaaacaaaacaauaauaaccgcaaaaccagcaacggcgacgauagccucuucuucaguaauuucagccuccucgggacucccguacugaaagacaucaacuucaagauugaacgcgggcaguugcuggccguggcggggagcacaggcgcgggaaagaccucuuuguugaugguuauuaugggcgaacuggaaccaagcgaagggaagaucaagcauuccggacgcauaagcuucugcucacaguuuaguuggauuaugccugggacuaucaaggagaacauuauuuucggcgugaguuacgacgaguacagauauagaagcgugaucaaagcuugucaacucgaagaagacaucagcaaguuugccgagaaagauaauauuguacuuggggagggcggcauuaccuuaagugggggacagcgggcgcgcaucucuuuggcaagagccguguacaaggacgcagaucucuaccugcucgacucgcccuuuggguaucuggaugugcucacggaaaaagagauuuuugagucaugugugugcaaacugauggcuaauaaaacgagaauucugguuacaagcaaaauggagcacuugaagaaagcggacaagauucuaauauuacacgaagguaguucauauuuuuauggcacauuuagcgagcugcagaaucugcaaccagacuucucauccaaacugauggguugcgacagcuucgaucaauuuagugcagaacggcgaaauaguauccuuacagagacacugcauagguucaguuuagagggagacgcuccugucucauggacggagacuaaaaagcagucuuuuaagcagacuggggaauuuggcgaaaaacggaagaacucaauuuugaauccuaucaauucuauuagaaaauuuucgauaguccaaaaaacuccacuucagaugaauggcaucgaggaggacagcgaugagccacuagaacggagacugagccucgugccugacuccgagcagggagaggcaauauuaccucggauuuccgugauuucuacuggccccacccugcaggcuaggagaagacaaagcgucuugaacuugaugacacacucuguaaaccagggucagaacauacaccggaagacuacagcuagcacacgaaagguuucacuggcuccacaggcaaaucucaccgagcucgacauauauuccagacggcugucucaagaaaccggacuggagaucagugaagaaauaaaugaagaagaccuaaaggaaugcuuuuuugacgauauggaaucaauacccgccgucacuacauggaacacauaccuaagguacauuaccgugcauaagagccucaucuuuguauugauuuggugccucguaauuuuucucgccgaaguugcagcaagucuuguuguccuguggcuccucgguaauaccccacuucaggauaagggaaacuccacacacucuaggaacaauucuuacgcagucauuaucaccuccacaucaaguuacuauguuuuuuacaucuaugugggcguugcagacacacugcucgccauggguuucuuccggggccucccacuggugcacacucuuauuaccguuuccaaaauucuucaucauaagaugcuccauagugugcuucaggcuccuaugucaacccugaacacccucaaggcuggagggauucucaauagauucuccaaggauaucgcaauauuagacgauuugcugccuuuaacaauauucgauuucauucaacugcuucucaucgugaucggagccauugccguagucgccgugcuucaacccuacauauucguugcuaccguuccggugauagucgcuuucauaaugcugagggccuauuuucuacagacaucucaacaacugaagcagcuggagucagagggaagauccccaauuuucacacauuuggugacaucccuaaaaggacuguggacucuccgugccuucggccggcagccauacuuugaaacacuguuccauaaagcccuuaaucuucacaccgccaacugguuucuauaucuuagcacacugcguugguuccagaugcgaauugaaaugaucuucguuauuuuuuucaucgccgugacauucauuaguauccugacaacuggggaaggcgaaggccgagucgggauuauuuugacacuugcuaugaacauuaugucaacacuucaaugggccgucaauuccucgaucgauguugacucuuugaugcgcuccgucagucgaguguucaaguucaucgacaugccaacagagggcaaaccaacgaaauccacuaaaccguacaaaaauggacaacugagcaaggucaugauuaucgagaacagccaugugaaaaaggaugauauuuggcccuccggagggcagaugacaguuaaagaccuuacagccaaguacacagaaggggggaacgcgauuuuggagaacaucucuuucucaauuaguccgggacagcgcgugggauugcuuggaaggacugggaguggcaagagcaccuugcugucagcauuucuucgguuauugaacacagagggggaaauccaaaucgacggagugaguugggacagcauuacgcuccagcaguggcgaaaggccuucggggugauaccccagaaaguuuucauuuuuagcgggacauuuaggaaaaaucuggauccguacgagcaauggagcgaucaggaaauuuggaaagucgcggaugaggucgggcuacgcucugugaucgagcaguuuccgggcaagcuggauuuuguguuaguagacggagguugcguguuaucgcacggacauaagcagcucaugugccuggcaagauccgugcucuccaaggccaagauucuccuucuggacgaaccuucagcucacuuagauccugucacauaucagauuauuagaagaacccuaaagcaggcauucgccgauugcaccgugauacuuugcgaacaccggauugaagcuauguuagagugccagcaguuccuggugaucgaagagaacaaggugcgucaauacgauuccauccaaaaguugcugaacgaaagaagucuuuuucggcaagcuaucagcccuagugacagagugaaauuauucccccaucguaacucaaguaagugcaaaagcaagccccagaucgccgcccucaaauag

SEQ ID NO: 9783 - RNA, 4260 nt, Artificial Sequence
  derived and/or modified sequence
augcagcgguccccuuuggagaaagccaguguugucagcaaacuguuuuucaguuggacacgaccuauacugcggaaaggcuaccggcagagacuggaacuuagugacaucuaucagauccccaguguagauucugccgauaauuuaagcgaaaaacuggaaagggaaugggauagagaauuggcgagcaaaaagaacccaaaacugaucaacgcauuaaggcgcuguuuuuuuuggagguucauguuuuauggaaucuucuuauaccucggcgaagucacgaaagccguccaaccccuucuuuuaggccgaauuauagccaguuaugaccccgacaauaaggaagagagauccauagccauuuacuugggaauugguuuaugucuguuauuuauaguccgcacucugcuccugcaccccgccaucuucggcuuacaccacauuggaaugcaaaugagaauugcuauguuuagccugauuuauaagaagacauugaagcuaucaucucgagugcuggacaaaauuucaauugggcagcuggugucauuguugucuaauaaccuuaacaaguuugacgaaggccucgcacucgcccauuucguuuggaucgcaccuuugcaaguagcucuucugauggguuugaucugggagcuguuacaggcuucagccuuuugcggucucggguuccugaucgugcuugcuuuauuccaagcagggcugggacggaugaugaugaaauauagggaccagcgugccggcaagauauccgagaggcucguuauuaccucugaaaugaucgaaaauauacagucuguaaaagcguauuguugggaggaagcaauggagaaaaugauugagaaucuuaggcaaacagaacugaaacugacucggaaagcagccuacguucgguacuuuaacucuuccgcuuuuuuuuucucaggcuucuucgugguguuccuaucggugcugcccuacgcccugauuaaaggcaucaucuuacggaaaauuuuuaccaccaucucuuucuguaucguucucagaauggcagugacccgucaguucccgugggcaguccagaccugguacgacucgcuuggcgcuauuaauaaaauacaggauuuccuccaaaaacaagaauacaagacucucgaguauaaccugacaacaaccgaagucguaauggaaaacgugaccgcauucugggaggagacuagccuccuuaugguuauuaugggagagcucgaaccauccgaaggcaagauuaagcauucuggacggauaaguuuuugcagccaguucuccuggaucaugccugggaccauaaaagagaauauaauuuucggagucuccuacgaugaauacagguaccgaagugugaucaaggcuugccaauuggaggaagauauuucaaaauuugcugaaaaagacaacauaguacuuggggaggguggaaucacacugaguggcggacagcgagcccgaaucagucuagcaagggccguuuacaaggacgcugaccucuaucuccuggauucucccuuuggcuauuuagaugugcuaacugagaaagaaauuuucgaauccugcguguguaagcugauggcgaauaagacccgaaucuuaguuacuucuaaaauggaacaccuuaagaaagccgacaaaauccugauuuugcacgaaggcagcagcuauuuuuacggcacuuucucugagcuucagaauuugcaaccugacuucucuucaaaacuaaugggaugugauucguuugaucaguucagcgcagaacggagaaauucaauacuaacggaaacccuccacagauuuagccucgaaggcgaugcgcccgucucauggaccgagacuaagaagcagaguuucaagcagacaggugaguucggugaaaaaagaaaaaauuccauacugaacccuauaaacucuauucgcaaguuuagcaucguacagaagaccccacuucaaaugaacggaauagaagaggacuccgaugagcccuuagaaagacgcuugagcuuggugccagauucugaacagggggaagccauucuaccaaggauaagcguaaucagcaccggccccacucuucaggcccgccgccgacaaucaguucuuaaucuuaugacucacaguguaaaucaaggccaaaacauccauagaaagaccaccgccuccacacgaaaggucagccucgccccacaagcaaaucucacugaauuggauaucuacucucgcagacugucacaggagaccggauuagagaucuccgaggagauaaaugaagaagaucugaaggagugcuucuuugacgauauggagucuauucccgccgucacaaccuggaacaccuaucuucgcuacauaacaguacacaagucuuugauauucgugcuaauuuggugcuuaguaauuuuccuggcagaggucgcagcuagucucgucguucucugguuacucgggaauacacccuugcaggacaaaggcaacucuacacacagcagaaacaacuccuaugcagucaucaucacaagcacuucauccuacuacgucuuuuacaucuacgucggcguggcugauacccuucuggcgaugggcuucuuccguggucugcccuuagugcacacccuaaucacugugucaaagauacugcaucacaaaaugcugcacucuguccuccaagccccaauguccacccuaaacacucugaaagcaggcggcauacucaaccgguuuaguaaagacaucgccauccucgaugaucugcuuccauuaacaauauuugauuuuauucagcugcuccuaauugucauuggugcgaucgcaguagucgccguacuacagccguauauauuuguugccacuguaccagucaucguugcuuucaucaugcuccgcgccuacuuuuuacagaccucacagcaacugaaacaguuggagagugaaggccggucaccuaucuucacgcaccuuguuacaaguuuaaaaggccuuuggacucuccgagccuuuggucgacagccauauuucgagacacuuuuccacaaggcccucaauuuacacacagccaacugguuucuuuaucugucaacacuccgcugguuccagaugaggauugagaugauuuucguuaucuucuuuauugccguuaccuucaucucuauacugaccacuggggagggagagggacgcgucggaaucauccuuacccuugccaugaacauaaugucaacuuugcagugggcugucaauucuagcauugaugucgauagccuuaugcggucuguaagucggguguuuaaguucaucgacaugccuacagagggcaagccuacuaaaucuacaaaaccuuacaaaaauggacaguugucuaaggugaugauuauagaaaacagucaugugaagaaggacgauauuuggccaagcgggggacaaaugacagugaaggacuuaaccgcaaaguauacugaagggggcaacgcaauucucgaaaauaucucguucaguaucucgccaggacagcgagucggacugcuaggacggacaggguccgguaaaucaacacuucugagcgcuuuuuugagacugcugaacacagagggcgagauccagauugacggagugaguugggacucuauaacauuacagcaguggagaaaagccuuuggagugauuccacaaaagguuuucaucuucuccgguacauuucgcaagaaccuagauccauacgaacaguggagugaucaggagaucuggaagguagccgacgaagugggccuuagaucagugauugagcaguuuccugggaaguuggacuuuguucugguggacgggggaugugugcuuucucacggccacaagcaauuaauguguuuagcacggucaguucugucuaaagccaaaauccuguuguuagaugagccuuccgcucauuuggauccaguuacguaucagaucauccgaagaacucuaaaacaggcuuucgcagacugcacaguuauauuaugugagcaucgcaucgaggccauguuggagugccagcaguuuuuagucaucgaagagaauaaggugcggcaguaugauaguauucagaaacuucuuaaugagcgcagccuguucagacaagcaauaagucccuccgaccgcgucaagcuguucccucaucgcaauucuaguaaauguaaguccaaaccucagaucgccgcacugaaagaagaaacugaagaagagguccaagauaccagauuauag

SEQ ID NO: 9784 - protein, 1497 aa, Artificial Sequence
  derived and/or modified sequence
MDVTKKNKRDGTEVTERIVTETVTTRLTSLPPKGGTSNGYAKTASLGGGSRLEKQSLTHGSSGYINSTGSTRGHASTSSYRRAHSPASTLPNSPGSTFERKTHVTRHAYEGSSSGNSSPEYPRKEFASSSTRGRSQTRESEIRVRLQSASPSTRWTELDDVKRLLKGSRSASVSPTRNSSNTLPIPKKGTVETKIVTASSQSVSGTYDATILDANLPSHVWSSTLPAGSSMGTYHNNMTTQSSSLLNTNAYSAGSVFGVPNNMASCSPTLHPGLSTSSSVFGMQNNLAPSLTTLSHGTTTTSTAYGVKKNMPQSPAAVNTGVSTSAACTTSVQSDDLLHKDCKFLILEKDNTPAKKEMELLIMTKDSGKVFTASPASIAATSFSEDTLKKEKQAAYNADSGLKAEANGDLKTVSTKGKTTTADIHSYGSSGGGGSGGGGGVGGAGGGPWGPAPAWCPCGSCCSWWKWLLGLLLTWLLLLGLLFGLIALAEEVRKLKARVDELERIRRSILPYGDSMDRIEKDRLQGMAPAAGADLDKIGLHSDSQEELWMFVRKKLMMEQENGNLRGSPGPKGDMGSPGPKGDRGFPGTPGIPGPLGHPGPQGPKGQKGSVGDPGMEGPMGQRGREGPMGPRGEAGPPGSGEKGERGAAGEPGPHGPPGVPGSVGPKGSSGSPGPQGPPGPVGLQGLRGEVGLPGVKGDKGPMGPPGPKGDQGEKGPRGLTGEPGMRGLPGAVGEPGAKGAMGPAGPDGHQGPRGEQGLTGMPGIRGPPGPSGDPGKPGLTGPQGPQGLPGTPGRPGIKGEPGAPGKIVTSEGSSMLTVPGPPGPPGAMGPPGPPGAPGPAGPAGLPGHQEVLNLQGPPGPPGPRGPPGPSIPGPPGPRGPPGEGLPGPPGPPGSFLSNSETFLSGPPGPPGPPGPKGDQGPPGPRGHQGEQGLPGFSTSGSSSFGLNLQGPPGPPGPQGPKGDKGDPGVPGALGIPSGPSEGGSSSTMYVSGPPGPPGPPGPPGSISSSGQEIQQYISEYMQSDSIRSYLSGVQGPPGPPGPPGPVTTITGETFDYSELASHVVSYLRTSGYGVSLFSSSISSEDILAVLQRDDVRQYLRQYLMGPRGPPGPPGASGDGSLLSLDYAELSSRILSYMSSSGISIGLPGPPGPPGLPGTSYEELLSLLRGSEFRGIVGPPGPPGPPGIPGNVWSSISVEDLSSYLHTAGLSFIPGPPGPPGPPGPRGPPGVSGALATYAAENSDSFRSELISYLTSPDVRSFIVGPPGPPGPQGPPGDSRLLSTDASHSRGSSSSSHSSSVRRGSSYSSSMSTGGGGAGSLGAGGAFGEAAGDRGPYGTDIGPGGGYGAAAEGGMYAGNGGLLGADFAGDLDYNELAVRVSESMQRQGLLQGMAYTVQGPPGQPGPQGPPGISKVFSAYSNVTADLMDFFQTYGAIQGPPGQKGEMGTPGPKGDRGPAGPPGHPGPPGPRGHKGEKGDKGDQVYAGRRRRRSIAVKP

SEQ ID NO: 9785 - protein, 417 aa, Artificial Sequence
  derived and/or modified sequence
MDVTKKNKRDGTEVTERIVTETVTTRLTSLPPKGGTSNGYAKTASLGGGSRLEKQSLTHGSSGYINSTGSTRGHASTSSYRRAHSPASTLPNSPGSTFERKTHVTRHAYEGSSSGNSSPEYPRKEFASSSTRGRSQTRESEIRVRLQSASPSTRWTELDDVKRLLKGSRSASVSPTRNSSNTLPIPKKGTVETKIVTASSQSVSGTYDATILDANLPSHVWSSTLPAGSSMGTYHNNMTTQSSSLLNTNAYSAGSVFGVPNNMASCSPTLHPGLSTSSSVFGMQNNLAPSLTTLSHGTTTTSTAYGVKKNMPQSPAAVNTGVSTSAACTTSVQSDDLLHKDCKFLILEKDNTPAKKEMELLIMTKDSGKVFTASPASIAATSFSEDTLKKEKQAAYNADSGLKAEANGKNKYDCCPP

SEQ ID NO: 9786 - protein, 66 aa, Artificial Sequence
  derived and/or modified sequence
  misc_feature (1)..(1): Xaa can be any naturally occurring amino acid
XYGAIQGPPGQKGEMGTPGPKGDRGPAGPPGHPGPPGPRGHKGEKGDKGDQVYAGRRRRRSIAVKP

SEQ ID NO: 9787 - protein, 604 aa, Artificial Sequence
  derived and/or modified sequence
MDVTKKNKRDGTEVTERIVTETVTTRLTSLPPKGGTSNGYAKTASLGGGSRLEKQSLTHGSSGYINSTGSTRGHASTSSYRRAHSPASTLPNSPGSTFERKTHVTRHAYEASSSTRGRSQTRESEIRVRLQSASPSTRWTELDDVKRLLKGSRSASVSPTRNSSNTLPIPKKGTVETKIVTASSQSVSGTYDATILDANLPSHVWSSTLPAGSSMGTYHNNMTTQSSSLLNTNAYSAGSVFGVPNNMASCSPTLHPGLSTSSSVFGMQNNLAPSLTTLSHGTTTTSTAYGVKKNMPQSPAAVNTGVSTSAACTTSVQSDDLLHKDCKFLILEKDNTPAKKEMELLIMTKDSGKVFTASPASIAATSFSEDTLKKEKQAAYNADSGLKAEANGDLKTVSTKGKTTTADIHSYGSSGGGGSGGGGGVGGAGGGPWGPAPAWCPCGSCCSWWKWLLGLLLTWLLLLGLLFGLIALAEEVRKLKARVDELERIRRSILPYGDSMDRIEKDRLQGMAPAAGADLDKIGLHSDSQEELWMFVRKKLMMEQENGNLRGSPGPKGDMGSPGPKGDRGFPGTPGIPGPLGHPGPQGPKGQKGSVGDPGMEGPM

SEQ ID NO: 9788 - DNA, 46 bp, Artificial Sequence
  derived and/or modified sequence
ctccgtctccatcatgttgtacatggtggctcttatatttcttctt

SEQ ID NO: 9789 - DNA, 4494 bp, Artificial Sequence
  derived and/or modified sequence
atggacgtgaccaagaagaacaagagagacggcaccgaggtgaccgagagaatcgtgaccgagaccgtgaccaccagactgaccagcctgccccccaagggcggcaccagcaacggctacgccaagaccgccagcctgggcggcggcagcagactggagaagcagagcctgacccacggcagcagcggctacatcaacagcaccggcagcaccagaggccacgccagcaccagcagctacagaagagcccacagccccgccagcaccctgcccaacagccccggcagcaccttcgagagaaagacccacgtgaccagacacgcctacgagggcagcagcagcggcaacagcagccccgagtaccccagaaaggagttcgccagcagcagcaccagaggcagaagccagaccagagagagcgagatcagagtgagactgcagagcgccagccccagcaccagatggaccgagctggacgacgtgaagagactgctgaagggcagcagaagcgccagcgtgagccccaccagaaacagcagcaacaccctgcccatccccaagaagggcaccgtggagaccaagatcgtgaccgccagcagccagagcgtgagcggcacctacgacgccaccatcctggacgccaacctgcccagccacgtgtggagcagcaccctgcccgccggcagcagcatgggcacctaccacaacaacatgaccacccagagcagcagcctgctgaacaccaacgcctacagcgccggcagcgtgttcggcgtgcccaacaacatggccagctgcagccccaccctgcaccccggcctgagcaccagcagcagcgtgttcggcatgcagaacaacctggcccccagcctgaccaccctgagccacggcaccaccaccaccagcaccgcctacggcgtgaagaagaacatgccccagagccccgccgccgtgaacaccggcgtgagcaccagcgccgcctgcaccaccagcgtgcagagcgacgacctgctgcacaaggactgcaagttcctgatcctggagaaggacaacacccccgccaagaaggagatggagctgctgatcatgaccaaggacagcggcaaggtgttcaccgccagccccgccagcatcgccgccaccagcttcagcgaggacaccctgaagaaggagaagcaggccgcctacaacgccgacagcggcctgaaggccgaggccaacggcgacctgaagaccgtgagcaccaagggcaagaccaccaccgccgacatccacagctacggcagcagcggcggcggcggcagcggcggcggcggcggcgtgggcggcgccggcggcggcccctggggccccgcccccgcctggtgcccctgcggcagctgctgcagctggtggaagtggctgctgggcctgctgctgacctggctgctgctgctgggcctgctgttcggcctgatcgccctggccgaggaggtgagaaagctgaaggccagagtggacgagctggagagaatcagaagaagcatcctgccctacggcgacagcatggacagaatcgagaaggacagactgcagggcatggcccccgccgccggcgccgacctggacaagatcggcctgcacagcgacagccaggaggagctgtggatgttcgtgagaaagaagctgatgatggagcaggagaacggcaacctgagaggcagccccggccccaagggcgacatgggcagccccggccccaagggcgacagaggcttccccggcacccccggcatccccggccccctgggccaccccggcccccagggccccaagggccagaagggcagcgtgggcgaccccggcatggagggccccatgggccagagaggcagagagggccccatgggccccagaggcgaggccggcccccccggcagcggcgagaagggcgagagaggcgccgccggcgagcccggcccccacggcccccccggcgtgcccggcagcgtgggccccaagggcagcagcggcagccccggcccccagggcccccccggccccgtgggcctgcagggcctgagaggcgaggtgggcctgcccggcgtgaagggcgacaagggccccatgggcccccccggccccaagggcgaccagggcgagaagggccccagaggcctgaccggcgagcccggcatgagaggcctgcccggcgccgtgggcgagcccggcgccaagggcgccatgggccccgccggccccgacggccaccagggccccagaggcgagcagggcctgaccggcatgcccggcatcagaggcccccccggccccagcggcgaccccggcaagcccggcctgaccggcccccagggcccccagggcctgcccggcacccccggcagacccggcatcaagggcgagcccggcgcccccggcaagatcgtgaccagcgagggcagcagcatgctgaccgtgcccggcccccccggcccccccggcgccatgggcccccccggcccccccggcgcccccggccccgccggccccgccggcctgcccggccaccaggaggtgctgaacctgcagggcccccccggcccccccggccccagaggcccccccggccccagcatccccggcccccccggccccagaggcccccccggcgagggcctgcccggcccccccggcccccccggcagcttcctgagcaacagcgagaccttcctgagcggcccccccggcccccccggcccccccggccccaagggcgaccagggcccccccggccccagaggccaccagggcgagcagggcctgcccggcttcagcaccagcggcagcagcagcttcggcctgaacctgcagggcccccccggcccccccggcccccagggccccaagggcgacaagggcgaccccggcgtgcccggcgccctgggcatccccagcggccccagcgagggcggcagcagcagcaccatgtacgtgagcggcccccccggcccccccggcccccccggcccccccggcagcatcagcagcagcggccaggagatccagcagtacatcagcgagtacatgcagagcgacagcatcagaagctacctgagcggcgtgcagggcccccccggcccccccggcccccccggccccgtgaccaccatcaccggcgagaccttcgactacagcgagctggccagccacgtggtgagctacctgagaaccagcggctacggcgtgagcctgttcagcagcagcatcagcagcgaggacatcctggccgtgctgcagagagacgacgtgagacagtacctgagacagtacctgatgggccccagaggcccccccggcccccccggcgccagcggcgacggcagcctgctgagcctggactacgccgagctgagcagcagaatcctgagctacatgagcagcagcggcatcagcatcggcctgcccggcccccccggcccccccggcctgcccggcaccagctacgaggagctgctgagcctgctgagaggcagcgagttcagaggcatcgtgggcccccccggcccccccggcccccccggcatccccggcaacgtgtggagcagcatcagcgtggaggacctgagcagctacctgcacaccgccggcctgagcttcatccccggcccccccggcccccccggcccccccggccccagaggcccccccggcgtgagcggcgccctggccacctacgccgccgagaacagcgacagcttcagaagcgagctgatcagctacctgaccagccccgacgtgagaagcttcatcgtgggcccccccggcccccccggcccccagggcccccccggcgacagcagactgctgagcaccgacgccagccacagcagaggcagcagcagcagcagccacagcagcagcgtgagaagaggcagcagctacagcagcagcatgagcaccggcggcggcggcgccggcagcctgggcgccggcggcgccttcggcgaggccgccggcgacagaggcccctacggcaccgacatcggccccggcggcggctacggcgccgccgccgagggcggcatgtacgccggcaacggcggcctgctgggcgccgacttcgccggcgacctggactacaacgagctggccgtgagagtgagcgagagcatgcagagacagggcctgctgcagggcatggcctacaccgtgcagggcccccccggccagcccggcccccagggcccccccggcatcagcaaggtgttcagcgcctacagcaacgtgaccgccgacctgatggacttcttccagacctacggcgccatccagggcccccccggccagaagggcgagatgggcacccccggccccaagggcgacagaggccccgccggcccccccggccaccccggcccccccggccccagaggccacaagggcgagaagggcgacaagggcgaccaggtgtacgccggcagaagaagaagaagaagcatcgccgtgaagccctag

SEQ ID NO: 9790 - DNA, 1254 bp, Artificial Sequence
  derived and/or modified sequence
atggacgtgaccaagaagaacaagagagacggcaccgaggtgaccgagagaatcgtgaccgagaccgtgaccaccagactgaccagcctgccccccaagggcggcaccagcaacggctacgccaagaccgccagcctgggcggcggcagcagactggagaagcagagcctgacccacggcagcagcggctacatcaacagcaccggcagcaccagaggccacgccagcaccagcagctacagaagagcccacagccccgccagcaccctgcccaacagccccggcagcaccttcgagagaaagacccacgtgaccagacacgcctacgagggcagcagcagcggcaacagcagccccgagtaccccagaaaggagttcgccagcagcagcaccagaggcagaagccagaccagagagagcgagatcagagtgagactgcagagcgccagccccagcaccagatggaccgagctggacgacgtgaagagactgctgaagggcagcagaagcgccagcgtgagccccaccagaaacagcagcaacaccctgcccatccccaagaagggcaccgtggagaccaagatcgtgaccgccagcagccagagcgtgagcggcacctacgacgccaccatcctggacgccaacctgcccagccacgtgtggagcagcaccctgcccgccggcagcagcatgggcacctaccacaacaacatgaccacccagagcagcagcctgctgaacaccaacgcctacagcgccggcagcgtgttcggcgtgcccaacaacatggccagctgcagccccaccctgcaccccggcctgagcaccagcagcagcgtgttcggcatgcagaacaacctggcccccagcctgaccaccctgagccacggcaccaccaccaccagcaccgcctacggcgtgaagaagaacatgccccagagccccgccgccgtgaacaccggcgtgagcaccagcgccgcctgcaccaccagcgtgcagagcgacgacctgctgcacaaggactgcaagttcctgatcctggagaaggacaacacccccgccaagaaggagatggagctgctgatcatgaccaaggacagcggcaaggtgttcaccgccagccccgccagcatcgccgccaccagcttcagcgaggacaccctgaagaaggagaagcaggccgcctacaacgccgacagcggcctgaaggccgaggccaacggcaagaacaagtacgactgctgccccccctag

SEQ ID NO: 9791 - DNA, 201 bp, Artificial Sequence
  derived and/or modified sequence
tgatacggcgccatccagggcccccccggccagaagggcgagatgggcacccccggccccaagggcgacagaggccccgccggcccccccggccaccccggcccccccggccccagaggccacaagggcgagaagggcgacaagggcgaccaggtgtacgccggcagaagaagaagaagaagcatcgccgtgaagccctag

SEQ ID NO: 9792 - DNA, 1815 bp, Artificial Sequence
  derived and/or modified sequence
atggacgtgaccaagaagaacaagagagacggcaccgaggtgaccgagagaatcgtgaccgagaccgtgaccaccagactgaccagcctgccccccaagggcggcaccagcaacggctacgccaagaccgccagcctgggcggcggcagcagactggagaagcagagcctgacccacggcagcagcggctacatcaacagcaccggcagcaccagaggccacgccagcaccagcagctacagaagagcccacagccccgccagcaccctgcccaacagccccggcagcaccttcgagagaaagacccacgtgaccagacacgcctacgaggccagcagcagcaccagaggcagaagccagaccagagagagcgagatcagagtgagactgcagagcgccagccccagcaccagatggaccgagctggacgacgtgaagagactgctgaagggcagcagaagcgccagcgtgagccccaccagaaacagcagcaacaccctgcccatccccaagaagggcaccgtggagaccaagatcgtgaccgccagcagccagagcgtgagcggcacctacgacgccaccatcctggacgccaacctgcccagccacgtgtggagcagcaccctgcccgccggcagcagcatgggcacctaccacaacaacatgaccacccagagcagcagcctgctgaacaccaacgcctacagcgccggcagcgtgttcggcgtgcccaacaacatggccagctgcagccccaccctgcaccccggcctgagcaccagcagcagcgtgttcggcatgcagaacaacctggcccccagcctgaccaccctgagccacggcaccaccaccaccagcaccgcctacggcgtgaagaagaacatgccccagagccccgccgccgtgaacaccggcgtgagcaccagcgccgcctgcaccaccagcgtgcagagcgacgacctgctgcacaaggactgcaagttcctgatcctggagaaggacaacacccccgccaagaaggagatggagctgctgatcatgaccaaggacagcggcaaggtgttcaccgccagccccgccagcatcgccgccaccagcttcagcgaggacaccctgaagaaggagaagcaggccgcctacaacgccgacagcggcctgaaggccgaggccaacggcgacctgaagaccgtgagcaccaagggcaagaccaccaccgccgacatccacagctacggcagcagcggcggcggcggcagcggcggcggcggcggcgtgggcggcgccggcggcggcccctggggccccgcccccgcctggtgcccctgcggcagctgctgcagctggtggaagtggctgctgggcctgctgctgacctggctgctgctgctgggcctgctgttcggcctgatcgccctggccgaggaggtgagaaagctgaaggccagagtggacgagctggagagaatcagaagaagcatcctgccctacggcgacagcatggacagaatcgagaaggacagactgcagggcatggcccccgccgccggcgccgacctggacaagatcggcctgcacagcgacagccaggaggagctgtggatgttcgtgagaaagaagctgatgatggagcaggagaacggcaacctgagaggcagccccggccccaagggcgacatgggcagccccggccccaagggcgacagaggcttccccggcacccccggcatccccggccccctgggccaccccggcccccagggccccaagggccagaagggcagcgtgggcgaccccggcatggagggccccatgtag

SEQ ID NO: 9793 - DNA, 4494 bp, Artificial Sequence
  derived and/or modified sequence
atggacgtgacgaaaaagaataagcgggatgggactgaagtgactgaacggattgtgactgagacagttacaacacggctgactagtctccctcctaagggggggacttctaacgggtatgccaaaaccgcttcattgggcggggggtcacgcctggagaagcagtctctgacccatggctcgagcgggtacattaacagtacggggagcacacggggtcatgccagtactagctcataccggagggctcacagcccagcatctacacttccaaattccccaggcagtacatttgaacgtaagacccatgtgacacgtcatgcatatgagggatcaagcagtggtaacagcagccctgaatatccgaggaaggagttcgccagttcctcaacaagaggtcggagtcagacgagggagtctgaaataagggttcggcttcagtccgcgtcaccttcgacccggtggactgagctggatgatgtcaaacgcttactgaaggggtcaagatcggcctccgtctcccctacacggaactcgtcgaacacattacctattccaaagaagggtacagtagagaccaagatcgttactgcttcttcccagtctgtctcgggcacctacgatgccaccatattggatgctaatttgccatcccacgtgtggtcatcaactttgcctgccggttcctcgatgggaacataccacaacaacatgaccactcagtcgtcctccctgctaaatacaaatgcttactccgcgggttcggtattcggagtacccaacaacatggcatcatgcagccctacactgcatccaggcctttcaacaagctctagtgtgtttgggatgcagaacaaccttgcgccctccttaacaacactctctcacgggacaacaacgacatctactgcctatggggtgaaaaagaatatgcctcagagcccggccgctgttaacactggggtatctaccagcgctgcttgtacaacaagcgttcagtctgacgacttgctgcacaaggattgcaagtttttaattctggaaaaagacaacacacccgctaagaaagagatggagctgctgattatgaccaaagattctgggaaagtattcaccgcttctcccgcaagtatcgccgctacatccttcagcgaggacacccttaagaaagagaaacaggccgcctataatgctgactcaggccttaaggctgaagccaatggagacctgaagactgtgtcaacgaaaggcaagacaacgacagcagatatccattcctatggctcttcgggcggagggggcagcggaggcgggggaggcgtcggcggagccggcggcggcccatggggtcccgccccagcttggtgcccctgcggcagctgttgtagctggtggaagtggctcctcggcctgttgttgacctggttgctgctcctcggtctcctgtttggactcatcgccctggccgaggaggtccgcaaactgaaagcacgggtcgacgagttggaacggatacggaggagtatcctcccttatggggatagtatggatcgaatagagaaagataggctgcaaggaatggcgcctgccgccggcgccgacttggacaagattggactgcactctgactcgcaggaagaactgtggatgttcgtcaggaagaagctcatgatggaacaggagaatgggaaccttcgtggatctccagggccaaaaggtgatatgggatcccccggaccaaagggcgaccggggctttccaggtactcctggtatcccagggcctctgggacatccaggcccacaggggccaaagggccaaaaaggctccgtaggcgatcctggaatggaaggccccatgggccagcggggccgagagggaccaatgggaccgaggggggaggccggaccacctggttccggggaaaaaggcgagcggggagccgcaggggagcccggaccccatggaccccccggggtacctggcagcgttgggccgaagggcagctccggctctcccgggccacagggaccccccgggcctgtcggcctgcagggactaaggggcgaggtcggcctgccaggagtcaaaggggacaagggcccgatggggccccccggccccaaaggggaccagggcgagaaagggccgagaggtctcactggcgagcccggaatgcggggattgcccggcgccgtgggtgagccaggagcaaagggcgccatgggccctgccggacctgatggccatcaggggccacggggcgagcaagggctcactggaatgccgggaatacgcggcccccccgggcccagcggggatccaggcaagccagggctgacagggccccaggggccccagggtctacctggtactcccggtcgccccgggattaagggggagcccggggcccccggcaaaatagtaactagcgaggggtcctctatgctcaccgtccctggccctccaggtcccccaggcgctatgggtcctccaggtccccccggtgcacctggtccagccggaccagcggggttacctggccaccaagaagtgcttaatctacagggcccacccgggccgcctggtccaaggggaccacctggcccctctatccccggccctccaggccccaggggccctccaggagaagggcttccgggccctcctgggcctcccgggagctttctgtcaaattctgaaaccttcttgagcgggcccccaggacccccaggacctccaggtcccaaaggcgatcaagggcctcccggaccacggggccaccagggcgagcagggtcttcctggattttcaacgtcgggctcaagttctttcgggctgaacttgcaaggacctcctggaccccccggaccgcagggtcctaaaggagacaagggtgacccaggggttcctggagcgttggggattcccagtgggcccagtgaagggggttcaagctctacaatgtatgtctctggtcctcccggccctccaggaccgcccggacctccaggtagcattagcagtagtggccaagagattcagcagtatatatccgaatatatgcagtcagactccatccgctcctatctctccggcgtccaggggcctccaggcccgcctggcccacccggccccgtgaccacgatcacgggcgagacgtttgattattctgagctagcctcccacgtcgtgtcttatctaagaacttctggctacggtgtctcattattttcaagcagcatctcctccgaggacattcttgccgtgcttcaacgagatgatgtgcgtcagtatctcaggcaatacttgatgggaccccgtggccctccaggaccccccggtgcctccggcgatggcagtctcctgtcactggactatgctgaattgagctctcgaattctgtcctatatgtctagctcaggaatctcaatcggactcccgggacctcccggccctcccggtctcccaggcaccagttatgaagaattgctgtcactgttacgaggatccgaattcagagggatcgtgggccccccagggccacccggccccccaggcatcccggggaacgtctggtcttctatcagcgtggaggacctgagttcctatctgcataccgccgggttgtctttcatcccaggtcccccaggaccgccgggtcccccaggccctcgagggccgcccggagttagcggtgctctggccacctatgctgccgaaaactctgatagctttcggagcgagcttatctcctatctcacctcaccagatgtccggagtttcatcgtgggtcctccaggcccccccggaccccagggccctccgggagatagccgacttctttccactgacgcttcacattccaggggttccagctcctctagccactcttcctctgtcaggcgaggttctagttactcctcttctatgtcgacggggggcggtggcgctggaagcttgggggctggaggagccttcggagaggccgcaggcgatcgggggccctatggaaccgatattggaccaggaggcggctacggcgcagcggcagagggtggaatgtacgccggaaatggagggctgctcggcgctgatttcgccggcgacctcgactacaacgaactggccgtgagagtaagcgaatctatgcagaggcagggccttctgcagggaatggcatacacagtacaggggcccccgggccagcctgggccacagggaccccctgggatcagcaaagtgttttctgcctattccaacgtcaccgcagatttaatggattttttccaaacgtatggcgcaattcaaggcccacccggccagaagggtgagatgggaacaccaggccccaagggggatcggggccctgccggtccacccggccatcctggcccccccggccctcggggtcataagggcgagaagggtgataagggggaccaggtctacgcagggcggcggagacggcggtctattgcggtgaaaccttag

SEQ ID NO: 9794 - DNA, 1254 bp, Artificial Sequence
  derived and/or modified sequence
atggatgtcaccaaaaagaacaagagggatgggaccgaggtaacggaacggatcgtgactgagaccgtgactaccaggctgacctcactacccccaaaagggggcacctccaacgggtatgccaagacagcgtcccttggtggaggcagtcgactcgagaagcagtccttgacgcatggcagctccggctacattaattctactggtagtaccagagggcatgccagcacgagttcctacaggcgagctcacagtcccgccagcacactgcctaactccccaggatccaccttcgagcgaaaaactcatgtaacacggcatgcatatgaagggtcaagctcaggcaattctagtccagagtatccaagaaaggaatttgctagctcctccacccgcggccgctcccagacacgagagagcgagattagagtacgcctgcagtccgcctccccatccacacggtggactgaactggacgatgtcaaacggctcctcaaaggatctaggtctgcctccgtaagtcctacccgaaactcatctaacaccctccccatacctaaaaagggcaccgtcgaaaccaagattgttactgcatctagccagtccgtatccgggacatacgacgctactattctagacgccaaccttccatctcacgtgtggtcatccactctgcccgccggatcgtctatgggaacgtatcataataatatgaccactcaaagctcaagcctactgaacactaatgcttattccgccggttccgtgttcggggtgcctaacaacatggccagctgttcacctacactgcacccggggctctcaacttctagtagcgtgtttggcatgcagaataacctggccccttctctgacaacactgagccacggaacaaccacgacatctaccgcatacggagtcaagaaaaacatgccacaaagtccagccgctgtgaataccggagtatcgacaagcgcggcctgcaccaccagcgtgcagtcagacgatttacttcataaagattgcaaattcctgatacttgagaaagacaacactccagccaaaaaagagatggaacttttgataatgactaaggattctggaaaggtcttcacggcctcgccagcatccattgcggccacatctttttccgaagacacgctgaagaaggaaaagcaagctgcctacaacgcggacagcggattgaaagctgaggcaaatggaaagaacaaatacgactgttgccctccttag

SEQ ID NO: 9795 - DNA, 201 bp, Artificial Sequence
  derived and/or modified sequence
tgatacggagcaattcaagggccgcccggtcagaagggtgagatgggaacccccggcccaaaaggggaccggggacctgcgggtccgcctggccacccaggccctccagggcctcgagggcacaagggtgagaaaggcgacaaaggggaccaggtgtatgccgggagacggaggcggcggtccattgccgtcaagccttag

SEQ ID NO: 9796 - DNA, 1815 bp, Artificial Sequence
  derived and/or modified sequence
atggatgttacaaagaagaataagcgggatggcactgaggttactgaaaggatagtgacggaaacggtgaccacacgcctcacatcacttccccctaaggggggcacctccaacggctacgccaagacagcctctctgggcggtggcagtagactcgaaaaacagtctctgacccatggaagcagcggctatattaatagcaccggtagtacccgtgggcatgcaagtaccagttcttatcgacgagcacattccccagcctctactttgcccaatagtccgggctccactttcgaaaggaaaacacacgtcacgcgccacgcttatgaggcgagcagcagtaccaggggtcggtctcagacacgggagagtgaaatccgggtgagattgcagtcagcctcaccttctacccgatggaccgaactggacgatgttaaaaggctgctcaagggcagtaggagcgctagtgtctctcccaccaggaattccagcaacacattgcccattccaaaaaaaggaactgtggaaactaagatcgtcaccgcaagctctcaatccgtcagcggaacttatgacgccactatcttagatgcgaatctgccgtcacacgtctggtctagcaccttacccgccgggtccagtatgggcacttatcataacaacatgacaacccagagctcctccttgctgaacaccaatgcctattctgcaggctcggtgttcggagttccaaacaacatggccagttgcagcccaactctccatcccggtctttctaccagcagtagtgtttttggtatgcagaacaacctggctccgagccttacaactctgtcccacgggaccactaccacctctaccgcttacggcgtcaaaaagaacatgcctcagagcccagcagccgtgaacacaggagtatcaacctctgctgcttgcactacctctgtgcagtcggacgatctgctccataaggattgtaagttcctgattttggagaaggataacactcccgccaaaaaggagatggaattgctaattatgacaaaggattccgggaaagtttttactgcctcacccgcaagtatagcggccactagctttagcgaggacacgctcaagaaggagaagcaggctgcgtataacgccgactcaggattaaaagcagaggcgaatggagacctgaagaccgtgtctacgaagggtaagacaactaccgccgacattcactcctacggttcatccgggggtggaggtagcggcggaggaggcggggtcggaggagccggcgggggcccatggggccctgcccccgcctggtgcccctgcgggagctgctgttcctggtggaagtggctgctgggtttgctcttaacttggcttctgcttctcggtcttctgttcgggctcatagcactagcggaggaggttaggaagctcaaggcgcgggtggatgagcttgaacgcatacgtcgatcgatcctgccctatggcgactctatggataggattgagaaggaccgcctccagggcatggcccccgcagctggcgccgaccttgataagattggtttgcacagcgacagccaggaggagctctggatgttcgttcgcaaaaagttgatgatggaacaagagaacggtaacctgcgcggaagtcctggtcctaaaggggacatggggagccccgggcccaagggagaccgcggcttcccaggtacccctggtatcccaggacccctcggtcacccaggaccccagggtcctaagggccaaaaggggagcgtcggggatccagggatggagggccctatgtag

SEQ ID NO: 9797 - DNA, 4494 bp, Artificial Sequence
  derived and/or modified sequence
atggatgtgaccaagaagaacaagagagatggaacagaggtgacagagcgcatcgtgacagagaccgtgaccacccggctgaccagcctgccccccaagggcggcaccagcaatggctacgccaagacagccagcctgggcggcggcagccggctggagaagcagagcctgacccacggcagcagcggctacatcaacagcacaggcagcacccggggccacgccagcaccagcagctacagaagagcccacagccctgccagcaccctgcccaacagccctggcagcacctttgagaggaagacccacgtgaccaggcatgcctatgagggcagcagcagcggcaacagcagccctgagtaccccaggaaggagtttgccagcagcagcacccggggccgcagccagacccgggagagcgagatccgggtgcggctgcagagcgccagccccagcacccgctggacagagctggatgatgtgaagaggctgctgaagggcagccgcagcgcctctgtgagccccaccaggaacagcagcaacaccctgcccatccccaagaagggcaccgtggagaccaagatcgtgacagccagcagccagagcgtgtctggcacctatgatgccaccatcctggatgccaacctgcccagccacgtgtggagcagcaccctgcctgctggcagctccatgggcacctaccacaacaacatgaccacccagagcagcagcctgctgaacaccaatgcctacagcgctggctctgtgtttggagtgcccaacaacatggccagctgcagccccaccctgcaccctggcctgagcaccagcagctctgtgtttggcatgcagaacaacctggcccccagcctgaccaccctgagccacggcaccaccaccaccagcacagcctatggagtgaagaagaacatgccccagagccctgctgctgtgaacacaggagtgtccaccagcgctgcctgcaccacctctgtgcagagtgatgacctgctgcacaaggactgcaagttcctgatcctggagaaggacaacaccccagccaagaaggagatggagctgctgatcatgaccaaggacagcggcaaggtgttcaccgccagccctgccagcattgctgccaccagcttcagcgaggacaccctgaagaaggagaagcaggccgcctacaatgctgacagcggcctgaaggccgaggccaatggagacctgaagacagtgtccaccaagggcaagaccaccacagctgacatccacagctatggcagcagcggcggcggcggcagcggcggcggcggcggcgtgggcggggccggcggcggcccctggggccctgccccagcctggtgcccctgtggcagctgctgctcctggtggaagtggctgctgggcctgctgctgacctggctgctgctgctgggcctgctgtttggcctcatcgccctggccgaggaggtgaggaagctgaaggcccgggtggatgagctggagcgcatccgccgcagcatcctgccctacggggacagcatggacagaattgagaaggaccggctgcagggcatggccccagctgctggagctgacctggacaagattggcctgcacagcgacagccaggaggagctgtggatgtttgtgaggaagaagctgatgatggagcaggagaatggaaacctgcggggcagccctggccccaagggggacatgggcagccctggccccaagggggaccggggcttccctggcaccccaggcatccctggccccctgggccaccctggcccccagggccccaagggccagaagggctctgtgggggaccccggcatggagggccccatgggccagaggggccgggagggccccatgggccccagaggagaggccggccccccaggcagcggggagaagggggagagaggagctgctggggagcccggcccccacggccccccaggagtgcccggctctgtgggccccaagggcagcagcggcagccctggcccccagggccccccaggccctgtgggcctgcagggcctgcggggggaggtgggcctgcccggggtgaagggggacaagggccccatgggccccccaggccccaagggggaccagggcgagaagggcccccggggcctgactggagagcccggcatgaggggcctgcccggggctgtgggggagcccggggccaagggggccatgggccctgctggcccagatggccaccagggccccagaggagagcagggcctgaccggcatgcctggcatccggggccccccaggccccagcggggaccccgggaagccaggcctgaccggcccccagggcccccagggcctgcccggcaccccaggccggcccggcatcaagggggagcccggggcccctgggaagatcgtgaccagcgagggcagctccatgctgactgtgcccggccccccaggccccccaggggccatgggccccccaggccccccaggggcccctggccctgctggccctgctggcctgcccggccaccaggaggtgctgaacctgcagggccccccaggccccccaggcccccggggccccccaggccccagcatccctggccccccaggcccccggggccccccaggagagggcctgcccggccccccaggccccccaggcagcttcctgagcaacagcgagaccttcctgagcggccccccaggccccccaggccccccaggccccaagggggaccagggccccccaggcccccggggccaccagggcgagcagggcctgcccggcttcagcaccagcggcagcagcagctttggcctgaacctgcagggccccccaggccccccaggcccccagggccccaagggggacaagggggaccccggggtgcctggggccctgggcatccccagcggccccagcgagggcggcagcagcagcaccatgtatgtgtctggccccccaggccccccaggccccccaggccccccaggcagcatcagcagcagcggccaggagatccagcagtacatcagcgagtacatgcagagcgacagcatccgcagctacctgagcggcgtgcagggccccccaggccccccaggccccccaggccctgtgaccaccatcactggagagacctttgactacagcgagctggccagccacgtggtgtcctacctgcggaccagcggctatggagtgtccctcttcagcagcagcatcagcagcgaggacatcctggccgtgctgcagagagatgatgtgcggcagtacctgcggcagtacctgatgggcccccggggccccccaggccccccaggggccagcggagatggcagcctgctgagcctggactatgcagagctgagcagccgcatcctgagctacatgagcagcagcggcatcagcatcggcctgcccggccccccaggccccccaggcctgcccggcaccagctatgaggagctgctgagcctgctgcggggcagcgagttccggggcatcgtgggccccccaggccccccaggccccccaggcatccctggaaatgtgtggagcagcatctctgtggaggacctgagcagctacctgcacacagctggcctgtccttcatccctggccccccaggccccccaggccccccaggcccccggggccccccaggagtgtctggggccctggccacctatgctgctgaaaattctgacagcttccgctctgagctgatctcctacctgaccagcccagatgtgcgctccttcatcgtgggccccccaggccccccaggcccccagggccccccaggggacagccggctgctgagcacagatgccagccacagccggggcagcagcagcagcagccacagcagctctgtgcggcggggcagcagctacagcagctccatgagcactggaggcggcggggccggcagcctgggcgccggcggggcctttggagaggccgccggggaccggggcccctatggaacagacatcggccctgggggcggctatggagctgctgctgagggcggcatgtatgctggaaatggaggcctgctgggcgctgactttgctggggacctggactacaatgagctggccgtgcgggtgtctgagagcatgcagaggcagggcctgctgcagggcatggcctacacagtgcagggccccccaggccagcccggcccccagggccccccaggcatcagcaaggtgttttctgcctacagcaatgtgacagctgacctgatggacttcttccagacctatggagccatccagggccccccaggccagaagggggagatgggcaccccaggccccaagggggaccggggccctgctggccccccaggccaccctggccccccaggcccccggggccacaagggggagaagggggacaagggggaccaggtgtatgccggcagaagaagaagaagaagcattgctgtgaagccctag

SEQ ID NO: 9798 - DNA, 1254 bp, Artificial Sequence
  derived and/or modified sequence
atggatgtgaccaagaagaacaagagagatggaacagaggtgacagagcgcatcgtgacagagaccgtgaccacccggctgaccagcctgccccccaagggcggcaccagcaatggctacgccaagacagccagcctgggcggcggcagccggctggagaagcagagcctgacccacggcagcagcggctacatcaacagcacaggcagcacccggggccacgccagcaccagcagctacagaagagcccacagccctgccagcaccctgcccaacagccctggcagcacctttgagaggaagacccacgtgaccaggcatgcctatgagggcagcagcagcggcaacagcagccctgagtaccccaggaaggagtttgccagcagcagcacccggggccgcagccagacccgggagagcgagatccgggtgcggctgcagagcgccagccccagcacccgctggacagagctggatgatgtgaagaggctgctgaagggcagccgcagcgcctctgtgagccccaccaggaacagcagcaacaccctgcccatccccaagaagggcaccgtggagaccaagatcgtgacagccagcagccagagcgtgtctggcacctatgatgccaccatcctggatgccaacctgcccagccacgtgtggagcagcaccctgcctgctggcagctccatgggcacctaccacaacaacatgaccacccagagcagcagcctgctgaacaccaatgcctacagcgctggctctgtgtttggagtgcccaacaacatggccagctgcagccccaccctgcaccctggcctgagcaccagcagctctgtgtttggcatgcagaacaacctggcccccagcctgaccaccctgagccacggcaccaccaccaccagcacagcctatggagtgaagaagaacatgccccagagccctgctgctgtgaacacaggagtgtccaccagcgctgcctgcaccacctctgtgcagagtgatgacctgctgcacaaggactgcaagttcctgatcctggagaaggacaacaccccagccaagaaggagatggagctgctgatcatgaccaaggacagcggcaaggtgttcaccgccagccctgccagcattgctgccaccagcttcagcgaggacaccctgaagaaggagaagcaggccgcctacaatgctgacagcggcctgaaggccgaggccaacgggaagaacaagtatgactgctgccccccatag

SEQ ID NO: 9799 - DNA, 201 bp, Artificial Sequence
  derived and/or modified sequence
tgatatggagccatccagggccccccaggccagaagggggagatgggcaccccaggccccaagggggaccggggccctgctggccccccaggccaccctggccccccaggcccccggggccacaagggggagaagggggacaagggggaccaggtgtatgccggcagaagaagaagaagaagcattgctgtgaagccctag

SEQ ID NO: 9800 - DNA, 1815 bp, Artificial Sequence
  derived and/or modified sequence
atggatgtgaccaagaagaacaagagagatggaacagaggtgacagagcgcatcgtgacagagaccgtgaccacccggctgaccagcctgccccccaagggcggcaccagcaatggctacgccaagacagccagcctgggcggcggcagccggctggagaagcagagcctgacccacggcagcagcggctacatcaacagcacaggcagcacccggggccacgccagcaccagcagctacagaagagcccacagccctgccagcaccctgcccaacagccctggcagcacctttgagaggaagacccacgtgaccaggcatgcctatgaggccagcagcagcacccggggccgcagccagacccgggagagcgagatccgggtgcggctgcagagcgccagccccagcacccgctggacagagctggatgatgtgaagaggctgctgaagggcagccgcagcgcctctgtgagccccaccaggaacagcagcaacaccctgcccatccccaagaagggcaccgtggagaccaagatcgtgacagccagcagccagagcgtgtctggcacctatgatgccaccatcctggatgccaacctgcccagccacgtgtggagcagcaccctgcctgctggcagctccatgggcacctaccacaacaacatgaccacccagagcagcagcctgctgaacaccaatgcctacagcgctggctctgtgtttggagtgcccaacaacatggccagctgcagccccaccctgcaccctggcctgagcaccagcagctctgtgtttggcatgcagaacaacctggcccccagcctgaccaccctgagccacggcaccaccaccaccagcacagcctatggagtgaagaagaacatgccccagagccctgctgctgtgaacacaggagtgtccaccagcgctgcctgcaccacctctgtgcagagtgatgacctgctgcacaaggactgcaagttcctgatcctggagaaggacaacaccccagccaagaaggagatggagctgctgatcatgaccaaggacagcggcaaggtgttcaccgccagccctgccagcattgctgccaccagcttcagcgaggacaccctgaagaaggagaagcaggccgcctacaatgctgacagcggcctgaaggccgaggccaatggagacctgaagacagtgtccaccaagggcaagaccaccacagctgacatccacagctatggcagcagcggcggcggcggcagcggcggcggcggcggcgtgggcggggccggcggcggcccctggggccctgccccagcctggtgcccctgtggcagctgctgctcctggtggaagtggctgctgggcctgctgctgacctggctgctgctgctgggcctgctgtttggcctcatcgccctggccgaggaggtgaggaagctgaaggcccgggtggatgagctggagcgcatccgccgcagcatcctgccctacggggacagcatggacagaattgagaaggaccggctgcagggcatggccccagctgctggagctgacctggacaagattggcctgcacagcgacagccaggaggagctgtggatgtttgtgaggaagaagctgatgatggagcaggagaatggaaacctgcggggcagccctggccccaagggggacatgggcagccctggccccaagggggaccggggcttccctggcaccccaggcatccctggccccctgggccaccctggcccccagggccccaagggccagaagggctctgtgggggaccccggcatggagggccccatgtag

SEQ ID NO: 9801 - DNA, 4494 bp, Artificial Sequence
  derived and/or modified sequence
atggacgtgaccaagaagaacaagcgggacggcaccgaggtgaccgaacgtatcgttactgagacagttacgaccaggttaacttctttgccccccaaaggtggtactagcaacgggtacgccaagactgcctcactgggtggcggctcacgcctcgagaagcaatctctgactcatggctcttcaggctatatcaattcaaccggctctactcgcggtcatgcctctactagctcttacagacgcgcccattcacccgcatctactttacctaattctccgggaagtaccttcgagcgtaagacccatgtgactcgccacgcttacgagggatcatcctctggaaacagtagccccgagtacccgcgcaaagagtttgcttccagcagtacacgcggccgctcccaaacacgggagagcgagatacgagttcgactgcagagcgcttcaccctctacgagatggacggaactagatgacgtgaaacggcttttgaaggggtcacggtctgccagcgtgagccccacaagaaatagtagtaatacattgcccatcccaaagaaaggaaccgtcgaaacaaagattgtgacagcctctagtcagagtgtcagcgggacctacgatgctaccatcctagatgcgaatctcccgagtcacgtttggtcctcaaccctacctgccggatcctccatgggtacctatcataataatatgactacccagagctcaagcttactgaacacaaacgcctacagtgccgggagcgtatttggagttccaaacaacatggcctcctgctcacctacattgcaccctggactgtctacaagctcaagtgtatttgggatgcaaaacaatcttgctccatccctgacaacgctgtcccacggaacgacgacaacgtcaaccgcatacggggtgaagaagaatatgccccagtctccagctgccgtgaatactggagtgtcaacatccgccgcgtgcactacatcagtacagagcgacgacctactccacaaggactgtaagttcctaattctggagaaagacaacacccctgcgaaaaaggagatggagcttttgatcatgacgaaagactcaggaaaggtgtttactgcgagtcctgcttcaatcgccgccaccagctttagcgaagacacactaaagaaggaaaagcaggccgcctataatgcagacagcggcctcaaagctgaagctaatggggatctaaagacggtgtccacaaaagggaaaacgacaaccgccgatatccattcctatggctcaagtggggggggcggaagcggcggaggcggtggtgtaggtggggctggtgggggtccttggggccctgctcccgcctggtgtccttgcggatcatgttgtagctggtggaaatggcttctcggtctactactgacctggttgctgctcttgggcctgctctttggcctgattgcccttgccgaggaggtcagaaaactaaaggctagggtggatgaacttgaaagaatccggaggtccattcttccctatggagattccatggatcggatcgaaaaagaccgactacagggaatggctcccgcagcgggtgccgacctggacaaaatcgggctacactctgactcccaggaagagctttggatgtttgtgagaaaaaagctaatgatggaacaggaaaatggtaatctccgcggctcccccggtcctaagggcgatatggggtctccaggcccaaaaggtgacagaggatttcctggaacaccaggcatcccgggcccactgggccaccctggcccacagggccctaaaggtcaaaaggggagtgtgggggaccctggaatggaagggccgatgggtcagcgtgggcgagaaggacccatgggtcctcggggcgaggctggccctcctgggtcgggagagaaaggagagcgtggggcggccggagaacccgggccacacggcccacctggggttccaggtagcgtcggcccaaagggctcatcagggagtcctggacctcagggccccccggggcccgtcggcctgcaaggcctaagaggtgaggtgggcctgcccggcgtgaaaggagataagggccctatgggtccaccaggaccaaagggggaccagggggagaaggggcctagaggcctcaccggagaaccaggcatgcgagggctacccggggcggtgggggagccgggagccaaaggggccatgggtccagcaggacctgatggccaccagggccctaggggcgagcaaggcctgacgggaatgcccggcataagagggccgcccggcccttcaggagatccgggaaagccaggtctgacgggccctcagggcccccaagggcttcctgggactcccgggagacccggcatcaaaggcgagccaggcgcccccggtaaaattgtgaccagcgagggcagctcaatgctgacggtcccagggccccccggaccacctggcgcgatgggcccacctgggcctccaggggctccaggacccgctggacccgctgggctcccgggccaccaagaggtattgaacctgcagggtcctcctgggcccccaggcccacgaggtcctcccgggccatctatccctggcccgcccggacctcgggggccccctggcgaaggcctgcctggccctcctggcccccccgggtccttcctttccaacagcgagacctttctgagtgggccccctggaccgcctgggccgcctggtccaaaaggcgatcagggtccaccaggaccacgtggacaccaaggcgaacagggcctacccggattctccacgagtgggagtagctccttcggcctaaatctccagggcccgccgggtcctccaggccctcaagggccaaagggggacaagggagatcctggtgtccccggagccctcggcatcccttctgggcctagcgaagggggatcctccagtacaatgtacgtgtccgggcctcccgggccaccagggccaccaggcccacccggctctattagctcttctgggcaagaaattcaacagtatatatccgagtatatgcagagcgattcaattagatcttaccttagcggggtgcaaggccctccaggtcccccaggcccaccggggccagtcactacaattacgggtgagaccttcgactacagtgagctcgcttcacatgtggtgagctacctgagaactagcggctatggcgtctcgctgttcagttccagtatctcatccgaagacatcctggctgtgttgcagcgcgatgacgtgcggcagtacctgcggcaatatttgatgggaccgagaggcccacctgggcctcccggtgctagtggtgacggctccttgctatccctcgattacgccgaactatcctcccgcatcctgtcctacatgtcatcttctggaatcagcatcggcttgcctggcccacccggaccaccaggattgcccggcacctcctacgaagaattgctgagcttgttaagaggcagtgaatttcgtgggattgttggaccaccaggaccgcctggccccccggggatcccgggtaatgtgtggagttctatctccgtcgaggacttgtcgtcctacctccatacagccgggctgagcttcatcccgggaccccctggcccgcccggccctccaggcccgagaggtccacctggagtgtctggggcattagccacttacgcagcagagaactccgatagtttcaggtctgagttaataagctacctaacctccccagatgtgcggagcttcatcgtgggacctcctggccctcccggccctcaagggccccctggcgacagtcggttgttatctacggacgccagccactcaagaggatcctcctcctccagtcactcttcctcagttcgcaggggctcgagctattctagcagcatgagcacaggcggcgggggcgctgggtcactgggtgcgggcggagccttcggcgaagcagccggggatcggggcccctacgggacagacatcggcccaggcggcggttatggagccgctgctgaaggcggtatgtacgctggtaacggaggactgttaggagctgacttcgcaggagatctcgattacaatgagctagccgttcgggtttctgagagtatgcaaaggcaaggcctcctccaaggaatggcctacaccgtgcaaggccccccggggcaaccaggcccacagggccccccaggaatttccaaggtcttctccgcttacagtaacgtgacagcggacctgatggactttttccaaacatatggggccattcagggacccccaggacagaagggcgagatggggacccccgggccaaaaggggaccggggccctgctgggcctccaggccatcccggccctccgggtccgcgaggtcacaaaggcgagaagggcgataagggagatcaagtgtatgccggacggagaaggcgacgctccattgcagtcaagccctag

SEQ ID NO: 9802 - DNA, 1254 bp, Artificial Sequence
  derived and/or modified sequence
atggacgtgaccaagaagaacaagcgggacggcaccgaggtgaccgaacgcatcgttaccgagaccgtcactacgcgattaacctctctgccgccgaaaggagggacatccaatggatacgcaaaaacagcgtcactgggcggcgggtcaaggctcgagaagcaatctctcactcacggctcctcaggatatattaattccaccggatcgacccgtggtcatgcttccacctcttcctataggagagcccacagccctgcttccactcttcccaattcccccggatccacattcgaacgcaaaacccatgtaaccaggcacgcttatgaagggtcaagttcaggaaacagctctcctgagtacccgcggaaagagttcgccagctcatccaccaggggacgaagccagacccgggaatcggagatccgggtgagactgcagagtgcctccccatctactcggtggacagagctcgacgacgtaaaaagactgctgaagggctctcggagtgcttctgtgtccccaacccgcaattcatccaataccttaccgattcccaagaagggtaccgttgagaccaaaatagttacggcatcaagccagagcgttagcggcacatacgacgcgactattctcgacgccaatcttccatctcatgtgtggtcttcaacactccccgcaggaagttccatggggacctaccacaacaatatgactactcaatcttcctcgttgctgaacacaaacgcatattctgccggtagcgtgttcggggtcccaaacaacatggccagctgctctccgacactccacccgggactttctacaagtagcagcgtgttcggcatgcaaaacaacttagccccgtctttaacgacactgtcccatgggactacgacaaccagcacagcctatggcgtgaagaagaatatgcctcagtctcctgccgctgtcaatactggagtctctacgtctgccgcatgtactacaagcgtgcagagtgacgatctcttgcacaaggactgcaaattcctgattcttgagaaagataacacaccagcgaaaaaggagatggaattgctgatcatgaccaaggattccgggaaagtattcaccgcttccccagcttccatagcggctacgtctttcagtgaagatacgctgaagaaggagaaacaggctgcctacaacgctgatagtggactcaaggcagaggctaacggaaagaataagtacgactgttgtcccccatag

SEQ ID NO: 9803 - DNA, 201 bp, Artificial Sequence
  derived and/or modified sequence
tgatacggcgccatccagggcccccccggccagaagggcgagatgggtacccctggccccaagggggatcgaggccccgctggaccccctggccacccaggcccccccggacctagagggcacaagggcgagaagggcgacaaaggtgaccaggtttacgccggaagaagacgcaggagaagcatcgcagtgaagccatag

SEQ ID NO: 9804 - DNA, 1815 bp, Artificial Sequence
  derived and/or modified sequence
atggacgtgaccaagaagaacaagcgggacggcaccgaggtgaccgaaagaatagtgacagaaacggtaacaacccgcctgaccagtctgccccctaagggaggaacaagcaatggttacgcgaagaccgcctcactgggaggcgggtctcgactggagaaacagagccttacccacgggagttccgggtatatcaactctactgggtctacaagaggccacgccagcaccagtagctacagaagagcacattccccagcttcaacgcttcctaatagtccaggctcaacgtttgagaggaagacacacgttacgaggcatgcctacgaagccagttctagcactagaggcagaagtcagacaagagaatccgaaatacgggtccgcctgcagtcagcctctcctagcacccgctggactgaactggatgacgtaaagaggctgttgaagggtagtaggagtgcctctgtcagccctacacgcaactcaagcaacacacttcccattcccaagaagggcaccgttgagacaaagatcgtcaccgccagctcacaatccgtgagtggaacatatgatgcaactatactggacgcaaatctgccgtctcacgtctggtcctcgactctcccagctggatccagcatgggcacgtaccacaataatatgactacccagtcctcttccctactcaacactaatgcatattcagctggcagtgtttttggtgtgcccaataacatggcaagctgttcccccaccttacatccagggttgtctacgagctccagtgttttcggaatgcagaacaacctcgccccatctctcaccacgctgtcacacggcacgaccactacaagtaccgcctatggagtgaagaagaacatgccccagtccccagctgcagtgaacacaggggtgtctaccagcgctgcctgtactacatctgtgcaatcggatgatctcttacacaaagattgcaaattcttaattctcgagaaggacaatactcctgcaaaaaaagaaatggaattactgatcatgaccaaagattcgggcaaggtttttaccgccagccccgcctcgattgccgcaactagcttctccgaagacacactgaagaaggagaaacaggccgcttataacgcggattccggactcaaagccgaggccaatggcgacctgaagacagtttctactaaaggcaagactactaccgcagatatccactcctacgggagcagtggtggagggggaagcgggggcggtgggggggttggtggtgctgggggtggcccatggggacctgcccccgcttggtgtccttgcggatcctgctgctcttggtggaaatggctgctcgggttgctgctaacctggctgttgcttttgggcctcttgttcggtctgattgccctggctgaagaagtccggaagttgaaggcgcgcgtagatgagctggagaggattcggcgttctattctgccttacggagatagcatggatcgtatagagaaggaccgcttacagggaatggctccagccgccggcgccgatctggataagattgggctccattccgacagccaggaagagctttggatgttcgtccgaaaaaaacttatgatggagcaggagaacggcaatctgcgcggctctccaggtcctaagggagacatgggcagtcctgggcccaaaggagacagggggtttccaggcacaccaggcattccagggccacttggtcatcccggtcctcagggccctaaaggacaaaaaggatctgtcggcgatccagggatggaaggacccatgtag

SEQ ID NO: 9805 - DNA, 5734 bp, Artificial Sequence
  derived and/or modified sequence
aaatccagcaagtgtcagataattggaagggtggagtaacgctgtaaaccatgacacacctttgtcaggacatgtttggaagcaaagagttgaaagaaacaaggtggagagaaagaaaagtgaacatttttgaaagatcactcagctttaacacaccttggctgggtctggataaaaaaaaagtgagcactgcaaatttctagaagaaaacatcaggagaagaaagagagagggggatttattcaaagttgtttccaattccttcaaaacctcaaaccaggtggctatggtatggatgtaaccaagaaaaacaaacgagatggaactgaagtcactgagagaattgtcactgaaacagtaaccacaagacttacatccttaccaccaaaaggcgggaccagcaatggctatgctaaaacagcctctcttggtggagggagccggctggagaaacaaagcctgactcatggcagcagcggctacataaactcaactggaagcacacgaggccatgcctccacctctagttacaggagggctcactcacctgcctccactctgcccaactccccaggctcaacctttgaaaggaaaactcacgttacccgccatgcgtatgaagggagctccagtggcaactcttctccggagtaccctcggaaggaatttgcatcttcttcaaccagaggacggagtcaaacacgagagagtgaaattcgagttcgactgcagagtgcgtccccatccacccgatggacagaattggatgatgttaagcgtttgctcaaggggagtcgatcggcaagtgtgagccccacccggaattcctccaacacactccccatccccaagaaaggcactgtggagaccaaaattgtgacagcgagctcccagtcggtgtcaggcacctacgatgcaacgatcctggatgccaaccttccctcccatgtgtggtcctccaccctgcccgcggggtcctccatggggacctatcacaacaacatgacaacccagagctcatccctcctcaacaccaatgcctactctgcgggatcagtcttcggagttccaaacaacatggcgtcctgctcacccactttgcaccctggactcagcacatcctcctcagtgtttggcatgcagaacaatctggcccccagcttgaccaccctgtcccatggcaccaccaccacttccacagcatatggggtgaagaaaaacatgccccagagtcctgcggctgtgaacactggcgtttccacctccgccgcctgcaccacaagtgtgcagagcgatgaccttttgcacaaggactgcaagttcctgatcctagagaaagacaacacacctgccaagaaggagatggagctgctcatcatgaccaaggacagcgggaaggtctttacagcctcccctgccagcatcgctgcaacttctttttcagaagacaccctaaaaaaagaaaagcaagctgcctacaatgctgactcaggcctaaaagccgaagctaatggagacctgaagactgtgtccacaaagggcaagaccaccactgcagatatccacagctacggcagcagtggtggtggtggcagtggaggaggtggcggtgttggtggcgctggcggcggcccttggggaccagcgccagcctggtgcccctgcggctcctgctgcagctggtggaagtggctgctgggcctgctgctcacctggctgctactcctggggctgctcttcggcctcattgctctggcggaggaggtgaggaagctgaaggcgcgtgtggatgagctggagaggatcaggaggagcatactgccctatggggacagcatggatagaatagaaaaggaccgcctccagggcatggcacccgcggcgggagcagacctggacaaaattgggctgcacagtgacagccaggaggagctctggatgttcgtgaggaagaagctaatgatggaacaggaaaatggaaatctccgaggaagccctggccctaaaggtgacatgggaagtccaggccctaaaggagatcgagggttccctgggactccaggtatccctgggcccttgggccacccaggtccacaaggaccaaagggtcaaaaaggcagcgtgggagatcctggcatggaaggccccatgggccagagagggcgagaaggccccatgggacctcgtggtgaggcagggcctcctggatctggagagaaaggggaaagaggggctgctggtgaaccaggtcctcatggcccacctggtgtcccaggttctgtgggtcccaaaggttccagcggctctcctggcccacagggccctccaggtcctgtaggtctccaagggctccgaggtgaagtaggacttcctggtgtcaaaggtgacaaaggaccaatgggaccaccaggacccaaaggtgaccagggtgagaaaggacctcgaggcctcacaggcgagcctggcatgagaggtttgcctggtgctgttggtgagcccggggctaaaggagcaatgggtcctgctggcccagacggacaccaaggcccaagaggtgaacaaggtcttactgggatgcctggaatccgtggcccaccaggaccttctggagacccaggaaagccaggtctcacaggaccccagggacctcagggacttcccggtacccctggccgaccaggaataaaaggtgaaccaggagctccaggcaagatcgtgacttcggaggggtcatcgatgctcactgtcccaggccccccaggacctcctggagccatgggacccccaggacctccaggtgccccaggccctgccggcccagctggtctcccaggacatcaagaagttcttaatttacaaggtcccccaggcccacccggcccacgcgggccaccagggccttccattccaggcccaccaggaccccgaggcccaccaggggagggtttgccaggcccaccaggcccaccaggatcgttcctgtccaactcagaaaccttcctctccggccccccaggcccacctggccccccaggtcccaagggagaccaaggtcccccaggccccagaggacaccaaggcgagcaaggcctcccaggtttctcaacctcagggtccagttctttcggactcaaccttcagggaccaccaggcccacctggcccccagggacccaaaggtgacaaaggtgatccaggtgttccaggggctcttggcattcctagtggtccttctgaagggggatcatcaagtaccatgtacgtgtcaggcccgccagggccccctgggccccctgggcctccgggctctatcagcagctctggccaggagattcagcagtacatctctgagtacatgcagagtgacagtattagatcttacctatccggagttcagggtcccccaggcccacctggtcccccaggacctgtcaccaccatcacaggcgagactttcgactactcagagctggcaagccacgttgtgagctacttacggacttcggggtacggtgtcagcttgttctcgtcctccatctcttctgaagacattctggctgtgctgcagcgggatgacgtgcgtcagtacctacgtcagtacttgatgggccctcggggtccgccagggccaccaggagccagtggagatgggtccctcctgtctttggactatgcagagctgagtagtcgcattctcagctacatgtcgagttctgggatcagcattgggcttcctggtcccccggggccccctggcttgccgggaacctcctatgaggagctcctctccttgctgcgagggtctgaattcagaggcatcgttggacccccaggtcccccgggtccaccagggatcccaggcaatgtgtggtccagcatcagcgtggaggacctctcgtcttacttacatactgccggcttgtcattcatcccaggccctccaggacctcctggtcccccagggcctcgagggcccccgggtgtctcaggagccctggcaacctatgcagctgaaaacagcgacagcttccggagcgagctgatcagctacctcacaagtcctgatgtgcgcagcttcattgttggccccccaggccctcctgggccgcagggaccccctggggacagccgcctcctgtccacggatgcctcccacagtcggggtagcagctcctcctcacacagctcatctgtcaggcggggcagctcctacagctcttccatgagcacaggaggaggtggtgcaggctccctgggtgcaggcggtgcctttggtgaagctgcaggagacaggggtccctatggcactgacatcggcccaggcggaggctatggggcagcagcagaaggcggcatgtatgctggcaatggcggactattgggagctgactttgctggagatctggattacaatgagctggctgtgagggtgtcagagagcatgcagcgtcagggcctactgcaagggatggcctacactgtccagggcccaccaggccagcctgggccacaggggccacccggcatcagcaaggtcttctctgcctacagcaacgtgactgcggacctcatggacttcttccaaacttatggagccattcaaggaccccctgggcaaaaaggagagatgggcactccaggacccaaaggtgacaggggccctgctgggccaccaggtcatcctgggccacctggccctcgaggacacaagggagaaaaaggagacaaaggtgaccaagtctatgctgggcggagaaggagaagaagtattgctgtcaagccgtgagctagccatggcaggacagctcctggaccaggtctcataatgcatgtggcacttaggtccaaggtctccagagggtgaaagctggagtctgtcaatgtcctactgagacagcacagccaacctagctagcaacatttgttttagtctgaacaatatatacttatagaattcagtcaaagatacacaatctgaaacagcttcatggggtggactctaacagtagttgcaatgttttagaatgagacttacttctctgctatctagatctgaactccttggcttctttacttagttcaagccccagcctaggaaagccagttacataaaagttggctcaggagtcttagagctttacctaaatatgagcccagaaaacggaggatgggggtggggcgccttcctggaggtgacacttgatgggggtgtgttctggttactgttctaaggctgtgccatcagctccttcctcccctgttcattctgcattctctagtcagttggctaagaagtgactcttgcaactaaaaaaattaagaaattcacttcccctctaggaggtgatgatagggtttctaatggttatatgtatatcacattcccatttgcttagaaagtctgattgtagctatgattgtccgtaggcccatactagagttcatggatatgttatactgaaccaggccagagcaaacagaaaaagaaggttgagggcaatggacaaggaaggaataaagggagaagagggaaaacagaaaacctgatgctggggacacagcatcagctcaagacgtcaccctccattctgcactcagaaaatggcacttgggggactgggcgcagttggtctttaaccacttttcaatgtctaaaaacatttgtttgtggtctataagatgaaacatcatttcaatcgtaaaatttcccattaaagaagtttttttttctaata

SEQ ID NO: 9806 - DNA, 1610 bp, Artificial Sequence
  derived and/or modified sequence
agagagagggggatttattcaaagttgtttccaattccttcaaaacctcaaaccaggtggctatggtatggatgtaaccaagaaaaacaaacgagatggaactgaagtcactgagagaattgtcactgaaacagtaaccacaagacttacatccttaccaccaaaaggcgggaccagcaatggctatgctaaaacagcctctcttggtggagggagccggctggagaaacaaagcctgactcatggcagcagcggctacataaactcaactggaagcacacgaggccatgcctccacctctagttacaggagggctcactcacctgcctccactctgcccaactccccaggctcaacctttgaaaggaaaactcacgttacccgccatgcgtatgaagggagctccagtggcaactcttctccggagtaccctcggaaggaatttgcatcttcttcaaccagaggacggagtcaaacacgagagagtgaaattcgagttcgactgcagagtgcgtccccatccacccgatggacagaattggatgatgttaagcgtttgctcaaggggagtcgatcggcaagtgtgagccccacccggaattcctccaacacactccccatccccaagaaaggcactgtggagaccaaaattgtgacagcgagctcccagtcggtgtcaggcacctacgatgcaacgatcctggatgccaaccttccctcccatgtgtggtcctccaccctgcccgcggggtcctccatggggacctatcacaacaacatgacaacccagagctcatccctcctcaacaccaatgcctactctgcgggatcagtcttcggagttccaaacaacatggcgtcctgctcacccactttgcaccctggactcagcacatcctcctcagtgtttggcatgcagaacaatctggcccccagcttgaccaccctgtcccatggcaccaccaccacttccacagcatatggggtgaagaaaaacatgccccagagtcctgcggctgtgaacactggcgtttccacctccgccgcctgcaccacaagtgtgcagagcgatgaccttttgcacaaggactgcaagttcctgatcctagagaaagacaacacacctgccaagaaggagatggagctgctcatcatgaccaaggacagcgggaaggtctttacagcctcccctgccagcatcgctgcaacttctttttcagaagacaccctaaaaaaagaaaagcaagctgcctacaatgctgactcaggcctaaaagccgaagctaatggtaagaacaaatatgattgttgtccaccttgacttcagccaggccacatttcatttcattgtcttcggagaccttgctactcaaagtgtggtccacgggccagcagcatcagccacacctgggagtgtgttataaaagcaggatcccagccctagctcagatctgctgagtcagaagctgcagttcaacaagcttcctaggtgatttgcatttgcattactgaagcaaaagcctgcctctgccatgtctacgaaggcatttgttttctcattttactttttctccataatcttcagaactaatagaaaaatgctttgcaaa

SEQ ID NO: 9807 - DNA, 537 bp, Artificial Sequence
  derived and/or modified sequence
cttatggagccattcaaggaccccctgggcaaaaaggagagatgggcactccaggacccaaaggtgacaggggccctgctgggccaccaggtcatcctgggccacctggccctcgaggacacaagggagaaaaaggagacaaaggtgaccaagtctatgctgggcggagaaggagaagaagtattgctgtcaagccgtgagctagccatggcaggacagctcctggaccaggcccatactagagttcatggatatgttatactgaaccaggccagagcaaacagaaaaagaaggttgagggcaatggacaaggaaggaataaagggagaagagggaaaacagaaaacctgatgctggggacacagcatcagctcaagacgtcaccctccattctgcactcagaaaatggcacttgggggactgggcgcagttggtctttaaccacttttcaatgtctaaaaacatttgtttgtggtctataagatgaaacatcatttcaatcgtaaaatttcccattaaagaagtttttttttctaa

SEQ ID NO: 9808 - DNA, 5553 bp, Artificial Sequence
  derived and/or modified sequence
gaaagatcactcagctttaacacaccttggctgggtctggataaaaaaaaagtgagcactgcaaatttctagaagaaaacatcaggagaagaaagagagagggggatttattcaaagttgtttccaattccttcaaaacctcaaaccaggtggctatggtatggatgtaaccaagaaaaacaaacgagatggaactgaagtcactgagagaattgtcactgaaacagtaaccacaagacttacatccttaccaccaaaaggcgggaccagcaatggctatgctaaaacagcctctcttggtggagggagccggctggagaaacaaagcctgactcatggcagcagcggctacataaactcaactggaagcacacgaggccatgcctccacctctagttacaggagggctcactcacctgcctccactctgcccaactccccaggctcaacctttgaaaggaaaactcacgttacccgccatgcgtatgaagcatcttcttcaaccagaggacggagtcaaacacgagagagtgaaattcgagttcgactgcagagtgcgtccccatccacccgatggacagaattggatgatgttaagcgtttgctcaaggggagtcgatcggcaagtgtgagccccacccggaattcctccaacacactccccatccccaagaaaggcactgtggagaccaaaattgtgacagcgagctcccagtcggtgtcaggcacctacgatgcaacgatcctggatgccaaccttccctcccatgtgtggtcctccaccctgcccgcggggtcctccatggggacctatcacaacaacatgacaacccagagctcatccctcctcaacaccaatgcctactctgcgggatcagtcttcggagttccaaacaacatggcgtcctgctcacccactttgcaccctggactcagcacatcctcctcagtgtttggcatgcagaacaatctggcccccagcttgaccaccctgtcccatggcaccaccaccacttccacagcatatggggtgaagaaaaacatgccccagagtcctgcggctgtgaacactggcgtttccacctccgccgcctgcaccacaagtgtgcagagcgatgaccttttgcacaaggactgcaagttcctgatcctagagaaagacaacacacctgccaagaaggagatggagctgctcatcatgaccaaggacagcgggaaggtctttacagcctcccctgccagcatcgctgcaacttctttttcagaagacaccctaaaaaaagaaaagcaagctgcctacaatgctgactcaggcctaaaagccgaagctaatggagacctgaagactgtgtccacaaagggcaagaccaccactgcagatatccacagctacggcagcagtggtggtggtggcagtggaggaggtggcggtgttggtggcgctggcggcggcccttggggaccagcgccagcctggtgcccctgcggctcctgctgcagctggtggaagtggctgctgggcctgctgctcacctggctgctactcctggggctgctcttcggcctcattgctctggcggaggaggtgaggaagctgaaggcgcgtgtggatgagctggagaggatcaggaggagcatactgccctatggggacagcatggatagaatagaaaaggaccgcctccagggcatggcacccgcggcgggagcagacctggacaaaattgggctgcacagtgacagccaggaggagctctggatgttcgtgaggaagaagctaatgatggaacaggaaaatggaaatctccgaggaagccctggccctaaaggtgacatgggaagtccaggccctaaaggagatcgagggttccctgggactccaggtatccctgggcccttgggccacccaggtccacaaggaccaaagggtcaaaaaggcagcgtgggagatcctggcatggaaggccccatgggccagagagggcgagaaggccccatgggacctcgtggtgaggcagggcctcctggatctggagagaaaggggaaagaggggctgctggtgaaccaggtcctcatggcccacctggtgtcccaggttctgtgggtcccaaaggttccagcggctctcctggcccacagggccctccaggtcctgtaggtctccaagggctccgaggtgaagtaggacttcctggtgtcaaaggtgacaaaggaccaatgggaccaccaggacccaaaggtgaccagggtgagaaaggacctcgaggcctcacaggcgagcctggcatgagaggtttgcctggtgctgttggtgagcccggggctaaaggagcaatgggtcctgctggcccagacggacaccaaggcccaagaggtgaacaaggtcttactgggatgcctggaatccgtggcccaccaggaccttctggagacccaggaaagccaggtctcacaggaccccagggacctcagggacttcccggtacccctggccgaccaggaataaaaggtgaaccaggagctccaggcaagatcgtgacttcggaggggtcatcgatgctcactgtcccaggccccccaggacctcctggagccatgggacccccaggacctccaggtgccccaggccctgccggcccagctggtctcccaggacatcaagaagttcttaatttacaaggtcccccaggcccacccggcccacgcgggccaccagggccttccattccaggcccaccaggaccccgaggcccaccaggggagggtttgccaggcccaccaggcccaccaggatcgttcctgtccaactcagaaaccttcctctccggccccccaggcccacctggccccccaggtcccaagggagaccaaggtcccccaggccccagaggacaccaaggcgagcaaggcctcccaggtttctcaacctcagggtccagttctttcggactcaaccttcagggaccaccaggcccacctggcccccagggacccaaaggtgacaaaggtgatccaggtgttccaggggctcttggcattcctagtggtccttctgaagggggatcatcaagtaccatgtacgtgtcaggcccgccagggccccctgggccccctgggcctccgggctctatcagcagctctggccaggagattcagcagtacatctctgagtacatgcagagtgacagtattagatcttacctatccggagttcagggtcccccaggcccacctggtcccccaggacctgtcaccaccatcacaggcgagactttcgactactcagagctggcaagccacgttgtgagctacttacggacttcggggtacggtgtcagcttgttctcgtcctccatctcttctgaagacattctggctgtgctgcagcgggatgacgtgcgtcagtacctacgtcagtacttgatgggccctcggggtccgccagggccaccaggagccagtggagatgggtccctcctgtctttggactatgcagagctgagtagtcgcattctcagctacatgtcgagttctgggatcagcattgggcttcctggtcccccggggccccctggcttgccgggaacctcctatgaggagctcctctccttgctgcgagggtctgaattcagaggcatcgttggacccccaggtcccccgggtccaccagggatcccaggcaatgtgtggtccagcatcagcgtggaggacctctcgtcttacttacatactgccggcttgtcattcatcccaggccctccaggacctcctggtcccccagggcctcgagggcccccgggtgtctcaggagccctggcaacctatgcagctgaaaacagcgacagcttccggagcgagctgatcagctacctcacaagtcctgatgtgcgcagcttcattgttggccccccaggccctcctgggccgcagggaccccctggggacagccgcctcctgtccacggatgcctcccacagtcggggtagcagctcctcctcacacagctcatctgtcaggcggggcagctcctacagctcttccatgagcacaggaggaggtggtgcaggctccctgggtgcaggcggtgcctttggtgaagctgcaggagacaggggtccctatggcactgacatcggcccaggcggaggctatggggcagcagcagaaggcggcatgtatgctggcaatggcggactattgggagctgactttgctggagatctggattacaatgagctggctgtgagggtgtcagagagcatgcagcgtcagggcctactgcaagggatggcctacactgtccagggcccaccaggccagcctgggccacaggggccacccggcatcagcaaggtcttctctgcctacagcaacgtgactgcggacctcatggacttcttccaaacttatggagccattcaaggaccccctgggcaaaaaggagagatgggcactccaggacccaaaggtgacaggggccctgctgggccaccaggtcatcctgggccacctggccctcgaggacacaagggagaaaaaggagacaaaggtgaccaagtctatgctgggcggagaaggagaagaagtattgctgtcaagccgtgagctagccatggcaggacagctcctggaccaggtctcataatgcatgtggcacttaggtccaaggtctccagagggtgaaagctggagtctgtcaatgtcctactgagacagcacagccaacctagctagcaacatttgttttagtctgaacaatatatacttatagaattcagtcaaagatacacaatctgaaacagcttcatggggtggactctaacagtagttgcaatgttttagaatgagacttacttctctgctatctagatctgaactccttggcttctttacttagttcaagccccagcctaggaaagccagttacataaaagttggctcaggagtcttagagctttacctaaatatgagcccagaaaacggaggatgggggtggggcgccttcctggaggtgacacttgatgggggtgtgttctggttactgttctaaggctgtgccatcagctccttcctcccctgttcattctgcattctctagtcagttggctaagaagtgactcttgcaactaaaaaaattaagaaattcacttcccctctaggaggtgatgatagggtttctaatggttatatgtatatcacattcccatttgcttagaaagtctgattgtagctatgattgtccgtaggcccatactagagttcatggatatgttatactgaaccaggccagagcaaacagaaaaagaaggttgagggcaatggacaaggaaggaataaagggagaagagggaaaacagaaaacctgatgctggggacacagcatcagctcaagacgtcaccctccattctgcactcagaaaatggcacttgggggactgggcgcagttggtctttaaccacttttcaatgtctaaaaacatttgtttgtggtctataagatgaaacatcatttcaatcgtaaaatttcccattaaagaagtttttttttctaa

SEQ ID NO: 9809 - DNA, 4494 bp, Artificial Sequence
  derived and/or modified sequence
atggatgttacaaagaagaataagcgcgacggtacagaagtgaccgagagaatcgtgactgagacggtcaccacccgccttaccagtctacctcccaagggtgggacctccaacgggtacgctaaaaccgcctccttgggcggaggatctcgcctggaaaagcaaagcctaactcatggttcaagtggatacataaatagcactggctccacaagggggcatgctagcaccagcagttaccggagagcgcattcccccgcatcaaccttacctaactcccctggaagcacgttcgaaaggaagacacatgtgaccaggcacgcatatgaaggatcatcaagcggcaactcaagtcccgagtacccgaggaaagaatttgcttcaagctcaacaaggggtagatcccaaaccagagaatctgagatacgtgtgcgccttcagtccgcatctcctagtactcggtggacggaactggatgacgtgaaacggctgctgaagggatcccgctcggccagtgtttctccgacaaggaacagtagcaacaccctcccaattccaaaaaagggtacggtggaaactaaaattgtgactgcttcctctcagtcggtgtcaggtacttacgacgccaccatacttgacgctaatctcccgtctcatgtgtggtccagtaccctgcctgctgggtctagcatgggcacctatcacaacaatatgactacccagtcttccagcctactgaatactaatgcctattcagcaggctcggtattcggagtgcctaacaacatggctagttgttctcccacccttcatcccggtctttcaacttcctcgagtgtgtttggtatgcagaataacctggcccctagtcttacaacgctgtcacatggcacaactacaacatccacagcttatggtgtgaaaaagaatatgccccagtcaccagcagctgtcaatactggagtctctactagtgcagcatgcacaacttcagtccaatcggatgacttactgcacaaggattgtaagttcctcatcctggagaaggataacaccccagctaaaaaggaaatggagctcctgataatgactaaagattctgggaaagtctttactgcgtcccctgcatccattgccgctacatccttctcagaggacactcttaaaaaagaaaagcaggctgcatataatgctgattccggactgaaagccgaagccaacggtgacttaaagaccgtgtccacaaaaggcaagacaaccaccgcggatattcactcgtatgggagctccggaggcggaggctcaggcggtggtggtggagtgggtggcgctgggggtggcccatggggccctgccccagcatggtgtccctgtggaagttgctgtagctggtggaaatggctccttgggctgttgctgacttggcttctcttgctgggcttacttttcggcttgatagcacttgccgaagaggtgcgcaaactgaaggccagagttgatgaattagaacggataaggcgaagcatattaccatatggtgactcaatggatagaatcgagaaggacagactccaagggatggctccagctgccggtgctgatctggacaagatcgggcttcactcagattcccaggaggaactctggatgttcgtgagaaaaaaacttatgatggaacaggagaacgggaacctgagaggttctcctggtccaaagggggatatgggctccccgggacccaaaggagaccggggattccccggaacccctgggatccccggtccacttggtcatcctgggccacaggggccaaaaggccagaaaggcagtgtcggcgacccgggtatggaaggtcctatggggcagagaggtcgggagggcccaatggggcctcgaggcgaggctggtcctccgggatcaggagaaaagggggagcggggagcggctggagaacctggaccacacggacccccaggcgtgcctgggagcgtgggcccaaaaggtagctccggtagtccaggtcctcagggtccccctggcccagtaggactccaaggcctaaggggcgaagtggggctgccgggtgttaagggagataaagggccaatggggcctccaggtccaaaaggcgatcagggcgagaagggacctcggggacttacaggggaaccagggatgaggggccttcctggagcggtgggtgaacccggagccaagggggcaatgggcccagccggacctgacggccaccaaggcccacgaggggagcaagggctcactggtatgcccggaatcagaggcccaccaggaccttccggggaccctgggaagcctggcctcaccggcccacaagggcctcaaggcctgcctggcacgcccggaagacctggcatcaaaggggagcccggtgctcccggaaagattgtgacttccgaggggtcctcaatgctcacagtccccggacccccaggacccccaggagccatgggcccacctggcccacctggcgctcccggaccagcagggcctgcaggactacctgggcaccaggaggtcctgaatttgcaggggcctccaggtcctcccggacctaggggacctcccggtcccagcattcccggtccccctgggccacggggtcctcctggcgaaggattacctgggcctcccggaccgccaggttccttcctgagcaacagtgaaactttcctgagcggcccacctggacctcccggaccacccggacccaagggtgatcaggggccacccggaccaagaggtcatcagggggaacagggactgcccggattcagtacctccggttcgtcgtcattcggtctgaacctccaggggccacccggtccccctggaccccagggacctaaaggcgacaagggcgaccctggtgtaccgggtgctcttggaattcctagcggaccatccgagggaggatcgtccagtactatgtacgtgagtggaccaccaggcccacctggcccacccggaccaccaggtagtatctcctctagtggccaggaaatccagcagtatatttccgagtatatgcagagcgacagtattcgcagctacctgtctggtgttcaaggccctcccggacctccaggtcctcccggtccagtgacgaccataaccggtgagacatttgactacagtgagttggccagtcatgtggtgtcttacctacgtacctctggctacggggtgtctctgttctcatcctctatctcaagcgaggatatccttgccgtcctgcagagggatgacgtccggcagtatctacgccagtatctgatgggcccacggggtccgccaggtccaccaggcgcatcaggtgatggatcactgcttagtttagactatgctgagctgtccagtagaatacttagttacatgagctcttcaggaatcagcattggccttcctggtcccccaggacctcctggcttacccggaacgtcttacgaagaattgctgagtttgttacggggtagcgaattccgcggtatcgtcggcccaccgggtccacctggccctccaggtattcctgggaatgtatggagctccatcagcgtagaggatcttagctcctatctgcacacagcagggctgagttttatccctggtccaccaggtcccccaggccctcccggtccgagggggcctcctggggtgagcggtgccttggcaacctatgccgctgagaactctgacagttttagaagtgaactgatttcttatctgacttcaccggatgtacgttcattcatcgtgggccctccaggccctcccggtcctcaggggcctcctggcgattctcggttgctgtccacagatgccagccattccagagggtcttctagcagttcccattcatcgtcagtccgcagggggagcagttattcttcgagtatgtccactggcggaggaggagcagggtcactcggagccggtggtgcttttggggaagccgctggagacaggggcccttacgggacagacatcggaccgggtggcggatacggcgcagccgctgaggggggtatgtacgccggaaatgggggacttctgggcgctgatttcgccggtgatctcgattacaacgagcttgctgtgcgagtgagtgaatcaatgcaaagacaggggttgctccagggaatggcctacacggtccagggtccccctggacagccagggccacaaggcccacccggaatctcaaaggtattcagcgcctattcaaatgtgactgctgacctaatggattttttccagacctacggtgctatccagggtccaccaggccagaagggtgaaatgggcaccccaggacctaaaggtgatcgcggaccagccggtccaccaggccacccaggtccacctggtccacgcggacataagggcgagaaaggagataagggggatcaggtgtatgcaggaaggcggagaaggagatcgattgctgtgaagccatag

SEQ ID NO: 9810 - DNA, 1254 bp, Artificial Sequence
  derived and/or modified sequence
atggacgtaactaaaaaaaacaagcgcgatgggaccgaggtcaccgaacggattgtgaccgaaactgtcaccacaagactgacttcacttcccccaaaaggtggcacatccaatggctatgcgaagaccgcatccctcgggggaggtagtaggttagaaaaacagagtctgactcacggctcctcggggtatatcaatagtactgggtctacgaggggtcatgcaagcacttcttcttacagacgcgcacacagtccagccagtacgttgcccaatagtccgggatcgacttttgaacggaaaacccatgtgactagacatgcttacgaaggttcctcatccgggaattcttctcctgagtatccaaggaaggagtttgcctcctcctccactcgcggtcgctcgcaaacaagagaaagtgaaatcagagtgagattacagtccgcgtccccttctacgcggtggaccgagctcgacgatgtgaagcgccttctgaaagggtccagatcggctagtgtgagcccgacccggaacagtagcaacacattgcctatcccgaaaaaaggcacagtggagaccaaaatcgtgacggcctcgagtcagtctgtctctggaacctacgatgctacaattttggacgccaacctcccatcacacgtgtggagttcgactctgcctgcaggttcctcgatgggcacataccacaataatatgacaactcagtcctcttcattacttaatacaaatgcttactctgccggtagcgtgtttggcgtccctaacaatatggcatcttgcagtcccaccctgcacccaggactgtccacctcaagtagcgtgttcggcatgcaaaacaacctggctccatcattgacgacactttcgcacggcaccacgacaacatctaccgcctacggagtgaaaaaaaacatgccacagtcacccgcagcggttaataccggagtctccaccagcgcagcctgtactacgtcggtgcagtccgacgatcttcttcacaaggactgcaagttcttgattcttgagaaagataatactcctgccaagaaggaaatggaattactcattatgaccaaggattcagggaaagtatttacagcgtcgcctgccagtatcgccgctacttccttcagtgaggataccttaaagaaagagaagcaagcggcttataatgccgattcaggcttgaaggctgaagccaacggaaagaacaagtatgactgttgccctccgtag

SEQ ID NO: 9811 - DNA, 201 bp, Artificial Sequence
  derived and/or modified sequence
tagtatggcgctattcaagggcctcccggacagaagggagagatgggcaccccgggaccaaaaggggaccgaggtcctgctggccctcccggacacccgggacctcctggaccccgtgggcacaagggggagaagggggacaagggtgatcaggtgtacgcaggacgcaggcgcagacgaagcatcgctgttaaaccttag

SEQ ID NO: 9812 - DNA, 1815 bp, Artificial Sequence
  derived and/or modified sequence
atggacgtgactaaaaaaaacaagcgcgacggcacagaagtgactgaaagaattgtgaccgagactgtaacgacccgcttgacgagcctgcccccaaagggtgggacatcaaacggttacgcgaagactgcttctttaggcggtggttcccgcctggagaagcagtcattgactcacggaagtagtggatacataaacagcactggctcaacccggggacacgcctctaccagttcttataggcgagctcattccccggcatcgactctccccaactcgcccggatccacttttgagcggaagacacatgtgacaagacacgcctatgaagcatctagctccactcgcggaaggagtcaaacccgcgaatccgagatccgagtcaggctccagtctgcgagcccctccacaagatggactgagcttgacgatgtgaaaagactgctgaagggatcaagatcggccagcgtgtcgcccacacgaaacagctccaatacgctacccatcccaaagaaggggaccgtcgagaccaaaattgtgaccgcatcatcccaatcagtgtcaggcacatatgacgctacaattctcgacgctaatctgccctcacacgtctggagctccactctgcctgccggttcgtctatgggcacatatcataacaatatgaccacacagtcctcctcgctgctcaacactaatgcctatagcgccggatcggtatttggagtgcccaataacatggctagctgttctcctaccctgcatcctgggctgtccaccagctccagcgtttttggcatgcagaacaatctggcgccttccctgaccacactgtcacatgggacgaccaccactagcacagcctatggcgtgaagaagaatatgccgcagtcaccagcggcagtaaacacgggcgtgtctacttctgccgcatgcactactagtgtacagagtgatgacctcctgcacaaagattgtaaattccttatcttggagaaagacaacactccggctaagaaagaaatggaattactgattatgaccaaagactcgggcaaggtcttcacggcaagtcctgcctcgattgcagctacgtcttttagcgaagatacccttaaaaaggagaaacaggccgcttacaatgcagactcaggtttgaaagctgaagctaacggtgatcttaagactgtgagtacaaaaggcaaaaccaccaccgctgacattcactcctacggttcaagcgggggtggagggagtgggggaggaggcggtgtcgggggagcgggaggaggaccatggggtcccgcacctgcctggtgtccctgcggctcgtgctgtagttggtggaagtggctgctaggtctgctcttgacgtggctgctgttgcttggtttgttgttcgggttgatcgcccttgcagaggaagttagaaagttaaaggccagggtagatgagttggaaagaatacggagatctattcttccctatggagatagtatggataggattgaaaaggaccgcttgcagggcatggcgcctgctgctggtgcagacttagacaagatcggccttcactcggacagccaggaggaactgtggatgtttgtccgtaagaagctgatgatggagcaagagaacggaaatctcagaggaagcccagggccaaaaggcgacatgggatccccaggacccaaaggtgatcgagggttccctggcactcctgggattcccggacccctcggccatcccggtccacagggaccaaagggacaaaagggaagcgtgggcgaccccggaatggaggggccaatgtag

SEQ ID NO: 9813 - DNA, 4494 bp, Artificial Sequence
  derived and/or modified sequence
atggatgtcactaagaagaataagcgggatggtacagaagtcactgaacgcattgttactgaaactgtcacgactcggctaacctccctcccacccaagggaggaacgtccaatgggtatgcaaagacagcatcactgggtgggggttctcgccttgagaagcagtccttgacacacgggtcctcagggtacattaactccaccggatctacccgcggacacgctagcacgtcgtcctacaggagagcgcacagccccgcatctacgttaccaaactcccctggctcaacatttgaacggaaaacacatgttactcggcacgcatatgagggatcgtcgtcaggaaactccagccctgagtatccaagaaaggagttcgcttccagtagcaccaggggccggagtcaaactcgggaatctgaaatcagggtcaggttgcaatccgcgtctccatcgactcgatggactgagctggatgatgttaaaagactcctaaaggggagcagatcagcttctgtgtcccccacccgcaacagtagcaatactctgcctatcccaaagaaaggaaccgttgagactaaaatcgtgacagccagttctcaatctgtgtcagggacatacgatgcaactattctagacgccaacttgcccagccatgtttggagcagcacactgccagccggctccagtatggggacctaccacaataacatgacgacccagtcctcttccctgctcaatactaatgcttattctgctggaagcgttttcggcgtgcctaacaatatggctagttgcagtccgaccctccacccaggtctctccaccagttcaagcgtctttgggatgcagaacaacctggccccgtccctgactactctgtcccatggcacaaccacgacttctacagcctatggcgtaaagaaaaacatgccccagtctcccgcggcagtgaatacaggcgtgtccacgtcagccgcttgcactacaagcgttcaatccgatgatttgttacacaaggattgtaagttcctgattcttgagaaggataatactcctgccaaaaaggagatggagctgcttatcatgacaaaggatagcggaaaggtgtttaccgcaagccccgcgtccatcgccgcaacctccttttcagaagatacacttaagaaggagaagcaagccgcctacaatgctgattcagggcttaaggccgaggcaaatggggatctaaaaacggtttccactaaaggaaaaactacgacagcagacatccattcttacggttcatcaggcgggggaggttcaggtggcggaggtggtgtgggcggtgcgggcgggggtccatggggacccgccccagcatggtgtccgtgcgggagctgttgctcctggtggaaatggttactgggtctactcctaacatggctgctgctgctgggcctgctgttcggcctgattgctcttgctgaggaggtaagaaaactaaaggcgcgggtggacgagctcgagagaattcgaagatcgatcctaccctacggagactctatggaccgtattgagaaggacagactgcagggcatggccccagctgccggagcagatctggataaaattggactccatagtgactcacaggaagagttatggatgtttgtccgcaagaagctgatgatggagcaagagaatggaaatctgagaggcagtccaggcccaaaaggcgatatgggctctcctggacctaaaggtgatcggggctttcccggcactccaggaattccaggtcctcttggccacccgggccctcaggggccgaaggggcaaaagggaagcgttggcgaccctggcatggaaggccctatgggtcagagaggcagggaggggccaatgggcccacgaggagaggcaggccctccaggaagcggtgagaaaggcgaacgaggagccgcaggggagcctggtccccacggaccacccggagtgcccggcagcgtggggcccaaaggatcttccggatccccaggaccacagggtccacctgggcccgtaggtctccagggactgcgcggagaagtgggattacctggagtgaaaggggataaaggacctatgggtccaccgggaccaaagggagaccaaggagagaaggggcctagaggactcaccggcgagccagggatgagggggcttccaggcgccgtgggagagcccggggccaagggcgccatggggcctgccggtccagatggccaccaagggccacggggcgaacagggcctgaccggaatgcctggaattcgtggccccccaggcccttcgggggatccgggcaagccaggtctcaccggacctcagggcccccagggcctcccgggaacacccggacgcccaggcataaaaggtgagccgggagcccctggcaaaatcgtgacctctgagggaagttcgatgttgaccgtgccaggaccccccggtcctcccggcgctatgggccctccagggccccccggtgcacccgggcctgccggaccagccgggttgccggggcatcaggaagtgctgaatttacaaggcccgccaggtcctcccggccctagggggcccccaggcccgagcatcccgggacctcctggcccacggggcccaccgggtgaggggctgcctgggccgccgggcccacccggatcgttcctttccaactctgagaccttcctctctggcccaccaggaccaccaggcccgcccggacctaagggggaccagggaccccccggaccacgcggtcaccaaggagaacagggcctgccaggattcagcacctccggaagcagtagctttgggctaaacctgcagggtcctccaggcccccctggtccacagggccccaagggcgataagggagaccccggggttccaggagcgcttggaatcccgtccggtccctcagagggagggtcatcaagtacgatgtatgtcagtggaccaccagggccccctggccctcccggaccacctggtagtatcagctccagcggccaggaaatccagcagtacattagtgaatatatgcagtctgactcgatcaggtcatacttgtctggagtgcagggcccacccggccctccagggccaccaggaccagtgaccaccatcaccggggagaccttcgattacagtgagttagccagtcatgttgtttcctatttgagaacctctggatatggcgtttcccttttcagcagcagtattagttccgaggacattctcgcggtcctgcagagggacgacgttcgccagtatctgagacaatatttgatgggacccagaggtccacccggtccacctggcgcctcaggcgacggcagtctgctatccctggattatgctgagctttcgagccgaatcctatcttatatgtcatcgtccggtatttctatcgggctgcccggccccccaggaccccctggcctaccaggaaccagctacgaagaactcctgagcctgcttcgaggctccgagtttcgaggcatcgttggcccccctggccctcccggccccccaggcatacccggaaatgtttggagttccatctccgtggaggatctctcgtcctatttacatacagctgggttgtcattcataccaggcccaccgggccctccagggccacccggacctagaggaccccccggggtctccggtgccctggcaacctacgctgcggagaattccgactcattccgctccgaattaatttcctatttaacatcgcctgacgtccgctctttcatcgtaggcccacccggccctcccggcccacaggggccgccaggcgactccaggctgctgtctaccgacgcgagccattcccgaggcagtagcagttcatctcatagttcgagcgtcaggagaggctcttcttatagctcctcaatgtccacaggagggggcggtgcaggttcacttggagccggaggggcattcggtgaagccgctggagacaggggtccctacgggactgatattgggcccggcggagggtacggcgccgctgccgaagggggaatgtacgctggcaacggtggcctactgggcgcggacttcgccggggacttggattataacgagcttgcagttcgggtctccgagtcgatgcagagacaagggttgctccaaggcatggcatataccgttcaaggtcctccgggccagcctggaccccagggcccacccggaatcagtaaggtgttttccgcatattccaacgtcacggcagatctgatggacttttttcaaacctatggcgcgatacaggggccacctggacagaaaggcgaaatggggactcccgggccaaagggcgacagaggcccggcaggaccgcccggacaccctggtcctcccggacctcgcggccataaaggtgagaagggggacaagggcgatcaagtctatgctgggcgaaggagacgtagaagcatagcggtgaaaccatag

SEQ ID NO: 9814 - DNA, 1254 bp, Artificial Sequence
  derived and/or modified sequence
atggatgtgactaaaaagaataagcgagacgggaccgaggtaactgagagaatcgtaaccgagaccgtgacaactaggttaacttcgctccctccaaagggaggaacttctaatggatacgcaaaaaccgctagcctggggggtggctcccggttagagaaacagtccctgacgcacggttctagtggctacatcaatagcaccggttccacccggggacatgcctcaacatcctcctaccgccgtgctcacagccctgctagtaccctgcctaactcccctggatctaccttcgaaaggaaaactcatgtgactcggcatgcttatgaaggatcctcatctgggaactctagcccagagtacccgcgcaaagaatttgcatcaagtagtacgcgaggtaggagccagacccgggagtccgaaattcgcgtgaggctccaaagcgccagtccttccacccggtggactgaactggatgatgtgaaacgcttacttaaaggttcccgaagcgcctctgtgtccccaacaagaaacagctcaaacacactacctatcccaaagaagggtaccgtggagacgaagattgtcacggcttcttctcaatctgttagcggcacctacgacgcgaccatattagacgccaacctgccaagccacgtgtggtcctcaactctccccgctggctcttcaatgggtacctatcataataatatgacgacccagtcctccagccttttaaacacaaacgcatactctgccggcagcgttttcggagtcccgaataatatggcttcatgttccccaacactccacccaggcctaagcactagcagctctgtcttcggcatgcagaataacctggcgcccagcctcaccactctcagccacgggactaccactacatctactgcctacggagtcaagaaaaatatgccccagagccctgctgctgttaacactggcgtgtcaacctccgctgcatgcacaactagcgttcagtccgatgatctgctgcacaaagattgtaaattcctcatcctggagaaagataacacacccgccaagaaagagatggagcttctgatcatgacaaaggacagcgggaaagtcttcaccgcctccccagctagcattgcagccacgtctttctccgaggatacattaaagaaggaaaagcaggcagcctacaatgcagattcagggcttaaagccgaagcaaacggcaagaacaagtatgattgctgccccccttag

SEQ ID NO: 9815 - DNA, 201 bp, Artificial Sequence
  derived and/or modified sequence
taatacggtgctattcaaggcccgcccggccaaaaaggggagatgggaactccaggacccaagggggataggggcccggccggtcctccagggcaccctgggccccccggcccacgaggacataaaggagagaagggagataaaggagatcaggtgtatgccggtagaagacgcagacgatctatcgcagtgaaaccttag

SEQ ID NO: 9816 - DNA, 1815 bp, Artificial Sequence
  derived and/or modified sequence
atggacgtgacaaagaaaaacaaaagggacggcacagaggttactgagcgcatcgtcaccgagaccgtgacaactagacttactagtctgcctcccaagggtggcacgagcaacgggtacgctaaaacggcgtcgttaggaggaggctcccgcctcgagaaacagtcccttacccacgggagcagcggctatataaacagcacaggcagtactcgcgggcacgccagtacttccagttaccgacgcgcacacagcccagccagcaccttaccaaactcacctggctccacgttcgaacgcaaaacacacgtcacccggcacgcatatgaggctagctcatctacccgagggagatcacaaactagggaatctgagattagagtgaggcttcagtcagcctcaccatctacgcggtggactgaattagatgatgttaaaagactgctgaagggatctagaagcgcctcagtgtctcccaccaggaactctagtaatacccttccaattcccaaaaaggggaccgttgagacaaaaatagtgactgcttccagccagtctgtctcaggcacttacgatgctactattttagatgccaatttaccgtctcacgtgtggtccagcacgttgcctgccggctcctccatgggtacctaccacaacaatatgacaactcaatcttccagtctattaaatacgaacgcttactctgcgggcagtgtgtttggagtcccaaataatatggcgagctgttcacctaccctgcatccgggtctaagtacatcttcgtctgtcttcggtatgcagaacaaccttgctcccagtctgactactcttagccacggaaccacaaccacgtcgactgcttatggcgtcaaaaagaacatgccccagagccctgctgcagtgaatacaggggtgtccacatccgctgcgtgtaccacatccgtgcagagcgacgaccttctgcacaaagattgcaaattcctgatcttagaaaaggataatacacccgcaaagaaagaaatggagctcctcattatgaccaaggattctggaaaggtgttcaccgccagcccagcctccatcgccgctacgagcttttccgaagatacactgaaaaaggagaagcaggcagcatacaatgcagattctggattaaaagctgaggctaatggagatttaaagacggtaagcacaaagggcaagacaacaaccgctgatattcattcctacggctcgtcaggagggggcggatcaggaggggggggcggagttggtggagctggcggtggcccctggggccccgccccagcttggtgtccttgtggaagctgctgctcctggtggaaatggttactgggtctattacttacatggctgttattactgggacttcttttcgggctcattgccctggctgaggaagtaaggaaattaaaggcacgcgtggacgagctggagcgtataaggcggtctatactcccatacggggactcaatggataggatcgaaaaggatcggctacaggggatggccccggctgctggtgccgatctcgataagatcgggctgcacagtgattcacaagaggaattgtggatgttcgtgaggaaaaaattaatgatggagcaggagaacggcaatttgcggggatcacccggaccgaagggagacatggggagccctggccccaagggagatcgcggcttccccggcacacccggaattcctggccccctcgggcaccctgggccccaaggacccaaagggcagaaggggtcagtcggcgaccctggcatggaggggccaatgtag

SEQ ID NO: 9817 - DNA, 4494 bp, Artificial Sequence
  derived and/or modified sequence
atggatgtcaccaaaaagaacaagagagatggcaccgaggtaaccgagaggatcgtcacagagaccgtaaccacacgcctgaccagtttaccaccaaagggaggaacaagtaacggctacgctaagaccgcaagcctgggaggggggtcccgcttagaaaaacaatctcttactcacggctccagcgggtatatcaatagcaccgggtcaacaagagggcacgcctctacatcctcttaccgcagagctcactcccctgcttccaccctgcctaattctcctggcagtactttcgagaggaagacacatgttacaagacacgcatacgaaggcagcagctccggcaattccagccccgagtacccccgcaaagagttcgctagtagcagcacacggggccgttctcagactcgggaaagtgaaatacgcgtaaggcttcaatccgcctctccaagcaccagatggaccgaacttgatgacgttaaaaggctgctgaaaggctcgagaagcgcatccgtctccccaacacgaaatagctctaatactctgcctatcccaaaaaaaggcactgtagagacaaagattgtaactgcctcaagccaatccgtctcaggaacatacgacgcaacaattctggacgccaatttgccatcccacgtctggtcctccacgcttccagccggttccagtatgggaacttaccacaataatatgacaacccagtcttcgagcctcctcaacactaacgcctacagcgccggatctgtatttggggtcccaaataatatggcttcatgttctccaacccttcacccaggtttaagcactagcagcagcgtgtttggtatgcagaacaatctggcaccctccttaaccacgctctcccacggtactaccacgacctctactgcctatggagttaagaagaatatgccccagtccccagccgccgtcaacacaggggtgagcacttctgctgcgtgcaccacaagcgtccaatccgacgatttattgcataaagactgcaaattccttattctagagaaggacaatacccctgcaaagaaagaaatggaattgctaattatgaccaaagactcgggcaaagtattcactgcttcacctgcttcaatcgccgctacctcattctccgaagacacactgaagaaggagaaacaggctgcctacaatgccgattcaggattgaaggcggaggccaatggcgacttaaagaccgtgtccactaaaggaaaaacaaccactgctgatatacactcatatggatcatccggcggaggaggttccggggggggtggcggagttggtggcgctggcggcggtccctggggtcccgcaccagcatggtgcccatgcgggtcatgctgttcgtggtggaagtggcttttggggctcctcctaacttggttactcctcttgggattgctgtttggacttatcgccctggccgaggaggttagaaaactaaaagctcgcgtggacgagctcgaaaggatccgccgttctattttgccgtacggtgactctatggacaggatcgaaaaggacagacttcagggaatggctcctgccgctggcgctgacctagacaaaattggactccattctgatagccaggaagaactttggatgttcgtaaggaaaaagctaatgatggaacaggaaaacggcaacctgcgcggctcccccggccccaaaggcgacatggggtctcccggacctaagggtgaccgcggctttcccggaaccccaggaattcctggaccattagggcaccccggaccacagggtcctaaaggccagaaaggtagcgttggggacccaggcatggaagggcccatgggacaacgggggagggaagggccaatgggtcccagaggcgaagccggtccaccaggcagcggggaaaaaggcgagcggggcgctgcaggcgaaccaggaccacatggaccccctggagtgcctggatcagtcggacccaagggctcgagcggctctccaggaccccaaggccctcctggacccgtcggactccagggcctgaggggcgaggtcggactgcctggtgtgaaaggtgataagggccccatgggtccacccggcccaaaaggggatcagggggaaaagggtcctcgcgggttaacaggtgaaccaggtatgagggggttgcctggtgccgtcggagaacccggtgcgaagggtgcaatgggcccagctggacctgatggccaccagggcccacgtggcgaacagggcttgacaggaatgcctgggataagaggaccacctggaccatctggggatcccggcaagccaggcctcacgggccctcagggtccccagggcttgcccggcacccccgggagaccaggaatcaagggagagcccggcgcaccaggaaaaatcgtgacatccgagggatctagtatgctgaccgtgccaggcccgcctggaccccccggcgcgatgggtcctcccggccccccaggcgctcccggcccggccggaccagccggactacctggacaccaagaggtgctgaacctgcagggtccacccggccctccgggacccagaggccctccaggaccatctatcccaggacccccaggtccaaggggccccccgggagaaggattacccggaccgcctggtccaccaggctcatttctgagcaattccgagacatttctctccggcccacccggtccacctggtccaccaggccccaaaggcgaccaaggccctccgggaccacgcgggcatcaaggcgaacaaggcctcccagggtttagtacgtccggctcctcatcctttggtctaaacctgcaaggtcctcccggtcctccaggccctcaaggacctaagggcgataagggggatcctggggtcccaggagcactggggattcccagcggccctagtgagggcgggtcttccagtaccatgtatgtgtcaggacccccaggccccccaggcccccctggtccccccggttccattagctcttctggccaggagatccagcagtatatctccgagtatatgcaaagtgactccattaggtcctacttatctggggtgcaaggcccccccggcccgccaggacctccagggccagtcaccacaatcaccggcgaaaccttcgactattcagaacttgcctcccatgttgtgtcctacttgagaacttctggctatggagtatcactgttctcttcctctatctcctctgaagatatccttgctgttctgcaaagagacgacgtgcgccagtaccttcgacaatatctgatgggccccagaggtcctcctggtccacccggagcatccggcgatgggtcattactctccctcgattacgcggaacttagcagtagaatactgtcatacatgagtagttctggaatcagtatcgggttacccggacctcccggcccccccggattgcccggaacatcttacgaggaactcctatctttgctgcggggatcagaatttaggggcatcgtggggccccccggccccccaggccccccaggtatcccaggaaatgtgtggtcttctatctcggtcgaagacctgtcttcctatctgcacactgccggactctcctttatcccaggaccccctggacctcccggtccacccggccccaggggccccccaggtgtctccggagctttagctacctatgcagctgagaatagcgactcatttagatcagagttgatatcatatctgacttcgccggacgttagaagtttcatcgttgggcctcccggccctccaggtccccagggccccccaggtgactcgagactcttatccacagatgcatcacactcgagaggatcatcctcatcctcacactcaagttccgtgaggagaggctcgagctattctagctccatgagtaccgggggaggaggcgcaggcagtcttggcgcgggaggggcctttggggaagcggcaggcgatagagggccatatggtacggatattggtcctggcggggggtacggagcagcagcagaaggtgggatgtatgcaggcaacgggggtctgctcggcgccgacttcgcaggcgacctggattacaacgaacttgccgtgcgggtgtcagaatccatgcaaagacaggggttactacaggggatggcttataccgtccaaggcccaccaggccaacctggcccacagggacccccaggcatcagcaaagtgtttagcgcctatagcaacgtcaccgccgacctaatggacttttttcaaacgtacggagccattcagggcccacccggtcagaagggtgagatgggaaccccgggcccaaaaggtgatagaggaccagccgggccacctggacaccccggacccccaggtcctcgcgggcataagggcgagaagggcgataagggagaccaggtttatgctggacgcaggcgcaggagatcaatcgcagtcaagccctag

SEQ ID NO: 9818 - DNA, 1254 bp, Artificial Sequence
  derived and/or modified sequence
atggacgtcactaaaaaaaacaagagagacgggactgaagtgacagaacgaattgtgactgagacagtgacaacccgcctgactagtctgcctcctaaagggggaaccagcaacggctacgccaagacagctagtctcggaggaggctctcggttagagaagcaatccctcactcatggaagttccggctacatcaattctacaggatccacgcgcggacacgccagtacatctagctacagaagagcacactcccccgccagtacactaccaaactcacctggaagcactttcgagcgtaaaacacacgtaaccagacacgcctacgaaggctcctccagcggcaattcgtctccagagtatcccagaaaggagttcgcaagttcttcaacgcgtggtcgctcccagacaagagagtccgagattcgcgtccgtcttcaaagcgccagcccctcaacccggtggacagaactagacgatgtgaaaagactgttgaaaggctcacggagcgcctcagtaagtcccacaagaaattcatcgaataccctgcctatcccaaagaagggaacggtcgagaccaagatcgtcacagccagttcccagagcgtttccgggacatacgacgcaacaattttggatgctaacctgccaagccatgtctggagttcaactctccctgccggatcaagcatggggacttatcacaacaatatgaccacacaaagcagtagcctgttaaacactaatgcctatagtgctggctctgtcttcggcgtgcccaacaatatggcctcctgttcccctacacttcacccaggtctaagtacctcatcaagcgtcttcggcatgcaaaataacctagccccttcccttactaccttgagtcacggcaccacaacaaccagtactgcttacggcgtcaaaaagaatatgccccagagtcccgccgccgtcaatactggggtatctacatccgcagcttgcaccacatctgtccaatccgacgacctgctgcacaaggactgtaaatttttaatcctcgaaaaggataacacaccagctaagaaggaaatggagctcctgattatgaccaaggatagcggcaaagtgtttacagctagtcccgcttcaatcgcagccacatccttttccgaagacaccctgaagaaggagaagcaggccgcttacaatgcagatagtggattgaaagcagaagcgaatggaaaaaacaaatacgactgttgcccaccctag

SEQ ID NO: 9819 - DNA, 1815 bp, Artificial Sequence
  derived and/or modified sequence
atggatgtgactaagaagaacaagagagatggcacagaggtcactgagcgtatagtgactgagacagtgacaacaagactaacttcgttgcctccaaagggtggaacatcaaacggatatgcaaagaccgcatccttaggcggaggaagtaggctggagaaacaatccctgacgcatggcagcagtggttatataaacagtaccggatctaccagaggacatgcctctacctcttcctaccgacgcgcccactcccccgcctcaacacttcccaacagccccggcagtacttttgaaagaaagacccatgtcactcgacacgcttacgaggcttcaagcagtaccagaggccggtctcagacccgtgaatccgaaatcagagttcgactccagtctgcatccccctctacacgatggacagaattggacgacgttaagcgattgctgaaaggatcacgtagtgcctctgtttcgcctaccagaaactcttctaacaccctccccataccaaaaaaaggaactgtggaaactaaaatcgtgacggcatcttcacagagtgtatctgggacctatgacgccacaattctcgacgctaacctaccgtctcacgtgtggagtagcaccctgccggccggaagctctatgggcacatatcataacaacatgacaacacaatcctcctccctgctgaacacaaatgcctactctgctgggtcagtctttggcgttccaaataacatggcctcatgttctcccactctccacccaggcttgtcaacatcctcgtccgtatttggtatgcaaaacaacctggccccatcccttaccactctgtcacacggcactacaactacatccacagcctatggcgtcaagaagaacatgccccagtcacctgccgccgtgaacaccggcgtcagcacatccgcggcatgcacaacctccgttcaatctgacgatctgcttcacaaggactgcaagttcctaatactagaaaaagataacacgccagcaaagaaggaaatggaactgctcatcatgaccaaggacagtggaaaagttttcaccgcatcccccgcctcgatcgcagcgacctccttcagtgaagatactcttaagaaagaaaagcaggcggcatataacgctgactctggcctgaaggccgaagctaacggcgacctcaagacggtgagtaccaagggcaagacaacaaccgctgatattcattcctacggctcgtcaggagggggcggatcaggaggggggggcggagttggtggagctggcggtggcccctggggccccgccccagcttggtgtccttgtggaagctgctgctcctggtggaaatggttactgggtctattacttacatggctgttattactgggacttcttttcgggctcattgccctggctgaggaagtaaggaaattaaaggcacgcgtggacgagctggagcgtataaggcggtctatactcccatacggggactcaatggaccggatagagaaagatcgactacagggaatggcccccgcagccggtgcagatttggacaagataggactacattccgattctcaggaggagctctggatgtttgtgagaaagaaacttatgatggagcaagagaatgggaatcttcgaggttccccaggccccaagggtgacatggggtccccaggcccaaaaggcgacagagggttccccggtacacccggtattcccggccccttaggccacccgggaccacaaggaccaaagggacagaagggctccgtaggcgacccaggtatggagggcccgatgtag

SEQ ID NO: 9820 - DNA, 180 bp, Artificial Sequence
  derived and/or modified sequence
atgagccacctgcctgcagtttctcccgtcttcttccagctccccgcaccgcacccgccaaccgtgctacggccacaacttggcctccacccaaacccagagtgtgacagagagaagatgtcggtgcgcgaccacgatcctgaggtactgactagaaactccggcagccttcaggcctag

SEQ ID NO: 9821 - RNA, 4494 nt, Artificial Sequence
  derived and/or modified sequence
auggaugucacuaagaagaauaagcgggaugguacagaagucacugaacgcauuguuacugaaacugucacgacucggcuaaccucccucccacccaagggaggaacguccaauggguaugcaaagacagcaucacuggguggggguucucgccuugagaagcaguccuugacacacggguccucaggguacauuaacuccaccggaucuacccgcggacacgcuagcacgucguccuacaggagagcgcacagccccgcaucuacguuaccaaacuccccuggcucaacauuugaacggaaaacacauguuacucggcacgcauaugagggaucgucgucaggaaacuccagcccugaguauccaagaaaggaguucgcuuccaguagcaccaggggccggagucaaacucgggaaucugaaaucagggucagguugcaauccgcgucuccaucgacucgauggacugagcuggaugauguuaaaagacuccuaaaggggagcagaucagcuucugugucccccacccgcaacaguagcaauacucugccuaucccaaagaaaggaaccguugagacuaaaaucgugacagccaguucucaaucugugucagggacauacgaugcaacuauucuagacgccaacuugcccagccauguuuggagcagcacacugccagccggcuccaguauggggaccuaccacaauaacaugacgacccaguccucuucccugcucaauacuaaugcuuauucugcuggaagcguuuucggcgugccuaacaauauggcuaguugcaguccgacccuccacccaggucucuccaccaguucaagcgucuuugggaugcagaacaaccuggccccgucccugacuacucugucccauggcacaaccacgacuucuacagccuauggcguaaagaaaaacaugccccagucucccgcggcagugaauacaggcguguccacgucagccgcuugcacuacaagcguucaauccgaugauuuguuacacaaggauuguaaguuccugauucuugagaaggauaauacuccugccaaaaaggagauggagcugcuuaucaugacaaaggauagcggaaagguguuuaccgcaagccccgcguccaucgccgcaaccuccuuuucagaagauacacuuaagaaggagaagcaagccgccuacaaugcugauucagggcuuaaggccgaggcaaauggggaucuaaaaacgguuuccacuaaaggaaaaacuacgacagcagacauccauucuuacgguucaucaggcgggggagguucagguggcggagguggugugggcggugcgggcggggguccauggggacccgccccagcaugguguccgugcgggagcuguugcuccugguggaaaugguuacugggucuacuccuaacauggcugcugcugcugggccugcuguucggccugauugcucuugcugaggagguaagaaaacuaaaggcgcggguggacgagcucgagagaauucgaagaucgauccuacccuacggagacucuauggaccguauugagaaggacagacugcagggcauggccccagcugccggagcagaucuggauaaaauuggacuccauagugacucacaggaagaguuauggauguuuguccgcaagaagcugaugauggagcaagagaauggaaaucugagaggcaguccaggcccaaaaggcgauaugggcucuccuggaccuaaaggugaucggggcuuucccggcacuccaggaauuccagguccucuuggccacccgggcccucaggggccgaaggggcaaaagggaagcguuggcgacccuggcauggaaggcccuaugggucagagaggcagggaggggccaaugggcccacgaggagaggcaggcccuccaggaagcggugagaaaggcgaacgaggagccgcaggggagccugguccccacggaccacccggagugcccggcagcguggggcccaaaggaucuuccggauccccaggaccacaggguccaccugggcccguaggucuccagggacugcgcggagaagugggauuaccuggagugaaaggggauaaaggaccuauggguccaccgggaccaaagggagaccaaggagagaaggggccuagaggacucaccggcgagccagggaugagggggcuuccaggcgccgugggagagcccggggccaagggcgccauggggccugccgguccagauggccaccaagggccacggggcgaacagggccugaccggaaugccuggaauucguggccccccaggcccuucgggggauccgggcaagccaggucucaccggaccucagggcccccagggccucccgggaacacccggacgcccaggcauaaaaggugagccgggagccccuggcaaaaucgugaccucugagggaaguucgauguugaccgugccaggaccccccgguccucccggcgcuaugggcccuccagggccccccggugcacccgggccugccggaccagccggguugccggggcaucaggaagugcugaauuuacaaggcccgccagguccucccggcccuagggggcccccaggcccgagcaucccgggaccuccuggcccacggggcccaccgggugaggggcugccugggccgccgggcccacccggaucguuccuuuccaacucugagaccuuccucucuggcccaccaggaccaccaggcccgcccggaccuaagggggaccagggaccccccggaccacgcggucaccaaggagaacagggccugccaggauucagcaccuccggaagcaguagcuuugggcuaaaccugcaggguccuccaggccccccugguccacagggccccaagggcgauaagggagaccccgggguuccaggagcgcuuggaaucccguccggucccucagagggagggucaucaaguacgauguaugucaguggaccaccagggcccccuggcccucccggaccaccugguaguaucagcuccagcggccaggaaauccagcaguacauuagugaauauaugcagucugacucgaucaggucauacuugucuggagugcagggcccacccggcccuccagggccaccaggaccagugaccaccaucaccggggagaccuucgauuacagugaguuagccagucauguuguuuccuauuugagaaccucuggauauggcguuucccuuuucagcagcaguauuaguuccgaggacauucucgcgguccugcagagggacgacguucgccaguaucugagacaauauuugaugggacccagagguccacccgguccaccuggcgccucaggcgacggcagucugcuaucccuggauuaugcugagcuuucgagccgaauccuaucuuauaugucaucguccgguauuucuaucgggcugcccggccccccaggacccccuggccuaccaggaaccagcuacgaagaacuccugagccugcuucgaggcuccgaguuucgaggcaucguuggccccccuggcccucccggccccccaggcauacccggaaauguuuggaguuccaucuccguggaggaucucucguccuauuuacauacagcuggguugucauucauaccaggcccaccgggcccuccagggccacccggaccuagaggaccccccggggucuccggugcccuggcaaccuacgcugcggagaauuccgacucauuccgcuccgaauuaauuuccuauuuaacaucgccugacguccgcucuuucaucguaggcccacccggcccucccggcccacaggggccgccaggcgacuccaggcugcugucuaccgacgcgagccauucccgaggcaguagcaguucaucucauaguucgagcgucaggagaggcucuucuuauagcuccucaauguccacaggagggggcggugcagguucacuuggagccggaggggcauucggugaagccgcuggagacaggggucccuacgggacugauauugggcccggcggaggguacggcgccgcugccgaagggggaauguacgcuggcaacgguggccuacugggcgcggacuucgccggggacuuggauuauaacgagcuugcaguucgggucuccgagucgaugcagagacaaggguugcuccaaggcauggcauauaccguucaagguccuccgggccagccuggaccccagggcccacccggaaucaguaagguguuuuccgcauauuccaacgucacggcagaucugauggacuuuuuucaaaccuauggcgcgauacaggggccaccuggacagaaaggcgaaauggggacucccgggccaaagggcgacagaggcccggcaggaccgcccggacacccugguccucccggaccucgcggccauaaaggugagaagggggacaagggcgaucaagucuaugcugggcgaaggagacguagaagcauagcggugaaaccauag

SEQ ID NO: 9822 - RNA, 1254 nt, Artificial Sequence
  derived and/or modified sequence
auggaugugacuaaaaagaauaagcgagacgggaccgagguaacugagagaaucguaaccgagaccgugacaacuagguuaacuucgcucccuccaaagggaggaacuucuaauggauacgcaaaaaccgcuagccugggggguggcucccgguuagagaaacagucccugacgcacgguucuaguggcuacaucaauagcaccgguuccacccggggacaugccucaacauccuccuaccgccgugcucacagcccugcuaguacccugccuaacuccccuggaucuaccuucgaaaggaaaacucaugugacucggcaugcuuaugaaggauccucaucugggaacucuagcccagaguacccgcgcaaagaauuugcaucaaguaguacgcgagguaggagccagacccgggaguccgaaauucgcgugaggcuccaaagcgccaguccuuccacccgguggacugaacuggaugaugugaaacgcuuacuuaaagguucccgaagcgccucuguguccccaacaagaaacagcucaaacacacuaccuaucccaaagaaggguaccguggagacgaagauugucacggcuucuucucaaucuguuagcggcaccuacgacgcgaccauauuagacgccaaccugccaagccacgugugguccucaacucuccccgcuggcucuucaauggguaccuaucauaauaauaugacgacccaguccuccagccuuuuaaacacaaacgcauacucugccggcagcguuuucggagucccgaauaauauggcuucauguuccccaacacuccacccaggccuaagcacuagcagcucugucuucggcaugcagaauaaccuggcgcccagccucaccacucucagccacgggacuaccacuacaucuacugccuacggagucaagaaaaauaugccccagagcccugcugcuguuaacacuggcgugucaaccuccgcugcaugcacaacuagcguucaguccgaugaucugcugcacaaagauuguaaauuccucauccuggagaaagauaacacacccgccaagaaagagauggagcuucugaucaugacaaaggacagcgggaaagucuucaccgccuccccagcuagcauugcagccacgucuuucuccgaggauacauuaaagaaggaaaagcaggcagccuacaaugcagauucagggcuuaaagccgaagcaaacggcaagaacaaguaugauugcugccccccuuag

SEQ ID NO: 9823 - RNA, 201 nt, Artificial Sequence
  derived and/or modified sequence
uaauacggugcuauucaaggcccgcccggccaaaaaggggagaugggaacuccaggacccaagggggauaggggcccggccgguccuccagggcacccugggccccccggcccacgaggacauaaaggagagaagggagauaaaggagaucagguguaugccgguagaagacgcagacgaucuaucgcagugaaaccuuag

SEQ ID NO: 9824 - RNA, 1815 nt, Artificial Sequence
  derived and/or modified sequence
auggacgugacaaagaaaaacaaaagggacggcacagagguuacugagcgcaucgucaccgagaccgugacaacuagacuuacuagucugccucccaaggguggcacgagcaacggguacgcuaaaacggcgucguuaggaggaggcucccgccucgagaaacagucccuuacccacgggagcagcggcuauauaaacagcacaggcaguacucgcgggcacgccaguacuuccaguuaccgacgcgcacacagcccagccagcaccuuaccaaacucaccuggcuccacguucgaacgcaaaacacacgucacccggcacgcauaugaggcuagcucaucuacccgagggagaucacaaacuagggaaucugagauuagagugaggcuucagucagccucaccaucuacgcgguggacugaauuagaugauguuaaaagacugcugaagggaucuagaagcgccucagugucucccaccaggaacucuaguaauacccuuccaauucccaaaaaggggaccguugagacaaaaauagugacugcuuccagccagucugucucaggcacuuacgaugcuacuauuuuagaugccaauuuaccgucucacgugugguccagcacguugccugccggcuccuccauggguaccuaccacaacaauaugacaacucaaucuuccagucuauuaaauacgaacgcuuacucugcgggcaguguguuuggagucccaaauaauauggcgagcuguucaccuacccugcauccgggucuaaguacaucuucgucugucuucgguaugcagaacaaccuugcucccagucugacuacucuuagccacggaaccacaaccacgucgacugcuuauggcgucaaaaagaacaugccccagagcccugcugcagugaauacagggguguccacauccgcugcguguaccacauccgugcagagcgacgaccuucugcacaaagauugcaaauuccugaucuuagaaaaggauaauacacccgcaaagaaagaaauggagcuccucauuaugaccaaggauucuggaaagguguucaccgccagcccagccuccaucgccgcuacgagcuuuuccgaagauacacugaaaaaggagaagcaggcagcauacaaugcagauucuggauuaaaagcugaggcuaauggagauuuaaagacgguaagcacaaagggcaagacaacaaccgcugauauucauuccuacggcucgucaggagggggcggaucaggaggggggggcggaguugguggagcuggcgguggccccuggggccccgccccagcuugguguccuuguggaagcugcugcuccugguggaaaugguuacugggucuauuacuuacauggcuguuauuacugggacuucuuuucgggcucauugcccuggcugaggaaguaaggaaauuaaaggcacgcguggacgagcuggagcguauaaggcggucuauacucccauacggggacucaauggauaggaucgaaaaggaucggcuacaggggauggccccggcugcuggugccgaucucgauaagaucgggcugcacagugauucacaagaggaauuguggauguucgugaggaaaaaauuaaugauggagcaggagaacggcaauuugcggggaucacccggaccgaagggagacauggggagcccuggccccaagggagaucgcggcuuccccggcacacccggaauuccuggcccccucgggcacccugggccccaaggacccaaagggcagaaggggucagucggcgacccuggcauggaggggccaauguag

SEQ ID NO: 9825 - RNA, 4494 nt, Artificial Sequence
  derived and/or modified sequence
auggaugucaccaaaaagaacaagagagauggcaccgagguaaccgagaggaucgucacagagaccguaaccacacgccugaccaguuuaccaccaaagggaggaacaaguaacggcuacgcuaagaccgcaagccugggaggggggucccgcuuagaaaaacaaucucuuacucacggcuccagcggguauaucaauagcaccgggucaacaagagggcacgccucuacauccucuuaccgcagagcucacuccccugcuuccacccugccuaauucuccuggcaguacuuucgagaggaagacacauguuacaagacacgcauacgaaggcagcagcuccggcaauuccagccccgaguacccccgcaaagaguucgcuaguagcagcacacggggccguucucagacucgggaaagugaaauacgcguaaggcuucaauccgccucuccaagcaccagauggaccgaacuugaugacguuaaaaggcugcugaaaggcucgagaagcgcauccgucuccccaacacgaaauagcucuaauacucugccuaucccaaaaaaaggcacuguagagacaaagauuguaacugccucaagccaauccgucucaggaacauacgacgcaacaauucuggacgccaauuugccaucccacgucugguccuccacgcuuccagccgguuccaguaugggaacuuaccacaauaauaugacaacccagucuucgagccuccucaacacuaacgccuacagcgccggaucuguauuuggggucccaaauaauauggcuucauguucuccaacccuucacccagguuuaagcacuagcagcagcguguuugguaugcagaacaaucuggcacccuccuuaaccacgcucucccacgguacuaccacgaccucuacugccuauggaguuaagaagaauaugccccaguccccagccgccgucaacacaggggugagcacuucugcugcgugcaccacaagcguccaauccgacgauuuauugcauaaagacugcaaauuccuuauucuagagaaggacaauaccccugcaaagaaagaaauggaauugcuaauuaugaccaaagacucgggcaaaguauucacugcuucaccugcuucaaucgccgcuaccucauucuccgaagacacacugaagaaggagaaacaggcugccuacaaugccgauucaggauugaaggcggaggccaauggcgacuuaaagaccguguccacuaaaggaaaaacaaccacugcugauauacacucauauggaucauccggcggaggagguuccgggggggguggcggaguugguggcgcuggcggcggucccuggggucccgcaccagcauggugcccaugcgggucaugcuguucgugguggaaguggcuuuuggggcuccuccuaacuugguuacuccucuugggauugcuguuuggacuuaucgcccuggccgaggagguuagaaaacuaaaagcucgcguggacgagcucgaaaggauccgccguucuauuuugccguacggugacucuauggacaggaucgaaaaggacagacuucagggaauggcuccugccgcuggcgcugaccuagacaaaauuggacuccauucugauagccaggaagaacuuuggauguucguaaggaaaaagcuaaugauggaacaggaaaacggcaaccugcgcggcucccccggccccaaaggcgacauggggucucccggaccuaagggugaccgcggcuuucccggaaccccaggaauuccuggaccauuagggcaccccggaccacaggguccuaaaggccagaaagguagcguuggggacccaggcauggaagggcccaugggacaacgggggagggaagggccaaugggucccagaggcgaagccgguccaccaggcagcggggaaaaaggcgagcggggcgcugcaggcgaaccaggaccacauggacccccuggagugccuggaucagucggacccaagggcucgagcggcucuccaggaccccaaggcccuccuggacccgucggacuccagggccugaggggcgaggucggacugccuggugugaaaggugauaagggccccauggguccacccggcccaaaaggggaucagggggaaaaggguccucgcggguuaacaggugaaccagguaugaggggguugccuggugccgucggagaacccggugcgaagggugcaaugggcccagcuggaccugauggccaccagggcccacguggcgaacagggcuugacaggaaugccugggauaagaggaccaccuggaccaucuggggaucccggcaagccaggccucacgggcccucaggguccccagggcuugcccggcacccccgggagaccaggaaucaagggagagcccggcgcaccaggaaaaaucgugacauccgagggaucuaguaugcugaccgugccaggcccgccuggaccccccggcgcgauggguccucccggccccccaggcgcucccggcccggccggaccagccggacuaccuggacaccaagaggugcugaaccugcaggguccacccggcccuccgggacccagaggcccuccaggaccaucuaucccaggacccccagguccaaggggccccccgggagaaggauuacccggaccgccugguccaccaggcucauuucugagcaauuccgagacauuucucuccggcccacccgguccaccugguccaccaggccccaaaggcgaccaaggcccuccgggaccacgcgggcaucaaggcgaacaaggccucccaggguuuaguacguccggcuccucauccuuuggucuaaaccugcaagguccucccgguccuccaggcccucaaggaccuaagggcgauaagggggauccuggggucccaggagcacuggggauucccagcggcccuagugagggcgggucuuccaguaccauguaugugucaggacccccaggccccccaggccccccugguccccccgguuccauuagcucuucuggccaggagauccagcaguauaucuccgaguauaugcaaagugacuccauuagguccuacuuaucuggggugcaaggcccccccggcccgccaggaccuccagggccagucaccacaaucaccggcgaaaccuucgacuauucagaacuugccucccauguuguguccuacuugagaacuucuggcuauggaguaucacuguucucuuccucuaucuccucugaagauauccuugcuguucugcaaagagacgacgugcgccaguaccuucgacaauaucugaugggccccagagguccuccugguccacccggagcauccggcgaugggucauuacucucccucgauuacgcggaacuuagcaguagaauacugucauacaugaguaguucuggaaucaguaucggguuacccggaccucccggcccccccggauugcccggaacaucuuacgaggaacuccuaucuuugcugcggggaucagaauuuaggggcaucguggggccccccggccccccaggccccccagguaucccaggaaauguguggucuucuaucucggucgaagaccugucuuccuaucugcacacugccggacucuccuuuaucccaggacccccuggaccucccgguccacccggccccaggggccccccaggugucuccggagcuuuagcuaccuaugcagcugagaauagcgacucauuuagaucagaguugauaucauaucugacuucgccggacguuagaaguuucaucguugggccucccggcccuccagguccccagggccccccaggugacucgagacucuuauccacagaugcaucacacucgagaggaucauccucauccucacacucaaguuccgugaggagaggcucgagcuauucuagcuccaugaguaccgggggaggaggcgcaggcagucuuggcgcgggaggggccuuuggggaagcggcaggcgauagagggccauaugguacggauauugguccuggcgggggguacggagcagcagcagaaggugggauguaugcaggcaacgggggucugcucggcgccgacuucgcaggcgaccuggauuacaacgaacuugccgugcgggugucagaauccaugcaaagacagggguuacuacaggggauggcuuauaccguccaaggcccaccaggccaaccuggcccacagggacccccaggcaucagcaaaguguuuagcgccuauagcaacgucaccgccgaccuaauggacuuuuuucaaacguacggagccauucagggcccacccggucagaagggugagaugggaaccccgggcccaaaaggugauagaggaccagccgggccaccuggacaccccggacccccagguccucgcgggcauaagggcgagaagggcgauaagggagaccagguuuaugcuggacgcaggcgcaggagaucaaucgcagucaagcccuag

SEQ ID NO: 9826 - RNA, 1254 nt, Artificial Sequence
  derived and/or modified sequence
auggacgucacuaaaaaaaacaagagagacgggacugaagugacagaacgaauugugacugagacagugacaacccgccugacuagucugccuccuaaagggggaaccagcaacggcuacgccaagacagcuagucucggaggaggcucucgguuagagaagcaaucccucacucauggaaguuccggcuacaucaauucuacaggauccacgcgcggacacgccaguacaucuagcuacagaagagcacacucccccgccaguacacuaccaaacucaccuggaagcacuuucgagcguaaaacacacguaaccagacacgccuacgaaggcuccuccagcggcaauucgucuccagaguaucccagaaaggaguucgcaaguucuucaacgcguggucgcucccagacaagagaguccgagauucgcguccgucuucaaagcgccagccccucaacccgguggacagaacuagacgaugugaaaagacuguugaaaggcucacggagcgccucaguaagucccacaagaaauucaucgaauacccugccuaucccaaagaagggaacggucgagaccaagaucgucacagccaguucccagagcguuuccgggacauacgacgcaacaauuuuggaugcuaaccugccaagccaugucuggaguucaacucucccugccggaucaagcauggggacuuaucacaacaauaugaccacacaaagcaguagccuguuaaacacuaaugccuauagugcuggcucugucuucggcgugcccaacaauauggccuccuguuccccuacacuucacccaggucuaaguaccucaucaagcgucuucggcaugcaaaauaaccuagccccuucccuuacuaccuugagucacggcaccacaacaaccaguacugcuuacggcgucaaaaagaauaugccccagagucccgccgccgucaauacugggguaucuacauccgcagcuugcaccacaucuguccaauccgacgaccugcugcacaaggacuguaaauuuuuaauccucgaaaaggauaacacaccagcuaagaaggaaauggagcuccugauuaugaccaaggauagcggcaaaguguuuacagcuagucccgcuucaaucgcagccacauccuuuuccgaagacacccugaagaaggagaagcaggccgcuuacaaugcagauaguggauugaaagcagaagcgaauggaaaaaacaaauacgacuguugcccacccuag

SEQ ID NO: 9827 - RNA, 1815 nt, Artificial Sequence
  derived and/or modified sequence
auggaugugacuaagaagaacaagagagauggcacagaggucacugagcguauagugacugagacagugacaacaagacuaacuucguugccuccaaaggguggaacaucaaacggauaugcaaagaccgcauccuuaggcggaggaaguaggcuggagaaacaaucccugacgcauggcagcagugguuauauaaacaguaccggaucuaccagaggacaugccucuaccucuuccuaccgacgcgcccacucccccgccucaacacuucccaacagccccggcaguacuuuugaaagaaagacccaugucacucgacacgcuuacgaggcuucaagcaguaccagaggccggucucagacccgugaauccgaaaucagaguucgacuccagucugcaucccccucuacacgauggacagaauuggacgacguuaagcgauugcugaaaggaucacguagugccucuguuucgccuaccagaaacucuucuaacacccuccccauaccaaaaaaaggaacuguggaaacuaaaaucgugacggcaucuucacagaguguaucugggaccuaugacgccacaauucucgacgcuaaccuaccgucucacguguggaguagcacccugccggccggaagcucuaugggcacauaucauaacaacaugacaacacaauccuccucccugcugaacacaaaugccuacucugcugggucagucuuuggcguuccaaauaacauggccucauguucucccacucuccacccaggcuugucaacauccucguccguauuugguaugcaaaacaaccuggccccaucccuuaccacucugucacacggcacuacaacuacauccacagccuauggcgucaagaagaacaugccccagucaccugccgccgugaacaccggcgucagcacauccgcggcaugcacaaccuccguucaaucugacgaucugcuucacaaggacugcaaguuccuaauacuagaaaaagauaacacgccagcaaagaaggaaauggaacugcucaucaugaccaaggacaguggaaaaguuuucaccgcaucccccgccucgaucgcagcgaccuccuucagugaagauacucuuaagaaagaaaagcaggcggcauauaacgcugacucuggccugaaggccgaagcuaacggcgaccucaagacggugaguaccaagggcaagacaacaaccgcugauauucauuccuacggcucgucaggagggggcggaucaggaggggggggcggaguugguggagcuggcgguggccccuggggccccgccccagcuugguguccuuguggaagcugcugcuccugguggaaaugguuacugggucuauuacuuacauggcuguuauuacugggacuucuuuucgggcucauugcccuggcugaggaaguaaggaaauuaaaggcacgcguggacgagcuggagcguauaaggcggucuauacucccauacggggacucaauggaccggauagagaaagaucgacuacagggaauggcccccgcagccggugcagauuuggacaagauaggacuacauuccgauucucaggaggagcucuggauguuugugagaaagaaacuuaugauggagcaagagaaugggaaucuucgagguuccccaggccccaagggugacaugggguccccaggcccaaaaggcgacagaggguuccccgguacacccgguauucccggccccuuaggccacccgggaccacaaggaccaaagggacagaagggcuccguaggcgacccagguauggagggcccgauguag

SEQ ID NO: 9828 - protein, 1685 aa, Artificial Sequence
  derived and/or modified sequence
MKLRGVSLAAGLFLLALSLWGQPAEAAACYGCSPGSKCDCSGIKGEKGERGFPGLEGHPGLPGFPGPEGPPGPRGQKGDDGIPGPPGPKGIRGPPGLPGFPGTPGLPGMPGHDGAPGPQGIPGCNGTKGERGFPGSPGFPGLQGPPGPPGIPGMKGEPGSIIMSSLPGPKGNPGYPGPPGIQGLPGPTGIPGPIGPPGPPGLMGPPGPPGLPGPKGNMGLNFQGPKGEKGEQGLQGPPGPPGQISEQKRPIDVEFQKGDQGLPGDRGPPGPPGIRGPPGPPGGEKGEKGEQGEPGKRGKPGKDGENGQPGIPGLPGDPGYPGEPGRDGEKGQKGDTGPPGPPGLVIPRPGTGITIGEKGNIGLPGLPGEKGERGFPGIQGPPGLPGPPGAAVMGPPGPPGFPGERGQKGDEGPPGISIPGPPGLDGQPGAPGLPGPPGPAGPHIPPSDEICEPGPPGPPGSPGDKGLQGEQGVKGDKGDTCFNCIGTGISGPPGQPGLPGLPGPPGSLGFPGQKGEKGQAGATGPKGLPGIPGAPGAPGFPGSKGEPGDILTFPGMKGDKGELGSPGAPGLPGLPGTPGQDGLPGLPGPKGEPGGITFKGERGPPGNPGLPGLPGNIGPMGPPGFGPPGPVGEKGIQGVAGNPGQPGIPGPKGDPGQTITQPGKPGLPGNPGRDGDVGLPGDPGLPGQPGLPGIPGSKGEPGIPGIGLPGPPGPKGFPGIPGPPGAPGTPGRIGLEGPPGPPGFPGPKGEPGFALPGPPGPPGLPGFKGALGPKGDRGFPGPPGPPGRTGLDGLPGPKGDVGPNGQPGPMGPPGLPGIGVQGPPGPPGIPGPIGQPGLHGIPGEKGDPGPPGLDVPGPPGERGSPGIPGAPGPIGPPGSPGLPGKAGASGFPGTKGEMGMMGPPGPPGPLGIPGRSGVPGLKGDDGLQGQPGLPGPTGEKGSKGEPGLPGPPGPMDPNLLGSKGEKGEPGLPGIPGVSGPKGYQGLPGDPGQPGLSGQPGLPGPPGPKGNPGLPGQPGLIGPPGLKGTIGDMGFPGPQGVEGPPGPSGVPGQPGSPGLPGQKGDKGDPGISSIGLPGLPGPKGEPGLPGYPGNPGIKGSVGDPGLPGLPGTPGAKGQPGLPGFPGTPGPPGPKGISGPPGNPGLPGEPGPVGGGGHPGQPGPPGEKGKPGQDGIPGPAGQKGEPGQPGFGNPGPPGLPGLSGQKGDGGLPGIPGNPGLPGPKGEPGFHGFPGVQGPPGPPGSPGPALEGPKGNPGPQGPPGRPGLPGPEGPPGLPGNGGIKGEKGNPGQPGLPGLPGLKGDQGPPGLQGNPGRPGLNGMKGDPGLPGVPGFPGMKGPSGVPGSAGPEGEPGLIGPPGPPGLPGPSGQSIIIKGDAGPPGIPGQPGLKGLPGPQGPQGLPGPTGPPGDPGRNGLPGFDGAGGRKGDPGLPGQPGTRGLDGPPGPDGLQGPPGPPGTSSVAHGFLITRHSQTTDAPQCPQGTLQVYEGFSLLYVQGNKRAHGQDLGTAGSCLRRFSTMPFMFCNINNVCNFASRNDYSYWLSTPEPMPMSMQPLKGQSIQPFISRCAVCEAPAVVIAVHSQTIQIPHCPQGWDSLWIGYSFMMHTSAGAEGSGQALASPGSCLEEFRSAPFIECHGRGTCNYYANSYSFWLATVDVSDMFSKPQSETLKAGDLRTRISRCQVCMKRT

SEQ ID NO: 9829 - protein, 205 aa, Artificial Sequence
  derived and/or modified sequence
MASDHQTQAGKPQSLNPKIIIFEQENFQGHSHELNGPCPNLKETGVEKAGSVLVQAGPWVGYEQANCKGEQFVFEKGEYPRWDSWTSSRRTDSLSSLRPIKVDSQEHKIILYENPNFTGKKMEIIDDDVPSFHAHGYQEKVSSVRVQSGTWVGYQYPGYRGLQYLLEKGDYKDSSDFGAPHPQVQSVRRIRDMQWHQRGAFHPSN

SEQ ID NO: 9830 - DNA, 618 bp, Artificial Sequence
  derived and/or modified sequence
atggcatcagatcatcagacccaagcaggaaagcctcagtccctcaatccaaagattatcatattcgaacaggagaatttccaggggcattctcatgagctcaacggaccatgtcccaacctgaaggagacaggggtggagaaggccggttctgtcctggtccaggcaggcccatgggtgggatatgaacaggccaattgcaagggtgagcagttcgtgttcgaaaagggagaatatcccagatgggacagttggacaagttctagacgtaccgacagcctctcctcgctgaggcctattaaagtggattcccaggagcacaagattatattgtatgaaaacccgaacttcaccggcaagaagatggaaatcattgacgacgacgtgccatcttttcacgcgcatgggtatcaagagaaagtttcctcagtcagagtgcagagcggaacatgggtgggataccagtaccccggctacaggggcctccaatacctgctagagaaaggtgattataaggacagtagcgactttggtgcaccgcatccgcaggtacagtccgtcaggaggatacgtgacatgcaatggcatcagcgcggagcttttcacccttctaactag

SEQ ID NO: 9831 - DNA, 618 bp, Artificial Sequence
  derived and/or modified sequence
atggccagtgaccaccagacccaggccggcaagccccagagcctgaaccccaagatcatcatctttgagcaggagaacttccagggccacagccatgagctgaatggcccctgccccaacctgaaggagaccggggtggagaaggccggctctgtgctggtgcaggccggcccctgggtgggctatgagcaggccaactgcaagggggagcagtttgtgtttgagaagggggagtacccccgctgggacagctggaccagcagcagaagaacagacagcctgagcagcctgcggcccatcaaggtggacagccaggagcacaagatcatcctgtatgagaaccccaacttcaccgggaagaagatggagatcattgatgatgatgtgcccagcttccacgcccacggctaccaggagaaggtgtcctctgtgcgggtgcagagcggcacctgggtgggctaccagtacccaggctaccggggcctgcagtacctgctggagaagggggactacaaggacagcagtgactttggagccccccacccccaggtgcagagcgtgcggcgcatccgggacatgcagtggcaccagagaggagccttccaccccagcaactag

SEQ ID NO: 9832 - DNA, 618 bp, Artificial Sequence
  derived and/or modified sequence
atggccagcgaccaccagacccaggccggcaagccccagagcctgaatccaaagattataattttcgaacaggaaaacttccaagggcatagccatgaactgaatggtccctgtccaaacctgaaggagaccggagtggaaaaggccggttcagtgctcgtacaagctggcccttgggtcggatacgaacaagctaactgtaaaggggagcagttcgtgttcgaaaaaggcgagtacccgagatgggattcgtggacttccagccggcgcaccgacagtctgtcaagcctccggcctatcaaggtggattcacaagagcataaaattatcttatatgagaacccgaatttcaccggcaaaaaaatggagattatcgatgatgacgtgccctcgtttcacgctcacgggtaccaggagaaggtgtcatctgttagggtccagtcaggaacctgggtgggctatcagtaccccgggtatcgcggactacagtacttactggagaagggagactataaggacagctccgattttggcgcaccccacccacaggtgcagtccgtgagaaggattcgcgacatgcagtggcaccagcgaggagcgtttcaccccagtaattag

SEQ ID NO: 9833 - DNA, 618 bp, Artificial Sequence
  derived and/or modified sequence
atggcgtctgatcaccagacacaggccggaaagcctcagtccctgaacccgaagatcattatcttcgaacaggagaactttcagggccacagccacgagttgaatgggccatgtcccaatctgaaagagaccggtgtggagaaagcgggttcagtgctcgtccaggcaggtccatgggtggggtacgagcaggccaattgcaagggagaacagttcgttttcgaaaagggagaatatcctcggtgggactcatggacgagctcaagacgcacagattcgctatccagtctacggcctataaaagtggactcccaagagcacaaaatcattctctacgagaatcccaactttacagggaaaaaaatggaaattatcgatgatgatgtcccttcatttcacgcacatggctatcaggagaaggtgtcatctgtgagggtccagagcggcacttgggtaggataccagtacccagggtatagagggctccagtacctgttagagaaaggcgattataaagattccagtgactttggagctccccacccgcaggtgcagagcgtgagacgcattcgtgacatgcaatggcatcagcggggagcgtttcatccaagtaactag

SEQ ID NO: 9834 - DNA, 886 bp, Artificial Sequence
  derived and/or modified sequence
ggtgagagcttaatccagcattctcaccctgcttttcgcaggagcacagcggtcactcatcttggcaccggcacttctggggaaggtataaatgccacctcccgctggccgagcttcacggcactcgcaggggctggtgtcactggtcattcctgcacaggacagtccaccatggcctcagatcaccagacccaggcgggcaagccacagtccctcaaccccaagatcatcatctttgagcaggaaaactttcaaggccactcgcatgagctcaatgggccctgccccaacctgaaggaaactggcgtggagaaggcaggttctgtcctagtgcaggctggaccctgggtgggctatgaacaggccaactgcaagggcgagcagtttgtgtttgagaagggtgagtacccccgctgggactcatggaccagcagccgaaggacggactccctcagctccctgaggcccatcaaagtggacagccaagagcacaagatcatcctctatgaaaaccccaacttcaccgggaagaagatggaaatcatagatgacgatgtacccagcttccacgcccatggctaccaggagaaggtgtcatctgtgcgggtgcagagtggcacgtgggttggctaccagtaccccggctaccgtgggctgcagtacctgctggagaagggagactacaaggacagcagcgactttggggcccctcacccccaggtgcagtccgtgcgccgtatccgcgacatgcagtggcaccaacgtggtgccttccacccctccaactagtgccctccccaccatgcctccttcccaggacccaggtctgctgcccaggaaccctccagacctcccagagagtgaataaagtgtgacttgcaacttg

SEQ ID NO: 9835 - DNA, 618 bp, Artificial Sequence
  derived and/or modified sequence
atggccagcgaccaccagacccaggccggcaagccccagagcctgaaccccaagatcatcatcttcgagcaggagaacttccagggccacagccacgagctgaacggcccctgccccaacctgaaggagaccggcgtggagaaggccggcagcgtgctggtgcaggccggcccctgggtgggctacgagcaggccaactgcaagggcgagcagttcgtgttcgagaagggcgagtaccccagatgggacagctggaccagcagcagaagaaccgacagcctgagcagcctgagacccatcaaggtggacagccaggagcacaagatcatcctgtacgagaaccccaacttcaccggcaagaagatggagatcatcgacgacgacgtgcccagcttccacgcccacggctaccaggagaaggtgagcagcgtgagagtgcagagcggcacctgggtgggctaccagtaccccggctacagaggcctgcagtacctgctggagaagggcgactacaaggacagcagcgacttcggcgccccccacccccaggtgcagagcgtgagaagaatcagagacatgcagtggcaccagagaggcgccttccaccccagcaactag

SEQ ID NO: 9836 - protein, 503 aa, Artificial Sequence
  derived and/or modified sequence
MALRAKAEVCMAVPWLSLQRAQALGTRAARVPRTVLPFEAMPRRPGNRWLRLLQIWREQGYEDLHLEVHQTFQELGPIFRYDLGGAGMVCVMLPEDVEKLQQVDSLHPHRMSLEPWVAYRQHRGHKCGVFLLNGPEWRFNRLRLNPEVLSPNAVQRFLPMVDAVARDFSQALKKKVLQNARGSLTLDVQPSIFHYTIEASNLALFGERLGLVGHSPSSASLNFLHALEVMFKSTVQLMFMPRSLSRWTSPKVWKEHFEAWDCIFQYGDNCIQKIYQELAFSRPQQYTSIVAELLLNAELSPDAIKANSMELTAGSVDTTVFPLLMTLFELARNPNVQQALRQESLAAAASISEHPQKATTELPLLRAALKETLRLYPVGLFLERVASSDLVLQNYHIPAGTLVRVFLYSLGRNPALFPRPERYNPQRWLDIRGSGRNFYHVPFGFGMRQCLGRRLAEAEMLLLLHHVLKHLQVETLTQEDIKMVYSFILRPSMFPLLTFRAIN

SEQ ID NO: 9837 - DNA, 1512 bp, Artificial Sequence
  derived and/or modified sequence
atggcgttgcgtgcaaaagcggaggtctgtatggctgtgccatggttgtcactgcagcgggctcaggccctgggtacccgggctgcccgagtgccacgcacggttctcccgttcgaagcgatgccccgcaggcccggcaaccgctggcttagactgctgcaaatctggcgagagcagggctacgaagatttacatctagaggtgcatcaaactttccaggaactgggacccattttcaggtacgacctgggcggagctggcatggtctgcgtcatgctgccagaggacgtcgaaaaattgcagcaagttgatagcctgcacccacatagaatgagcctcgagccatgggtcgcctacagacagcacagggggcacaaatgtggcgtctttcttttgaacggcccggagtggaggtttaaccgtctgcgactgaacccagaggtgctttctcccaatgccgtccagcgattcctccctatggttgatgccgtagccagggatttctcccaggctctcaagaagaaagttctccagaacgcccgcgggtccctgactctggacgtgcagccatctatttttcattatactattgaggcctcaaatcttgcattatttggggagagactggggctggtgggacatagcccttcttccgcctctctgaattttctccacgccttggaagtgatgttcaagtctacagtccaattgatgtttatgccccgcagcctgtccaggtggacaagtccaaaagtgtggaaggagcacttcgaggcttgggactgtattttccagtatggtgataactgcattcagaagatttaccaggagctcgctttctcaaggcctcagcaatacacctctattgttgcagagttgctgcttaacgctgagcttagtcccgacgcgattaaagcgaactcaatggagctgacagcaggtagcgtggatactaccgtgttccctctcctcatgacactgtttgagttggccaggaatcccaatgtgcagcaggcactgcggcaagagtcattggcagctgccgcctcgatcagcgaacatccacagaaagccactaccgagttacccttattaagggcagcgctcaaagaaaccctgcggctgtatccggtcggattattcctggagagagtggcttcgagtgatctcgtgcttcaaaactaccatatccctgccggaacacttgtacgcgtgttcctttatagtctcggaaggaaccccgcgttgtttccacggccagaaaggtacaacccacagcgctggctggatatccgtgggtccgggcgaaatttttaccatgtgccattcgggtttggcatgagacaatgtttggggcggcgtctggctgaggccgaaatgctgctgctgctgcatcacgtcttgaagcacctgcaggtcgagaccttaactcaggaagacattaagatggtgtacagcttcatcttacgcccgtctatgttccccctgctgacatttcgtgcaattaactag

SEQ ID NO: 9838 - DNA, 1512 bp, Artificial Sequence
  derived and/or modified sequence
atggccctgcgggccaaggccgaggtgtgcatggctgtgccctggctgagcctgcagagggcccaggccctgggcacccgggccgcccgggtgcccaggacagtgctgccctttgaggccatgcccaggaggcctggcaaccgctggctgcggctgctgcagatctggagggagcagggctatgaggacctgcacctggaggtgcaccagaccttccaggagctgggccccatcttccgctatgacctgggcggggccggcatggtgtgtgtgatgctgcctgaagatgtggagaagctgcagcaggtggacagcctgcacccccacaggatgagcctggagccctgggtggcctaccggcagcaccggggccacaagtgtggggtcttcctgctgaatggacctgagtggaggttcaaccggctgcggctgaaccctgaggtgctgagccccaatgctgtgcagcgcttcctgcccatggtggatgctgtggcccgggacttcagccaggccctgaagaagaaggtgctgcagaatgcccggggcagcctgaccctggatgtgcagcccagcatcttccactacaccatcgaggccagcaacctggccctgtttggagagcggctgggcctggtgggccacagccccagcagcgccagcctgaacttcctgcacgccctggaggtgatgttcaagagcacagtgcagctgatgttcatgcccaggagcctgagccgctggaccagccccaaggtgtggaaggagcactttgaggcctgggactgcatcttccagtacggggacaactgcatccagaagatctaccaggagctggccttcagccggccccagcagtacaccagcatcgtggccgagctgctgctgaatgctgagctgagcccagatgccatcaaggccaacagcatggagctgacagctggctctgtggacaccaccgtcttccccctgctgatgaccctgtttgagctggccaggaaccccaacgtgcagcaggccctgcggcaggagagcctggccgccgccgccagcatcagcgagcacccccagaaggccaccacagagctgcccctgctgcgggccgccctgaaggagaccctgcggctgtaccctgtgggcctcttcctggagcgggtggccagcagtgacctggtgctgcagaactaccacatcccagctggcaccctggtgcgggtcttcctgtacagcctgggcaggaacccagccctcttccccaggcctgagcgctacaacccccagcgctggctggacatccggggcagcggcaggaacttctaccacgtgccctttggatttggcatgaggcagtgcctgggccgccgcctggccgaggccgagatgctgctgctgctgcaccacgtgctgaagcacctgcaggtggagaccctgacccaggaggacatcaagatggtgtacagcttcatcctgcggcccagcatgttccccctgctgaccttccgggccatcaactag

SEQ ID NO: 9839 - DNA, 1512 bp, Artificial Sequence
  derived and/or modified sequence
atggccctgcgggccaaggccgaggtgtgcatggccgtgccctggctgtcccttcagcgagctcaagccctcggcacccgggcagcacgggtgccccgtacagtcctgcccttcgaggctatgccaagacgtcccggcaatagatggctgaggctcctacagatttggagggagcaaggttacgaagatttgcatctcgaggtgcatcagaccttccaggaactcgggcctattttccgctatgatctggggggggccgggatggtctgcgtcatgttaccggaggatgtggaaaagttgcagcaggtggacagcctgcacccacaccggatgtcgctcgaaccttgggtggcatacagacagcaccggggtcacaaatgcggtgtgttccttcttaacggacccgaatggagatttaatcggctgaggttgaaccctgaagtgttgtctccaaacgccgtccagaggttcctgcctatggtcgacgccgtggcacgagatttttcgcaagccctgaaaaagaaagtgcttcagaatgcccgcggttccctcactctcgatgtccaaccctcgatcttccactataccattgaggcaagtaacctggccctcttcggggagagactgggccttgtcggccattctccaagttccgcctcactgaatttcctgcatgctctcgaagtgatgttcaagagcaccgtgcagctcatgttcatgcctaggtccctctcacgatggactagccccaaggtgtggaaggagcactttgaggcttgggattgcatctttcagtacggcgataactgcatacagaaaatttaccaagagctcgccttttcccgccctcaacagtacacctccatcgtggctgagctgttgctgaatgcggagctgtctcccgatgcgatcaaggccaacagtatggagttaacggcaggctctgtcgatacgactgtgttcccactgctaatgacattatttgaactggctcgtaacccaaatgttcagcaagccctcagacaggaaagcctggccgccgcagcctccatctcagagcatcctcagaaggccaccacagaactccctctcttaagggccgccctgaaagagactctcaggctgtaccccgttggtctattcctggaacgggtggcatcatctgacctggttctccagaattatcacatcccggcaggcacactggtgagagtttttttgtatagcctcggtaggaaccccgcgctttttcccagacctgaaaggtacaaccctcagcgctggctcgacatccgcggatcagggcgaaatttctaccatgtcccattcggctttgggatgcggcaatgtctagggcgtagactggctgaggctgagatgctgctactcttacaccacgttctgaagcacctgcaggtggagactctgacacaggaagacattaagatggtgtactcctttatactgcggccttccatgtttcctctgctgactttcagggccattaactag

SEQ ID NO: 9840 - DNA, 1512 bp, Artificial Sequence
  derived and/or modified sequence
atggccctgcgggcaaaagctgaagtatgcatggccgtcccatggctctctttacaacgcgcacaggccctaggcacaagagcggcacgtgtacctagaacagtactgccttttgaagccatgcccagacgacccggaaaccgatggttacggctcttacagatatggcgtgagcagggttacgaggacttacacctcgaggtgcatcaaacattccaggaacttggacccatctttaggtacgatctcggaggggctggcatggtgtgtgtcatgctgcctgaagatgtggagaaattgcagcaggtagatagcctgcacccacaccggatgtcactggagccatgggtcgcctaccgtcagcaccgcggtcataagtgtggagtgttcctcctgaacggccctgaatggcggtttaaccggctgcgtttaaatcccgaagttctgagtcctaatgccgttcagcgcttccttccgatggtggacgccgtggccagagacttctcccaggctctgaaaaagaaggtcctccagaacgctcgcggatctctgaccctggacgtgcagccgtctatcttccactacaccatagaggcttcaaacctggccttgtttggtgagaggctaggccttgtcgggcattccccttcttcagctagtttgaacttcctccacgccctcgaggtaatgttcaaatccacagtgcagctaatgttcatgccaaggagtttgagcagatggaccagtccgaaggtgtggaaggaacattttgaggcttgggattgtatcttccaatacggcgacaactgcatccagaagatctatcaggaactggcgtttagccgtcctcaacaatatacctccatcgtggcagagttgctgttgaacgctgagctttctcccgacgctattaaggccaactctatggagctgaccgctggcagcgttgacacaaccgtgttcccactgctaatgaccctgttcgaactcgctcgtaaccctaatgttcagcaggctttgagacaggaatccctagccgcagctgcttccatttcagagcaccctcagaaggccacaacagagctgccactactacgggcagctttgaaggagaccttgcgactgtaccctgtgggtctgtttttagagcgcgtcgctagttcagatctggtcctgcagaactatcacattcctgccggaacgctggttagagtatttttgtattctctcggtaggaatcccgctctctttccacggcctgagcggtacaatccccagcggtggctggatattagaggaagcggtaggaatttttaccacgtgccattcggttttgggatgcgacagtgtctcggaagacgcctggctgaggctgaaatgttgctccttttacatcatgtgttaaaacaccttcaggtggagactctgacgcaggaggacatcaaaatggtgtattctttcatactccgtccgtcgatgtttccattgttaacctttcgcgctattaattag

SEQ ID NO: 9841 - DNA, 2664 bp, Artificial Sequence
  derived and/or modified sequence
attgcagctgaacagggtggagggagcattggaatggcactcagggcaaaggcagaggtgtgcatggcagtgccctggctgtccctgcaaagggcacaggcactgggcacgagagccgcccgggtccccaggacagtgctgccctttgaagccatgccccggcgtccaggcaacaggtggctgaggctgctgcagatctggagggagcagggttatgaggacctgcacctggaagtacaccagaccttccaggaactagggcccattttcaggtacgacttgggaggagcaggcatggtgtgtgtgatgctgccggaggacgtggagaagctgcaacaggtggacagcctgcatccccacaggatgagcctggagccctgggtggcctacagacaacatcgtgggcacaaatgtggcgtgttcttgctgaatgggcctgaatggcgcttcaaccgattgcggctgaatccagaagtgctgtcgcccaacgctgtgcagaggttcctcccgatggtggatgcagtggccagggacttctcccaggccctgaagaagaaggtgctgcagaacgcccgggggagcctgaccctggacgtccagcccagcatcttccactacaccatagaagccagcaacttggctctttttggagagcggctgggcctggttggccacagccccagttctgccagcctgaacttcctccatgccctggaggtcatgttcaaatccaccgtccagctcatgttcatgcccaggagcctgtctcgctggaccagccccaaggtgtggaaggagcactttgaggcctgggactgcatcttccagtacggcgacaactgtatccagaaaatctatcaggaactggccttcagccgccctcaacagtacaccagcatcgtggcggagctcctgttgaatgcggaactgtcgccagatgccatcaaggccaactctatggaactcactgcagggagcgtggacacgacggtgtttcccttgctgatgacgctctttgagctggctcggaaccccaacgtgcagcaggccctgcgccaggagagcctggccgccgcagccagcatcagtgaacatccccagaaggcaaccaccgagctgcccttgctgcgtgcggccctcaaggagaccttgcggctctaccctgtgggtctgtttctggagcgagtggcgagctcagacttggtgcttcagaactaccacatcccagctgggacattggtgcgcgtgttcctctactctctgggtcgcaaccccgccttgttcccgaggcctgagcgctataacccccagcgctggctagacatcaggggctccggcaggaacttctaccacgtgccctttggctttggcatgcgccagtgccttgggcggcgcctggcagaggcagagatgctgctgctgctgcaccatgtgctgaaacacctccaggtggagacactaacccaagaggacataaagatggtctacagcttcatattgaggcccagcatgttccccctcctcaccttcagagccatcaactaatcacgtctctgcacccagggtcccagcctggccaccagcctccctttctgcctgaccccaggccacccctcttctctcccacatgcacagcttcctgagtcacccctctgtctaaccagccccagcacaaatggaactcccgagggcctctaggaccagggtttgccaggctaagcagcaatgccagggcacagctggggaagatcttgctgaccttgtccccagccccacctggccctttctccagcaagcactgtcctctgggcagtttgcccccatccctcccagtgctggctccaggctcctcgtgtggccatacaagggtgctgtggttttgtcccttgccttcctgcctagtctcacatgtccctgttcctcttcccctggccagggcccctgcgcagactgtcagagtcattaagcgggatcccagcatctcagagtccagtcaagttccctcctgcagcctgacccctaggcagctcgagcatgccctgagctctctgaaagttgtcaccctggaatagggtcctgcagggtagaataaaaaggcccctgtggtcacttgtcctgacatccccattttcaagtgatacaactgagtctcgagggacgtgtgttccccagctgatcgtgtcagcctcatgccccaggcctcatctttcatggaccaggccttgttccaggagtgggtgttgggtcctctgcttcctgtgctgtcccctggggaaggtcccgaggatgctgtcaggagatggaagagtcatgtggggtgggaacctggggtgtggttccagaaatgtttttggcaacaggagagacaggattgggccaacaaggactcagacgagttttattgactcatttctctggttgatacggagccatgtcatgtgccacgacctggggtgggcacagggaggctgcagtttcctgcgtgaacctgccttgggcctcatctgctcctagcccagcagagagagttgacccctcctgaactggccactccccagtgctcccgtgcagggagaggaagcacccagtttgagagtgtacccagccagactgtctttatctccatggattttcatcagggcaaagatcacagcagccagctcc

SEQ ID NO: 9842 - DNA, 1512 bp, Artificial Sequence
  derived and/or modified sequence
atggccctgagagccaaggccgaggtgtgcatggccgtgccctggctgagcctgcagagagcccaggccctgggcaccagagccgccagagtgcccagaaccgtgctgcccttcgaggccatgcccagaagacccggcaacagatggctgagactgctgcagatctggagagagcagggctacgaggacctgcacctggaggtgcaccagaccttccaggagctgggccccatcttcagatacgacctgggcggcgccggcatggtgtgcgtgatgctgcccgaggacgtggagaagctgcagcaggtggacagcctgcacccccacagaatgagcctggagccctgggtggcctacagacagcacagaggccacaagtgcggcgtgttcctgctgaacggccccgagtggagattcaacagactgagactgaaccccgaggtgctgagccccaacgccgtgcagagattcctgcccatggtggacgccgtggccagagacttcagccaggccctgaagaagaaggtgctgcagaacgccagaggcagcctgaccctggacgtgcagcccagcatcttccactacaccatcgaggccagcaacctggccctgttcggcgagagactgggcctggtgggccacagccccagcagcgccagcctgaacttcctgcacgccctggaggtgatgttcaagagcaccgtgcagctgatgttcatgcccagaagcctgagcagatggaccagccccaaggtgtggaaggagcacttcgaggcctgggactgcatcttccagtacggcgacaactgcatccagaagatctaccaggagctggccttcagcagaccccagcagtacaccagcatcgtggccgagctgctgctgaacgccgagctgagccccgacgccatcaaggccaacagcatggagctgaccgccggcagcgtggacaccaccgtgttccccctgctgatgaccctgttcgagctggccagaaaccccaacgtgcagcaggccctgagacaggagagcctggccgccgccgccagcatcagcgagcacccccagaaggccaccaccgagctgcccctgctgagagccgccctgaaggagaccctgagactgtaccccgtgggcctgttcctggagagagtggccagcagcgacctggtgctgcagaactaccacatccccgccggcaccctggtgagagtgttcctgtacagcctgggcagaaaccccgccctgttccccagacccgagagatacaacccccagagatggctggacatcagaggcagcggcagaaacttctaccacgtgcccttcggcttcggcatgagacagtgcctgggcagaagactggccgaggccgagatgctgctgctgctgcaccacgtgctgaagcacctgcaggtggagaccctgacccaggaggacatcaagatggtgtacagcttcatcctgagacccagcatgttccccctgctgaccttcagagccatcaactag

SEQ ID NO: 9843 - protein, 503 aa, Artificial Sequence
  derived and/or modified sequence
MALRAKAEVCVAAPWLSLQRARALGTRAARAPRTVLPFEAMPQHPGNRWLRLLQIWREQGYEHLHLEMHQTFQELGPIFRYNLGGPRMVCVMLPEDVEKLQQVDSLHPCRMILEPWVAYRQHRGHKCGVFLLNGPEWRFNRLRLNPDVLSPKAVQRFLPMVDAVARDFSQALKKKVLQNARGSLTLDVQPSIFHYTIEASNLALFGERLGLVGHSPSSASLNFLHALEVMFKSTVQLMFMPRSLSRWISPKVWKEHFEAWDCIFQYGDNCIQKIYQELAFNRPQHYTGIVAELLLKAELSLEAIKANSMELTAGSVDTTAFPLLMTLFELARNPDVQQILRQESLAAAASISEHPQKATTELPLLRAALKETLRLYPVGLFLERVVSSDLVLQNYHIPAGTLVQVFLYSLGRNAALFPRPERYNPQRWLDIRGSGRNFHHVPFGFGMRQCLGRRLAEAEMLLLLHHVLKHFLVETLTQEDIKMVYSFILRPGTSPLLTFRAIN

SEQ ID NO: 9844 - DNA, 1512 bp, Artificial Sequence
  derived and/or modified sequence
atggcactaagagccaaagctgaggtttgcgtggctgccccctggctgagcctccagcgcgctcgggccctcggcaccagggctgctagggcaccccgaactgtcttgcccttcgaggcgatgccacaacatccagggaatagatggctgcggttgcttcaaatttggagggagcagggctacgaacatcttcaccttgagatgcatcagacgttccaggaacttggcccaatcttcagatacaacttagggggtccccgcatggtgtgtgtgatgttgcctgaggacgtggagaaactgcagcaggttgacagcctacatccttgtagaatgatactggagccatgggttgcctaccgacaacatcggggccacaagtgtggggtgttcctgctgaatgggcctgaatggcgtttcaacagacttcgcttgaacccagacgtcctcagcccaaaggcagtccagcgcttcctccctatggtggatgccgtagcacgcgactttagccaggccctgaagaagaaggtactgcagaacgcaagaggctcactgacgctggatgtgcagccctcaatttttcattacaccatcgaagcatcaaacctggcgctctttggagagcgcctcggcctggtcgggcacagtccaagctccgcttctctgaactttctacacgccctcgaggtaatgttcaagagcactgtgcagttgatgttcatgcccagaagcctgtctcgatggattagtcccaaggtttggaaagaacattttgaagcttgggactgcattttccagtatggggacaactgtatccaaaaaatttatcaggaactggcctttaatcgcccacagcactacacagggattgtagctgagttattactgaaggcggagctgtcactcgaagccatcaaggcaaatagcatggaattaacggccgggagcgttgacactacagctttccctttactgatgacgctcttcgagctcgcacggaatcctgacgtccagcagatcctacgacaggaaagtcttgccgctgctgcctccattagcgaacaccctcagaaagctacaacagaattgcccctgctgagagcagctcttaaagagacactgagattgtatcctgttgggttattcctagagcgggttgttagctcagacctggtgctgcagaactatcacattcctgccggcaccttggtgcaggtgtttctgtatagcttggggcggaatgccgctttgttcccacggccggaaagatataacccacagagatggctcgatataaggggtagcggccggaactttcatcacgtcccgttcggatttggcatgcggcagtgtctgggacggaggttggcggaagcggagatgctgctgctgctccaccacgttctgaagcactttttagttgaaaccttgacgcaagaggacatcaagatggtgtatagcttcattctgcggcccggcacctctcccttgttgaccttcagggcaatcaactag

SEQ ID NO: 9845 - DNA, 1512 bp, Artificial Sequence
  derived and/or modified sequence
atggccctgcgggccaaggccgaggtgtgtgtggccgccccctggctgagcctgcagagggcccgggccctgggcacccgggccgcccgggcccccaggacagtgctgccctttgaggccatgccccagcaccctggcaaccgctggctgcggctgctgcagatctggagggagcagggctatgagcacctgcacctggagatgcaccagaccttccaggagctgggccccatcttccgctacaacctgggcggccccaggatggtgtgtgtgatgctgcctgaagatgtggagaagctgcagcaggtggacagcctgcacccctgcaggatgatcctggagccctgggtggcctaccggcagcaccggggccacaagtgtggggtcttcctgctgaatggacctgagtggaggttcaaccggctgcggctgaacccagatgtgctgagccccaaggctgtgcagcgcttcctgcccatggtggatgctgtggcccgggacttcagccaggccctgaagaagaaggtgctgcagaatgcccggggcagcctgaccctggatgtgcagcccagcatcttccactacaccatcgaggccagcaacctggccctgtttggagagcggctgggcctggtgggccacagccccagcagcgccagcctgaacttcctgcacgccctggaggtgatgttcaagagcacagtgcagctgatgttcatgcccaggagcctgagccgctggatcagccccaaggtgtggaaggagcactttgaggcctgggactgcatcttccagtacggggacaactgcatccagaagatctaccaggagctggccttcaaccggccccagcactacacaggaattgtggccgagctgctgctgaaggccgagctgagcctggaggccatcaaggccaacagcatggagctgacagctggctctgtggacaccacagccttccccctgctgatgaccctgtttgagctggccaggaacccagatgtgcagcagatcctgcggcaggagagcctggccgccgccgccagcatcagcgagcacccccagaaggccaccacagagctgcccctgctgcgggccgccctgaaggagaccctgcggctgtaccctgtgggcctcttcctggagcgggtggtgtccagtgacctggtgctgcagaactaccacatcccagctggcaccctggtgcaggtgttcctgtacagcctgggcagaaatgctgccctcttccccaggcctgagcgctacaacccccagcgctggctggacatccggggcagcggcaggaacttccaccacgtgccctttggatttggcatgaggcagtgcctgggccgccgcctggccgaggccgagatgctgctgctgctgcaccacgtgctgaagcacttcctggtggagaccctgacccaggaggacatcaagatggtgtacagcttcatcctgcggcccggcaccagccccctgctgaccttccgggccatcaactag

SEQ ID NO: 9846 - DNA, 1512 bp, Artificial Sequence
  derived and/or modified sequence
atggccctgcgggccaaggccgaggtgtgcgtggccgccccctggctgagcctccagcgcgctagggctctgggcacaagagctgccagggcccccagaaccgtgctcccgttcgaggcgatgccacaacaccccggaaacagatggctgcgtctgcttcagatctggagagaacaaggatatgagcacctacatctcgaaatgcatcagacattccaggaactgggcccgatcttcagatacaatctgggcggaccccgcatggtgtgtgtgatgctaccagaggacgtcgagaagctacaacaggtcgatagcctgcatccttgtaggatgatcctggagccttgggtggcctaccggcagcaccgtggccacaaatgtggtgtctttttgcttaatggcccagaatggcgttttaatcgcctcaggttgaatcccgacgtattgtctccgaaagccgttcagcgctttttacccatggttgatgcagtagcccgcgattttagccaggcgcttaagaagaaggtcctccagaatgctcgaggctctctcactctggacgttcaaccttccattttccactatactatcgaagcgtccaacctggccctgtttggcgaacgactggggcttgtcggacattctcctagttctgcttcactgaattttcttcatgcattagaggtgatgtttaaatccaccgtgcagttgatgttcatgcccagatctctgagccggtggatctccccgaaagtctggaaggagcactttgaggcctgggactgcatctttcagtatggcgacaattgtattcagaagatataccaagagctcgcatttaaccgaccgcagcactacacaggtatcgttgctgagcttctgctcaaagccgagctcagcctggaagctataaaggcaaactcaatggagcttacagcggggtccgtcgataccacggctttccccttgctcatgacactgttcgagttagcccgtaaccccgatgtgcagcagatcctaaggcaggaaagtcttgcagccgctgcatcaatttccgagcacccacagaaagctacaaccgagctgcccctgttacgggccgcattgaaagaaaccttgaggttgtaccctgtaggcctatttttggagcgagtcgtcagcagtgacttggtactgcagaattatcatatccccgctgggactctcgtgcaagtctttctctattctcttggtaggaatgctgccctgttccccagaccagagagatacaatccccaaaggtggctcgatattcgcggttcagggagaaattttcatcacgtccctttcggattcgggatgcgtcagtgtctcggacgacgcttggcagaagccgaaatgttgctcctgctgcatcatgtgcttaagcatttcctagttgagactctcacgcaggaagatattaaaatggtgtattctttcatccttcggccaggtacaagtcctttgctgacctttagggccatcaactag

SEQ ID NO: 9847 - DNA, 1512 bp, Artificial Sequence
  derived and/or modified sequence
atggcattgcgcgcaaaggctgaagtgtgcgtagcggcaccctggctctctctgcagcgggctagggctctgggcacaagagccgctcgtgcccctagaacagtgcttcccttcgaggccatgccgcagcaccctgggaacagatggctacggctgctgcagatctggagagagcagggttatgaacacctccacttagagatgcaccagaccttccaggaactgggaccgattttcagatataatctggggggacctcgaatggtctgcgtaatgctgccagaggacgttgagaaactacaacaggtagactcgctccacccgtgcaggatgattttggagccgtgggttgcctaccgacagcaccggggtcataagtgtggcgtctttctcctcaacggcccagagtggagattcaatcggttgagattaaatcctgatgttctaagtcctaaggctgttcagaggtttctaccaatggtggacgcagtggctagggacttcagtcaggcactgaaaaaaaaggttctgcagaacgcccgaggctcactgacactcgatgttcaaccatccatcttccattacactatcgaggcctccaacctggccttgttcggggaacgcctgggcctggtcggacacagtcctagctccgcttccttgaatttcctccacgcactcgaggtcatgtttaagagcactgtgcagcttatgtttatgcctagatccctgtctcgttggattagccctaaggtctggaaggaacatttcgaggcatgggactgcatctttcaatacggagacaactgtatccaaaagatataccaggagctggccttcaatcgcccacagcattacaccggcatcgtggccgaactgcttcttaaagctgaactctctctggaagctatcaaagccaattccatggagcttaccgccggatcagtggatactactgcctttccactcctgatgaccctcttcgagctggctcgcaaccccgacgtgcagcagatattacgccaggagagcctggccgcagccgcatctatcagcgagcatcctcagaaagctactacagagttgcctctgttgagggctgccttaaaggagacgctcagactgtacccagttggcctctttctggaaagggtcgtgagctccgatctcgtactgcaaaattaccacataccagcaggcactctggtccaagtttttctctactcattgggccgtaatgccgctttgtttccgagacctgagcgctataatcctcagagatggttggatattaggggctccgggagaaattttcatcacgtcccgttcggcttcggcatgcggcaatgcttagggagaagactcgcagaagctgagatgttgttgctgctgcaccatgtgttgaagcactttctcgtagagacactcacccaagaggacatcaagatggtgtactcttttatactgcggcctggcacttcccctctgctgactttccgcgcaatcaactag

SEQ ID NO: 9848 - DNA, 2936 bp, Artificial Sequence
  derived and/or modified sequence
ggaatggcactcagggcaaaggcagaggtgtgcgtggcagcgccctggctgtccctgcaaagggcacgggcactgggcactagagccgctcgggcccctaggacggtgctgccgtttgaagccatgccccagcatccaggcaacaggtggctgaggctgctgcagatctggagggagcagggttatgagcacctgcacctggagatgcaccagaccttccaggagctggggcccattttcaggtacaacttgggaggaccacgcatggtgtgtgtgatgctgccggaggatgtggagaagctgcaacaggtggacagcctgcatccctgcaggatgatcctggagccctgggtggcctacagacaacatcgtgggcacaaatgtggcgtgttcttgttgaatgggcctgaatggcgcttcaaccgattgcggctgaacccagatgtgctgtcgcccaaggccgtgcagaggttcctcccgatggtggatgcagtggccagggacttctcccaggccctgaagaagaaggtgctgcagaacgcccgggggagcctgaccctggacgtccagcccagcatcttccactacaccatagaagccagcaacttagctctttttggagagcggctgggcctggttggccacagccccagttctgccagcctgaacttcctccatgccctggaggtcatgttcaaatccaccgtccagctcatgttcatgcccaggagcctgtctcgctggatcagccccaaggtgtggaaggagcactttgaggcctgggactgcatcttccagtacggtgacaactgtatccagaaaatctaccaggaactggccttcaaccgccctcaacactacacaggcatcgtggcggagctcctgttgaaggcggaactgtcactagaagccatcaaggccaactctatggaactcactgcagggagcgtggacacgacagcgtttcccttgctgatgacgctctttgagctggctcggaaccccgacgtgcagcagatcctgcgccaggagagcctggccgccgcagccagcatcagtgaacatccccagaaggcaaccaccgagctgcccttgctgcgggcggccctcaaggagaccttgcggctctaccctgtgggtctgtttttggagcgagtggtgagctcagacttggtgcttcagaactaccacatcccagctgggacattggtacaggttttcctctactcgctgggtcgcaatgccgccttgttcccgaggcctgagcggtataatccccagcgctggctagacatcaggggctccggcaggaacttccaccacgtgccctttggctttggcatgcgccagtgcctcgggcggcgcctggcagaggcagagatgctgctgctgctgcaccacgtgctgaagcacttcctggtggagacactaactcaagaggacataaagatggtctacagcttcatattgaggcctggcacgtcccccctcctcactttcagagcgattaactagtcttgcatctgcacccagggtcccagcctggccaccagcttccctctgcctgaccccaggccacctgtcttctctcccacgtgcacagcttcctgagtcacccctctgtccagccagctcctgcacaaatggaactccccagggcctccaggactggggcttgccaggcttgtcaaatagcaaggccagggcacagctggagacgatcttgctggcagggcctggccttgtccccagctccacctggccccttctccagcaagcagtgccctctggacagcttgactctactcccagcgctggctccaggctcctcatgaggccatgcaagggtgctgtgattttgtcccttgccttcctgcctagtctcacatgtccctgtccctctcgccctggccagggcctctgtgcagacagtgtcagagtcattaagcgggatcccagcatctcagagtccagtcaagttccctcctgcagcctgaccccaggcagctcgagcatgccctgagctctctgaaagttgtcaccctggaatacgatcctgcagggtagactaaaaaggcccctgtggtcacttatcctgacacattttcaagtgatacaactgagtctcgaggggcgtgtgttccccagctgatcatgtcagcctcatgccccaggcctcgtctttcatggaccaggtcttgttcaagcagcgagtgttgggtcctctgcttcctgagctgtcccctggagaaggtcccgaggatgctgtcaggagatggaagagtcatgtggggtgggaacctggggtgtggttccagaaatgtttttggcaacaggagagacaggattgggccaacaaggactcagatgagttttattgactcattcctctggttgatacggagccatgtcatgtgccacgacctggggtgggcacagggaggctgcagttccctacgtgaacctgccttgggcctcatctgctcctagcccagcagagagagttgacccctcctgaactggccactccccagtgctcctgtgcagggataggaagtgccccagggtgagaacgtgcccagccacatcatctttatctcctgggattttcattagggcaaagatctcagcagccagctcctggtagctgatgaggatcagagcgtttgttcccccatgaaaggggaaatacttaggtaatcattccaggtgtgttcagtagttccaggactcagggactcaggccagtcaccctgtgaccgcaggttgctttcccaccctgggcaatgcagtgcagcatgggaaaggaataagggggcaacaaggtgcacagacctcagagatggcttccttgtttatggggctctcacagatacccatccaactcctctagtcagcactagatcatgggatcctaaaataaaccttggaaaaat

SEQ ID NO: 9849 - DNA, 1512 bp, Artificial Sequence
  derived and/or modified sequence
atggccctgagagccaaggccgaggtgtgcgtggccgccccctggctgagcctgcagagagccagagccctgggcaccagagccgccagagcccccagaaccgtgctgcccttcgaggccatgccccagcaccccggcaacagatggctgagactgctgcagatctggagagagcagggctacgagcacctgcacctggagatgcaccagaccttccaggagctgggccccatcttcagatacaacctgggcggccccagaatggtgtgcgtgatgctgcccgaggacgtggagaagctgcagcaggtggacagcctgcacccctgcagaatgatcctggagccctgggtggcctacagacagcacagaggccacaagtgcggcgtgttcctgctgaacggccccgagtggagattcaacagactgagactgaaccccgacgtgctgagccccaaggccgtgcagagattcctgcccatggtggacgccgtggccagagacttcagccaggccctgaagaagaaggtgctgcagaacgccagaggcagcctgaccctggacgtgcagcccagcatcttccactacaccatcgaggccagcaacctggccctgttcggcgagagactgggcctggtgggccacagccccagcagcgccagcctgaacttcctgcacgccctggaggtgatgttcaagagcaccgtgcagctgatgttcatgcccagaagcctgagcagatggatcagccccaaggtgtggaaggagcacttcgaggcctgggactgcatcttccagtacggcgacaactgcatccagaagatctaccaggagctggccttcaacagaccccagcactacaccggcatcgtggccgagctgctgctgaaggccgagctgagcctggaggccatcaaggccaacagcatggagctgaccgccggcagcgtggacaccaccgccttccccctgctgatgaccctgttcgagctggccagaaaccccgacgtgcagcagatcctgagacaggagagcctggccgccgccgccagcatcagcgagcacccccagaaggccaccaccgagctgcccctgctgagagccgccctgaaggagaccctgagactgtaccccgtgggcctgttcctggagagagtggtgagcagcgacctggtgctgcagaactaccacatccccgccggcaccctggtgcaggtgttcctgtacagcctgggcagaaacgccgccctgttccccagacccgagagatacaacccccagagatggctggacatcagaggcagcggcagaaacttccaccacgtgcccttcggcttcggcatgagacagtgcctgggcagaagactggccgaggccgagatgctgctgctgctgcaccacgtgctgaagcacttcctggtggagaccctgacccaggaggacatcaagatggtgtacagcttcatcctgagacccggcaccagccccctgctgaccttcagagccatcaactag

SEQ ID NO: 9850 - protein, 484 aa, Artificial Sequence
  derived and/or modified sequence
MLFPISMSATEFLLASVIFCLVFWVIRASRPQVPKGLKNPPGPWGWPLIGHMLTLGKNPHLALSRMSQQYGDVLQIRIGSTPVVVLSGLDTIRQALVRQGDDFKGRPDLYTFTLISNGQSMSFSPDSGPVWAARRRLAQNGLKSFSIASDPASSTSCYLEEHVSKEAEVLISTLQELMAGPGHFNPYRYVVVSVTNVICAICFGRRYDHNHQELLSLVNLNAFKDLNEKFYSFMQKMVKEHYKTFEKGHIRDITDSLIEHCQEKQLDENANVQLSDEKIINIVLDLFGAGFDTVTTAISWSLMYLVMNPRVQRKIQEELDTVIGRSRRPRLSDRSHLPYMEAFILETFRHSSFVPFTIPHSTTRDTSLKGFYIPKGRCVFVNQWQINHDQKLWVNPSEFLPERFLTPDGAIDKVLSEKVIIFGMGKRKCIGETIARWEVFLFLAILLQRVEFSVPLGVKVDMTPIYGLTMKHACCEHFQMQLRS

SEQ ID NO: 9851 - protein, 512 aa, Artificial Sequence [sequence omitted]

SEQ ID NO: 9852 - protein, 483 aa, Artificial Sequence
  derived and/or modified sequence
MLFPISMSATEFLLASVIFCLVFWVIRASRPQVPKGLKNPPGPWGWPLIGHMLTLGKNPHLALSRMSQQYGDVLQIRIGSTPVVVLSGLDTIRQALVRQGDDFKGRPDLYTFTLISNGQSMSFSPDSGPVWAARRRLAQNGLKSFSIASDPASSTSCYLEEHVSKEAEVLISTLQELMAGPGHFNPYRYVVVSVTNVICAICFGRRYDHNHQELLSLVNLNNNFGEVVGSGNPADFIPILRYLPNPSLNAFKDLNEKFYSFMQKMVKEHYKTFEKGHIRDITDSLIEHCQEKQLDENANVQLSDEKIINIVLDLFGAGFDTVTTAISWSLMYLVMNPRVQRKIQEELDTVIGRSRRPRLSDRSHLPYMEAFILETFRHSSFVPFTIPHRKLWVNPSEFLPERFLTPDGAIDKVLSEKVIIFGMGKRKCIGETIARWEVFLFLAILLQRVEFSVPLGVKVDMTPIYGLTMKHACCEHFQMQLRS

SEQ ID NO: 9853 - DNA, 1455 bp, Artificial Sequence
  derived and/or modified sequence
atgttattccctatcagtatgtctgcaaccgagttcttacttgcctctgtgatcttttgtctggtcttttgggtcatcagagcgtccaggcctcaggtgcctaagggactcaaaaacccgcctggcccgtggggctggccactgatcggccacatgcttacgctgggtaaaaatccacacctcgccctcagccggatgagccagcagtatggagacgtcctgcagatcaggatcggctccactccagttgtggtcctcagcgggcttgacaccatccgacaagctctggttagacagggggacgatttcaagggacgtccggatctgtacaccttcacccttatctccaacggccagtccatgtctttcagcccggattcaggtcctgtttgggcagccaggcggcgactggcgcagaacggccttaagtctttttctatcgccagcgatccagcctcttcaacaagctgttacttggaagagcatgtgagcaaagaggccgaagtgttgataagtaccctgcaggagctgatggccgggcccggacatttcaatccatacaggtatgtggtcgtgtccgtgaccaatgttatttgcgccatctgttttggacgacggtacgaccataatcaccaggaattactaagccttgtgaacctgaatgctttcaaagatctcaacgaaaaattctattccttcatgcaaaaaatggtcaaagagcattataagacatttgagaaaggccacatcagggacattactgacagcctcattgagcattgccaagaaaagcaactcgatgaaaatgctaacgttcaactgagtgacgagaaaatcattaatatcgtgctggacctctttggtgctggcttcgacaccgtcactaccgcaatatcctggagcttaatgtaccttgtgatgaacccgagggtgcagaggaagatccaggaagagctggataccgtcatcggcagaagtagaagacccagactctccgaccgttcgcatctaccctacatggaggcattcattctcgaaacgtttcgccacagcagcttcgtgccatttacaattccgcactctacaacacgagatactagtctcaagggcttctatattccgaagggacgatgtgtattcgtaaaccagtggcagataaaccatgaccagaagctctgggttaacccgagcgaattcctgccagaacggtttcttacacccgacggcgccattgataaagtgcttagtgaaaaagtaatcatctttggcatgggaaagagaaaatgcattggcgagacaatcgctcgatgggaggtattccttttcctcgcgatcctactgcagcgggttgagttttctgtgccactcggagtaaaagtggacatgacccccatctatggcctgacaatgaaacacgcttgctgcgagcattttcagatgcagctgcggagttag

SEQ ID NO: 9854 - DNA, 1539 bp, Artificial Sequence
  derived and/or modified sequence
atgttgttcccaatttcgatgtctgcaaccgagtttctgctggcttctgtcatattctgtctggtgttctgggtcataagggcaagcaggccccaggttccaaaaggcctgaaaaaccccccagggccttggggctggcccctcatcggacacatgttaactcttggtaaaaaccctcatctcgccctaagcagaatgagccagcagtacggcgatgttttacagatcaggataggctccaccccagtggtggtactctccggacttgacactatcaggcaggccctcgtgcgacagggcgacgatttcaaagggagaccagacttatatactttcaccctgattagtaatggccaatctatgtcattctcccctgactctggtcctgtatgggcagccaggcgaagactggctcagaatggtctgaagtcattcagtatcgcgtccgatcctgcctcctccacttcctgctatttagaggagcacgtaagcaaggaggccgaggtcctgattagcactctgcaggagctaatggccggacctggtcactttaatccttaccgatacgtcgtcgtcagcgttaccaatgtgatctgcgcaatatgcttcggacgccggtacgatcacaaccatcaagagttgttgtccctggtgaacctcaacaataacttcggtgaagtggtggggtccggcaacccagccgacttcattccaattctccgatacctgcccaatccaagtctgaatgccttcaaggatctcaacgaaaagttctattctttcatgcagaagatggtgaaggagcactataaaacatttgaaaaagggcatatcagagatataacggatagcctgatcgaacattgtcaggaaaagcagctggatgagaatgcgaacgtccagctgagcgacgagaagattattaatatcgtgttagacctctttggggccggtttcgatacagtgacaactgcgatttcatggtccctgatgtatctggtgatgaacccccgcgttcagcgtaaaatccaagaggaactggacacagttataggccgctcacgcaggccacgtctatcagaccgatcccacctaccctatatggaagctttcatactggagactttcagacacagctcgtttgtcccatttaccatcccccactcaacaacccgcgacacctccctgaagggcttttatatccctaaaggccgttgcgtgtttgtgaaccagtggcaaatcaatcacgaccagaagctctgggtaaatcctagcgaattcctgccagagaggttcctgacccctgatggcgccatcgacaaagttttgagcgagaaagttataatcttcgggatgggaaagcgcaagtgtattggagaaacaatagcccgatgggaagtcttcctcttcctggccatcctgctccagcgggttgagtttagcgtgcctctgggcgtcaaggtggatatgactcctatctacggacttactatgaaacacgcctgctgcgaacacttccaaatgcagctccgaagttag

SEQ ID NO: 9855 - DNA, 1539 bp, Artificial Sequence
  derived and/or modified sequence
atgctgttcccaatcagcatgtcagcaactgaatttctgttagcgtcggttatcttctgtcttgtgttctgggtgatacgagcgtcccggccacaagtccctaaaggcttgaagaacccgcccggcccctgggggtggcccctcataggccacatgctgactcttgggaagaatccccatctggcattaagtcgcatgagtcagcagtacggcgacgttcttcaaataaggataggttcgaccccagttgtggttctcagtgggttggatacaatacgccaggccttagtgcgacaaggagatgactttaaaggccggcccgacctgtatacatttactctgattagcaatgggcagtctatgtccttttcacccgacagcggacctgtatgggctgcccggagaaggttagctcaaaacggccttaagtcattttctattgcttccgatccagccagcagtacttcttgctatctggaagaacacgtgagcaaagaggccgaggtgttgattagcacactgcaggaactgatggccggtcctggccattttaacccatataggtacgtagtagtgagcgttacaaacgtgatttgtgcgatttgcttcgggagacggtacgaccataatcatcaggagttgttgagcttggtcaacttgaataacaacttcggggaagtggtgggctctggaaatcctgccgacttcatccctattctgagatacctgccaaacccatccctgaatgcctttaaagacctgaatgagaaattctattctttcatgcagaagatggtgaaggagcattataaaacctttgaaaagggccatattagggatattaccgattcactgattgaacactgccaggaaaaacagctcgacgagaacgccaatgtccagttaagtgatgagaaaattatcaatatcgttctagatttgttcggggcagggtttgacactgtcaccacagctatctcttggagcctgatgtacctggtcatgaacccccgcgtgcagagaaagatccaggaggagctcgacactgtcattgggcgctctagaaggccacgcctcagcgatagatctcacctgccgtatatggaagccttcattttggaaactttccggcacagctcgttcgtgccttttaccatccctcactcgaccacccgggacacatccttgaagggattttatattcccaaaggacgctgcgtatttgtgaaccagtggcagataaatcatgaccagaaattgtgggtgaacccgtccgagttcctgcccgagagatttctgacccccgatggcgccatagacaaggtactgtctgaaaaggttataatcttcggcatgggaaagcgcaagtgtataggggaaaccatagcccgttgggaggtcttccttttcctcgctatcctgctgcagcgcgtagagttcagcgtgccgctgggagtaaaggtggatatgacgcccatttacggcctgacaatgaaacacgcctgttgtgagcacttccagatgcaattgagatcctag

SEQ ID NO: 9856 - DNA, 1452 bp, Artificial Sequence
  derived and/or modified sequence
atgctgtttcccatctccatgagcgcgaccgaatttctcctggcatctgtgatcttctgtctggtgttctgggtcattagggcaagccggccacaagtgcccaaaggactgaagaaccctccagggccgtggggttggccactcattggccatatgctgactttaggtaaaaatcctcatctcgcactgtctagaatgtctcagcagtatggagatgttttacagatcaggatcggaagtacacccgtggtcgtgctttctggcctcgatacgattaggcaggccctggtgaggcagggggatgattttaaaggcaggccagatctatataccttcaccttgatttctaatgggcagtctatgtccttctcgcctgattcaggccccgtgtgggctgcacggcggcgcttggctcagaatggtcttaagagcttctcgattgcttcagacccagcctcgagcaccagttgctatctggaggaacatgtttctaaggaagcggaagtcctgatctccaccctgcaagagcttatggcaggcccagggcacttcaatccttacagatacgtggtggtcagtgtaaccaacgtcatatgcgccatatgtttcggcagaagatatgaccacaaccaccaggagctgctgtccctcgtgaatcttaataacaattttggggaagtggttggcagcggaaaccccgccgatttcattccaattctccgctacctccctaaccccagcttgaatgcttttaaagatctgaatgaaaagttttactcatttatgcaaaagatggtgaaagaacactataaaacgttcgagaaagggcacattcgggatatcaccgatagtctgatcgagcactgtcaggagaagcagctggatgagaacgctaacgtacagctctcagacgagaaaattataaacattgtgctggatctgtttggtgcaggattcgacacagtcacgacagcgatcagttggtcccttatgtacctggtgatgaatcccagggtccaacggaagatccaggaagaactggatacagtgataggacgctcccgcagaccgagactttccgacagaagtcatcttccttacatggaggcattcattcttgaaacctttaggcacagttctttcgtgccgttcacaataccccacagaaagctctgggtcaatcctagtgaatttctcccagagcgcttcttaactcctgacggcgccatcgacaaggttctatctgagaaagtcatcattttcggtatgggtaagcgtaagtgcatcggtgagaccattgcccgatgggaggtgttcctgtttttggccatcctactgcagcgcgtcgagttctcagtgccattgggcgtgaaggtggacatgacaccgatctatggccttacaatgaaacacgcatgctgcgagcactttcagatgcaactcagatcgtag

SEQ ID NO: 9857 - DNA, 1455 bp, Artificial Sequence
  derived and/or modified sequence
atgctgttccccatctccatgtctgccacagagttcctgctggccagcgtcatcttctgcctggtgttctgggtgatccgggccagccggccccaggtgcccaagggcctgaagaaccccccaggcccctggggctggcccctgattggccacatgctgaccctgggcaagaacccccacctggccctgagcaggatgagccagcagtatggagatgtgctgcagatccgcatcggcagcacccctgtggtggtgctgagcggcctggacaccatccggcaggccctggtgcggcagggagatgacttcaagggccgcccagacctgtacaccttcaccctcatcagcaatggccagagcatgtccttctccccagattctggccctgtgtgggccgcccggcggcggctggcccagaatggcctgaagagcttcagcatcgccagtgaccctgccagcagcaccagctgctacctggaggagcacgtgtccaaggaggccgaggtgctgatcagcaccctgcaggagctgatggccggccctggccacttcaacccctaccgctacgtggtggtgtctgtgaccaacgtcatctgtgccatctgctttggaagaagatatgaccacaaccaccaggagctgctgagcctggtgaacctgaatgccttcaaggacctgaatgagaagttctacagcttcatgcagaagatggtgaaggagcactacaagacctttgagaagggccacatccgggacatcacagacagcctcatcgagcactgccaggagaagcagctggatgaaaatgccaacgtgcagctgagtgatgagaagatcatcaacatcgtgctggacctgtttggagctggctttgacacagtgaccacagccatctcctggagcctgatgtacctggtgatgaacccccgggtgcagaggaagatccaggaggagctggacacagtgattggccgcagcagaagaccccggctgagtgacaggagccacctgccctacatggaggccttcatcctggagaccttccgccacagcagctttgtgcccttcaccatcccccacagcaccacccgggacaccagcctgaagggcttctacatccccaagggccgctgtgtgtttgtgaaccagtggcagatcaaccacgaccagaagctgtgggtgaaccccagcgagttcctgcctgagcgcttcctgaccccagatggagccatcgacaaggtgctgtctgagaaggtgatcatcttcggcatgggcaagaggaagtgcatcggggagaccatcgcccgctgggaggtgttcctgttcctggccatcctgctgcagagggtggagttctctgtgcccctgggcgtgaaggtggacatgacccccatctacggcctgaccatgaagcacgcctgctgtgagcacttccagatgcagctgcggagctag

SEQ ID NO: 9858 - DNA, 1539 bp, Artificial Sequence
  derived and/or modified sequence
atgctgttccccatctccatgtctgccacagagttcctgctggccagcgtcatcttctgcctggtgttctgggtgatccgggccagccggccccaggtgcccaagggcctgaagaaccccccaggcccctggggctggcccctgattggccacatgctgaccctgggcaagaacccccacctggccctgagcaggatgagccagcagtatggagatgtgctgcagatccgcatcggcagcacccctgtggtggtgctgagcggcctggacaccatccggcaggccctggtgcggcagggagatgacttcaagggccgcccagacctgtacaccttcaccctcatcagcaatggccagagcatgtccttctccccagattctggccctgtgtgggccgcccggcggcggctggcccagaatggcctgaagagcttcagcatcgccagtgaccctgccagcagcaccagctgctacctggaggagcacgtgtccaaggaggccgaggtgctgatcagcaccctgcaggagctgatggccggccctggccacttcaacccctaccgctacgtggtggtgtctgtgaccaacgtcatctgtgccatctgctttggaagaagatatgaccacaaccaccaggagctgctgagcctggtgaacctgaacaacaactttggagaggtggtgggcagcggcaacccagctgacttcatccccatcctgcgctacctgcccaaccccagcctgaatgccttcaaggacctgaatgagaagttctacagcttcatgcagaagatggtgaaggagcactacaagacctttgagaagggccacatccgggacatcacagacagcctcatcgagcactgccaggagaagcagctggatgaaaatgccaacgtgcagctgagtgatgagaagatcatcaacatcgtgctggacctgtttggagctggctttgacacagtgaccacagccatctcctggagcctgatgtacctggtgatgaacccccgggtgcagaggaagatccaggaggagctggacacagtgattggccgcagcagaagaccccggctgagtgacaggagccacctgccctacatggaggccttcatcctggagaccttccgccacagcagctttgtgcccttcaccatcccccacagcaccacccgggacaccagcctgaagggcttctacatccccaagggccgctgtgtgtttgtgaaccagtggcagatcaaccacgaccagaagctgtgggtgaaccccagcgagttcctgcctgagcgcttcctgaccccagatggagccatcgacaaggtgctgtctgagaaggtgatcatcttcggcatgggcaagaggaagtgcatcggggagaccatcgcccgctgggaggtgttcctgttcctggccatcctgctgcagagggtggagttctctgtgcccctgggcgtgaaggtggacatgacccccatctacggcctgaccatgaagcacgcctgctgtgagcacttccagatgcagctgcggagctag

SEQ ID NO: 9859 - DNA, 1452 bp, Artificial Sequence
  derived and/or modified sequence
atgctgttccccatctccatgtctgccacagagttcctgctggccagcgtcatcttctgcctggtgttctgggtgatccgggccagccggccccaggtgcccaagggcctgaagaaccccccaggcccctggggctggcccctgattggccacatgctgaccctgggcaagaacccccacctggccctgagcaggatgagccagcagtatggagatgtgctgcagatccgcatcggcagcacccctgtggtggtgctgagcggcctggacaccatccggcaggccctggtgcggcagggagatgacttcaagggccgcccagacctgtacaccttcaccctcatcagcaatggccagagcatgtccttctccccagattctggccctgtgtgggccgcccggcggcggctggcccagaatggcctgaagagcttcagcatcgccagtgaccctgccagcagcaccagctgctacctggaggagcacgtgtccaaggaggccgaggtgctgatcagcaccctgcaggagctgatggccggccctggccacttcaacccctaccgctacgtggtggtgtctgtgaccaacgtcatctgtgccatctgctttggaagaagatatgaccacaaccaccaggagctgctgagcctggtgaacctgaacaacaactttggagaggtggtgggcagcggcaacccagctgacttcatccccatcctgcgctacctgcccaaccccagcctgaatgccttcaaggacctgaatgagaagttctacagcttcatgcagaagatggtgaaggagcactacaagacctttgagaagggccacatccgggacatcacagacagcctcatcgagcactgccaggagaagcagctggatgaaaatgccaacgtgcagctgagtgatgagaagatcatcaacatcgtgctggacctgtttggagctggctttgacacagtgaccacagccatctcctggagcctgatgtacctggtgatgaacccccgggtgcagaggaagatccaggaggagctggacacagtgattggccgcagcagaagaccccggctgagtgacaggagccacctgccctacatggaggccttcatcctggagaccttccgccacagcagctttgtgcccttcaccatcccccacaggaagctgtgggtgaaccccagcgagttcctgcctgagcgcttcctgaccccagatggagccatcgacaaggtgctgtctgagaaggtgatcatcttcggcatgggcaagaggaaatgtattggagagaccatcgcccgctgggaggtgttcctgttcctggccatcctgctgcagagggtggagttctctgtgcccctgggcgtgaaggtggacatgacccccatctacggcctgaccatgaagcacgcctgctgtgagcacttccagatgcagctgcggagctag

SEQ ID NO: 9860 - DNA, 1455 bp, Artificial Sequence
  derived and/or modified sequence
atgctgttccccatcagcatgagcgccaccgagttcctgctggcctctgtcattttctgccttgtcttttgggttattagagcctccagacctcaagtgccaaaaggcctgaagaaccctccaggcccatggggctggccattgatcggccacatgcttacgttgggaaaaaatcctcacctcgctctctctcggatgtcccagcaatatggagacgtactgcaaatccggataggatccacccccgtggtagtgctgtcggggctagacaccattagacaggccctcgttcgacagggggacgatttcaaaggcaggccagatctgtacaccttcacgttaatttctaacggtcagtcaatgtcctttagtccagattccggccctgtctgggctgcgagacgtagactggcgcagaacggattgaagagtttctccattgcctcagatcccgcatcctcaacatcatgttatcttgaggaacatgtgtctaaggaggccgaggtgctcatttctaccctccaagaactcatggctggtccaggacacttcaacccttacagatacgtagttgtatctgtgaccaatgtgatctgtgcaatatgtttcggacgccggtacgatcacaatcaccaggagttgctgtccttggtcaacctgaacgcctttaaagacttgaacgaaaagttttactcttttatgcaaaaaatggtgaaagaacattataagaccttcgaaaagggccacatccgcgatatcaccgatagcctgatcgagcattgtcaggagaagcagctcgatgaaaatgcaaatgttcaactgtccgacgagaagattattaatatcgttctcgacctgttcggtgcagggttcgacaccgtgacaactgcaatttcatggtcattaatgtatctggtcatgaatccccgagtccaacgtaaaattcaggaagagctggacactgtgatcggacgctcccggcgtccacggttgtccgatagaagtcaccttccgtacatggaggctttcattttggaaaccttccgccactcttcctttgtccccttcaccatccctcattcgacaacacgcgatacttctttgaaagggttttacattcccaagggtcgttgtgtgtttgtcaaccagtggcagatcaaccatgatcaaaagctttgggtaaaccctagcgagttccttccggaacgatttcttacacccgatggagctatagataaggtgctatctgagaaagtaatcatctttggaatgggcaagagaaaatgcataggtgaaacaattgcacgatgggaggtatttctgtttcttgccatcctgttacagcgggtggagttttctgttccactcggtgtcaaggtggatatgacgcctatttatggcctgacaatgaagcatgcttgttgtgaacactttcaaatgcagctgaggtcatag

SEQ ID NO: 9861 - DNA, 1539 bp, Artificial Sequence
  derived and/or modified sequence
atgctgttccccatcagcatgagcgccaccgagttcctgctggcctccgtaatattctgcctggtcttctgggtgatccgtgctagccgaccacaggttcccaagggactgaagaatcctcccgggccatggggctggcccctgatcgggcatatgctgacacttggcaaaaacccccacctggccttatcccggatgagccagcagtacggcgatgttcttcagattcgcatagggagcacacccgttgtagtgttatctggcctggatacgatccgccaggcactcgttaggcagggagacgacttcaaagggagacccgatctctatactttcaccttaattagcaacggccagagcatgtcattctccccagacagcggacctgtctgggctgccagaaggcggctggcacagaacggacttaaatcttttagcattgcctcggatcccgccagctctacctcatgctatctggaagaacacgtgtctaaagaggcggaggtactgatctctacgttacaggagcttatggctggacctggccattttaacccgtacaggtacgtggtggtgagcgtcactaatgttatctgtgccatctgttttggtagaagatacgatcacaaccatcaagaattgttgtcccttgttaatctcaacaacaacttcggcgaggtcgtcggatcaggcaacccagcggatttcataccaatactgaggtacctgcccaaccccagtctgaacgcgttcaaggatctgaatgagaagttctacagtttcatgcaaaagatggtgaaggagcattataaaaccttcgaaaagggtcacatccgggatatcaccgacagcctgatcgaacactgccaagaaaagcagctggacgagaatgcaaatgtacaactaagcgatgagaagattatcaacattgtgctcgatctgttcggcgcagggtttgatactgtgacaacagccatcagctggagcctgatgtatctggttatgaatccgagggtccagcgcaagattcaagaagagttagataccgtcatcggccgaagcaggcgcccccggctaagcgataggtctcacctcccatacatggaggcttttatcctcgagacattcaggcactcttctttcgtgccatttactatcccccattcgactaccagggacaccagcctcaaagggttctacattccgaaaggccgatgtgtgtttgtgaatcagtggcaaatcaatcacgaccaaaagctgtgggtcaatcctagcgagtttcttccagagaggtttttgacaccagacggtgcgattgataaagtgctgtctgagaaggtgattatcttcgggatgggaaaaagaaaatgtattggggagaccatcgctcgctgggaagtgttcctgttcttagctatcctgctgcaacgcgttgaattctcagtgcctctaggcgtgaaagtagatatgactcctatctatgggttgacaatgaaacacgcatgctgtgaacactttcaaatgcagcttagatcttag

SEQ ID NO: 9862 - DNA, 1539 bp, Artificial Sequence
  derived and/or modified sequence
atgctgttccccatcagcatgagcgccaccgagttcctgctggcctcagtcattttctgcctcgtgttttgggtgatacgggcctcccgccctcaggtccccaaggggcttaaaaacccaccggggccctggggttggcccctgattggccatatgctgaccctgggaaaaaatcctcaccttgctctcagtcgcatgtcacagcaatatggcgatgtcttgcagattcgcatcggatcgacccccgtcgtggtgctatctggactggacactatacggcaggcgcttgtgaggcagggcgacgactttaaaggtcgtcctgacctctatacattcacactgatctcaaatggccagtccatgtcattttcacccgacagcggccccgtttgggctgcccggcgccgtttagcgcaaaatggccttaagagcttcagcattgctagcgaccccgcaagttctactagttgttacctggaggagcacgtgagcaaggaggcagaagttcttatttcaaccctgcaagaactaatggccggcccagggcacttcaatccttaccgctacgtggtggtgtccgttacaaacgtaatctgtgccatttgcttcgggcggcgttatgatcacaaccatcaggagttgttgtccctcgtgaatctgaacaacaatttcggggaggtggtcggctcaggaaacccagccgattttatcccaatcctgcgctacttaccaaacccttccctgaatgctttcaaagatctcaatgaaaaattttacagtttcatgcagaagatggtgaaggagcactataaaacttttgagaagggtcatatccgtgatatcaccgactccctgattgagcattgccaggagaagcagcttgacgagaacgctaacgtgcaactgagcgatgaaaagatcatcaacatagttttggatttattcggggctggatttgacacggtgacgaccgccatctcttggtcactgatgtatctcgtgatgaatccccgagtacagagaaaaatccaggaagagctggacactgtcattggcagatccagacggcccaggttgagtgatcgatcccatcttccatacatggaggcgttcatcctggagacctttaggcattcttccttcgtgcctttcaccatcccacattctactacgagagacacatcgttaaaaggtttctatattcccaaagggaggtgtgtttttgttaatcagtggcaaatcaaccacgaccagaaattgtgggtgaatccttccgagttcctcccagagagattcctgacacctgacggggctatcgataaggtgctcagcgagaaggtgatcatcttcggtatggggaagagaaagtgcattggggaaaccattgcaagatgggaggtcttcttatttcttgcaatcttgctgcagagggttgaatttagcgtaccgctcggtgtcaaggtggatatgactcccatttatggcttgacaatgaaacacgcctgctgcgagcacttccaaatgcaattgcgaagttag

SEQ ID NO: 9863 - DNA, 1452 bp, Artificial Sequence
  derived and/or modified sequence
atgctgttccccatcagcatgagcgccaccgagttcctgctggccagtgtgatcttctgtctggtgttctgggtgatccgggcctcccgacctcaagtccccaaaggactcaaaaaccctcctggcccctggggctggcccttaattggacatatgctgacactcggcaagaacccccacctagccctttcccgcatgagccagcagtacggtgacgtcctgcagatccgaataggtagtacacctgtggtcgtgctgtctgggctagacaccattcgccaggccctcgttcggcagggggatgattttaagggacgaccagacctctatacgttcaccctcataagtaatggccaatcaatgtctttctcccccgactctggtccagtatgggccgctagaagacgcctggctcagaacgggctgaagtccttctcaatcgccagcgatcccgcatccagcacatcctgttacctggaagaacatgtatccaaagaggccgaagtactgatatccaccctgcaggaactgatggctgggcctgggcacttcaacccttataggtacgtggtagtatctgtgactaatgtgatttgcgctatatgctttggaaggcgttatgatcataaccatcaagaactgctgagtctggtgaacctcaacaacaactttggcgaggtggtggggagtggcaacccggcagattttatcccaattcttcggtacttgcctaatccatctcttaacgcattcaaggacctgaacgagaaattctacagtttcatgcaaaaaatggtgaaagaacactacaaaactttcgagaaaggacacatccgagatatcaccgattccttgatagagcactgtcaagaaaaacagctggacgaaaacgctaatgtgcagttgagcgatgagaagatcatcaacattgtgctggacctgttcggcgccgggttcgacacagtcacaactgcaatttcgtggtcccttatgtatttggtcatgaacccacgcgtacaaaggaaaatccaggaagaactggacacagtcattggtcggtctcgccggcccagactgtcagatagatcacatctgccctacatggaggcctttatactcgaaaccttcaggcacagctcctttgtcccctttaccattccgcatagaaaattgtgggtaaatccctccgagtttctgcctgagcgatttttaacaccagatggcgcgatagacaaggtgctctccgaaaaagtgattatcttcggtatggggaagagaaagtgcattggcgagacgatcgccaggtgggaggtcttcctgttcctcgcaattttactccagcgcgtcgagtttagtgtacccttaggtgtaaaagtagacatgacaccaatctatggcttgaccatgaagcacgcctgctgcgaacacttccaaatgcaactgagatcatag

SEQ ID NO: 9864 - DNA, 1455 bp, Artificial Sequence
  derived and/or modified sequence
atgttgtttcccataagtatgtctgctactgagtttttactagcaagcgttatcttctgtctggtattttgggttataagggcctctagaccacaagtgcctaagggtctgaaaaaccccccagggccttgggggtggcctctgatcgggcatatgctcactctcgggaagaacccgcatctcgccctgtctagaatgtctcaacagtacggggacgtacttcagattaggatcgggtcaactcctgtcgtagtgctcagcggtttagacaccattcggcaggccctggtgcggcaaggagacgacttcaaaggcagacctgacctgtacacttttacacttatttctaatggtcaatcaatgtccttcagccctgatagcggacctgtctgggccgcacgacggaggctggctcagaatggtctgaaatccttctctatcgcaagcgatcctgctagctccacatcgtgctacctggaagagcacgtgagtaaggaggctgaagtgctgattagcacgttgcaagagttaatggccggaccagggcacttcaatccctaccgttatgtggtggtctccgtgactaatgtcatttgtgccatctgttttgggaggaggtacgaccataaccatcaggaactcctgagcttggtcaatctcaatgcctttaaggatctgaacgaaaagttttacagctttatgcaaaagatggtgaaggaacactataagacgttcgaaaagggacacattagagacatcacagatagtctgattgagcattgtcaggagaagcaactggacgagaatgcaaacgtgcagcttagtgatgaaaaaattatcaacatcgtgctggatctgttcggggcaggctttgataccgtcaccacagccatttcatggtccctcatgtatttggtgatgaatccaagggtgcagcgaaagatccaggaagagctggacactgtcattggtaggagccgtagacccagactcagtgaccgcagtcatcttccctatatggaagcctttatcctggaaacctttaggcactcctccttcgtgccgttcactatccctcactccacgaccagagatacctctttgaaaggtttttatataccaaagggacgttgcgtattcgtcaaccagtggcagattaaccatgaccagaagctgtgggtgaacccttcagagtttctgcccgaaaggtttttgactccggacggggctattgataaggtcctctctgaaaaggtgatcatctttgggatgggcaaacgaaaatgtattggtgaaacaatcgctaggtgggaagtgttcctcttccttgccatcttgttgcaaagagttgagttctccgtgcccctcggagtaaaggttgatatgacaccaatctatgggctgaccatgaaacatgcatgttgcgagcacttccagatgcaactgcgcagctag

SEQ ID NO: 9865 - DNA, 1539 bp, Artificial Sequence
  derived and/or modified sequence
atgctcttcccaatctcaatgtccgctactgaatttttgctggcatcagtcattttctgcctcgtattttgggtgatcagggctagccgcccacaggtgcctaaggggctgaaaaatccccctggtccctggggatggccgctgattggccatatgttgacactgggcaagaatccccacctagctctctctcggatgtcgcagcagtacggtgatgttcttcaaatccgaatcggctctactcctgtggtggttctcagcgggctggacaccatacgtcaggccctggtccgtcagggtgatgatttcaagggcagacccgacctgtacactttcaccctgatctccaacggtcagtctatgtctttctccccagactccgggccagtttgggcagcacgaagacgactggctcagaacggcctaaagtctttttcaatcgcgtcagatcccgcatcctccacctcctgttacctggaggaacacgtgtcaaaggaggccgaagtgctcatttccaccctacaagagctcatggctgggccaggtcactttaatccctatcggtacgttgtggtatcagtgactaacgtcatctgtgccatctgttttgggaggcgctacgaccataatcaccaggagctcttgtcgctggttaatctcaacaataacttcggtgaggtagttgggagtggaaatccagcagacttcattcccatcttacggtatctgcccaatccttctcttaacgcattcaaagacctcaatgagaagttttactcgttcatgcaaaagatggtgaaggaacactacaagaccttcgaaaagggccacatccgggacataaccgactcactcatcgaacactgtcaggagaaacaattagacgagaatgcaaatgtacaactatcagacgagaagataattaacatagttctggatttgttcggcgcaggctttgacacggttaccaccgcaattagttggtccttaatgtatcttgtgatgaatcctcgggtccaacgaaagattcaagaggagctggatactgtgatcggcagaagtagacgaccaaggctcagcgacaggtcccatcttccctatatggaggcttttatattggaaacattcaggcattcatctttcgtgccctttacaattcctcattccaccactcgggatacaagcctaaaaggcttctatattcccaaaggcagatgcgtttttgtgaatcagtggcagatcaaccatgaccaaaagctgtgggtcaatcctagcgagtttctgcccgaacgttttttgacgcccgacggtgccatcgataaagttcttagcgaaaaagttatcatattcggaatgggcaaaaggaagtgtattggcgagacaatcgcacggtgggaggtttttctcttccttgcaatcttgctccagagggtcgagttttctgtgcctcttggtgtcaaggtggacatgacaccaatttatgggttgacaatgaaacacgcctgctgcgagcatttccagatgcagctcaggtcatag

SEQ ID NO: 9866 - DNA, 1539 bp, Artificial Sequence
  derived and/or modified sequence
atgcttttccccatcagcatgagcgctaccgagttcctgctggcaagcgtaattttttgtctggtgttctgggttatccgagcttccaggccacaggttcccaagggtctgaagaatccaccagggccatggggatggccactgataggtcacatgcttacactcggcaaaaacccccacctagccctgtcaaggatgtctcagcagtatggagatgttctccagatccgcataggatctacccccgttgtggtgctctccgggttagacacgatccggcaagcccttgtacggcaaggggacgactttaaaggtaggccagatctctatacctttaccttgatctcaaatggacagtctatgagcttctctccggacagtggcccagtatgggcagctaggcgaagactggcccagaatggtctgaagtccttttccatagcttctgatcctgcctcttcaacaagttgctacctggaggaacatgtgtctaaagaggctgaagtgttgataagtactctccaggagttgatggcgggaccaggtcacttcaatccatatagatacgtcgttgtctcggtgactaatgtgatctgtgccatttgcttcgggagacgctatgatcacaaccaccaagaactcctgagtctcgttaatcttaataacaacttcggtgaggtcgtgggctctggaaacccagcggacttcatccccatcctgcgctacctgcctaatcccagcctgaacgccttcaaggacctgaatgagaagttttattcgttcatgcagaaaatggtcaaagagcattacaaaacctttgaaaagggtcacatccgcgacattaccgactcgttaatagagcactgccaggagaaacaattagacgagaatgcaaacgttcagctgtccgacgaaaagatcattaatattgtactggatcttttcggcgctggttttgataccgtcactacagctatatcctggagcctaatgtacctcgtgatgaatcctcgggtccagcggaaaatccaggaggagctcgacaccgtgatcggaaggtcccgccgtccccgtctgtcggacaggtctcatttgccatacatggaggccttcatacttgagacttttaggcactcatcctttgtcccatttactatccctcacagtacaacacgtgatacctctttgaaggggttctatatccctaagggcagatgtgttttcgtgaaccagtggcagatcaaccacgatcaaaagttgtgggtcaacccttcagaatttctgcctgaacgctttctgacgcccgatggcgctatcgacaaagtccttagcgaaaaggtaattattttcgggatgggcaaacgcaagtgcatcggcgagacaatagcaaggtgggaggtgtttttgttccttgcaattcttctccagagagtggagttctcagtccctctgggcgttaaggtagacatgacacctatttatgggcttacgatgaagcatgcttgctgtgagcacttccagatgcagctgcggtcctag

SEQ ID NO: 9867 - DNA, 1452 bp, Artificial Sequence
  derived and/or modified sequence
atgttgttccctatatctatgagtgcgaccgagttcctgttagcttcagtgattttctgtctagtgttctgggttatcagggcaagccgtccacaggtgccaaaagggttgaagaaccctccgggaccgtggggctggcctttaatcgggcatatgttaacactcggaaaaaatccacacctggccttgagtcgaatgtcccaacagtacggagatgtgctccagatccggattggtagcacccctgtagtggttctgtccggactcgacacgatcaggcaggcgctcgtgcggcagggagatgattttaagggacgcccagacctctacactttcacccttatctcaaatgggcaatccatgtctttcagcccagatagcggccctgtctgggccgctagacggcgactggctcaaaacggtctgaagtcctttagtatcgctagtgatccagcgtctagtacctcctgttacctcgaggagcacgtgtccaaagaggccgaggtcttaatctccacactgcaggaacttatggccggacccggtcacttcaacccctatcgctacgtcgtagttagcgtgacaaatgttatttgcgctatctgcttcggcaggcgctatgaccataatcatcaggagctgctaagtcttgtaaatttgaataacaactttggagaagtcgtcgggtccggcaaccctgcggatttcatacccatcctcagatacttgcccaatcccagcctgaatgcgttcaaggatctgaacgagaagttctattccttcatgcagaagatggtcaaggaacactacaagacattcgagaaggggcacattagagatatcacggattcacttatagaacactgtcaggagaaacaactggacgaaaatgcaaacgtacagcttagtgatgaaaagattattaatattgtgcttgacctgttcggggctggattcgatacggttacgaccgccatcagttggagtctgatgtacctagtgatgaatcccagagtgcagcggaagatccaggaggagctagacaccgtaataggcaggtcccgtcggccacggctctccgatcgaagccacttaccgtatatggaggcttttattttggagacctttaggcattcatccttcgtgccattcacgataccccacaggaagttgtgggtgaacccctcggaattcctgcctgagagatttcttaccccagacggcgctatcgataaggtcttatctgaaaaggtgatcatctttgggatgggcaagcgcaagtgcattggtgaaaccatcgctcggtgggaggtgtttctcttcttagctatacttctgcaacgggtcgaattctcggtcccgttgggggtaaaggtcgatatgacccctatttatgggctcacaatgaagcacgcatgctgcgagcactttcaaatgcagctgcggtcctag

SEQ ID NO: 9868 - DNA, 1455 bp, Artificial Sequence
  derived and/or modified sequence
atgcttttcccaatctccatgtcggccacggagtttcttctggcctctgtcatcttctgtctggtattctgggtaatcagggcctcaagacctcaggtccccaaaggcctgaagaatccaccagggccatggggctggcctctgattgggcacatgctgaccctgggaaagaacccgcacctggcactgtcaaggatgagccagcagtatggggacgtgctgcagatccgaattggctccacacccgtggtggtgctgagcggcctggacaccatccggcaggccctggtgcggcagggcgatgatttcaagggccggcccgacctctacaccttcaccctcatcagtaatggtcagagcatgtccttcagcccagactctggaccagtgtgggctgcccgccggcgcctggcccagaatggcctgaaaagtttctccattgcctctgacccagcctcctcaacctcctgctacctggaagagcatgtgagcaaggaggctgaggtcctgataagcacgttgcaggagctgatggcagggcctgggcactttaacccctacaggtatgtggtggtatcagtgaccaatgtcatctgtgccatttgctttggccggcgctatgaccacaaccaccaagaactgcttagcctagtcaacctgaatgccttcaaggacctgaatgagaagttctacagcttcatgcagaagatggtcaaggagcactacaaaacctttgagaagggccacatccgggacatcacagacagcctgattgagcactgtcaggagaagcagctggatgagaacgccaatgtccagctgtcagatgagaagatcattaacatcgtcttggacctctttggagctgggtttgacacagtcacaactgctatctcctggagcctcatgtatttggtgatgaaccccagggtacagagaaagatccaagaggagctagacacagtgattggcaggtcacggcggccccggctctctgacagatcccatctgccctatatggaggccttcatcctggagaccttccgacactcttccttcgtccccttcaccatcccccacagcacaacaagagacacaagtttgaaaggcttttacatccccaaggggcgttgtgtctttgtaaaccagtggcagatcaaccatgaccagaagctatgggtcaacccatctgagttcctacctgaacggtttctcacccctgatggtgctatcgacaaggtgttaagtgagaaggtgattatctttggcatgggcaagcggaagtgtatcggtgagaccattgcccgctgggaggtctttctcttcctggctatcctgctgcaacgggtggaattcagcgtgccactgggcgtgaaggtggacatgacccccatctatgggctaaccatgaagcatgcctgctgtgagcacttccaaatgcagctgcgctcttag

SEQ ID NO: 9869 - DNA, 2685 bp, Artificial Sequence
  derived and/or modified sequence
atctcagctcgctccagggaaggaggcgtggccacacgtacaagcccgcctataaaggtggcagtgccttcaccctcaccctgaaggtgacagttccttggaaccttccctgatccttgtgatcccaggctccaagagtccacccttcccagctcagctcagtacctcagcagccacctccaagatccctacactgatcatgcttttcccaatctccatgtcggccacggagtttcttctggcctctgtcatcttctgtctggtattctgggtaatcagggcctcaagacctcaggtccccaaaggcctgaagaatccaccagggccatggggctggcctctgattgggcacatgctgaccctgggaaagaacccgcacctggcactgtcaaggatgagccagcagtatggggacgtgctgcagatccgaattggctccacacccgtggtggtgctgagcggcctggacaccatccggcaggccctggtgcggcagggcgatgatttcaagggccggcccgacctctacaccttcaccctcatcagtaatggtcagagcatgtccttcagcccagactctggaccagtgtgggctgcccgccggcgcctggcccagaatggcctgaaaagtttctccattgcctctgacccagcctcctcaacctcctgctacctggaagagcatgtgagcaaggaggctgaggtcctgataagcacgttgcaggagctgatggcagggcctgggcactttaacccctacaggtatgtggtggtatcagtgaccaatgtcatctgtgccatttgctttggccggcgctatgaccacaaccaccaagaactgcttagcctagtcaacctgaataataatttcggggaggtggttggctctggaaacccagctgacttcatccctattcttcgctacctacccaacccttccctgaatgccttcaaggacctgaatgagaagttctacagcttcatgcagaagatggtcaaggagcactacaaaacctttgagaagggccacatccgggacatcacagacagcctgattgagcactgtcaggagaagcagctggatgagaacgccaatgtccagctgtcagatgagaagatcattaacatcgtcttggacctctttggagctgggtttgacacagtcacaactgctatctcctggagcctcatgtatttggtgatgaaccccagggtacagagaaagatccaagaggagctagacacagtgattggcaggtcacggcggccccggctctctgacagatcccatctgccctatatggaggccttcatcctggagaccttccgacactcttccttcgtccccttcaccatcccccacagcacaacaagagacacaagtttgaaaggcttttacatccccaaggggcgttgtgtctttgtaaaccagtggcagatcaaccatgaccagaagctatgggtcaacccatctgagttcctacctgaacggtttctcacccctgatggtgctatcgacaaggtgttaagtgagaaggtgattatctttggcatgggcaagcggaagtgtatcggtgagaccattgcccgctgggaggtctttctcttcctggctatcctgctgcaacgggtggaattcagcgtgccactgggcgtgaaggtggacatgacccccatctatgggctaaccatgaagcatgcctgctgtgagcacttccaaatgcagctgcgctcttaggtgcttgagagccctgaggcctagactctgtctacctggtctggttgggcagccagaccagcaggctggcctatgtggtctaaggttcagcctgaaactcatagacactgatctggctgcagttttgctatctgggctgtgggcaagcctaagggatcctgcctgcccctaccctggacttgcctctgcacaccctccagagacaacaggtaaaacagggccacatagatgctgatggagccttcccaagttgtgcttgagccaggaggcctgctagggttaggaggtccttaggcctctgagaagctctgaagaactctctggaagcccctgggcccagtacctagctggctctgtgagggtgctgactggcttcagcaagttagaactagccaaaccaggaccctgtccaatctttgacaattgggagctgccaagagtgaagggaagagacagcccaggatactggcacagaggtagtctcactgcttgaactaggctgagcaatctgaccctatgggtctaggacacagttcctgggaacatcacattcctctgcccttcctgcaggcaggaacaaacagggctgccttctggccttgtaagacccttattgctgtcctggaggggctggggacttgtgtctgcggggatcagagcgcacagggagtgcacatatccaggcaccaggactagggctggagtgaggggggggtatttcaattaccttctattggtctcccttctctacactcttgtaataaaatgtctatttttaatgtttgtacacaacaatccttctattctagcctgcattgagcttgcatgcttgcataagagcttaagaaccattgatttaatgtaatagggaaaattctaacccaggtatccaaaaatgtgtaagaacaactacctgagctaaataaagatattgttcagaaatccta

SEQ ID NO: 9870 - DNA, 2608 bp, Artificial Sequence
  derived and/or modified sequence
ctcaccctgaaggtgacagttccttggaaccttccctgatccttgtgatcccaggctccaagagtccacccttcccagctcagctcagtacctcagccacctccaagatccctacactgatcatgcttttcccaatctccatgtcggccacggagtttcttctggcctctgtcatcttctgtctggtattctgggtaatcagggcctcaagacctcaggtccccaaaggcctgaagaatccaccagggccatggggctggcctctgattgggcacatgctgaccctgggaaagaacccgcacctggcactgtcaaggatgagccagcagtatggggacgtgctgcagatccgaattggctccacacccgtggtggtgctgagcggcctggacaccatccggcaggccctggtgcggcagggcgatgatttcaagggccggcccgacctctacaccttcaccctcatcagtaatggtcagagcatgtccttcagcccagactctggaccagtgtgggctgcccgccggcgcctggcccagaatggcctgaaaagtttctccattgcctctgacccagcctcctcaacctcctgctacctggaagagcatgtgagcaaggaggctgaggtcctgataagcacgttgcaggagctgatggcagggcctgggcactttaacccctacaggtatgtggtggtatcagtgaccaatgtcatctgtgccatttgctttggccggcgctatgaccacaaccaccaagaactgcttagcctagtcaacctgaataataatttcggggaggtggttggctctggaaacccagctgacttcatccctattcttcgctacctacccaacccttccctgaatgccttcaaggacctgaatgagaagttctacagcttcatgcagaagatggtcaaggagcactacaaaacctttgagaagggccacatccgggacatcacagacagcctgattgagcactgtcaggagaagcagctggatgagaacgccaatgtccagctgtcagatgagaagatcattaacatcgtcttggacctctttggagctgggtttgacacagtcacaactgctatctcctggagcctcatgtatttggtgatgaaccccagggtacagagaaagatccaagaggagctagacacagtgattggcaggtcacggcggccccggctctctgacagatcccatctgccctatatggaggccttcatcctggagaccttccgacactcttccttcgtccccttcaccatcccccacagcacaacaagagacacaagtttgaaaggcttttacatccccaaggggcgttgtgtctttgtaaaccagtggcagatcaaccatgaccagaagctatgggtcaacccatctgagttcctacctgaacggtttctcacccctgatggtgctatcgacaaggtgttaagtgagaaggtgattatctttggcatgggcaagcggaagtgtatcggtgagaccattgcccgctgggaggtctttctcttcctggctatcctgctgcaacgggtggaattcagcgtgccactgggcgtgaaggtggacatgacccccatctatgggctaaccatgaagcatgcctgctgtgagcacttccaaatgcagctgcgctcttaggtgcttgagagccctgaggcctagactctgtctacctggtctggttgggcagccagaccagcaggctggcctatgtggtctaaggttcagcctgaaactcatagacactgatctggctgcagttttgctatctgggctgtgggcaagcctaagggatcctgcctgcccctaccctggacttgcctctgcacaccctccagagacaacaggtaaaacagggccacatagatgctgatggagccttcccaagttgtgcttgagccaggaggcctgctagggttaggaggtccttaggcctctgagaagctctgaagaactctctggaagcccctgggcccagtacctagctggctctgtgagggtgctgactggcttcagcaagttagaactagccaaaccaggaccctgtccaatctttgacaattgggagctgccaagagtgaagggaagagacagcccaggatactggcacagaggtagtctcactgcttgaactaggctgagcaatctgaccctatgggtctaggacacagttcctgggaacatcacattcctctgcccttcctgcaggcaggaacaaacagggctgccttctggccttgtaagacccttattgctgtcctggaggggctggggacttgtgtctgcggggatcagagcgcacagggagtgcacatatccaggcaccaggactagggctggagtgaggggggggtatttcaattaccttctattggtctcccttctctacactcttgtaataaaatgtctatttttaatgtttgtacacaacaatccttctattctagcctgcattgagcttgcatgcttgcataagagcttaagaaccattgatttaatgtaatagggaaaattctaacccaggtatccaaaaatgtgtaagaacaactacctgagctaaataaagatattgttcagaaatccta

SEQ ID NO: 9871 - DNA, 1594 bp, Artificial Sequence
  derived and/or modified sequence
ttgtgatcccaggctccaagagtccacccttcccagctcagctcagtacctcagcagccacctccaagatccctacactgatcatgcttttcccaatctccatgtcggccacggagtttcttctggcctctgtcatcttctgtctggtattctgggtaatcagggcctcaagacctcaggtccccaaaggcctgaagaatccaccagggccatggggctggcctctgattgggcacatgctgaccctgggaaagaacccgcacctggcactgtcaaggatgagccagcagtatggggacgtgctgcagatccgaattggctccacacccgtggtggtgctgagcggcctggacaccatccggcaggccctggtgcggcagggcgatgatttcaagggccggcccgacctctacaccttcaccctcatcagtaatggtcagagcatgtccttcagcccagactctggaccagtgtgggctgcccgccggcgcctggcccagaatggcctgaaaagtttctccattgcctctgacccagcctcctcaacctcctgctacctggaagagcatgtgagcaaggaggctgaggtcctgataagcacgttgcaggagctgatggcagggcctgggcactttaacccctacaggtatgtggtggtatcagtgaccaatgtcatctgtgccatttgctttggccggcgctatgaccacaaccaccaagaactgcttagcctagtcaacctgaataataatttcggggaggtggttggctctggaaacccagctgacttcatccctattcttcgctacctacccaacccttccctgaatgccttcaaggacctgaatgagaagttctacagcttcatgcagaagatggtcaaggagcactacaaaacctttgagaagggccacatccgggacatcacagacagcctgattgagcactgtcaggagaagcagctggatgagaacgccaatgtccagctgtcagatgagaagatcattaacatcgtcttggacctctttggagctgggtttgacacagtcacaactgctatctcctggagcctcatgtatttggtgatgaaccccagggtacagagaaagatccaagaggagctagacacagtgattggcaggtcacggcggccccggctctctgacagatcccatctgccctatatggaggccttcatcctggagaccttccgacactcttccttcgtccccttcaccatcccccacaggaagctatgggtcaacccatctgagttcctacctgaacggtttctcacccctgatggtgctatcgacaaggtgttaagtgagaaggtgattatctttggcatgggcaagcggaagtgtatcggtgagaccattgcccgctgggaggtctttctcttcctggctatcctgctgcaacgggtggaattcagcgtgccactgggcgtgaaggtggacatgacccccatctatgggctaaccatgaagcatgcctgctgtgagcacttccaaatgcagctgcgctcttaggtgcttgagagccctgaggcctagactctgtctacctggtctggttgggcagccagacc

SEQ ID NO: 9872 - DNA, 1455 bp, Artificial Sequence
  derived and/or modified sequence
atgctgttccccatcagcatgagcgccaccgagttcctgctggccagcgtgatcttctgcctggtgttctgggtgatcagagccagcagaccccaggtgcccaagggcctgaagaacccccccggcccctggggctggcccctgatcggccacatgctgaccctgggcaagaacccccacctggccctgagcagaatgagccagcagtacggcgacgtgctgcagatcagaatcggcagcacccccgtggtggtgctgagcggcctggacaccatcagacaggccctggtgagacagggcgacgacttcaagggcagacccgacctgtacaccttcaccctgatcagcaacggccagagcatgagcttcagccccgacagcggccccgtgtgggccgccagaagaagactggcccagaacggcctgaagagcttcagcatcgccagcgaccccgccagcagcaccagctgctacctggaggagcacgtgagcaaggaggccgaggtgctgatcagcaccctgcaggagctgatggccggccccggccacttcaacccctacagatacgtggtggtgagcgtgaccaacgtgatctgcgccatctgcttcggcagaagatacgaccacaaccaccaggagctgctgagcctggtgaacctgaacgccttcaaggacctgaacgagaagttctacagcttcatgcagaagatggtgaaggagcactacaagaccttcgagaagggccacatcagagacatcaccgacagcctgatcgagcactgccaggagaagcagctggacgagaacgccaacgtgcagctgagcgacgagaagatcatcaacatcgtgctggacctgttcggcgccggcttcgacaccgtgaccaccgccatcagctggagcctgatgtacctggtgatgaaccccagagtgcagagaaagatccaggaggagctggacaccgtgatcggcagaagcagaagacccagactgagcgacagaagccacctgccctacatggaggccttcatcctggagaccttcagacacagcagcttcgtgcccttcaccatcccccacagcaccaccagagacaccagcctgaagggcttctacatccccaagggcagatgcgtgttcgtgaaccagtggcagatcaaccacgaccagaagctgtgggtgaaccccagcgagttcctgcccgagagattcctgacccccgacggcgccatcgacaaggtgctgagcgagaaggtgatcatcttcggcatgggcaagagaaagtgcatcggcgagaccatcgccagatgggaggtgttcctgttcctggccatcctgctgcagagagtggagttcagcgtgcccctgggcgtgaaggtggacatgacccccatctacggcctgaccatgaagcacgcctgctgcgagcacttccagatgcagctgagaagctag

SEQ ID NO: 9873 - DNA, 1539 bp, Artificial Sequence
  derived and/or modified sequence
atgctgttccccatcagcatgagcgccaccgagttcctgctggccagcgtgatcttctgcctggtgttctgggtgatcagagccagcagaccccaggtgcccaagggcctgaagaacccccccggcccctggggctggcccctgatcggccacatgctgaccctgggcaagaacccccacctggccctgagcagaatgagccagcagtacggcgacgtgctgcagatcagaatcggcagcacccccgtggtggtgctgagcggcctggacaccatcagacaggccctggtgagacagggcgacgacttcaagggcagacccgacctgtacaccttcaccctgatcagcaacggccagagcatgagcttcagccccgacagcggccccgtgtgggccgccagaagaagactggcccagaacggcctgaagagcttcagcatcgccagcgaccccgccagcagcaccagctgctacctggaggagcacgtgagcaaggaggccgaggtgctgatcagcaccctgcaggagctgatggccggccccggccacttcaacccctacagatacgtggtggtgagcgtgaccaacgtgatctgcgccatctgcttcggcagaagatacgaccacaaccaccaggagctgctgagcctggtgaacctgaacaacaacttcggcgaggtggtgggcagcggcaaccccgccgacttcatccccatcctgagatacctgcccaaccccagcctgaacgccttcaaggacctgaacgagaagttctacagcttcatgcagaagatggtgaaggagcactacaagaccttcgagaagggccacatcagagacatcaccgacagcctgatcgagcactgccaggagaagcagctggacgagaacgccaacgtgcagctgagcgacgagaagatcatcaacatcgtgctggacctgttcggcgccggcttcgacaccgtgaccaccgccatcagctggagcctgatgtacctggtgatgaaccccagagtgcagagaaagatccaggaggagctggacaccgtgatcggcagaagcagaagacccagactgagcgacagaagccacctgccctacatggaggccttcatcctggagaccttcagacacagcagcttcgtgcccttcaccatcccccacagcaccaccagagacaccagcctgaagggcttctacatccccaagggcagatgcgtgttcgtgaaccagtggcagatcaaccacgaccagaagctgtgggtgaaccccagcgagttcctgcccgagagattcctgacccccgacggcgccatcgacaaggtgctgagcgagaaggtgatcatcttcggcatgggcaagagaaagtgcatcggcgagaccatcgccagatgggaggtgttcctgttcctggccatcctgctgcagagagtggagttcagcgtgcccctgggcgtgaaggtggacatgacccccatctacggcctgaccatgaagcacgcctgctgcgagcacttccagatgcagctgagaagctag

SEQ ID NO: 9874 - DNA, 1452 bp, Artificial Sequence
  derived and/or modified sequence
atgctgttccccatcagcatgagcgccaccgagttcctgctggccagcgtgatcttctgcctggtgttctgggtgatcagagccagcagaccccaggtgcccaagggcctgaagaacccccccggcccctggggctggcccctgatcggccacatgctgaccctgggcaagaacccccacctggccctgagcagaatgagccagcagtacggcgacgtgctgcagatcagaatcggcagcacccccgtggtggtgctgagcggcctggacaccatcagacaggccctggtgagacagggcgacgacttcaagggcagacccgacctgtacaccttcaccctgatcagcaacggccagagcatgagcttcagccccgacagcggccccgtgtgggccgccagaagaagactggcccagaacggcctgaagagcttcagcatcgccagcgaccccgccagcagcaccagctgctacctggaggagcacgtgagcaaggaggccgaggtgctgatcagcaccctgcaggagctgatggccggccccggccacttcaacccctacagatacgtggtggtgagcgtgaccaacgtgatctgcgccatctgcttcggcagaagatacgaccacaaccaccaggagctgctgagcctggtgaacctgaacaacaacttcggcgaggtggtgggcagcggcaaccccgccgacttcatccccatcctgagatacctgcccaaccccagcctgaacgccttcaaggacctgaacgagaagttctacagcttcatgcagaagatggtgaaggagcactacaagaccttcgagaagggccacatcagagacatcaccgacagcctgatcgagcactgccaggagaagcagctggacgagaacgccaacgtgcagctgagcgacgagaagatcatcaacatcgtgctggacctgttcggcgccggcttcgacaccgtgaccaccgccatcagctggagcctgatgtacctggtgatgaaccccagagtgcagagaaagatccaggaggagctggacaccgtgatcggcagaagcagaagacccagactgagcgacagaagccacctgccctacatggaggccttcatcctggagaccttcagacacagcagcttcgtgcccttcaccatcccccacagaaagctgtgggtgaaccccagcgagttcctgcccgagagattcctgacccccgacggcgccatcgacaaggtgctgagcgagaaggtgatcatcttcggcatgggcaagagaaagtgcatcggcgagaccatcgccagatgggaggtgttcctgttcctggccatcctgctgcagagagtggagttcagcgtgcccctgggcgtgaaggtggacatgacccccatctacggcctgaccatgaagcacgcctgctgcgagcacttccagatgcagctgagaagctag

SEQ ID NO: 9875 - protein, 495 aa, Artificial Sequence
  derived and/or modified sequence
MLLLGLLLLLPLLAGARLLWNWWKLRSLHLPPLAPGFLHLLQPDLPIYLLGLTQKFGPIYRLHLGLQDVVVLNSKRTIEEAMVKKWADFAGRPEPLTYKLVSRNYPDLSLGDYSLLWKAHKKLTRSALLLGIRDSMEPVVEQLTQEFCERMRAQPGTPVAIEEEFSLLTCSIICYLTFGDKIKDDNLMPAYYKCIQEVLKTWSHWSIQIVDVIPFLRFFPNPGLRRLKQAIEKRDHIVEMQLRQHKESLVAGQWRDMMDYMLQGVAQPSMEEGSGQLLEGHVHMAAVDLLIGGTETTANTLSWAVVFLLHHPEIQQRLQEELDHELGPGASSSRVPYKDRARLPLLNATIAEVLRLRPVVPLALPHRTTRPSSISGYDIPEGTVIIPNLQGAHLDETVWERPHEFWPDRFLEPGKNSRALAFGCGARVCLGEPLARLELFVVLTRLLQAFTLLPSGDALPSLQPLPHCSVILKMQPFQVRLQPRGMGAHSPGQSQ

SEQ ID NO: 9876 - protein, 494 aa, Artificial Sequence [sequence omitted]

SEQ ID NO: 9877 - protein, 495 aa, Artificial Sequence
  derived and/or modified sequence
MLLLGLLLLLPLLAGARLLWNWWKLRSLHLLPLAPGFLHLLQPDLPIYLLGLTQKFGPIYRLHLGLQDVVVLNSKRTIEEAMVKKWADFAGRPEPLTYKLVSKNYPDLSLGDYSLLWKAHKKLTRSALLLGIRDSMEPVVEQLTQEFCERMRAQPGTPVAIEEEFSLLTCSIICYLTFGDKIKDDNLMPAYYKCIQEVLKTWSHWSIQIVDVIPFLRFFPNPGLRRLKQAIEKRDHIVEMQLRQHKESLVAGQWRDMMDYMLQGVAQPSMEEGSGQLLEGHVHMAAVDLLIGGTETTANTLSWAVVFLLHHPEIQQRLQEELDHELGPGASSSRVPYKDRARLPLLNATIAEVLRLRPVVPLALPHRTTRPSSISGYDIPEGTVIIPNLQGAHLDETVWERPHEFWPDRFLEPGKNSRALAFGCGARVCLGEPLARLELFVVLTRLLQAFTLLPSGDALPSLQPLPHCSVILKMQPFQVRLQPRGMGAHSPGQNQ

SEQ ID NO: 9878 - protein, 495 aa, Artificial Sequence
  derived and/or modified sequence
MLLLGLLLLLPLLAGARLLWNWWKLRSLHLPPLAPGFLHLLQPDLPIYLLGLTQKFGPIYRLHLGLQDVVVLNSKRTIEEAMVKKWADFAGRPEPLTYKLVSKNYPDLSLGDYSLLWKAHKKLTRSALLLGIRDSMEPVVEQLTQEFCERMRAQPGTPVAIEEEFSLLTCSIICYLTFGDKIKDDNLMPAYYKCIQEVLKTWSHWSIQIVDVIPFLRFFPNPGLRRLKQAIEKRDHIVEMQLRQHKESLVAGQWRDMMDYMLQGVAQPSMEEGSGQLLEGHVHMAAVDLLIGGTETTANTLSWAVVFLLHHPEIQQRLQEELDHELGPGASSSRVPYKDRARLPLLNATIAEVLRLRPVVPLALPHRTTRPSSISGYDIPEGTVIIPNLQGAHLDETVWERPHEFWPDRFLEPGKNSRALAFGCGARVCLGEPLARLELFVVLTRLLQAFTLLPSGDALPSLQPLPHCSVILKMQPFQVRLQPRGMGAHSPGQNQ

SEQ ID NO: 9879 - DNA, 1488 bp, Artificial Sequence
  derived and/or modified sequence
atgctgcttttggggctgttgctcctgctacctttgcttgccggcgcgagactcttgtggaactggtggaagctgcgatccctacacctccctccacttgcccctggattcctgcacttgctccagcctgacttaccaatatacctgctgggcctgactcaaaaatttggacccatctaccgtctccacctcggactgcaagacgtggtcgtcttaaatagtaaacgtacgattgaggaggctatggtaaagaaatgggccgactttgctggtcggccagagccacttacatataaattagtgtctagaaactatccagatttaagcctgggcgactactccttactgtggaaggctcacaagaaattgacacgcagcgcactgctgcttgggatccgagattcaatggaacctgtggtggaacagctgacgcaggaattttgcgagcgtatgagagcgcagcctggcacaccagtcgccattgaggaagagttctcgctccttacctgtagcatcatttgctatttgacctttggagacaagataaaggatgataaccttatgcccgcctactataaatgcattcaggaggtgcttaagacatggtcccactggagtattcaaattgtcgacgttataccctttcttaggttctttcccaatcccggcttgcggcggctgaaacaggctatagagaaaagggaccacatcgtcgagatgcagctcaggcaacataaggagtctctggtagccggccagtggcgagatatgatggattatatgttgcagggagtggcacagccttctatggaagaagggagcggccagttactggagggacacgtccacatggctgctgttgacctactgattggtggaaccgagaccacagccaatactctgtcatgggccgtggtctttctccttcaccaccctgaaatacagcaacggctacaagaagagctggatcacgagctcggacctggtgccagctcaagtcgggttccatataaagaccgggccaggctgcctttactgaacgccaccatcgcggaagttctgagactcagacccgtggttccactggcactgccgcaccgaaccaccagacctagctctatcagcggctacgacatacccgagggcaccgtcattataccaaacctgcagggagctcacctcgacgaaaccgtgtgggaaaggccccacgagttttggcctgacaggttcctcgagccagggaaaaatagcagggcattggcatttggttgcggcgcgcgcgtgtgcctgggagaaccgctagctcgcctggagctgtttgtcgtccttacacgcctgctgcaggcattcacattactgccgagtggcgatgccctcccaagcctgcagcctttacctcattgcagtgtgatcctgaaaatgcaaccctttcaggtacgccttcagcccagggggatgggagcccacagtccagggcagtctcaatag

SEQ ID NO: 9880 - DNA, 1488 bp, Artificial Sequence
  derived and/or modified sequence
atgcttttattgggactcctcttactactgccactcctagctggtgctaggctgttgtggaattggtggaaacttcggagtttgcacctgcctccactcgcacctggttttctccatttgctccagcctgacctgcctatctatctgctcggactcacgcagaagtttggccctatctatcgcttacatttaggcttgcaagacgtggtcgtgcttaattctaagaggaccatcgaagaagccatggtgaaaaaatgggctgacttcgcgggtaggccagagccactgacctacaagctggtatcacggaactaccccgatctgtccttgggcgattatagtctgctttggaaggcccataagaaattgaccagaagtgctctgctgctaggcatccgtgacagcatggagcctgtggtcgagcagctcacacaggagttctgcgagcgcatgcgcgcacagccaggcaccccagtggctattgaagaggagttctctcttctgacttgctccattatctgctacctgacgttcggagacaaaatcaaggatgataacctgatgcctgcttactacaagtgcattcaagaggtactgaagacctggagccactggagcattcagattgtggacgtgataccattcttacgctttttcccaaaccccggcctcagacggctgaaacaggccatagagaagcgcgatcacattgtggagatgcagcttcgtcaacataaagagagcctagttgccggtcagtggagagacatgatggactacatgctgcaaggcgtcgcccagccttctatggaggagggcagtggacaactacttgaagggcacgtgcacatggcagctgtggatctgctcatcggcgggactgaaaccactgcgaacacactgagctgggccgttgttttcctgcttcaccaccccgagatccagcagaggttacaggaggagctagatcacgagctgggtcccggagcctcctccagtagggtaccgtataaggacagagctcggcttcctctactgaacgcaaccatagctgaagttcttaggctccgacccgtcgtgcccctggcccttcctcataggaccactagacccagtagcatatccggctacgacatccctgagggcacagtcataatcccaaatctccagggagcccatctcgacgagaccgtttgggaaaggccacacgagttttggcccgatagatttctggaacctggcaagaattctcgcgctctggcattcggatgtggggcgcgtgtctgcttgggggagccattggcacgcctggagctttttgtggtgttgactaggctcttgcaggcttttactctgcttccttcgggcgacgcgctgccaagcttacaacctctcccccactgttccgttatacttaaaatgcagcctttccaagtccggctccaaccccgaggaatgggggcccacagccctggtcagagccagtag

SEQ ID NO: 9881 - DNA, 1485 bp, Artificial Sequence
  derived and/or modified sequence
atgctcctgctgggtcttcttctgctgcccctattggcgggcgcccggctcctttggaattggtggaagctgaggtcactgcacctaccaccccttgccccagggtttctgcaccttctgcagccagatctgcctatctacctcctgggcctgactcagaagttcggacctatctaccgcctgcatctggggctgcaggacgtggttgtgctgaactccaagagaaccattgaggaggcaatggtcaagaaatgggctgactttgcagggagacctgagccactcacctataagttggtgtcgaaaaactaccccgatctcagcctgggggattattccttgctttggaaagcgcacaagaaactaactaggtcggcactgctgctgggaatccgcgattccatggagcccgtagtggaacagctgactcaggaattctgtgagcgcatgagagcgcaacctggtactccagtagccattgaggaggaattctctctcttgacttgtagtatcatctgttacctgactttcggggacaaaattaaagatgataacctgatgcccgcgtattataaatgcattcaggaggtgctcaagacttggtctcactggtctatccagattgtcgatgttatacccttcttgcggttctttccgaaccctggattaagacgccttaagcaggctatcgaaaaaagagaccatatcgtcgagatgcagcttagacagcataaagagagtctggtcgcaggccagtggcgtgacatgatggactacatgcttcagggggtagctcagccttccatggaggaaggctcaggacagcttcttgagggacatgtgcacatggcggccgtggacttgttaattggcggaaccgagaccacggccaacaccctgtcctgggcagttgtcttcttactacaccaccccgaaatccaacagaggctccaagaggaattggaccatgagcttggcccgggggcttcaagctccagagtgccctataaggatcgagcccgcctcccattgctcaatgctacgattgcagaggttttgcgcctgcggccagtagtgccccttgccctgccccatagaaccacccgtccttcctccatctccgggtacgatattccagaggggacggtcattatacccaatctccagggtgctcacctggacgaaaccgtatgggaacgcccccatgagttctggccagatcgttttcttgagccaggcaagaatagccgggccctcgcatttggctgcggggctagagtatgtctcggggaacctctggctcggctggagctgttcgtggtgctgacgcgactcctgcaggcgttcactctgctgccctccggggacgccctaccttcgctgcaacctcttccacactgctccgtgatcctgaagatgcaaccattccaggttagattgcagcccaggggcatgggggcgcacagtcccggacagaaccaatag

SEQ ID NO: 9882 - DNA, 1485 bp, Artificial Sequence
  derived and/or modified sequence
atgctcctcttgggcctgctgctgcttcctctgctagctggcgcccggctcctttggaattggtggaaacttcgcagtctccacctccctccccttgcgcccgggtttcttcacctgctgcagccagatctgcctatatatcttctcggcctgacacaaaaatttggccctatataccgccttcacctcgggctccaagatgttgtggtcctcaactcaaagaggaccatcgaagaggcgatggtcaagaagtgggctgatttcgccgggcgacccgagcccctgacatataagctggtaagcaaaaattacccagatctcagtcttggagattattcacttttgtggaaagcccacaagaaactgactaggtctgctctcctcttaggaatcagagacagtatggaacctgtagtagagcagctaacgcaggagttctgcgagagaatgcgcgctcagccaggaaccccagtggcgatcgaggaggagttctctcttctgacctgtagcataatctgttacctgaccttcggagataaaatcaaggatgacaacctgatgcctgcatactataaatgcatccaagaggtgctgaaaacgtggtcccactggtctatacagatagtagacgtgatcccgttcttgcggttctttcccaacccaggcctacgtaggcttaaacaggcgattgaaaagagggaccacatagtggaaatgcagctgcgccagcataaggagagtttagtcgctggtcagtggagggacatgatggactacatgctgcaaggagtggctcaaccgtccatggaggaaggatctggccagctccttgaaggacatgttcacatggctgctgtggatctgctgattggtgggaccgaaaccacagccaataccctatcttgggcggtggtgttccttttgcaccaccctgagatccaacagcgacttcaggaagagctggatcatgagttaggtccgggcgcatcctcatcccgggtgccatataaggacagggcacgcctccccctgttaaatgctactattgcggaagttctcagacttaggcccgtagtgccccttgcactcccacatcggactaccagaccttcaagtatttccggttacgacatccccgaaggaactgtgattataccaaacctgcagggggcgcacctggacgagaccgtttgggaacgcccgcacgaattctggcccgatagatttctggaaccaggcaagaatagcagggcccttgcctttgggtgcggagcgcgcgtgtgccttggtgagccactcgctaggctggagttatttgtggtactgacacggctactccaggcctttaccctgctcccatctggagatgctctgccatcccttcagcctctgcctcactgctctgttatcttaaagatgcaaccgtttcaggtgagactgcaaccgagaggtatgggtgcacatagccctggccagaatcaatag

SEQ ID NO: 9883 - DNA, 1488 bp, Artificial Sequence
  derived and/or modified sequence
atgctgctcctgggacttcttctccttctgccactcttagccggggcccgcctgctctggaactggtggaaactcagatctctacacctgccaccacttgcaccaggctttctccatctcctgcaacctgatctccctatttacctgctggggctgacccagaaatttggtcccatttatagactccaccttgggctacaagacgtggtggtgctcaatagtaaacgaacaatcgaggaagcgatggtgaagaaatgggccgactttgctggccgcccagagccactgacgtacaagctagtcagccggaactaccccgatttatctttaggtgattattctctgttatggaaggcccacaagaaattaactcgctccgcccttctcctgggcattagggattccatggagcccgtcgtggagcaattgacccaggagttctgcgagagaatgcgtgcccagccggggacccccgtggccattgaggaagaattctcgctcctgacctgcagcataatatgttacctcacttttggcgataagataaaagatgacaatctcatgcctgcttactataaatgtatccaagaagtgctgaagacgtggagtcattggtccattcagattgtggatgtaatccctttcctgaggttcttcccaaaccccggactgcgccgactgaaacaagctattgagaagagggaccacattgtggaaatgcagcttagacaacataaggagtccctggttgccggacaatggcgtgacatgatggactacatgctgcaaggggtcgcccagccttccatggaagaggggtccggccagctcctcgagggccacgtgcatatggctgctgtggacctcctgattggggggactgaaacaacggcgaataccctgtcttgggctgttgttttcctcctgcaccatcccgagatccagcagaggctgcaggaagagttggaccatgaactaggaccaggagcctcttccagcagagtcccctataaagatagggcccgactccctttactaaacgccaccattgctgaagtactcagactccgcccagtagtcccactggccctgccacaccggactactaggccaagctctatctccggctacgacatacctgaagggaccgtgataattcctaatcttcagggggcacatctggacgagactgtgtgggaaagaccccacgaattttggccggatagattcctggagcccggcaagaattcccgggccctggctttcggatgtggagcaagagtctgcctgggggaaccactggcccgcctggagctgttcgtcgtcctgacgaggctgctccaggcttttacattgttaccaagcggggatgccctgcccagtctccagccgctgccccactgctctgtgatcctgaaaatgcaacccttccaagtccgcctccagccccgtggcatgggcgcacattcccctggacaatcacagtag

SEQ ID NO: 9884 - DNA, 1488 bp, Artificial Sequence
  derived and/or modified sequence
atgctactgcttggcttgctgctgctgctgcctctcctcgctggggctagattgctctggaattggtggaagctgaggagccttcacttgctgccactggcacctggcttcttgcacctgttacagcctgaccttcctatatatctactgggcttaacccagaagttcggcccaatctacaggctgcacttaggcctgcaagatgtggtggtattaaactccaaacgaaccatcgaggaggcgatggtcaaaaagtgggccgattttgctggtagaccagagccactgacctacaaactggtgagcaaaaactatccagacttgtcattaggggactattctctcctatggaaagcacataagaaactgacaaggagcgcattactgctgggaatccgcgattcaatggagcccgttgttgagcagcttacgcaggaattttgtgagcgaatgcgggcacagccagggaccccggtagccatcgaggaggaattcagtctactgacctgttcaatcatctgctacctgacgtttggcgataagatcaaggacgacaatctgatgcccgcctattataagtgtatacaggaggtgctaaaaacatggagccactggtcaatccaaattgtggatgtgatcccgtttctgcgtttttttcccaacccggggctgaggcgattgaaacaggcaatcgagaagcgcgaccatattgtggagatgcagctgaggcagcacaaagagagtctggtagccgggcagtggagagacatgatggattacatgttgcaaggagtggcgcagccaagtatggaggaaggctcaggacagctgctcgagggacacgtgcacatggctgccgtggacctgctgataggaggcaccgagactaccgccaataccctcagttgggctgtcgtgttcctactgcaccatccagagatccagcagcggcttcaggaggaactggatcacgaacttggtccaggcgccagtagtagtcgggtgccatacaaggacagagcacgtttacccctgttaaacgccactattgccgaagtactgagattgaggcctgttgtcccccttgctcttccccaccgcaccaccaggccttcctccatcagcgggtatgatatcccagaagggaccgtcattatccctaacctgcaaggagcccacctggacgagactgtgtgggagcgcccccacgagttctggcccgacaggttcctggagccgggtaagaactctcgggctctggccttcggttgtggggccagagtttgtctaggggaacctctcgctaggctggagctgtttgtggtactgacccggctgctgcaggcctttacgttgcttccttctggcgatgccctcccgtccctccagcctctgcctcactgttcagtgatccttaagatgcagccctttcaagtgaggttacaacctcggggcatgggggcccattctccaggacagaaccaatag

SEQ ID NO: 9885 - DNA, 1488 bp, Artificial Sequence
  derived and/or modified sequence
atgcttctattaggtctgttgttacttcttccccttttggccggagcacgactcctctggaattggtggaagctgagaagcctgcacctgcctccactggcccccggcttcctgcacctgctgcaaccggatctgccaatctacctgcttggactcacccaaaagtttggcccgatctatcgtctgcatttgggactgcaagatgtagtggtgctgaactccaaaagaacaatagaggaggcaatggtgaaaaagtgggctgatttcgcagggaggccggaacctcttacatataagcttgtctctaagaactaccccgacctgagcctaggcgattattcgctgctctggaaggcacacaagaaacttactcgtagcgcactgctcctcgggataagggattccatggagcccgtcgtggaacaactcacccaggaattttgcgagcgcatgcgggcacagcctggaacacccgtagcaatagaggaagagttctctctccttacatgctcaattatttgttacttgacattcggcgataaaatcaaagacgataatctgatgccagcgtattataaatgtatccaggaggtcctcaaaacctggtcgcactggtccattcaaatagtggatgtcatcccattcctgcgcttcttcccaaatccgggactcagacgacttaaacaggcgattgaaaaaagagatcatattgtggagatgcaactgagacagcacaaggagtccctcgtggccgggcagtggagggatatgatggattacatgcttcagggagttgcccagccatctatggaagagggttcaggtcaattgctggaaggccacgtgcacatggcagccgttgatctgctgatcggtgggacggagaccacggccaacaccctgagttgggccgttgtgttccttttacaccacccagaaattcaacagcggcttcaggaggagctcgaccacgagttagggccgggagcaagttccagcagagttccgtataaagatagggcgcgactcccattactcaacgccaccatcgcggaggttctgagactgcgaccggtggtgccactggctctcccccacaggaccaccaggccctcaagtatctcaggctacgacatcccagaggggaccgttatcatcccaaacctgcaaggcgcccacctcgatgagacagtgtgggagcgacctcacgagttctggcctgacagatttctggagccaggcaagaacagcagggccttggccttcggctgtggtgcccgggtttgtctgggcgagcccctggctagactggagctgtttgtggtgctgacgaggttattacaagccttcactcttttaccctcaggtgatgctctgccgtctctccagcccctgcctcattgttcagtaatcctgaaaatgcagccattccaggtgcgcttacagccgaggggaatgggcgcccatagccccggacaaaaccagtag

SEQ ID NO: 9886 - DNA, 1488 bp, Artificial Sequence
  derived and/or modified sequence
atgctgctgctgggcctgctgctgctgctgcccctgctggccggggcccggctgctgtggaactggtggaagctgcggagcctgcacctgccccccctggcccctggcttcctgcacctgctgcagcctgacctgcccatctacctgctgggcctgacccagaagtttggccccatctaccgcctgcacctgggcctgcaggatgtggtggtgctgaacagcaagaggaccatcgaggaggccatggtgaagaagtgggccgactttgctggccggcctgagcccctgacctacaagctggtgtccaggaactacccagacctgagcctgggggactacagcctgctgtggaaggcccacaagaagctgaccaggtctgccctgctgctgggcatccgggacagcatggagcctgtggtggagcagctgacccaggagttctgtgagaggatgagggcccagcccggcacccctgtggccatcgaggaggagttcagcctgctgacctgcagcatcatctgctacctgaccttcggggacaagatcaaggatgacaacctgatgcctgcctactacaagtgcatccaggaggtgctgaagacctggagccactggagcatccagatcgtggatgtgatccccttcctgcgcttcttccccaaccctggcctgcggcggctgaagcaggccatcgagaagagggaccacatcgtggagatgcagctgcggcagcacaaggagagcctggtggccggccagtggagggacatgatggactacatgctgcagggcgtggcccagcccagcatggaggagggcagcggccagctgctggagggccacgtgcacatggctgctgtggacctgctgattggaggaacagagaccacagccaacaccctgtcctgggccgtggtgttcctgctgcaccaccctgagatccagcagaggctgcaggaggagctggaccacgagctgggccctggggccagcagcagccgggtgccctacaaggaccgggcccggctgcccctgctgaatgccaccatcgccgaggtgctgcggctgcggcctgtggtgcccctggccctgccccacaggaccacccggcccagcagcatcagcggctatgacatccctgagggcaccgtcatcatccccaacctgcagggcgcccacctggatgaaacagtgtgggagcggccccatgagttctggccagaccgcttcctggagcccgggaagaacagccgggccctggccttcggctgtggggcccgggtgtgcctgggggagcccctggcccggctggagctgtttgtggtgctgacccggctgctgcaggccttcaccctgctgcccagcggagatgccctgcccagcctgcagcccctgccccactgcagcgtcatcctgaagatgcagcccttccaggtgcggctgcagccccggggcatgggcgcccacagccctggccagagccagtag

SEQ ID NO: 9887 - DNA, 1485 bp, Artificial Sequence
  derived and/or modified sequence
atgctgctgctgggcctgctgctgctgcccctgctggccggggcccggctgctgtggaactggtggaagctgcggagcctgcacctgccccccctggcccctggcttcctgcacctgctgcagcctgacctgcccatctacctgctgggcctgacccagaagtttggccccatctaccgcctgcacctgggcctgcaggatgtggtggtgctgaacagcaagaggaccatcgaggaggccatggtgaagaagtgggccgactttgctggccggcctgagcccctgacctacaagctggtgtccaagaactacccagacctgagcctgggggactacagcctgctgtggaaggcccacaagaagctgaccaggtctgccctgctgctgggcatccgggacagcatggagcctgtggtggagcagctgacccaggagttctgtgagaggatgagggcccagcccggcacccctgtggccatcgaggaggagttcagcctgctgacctgcagcatcatctgctacctgacctttggagacaagatcaaggatgacaacctgatgcctgcctactacaagtgcatccaggaggtgctgaagacctggagccactggagcatccagatcgtggatgtgatccccttcctgcgcttcttccccaaccctggcctgcggcggctgaagcaggccatcgagaagagggaccacatcgtggagatgcagctgcggcagcacaaggagagcctggtggccggccagtggagggacatgatggactacatgctgcagggcgtggcccagcccagcatggaggagggcagcggccagctgctggagggccacgtgcacatggctgctgtggacctgctgattggaggaacagagaccacagccaacaccctgtcctgggccgtggtgttcctgctgcaccaccctgagatccagcagaggctgcaggaggagctggaccacgagctgggccctggggccagcagcagccgggtgccctacaaggaccgggcccggctgcccctgctgaatgccaccatcgccgaggtgctgcggctgcggcctgtggtgcccctggccctgccccacaggaccacccggcccagcagcatcagcggctatgacatccctgagggcaccgtcatcatccccaacctgcagggcgcccacctggatgagaccgtgtgggagcggccccatgagttctggccagaccgcttcctggagcccgggaagaacagccgggccctggccttcggctgtggggcccgggtgtgcctgggggagcccctggcccggctggagctgtttgtggtgctgacccggctgctgcaggccttcaccctgctgcccagcggagatgccctgcccagcctgcagcccctgccccactgcagcgtcatcctgaagatgcagcccttccaggtgcggctgcagccccggggcatgggcgcccacagccctggccagaaccagtag

SEQ ID NO: 9888 - DNA, 1488 bp, Artificial Sequence
  derived and/or modified sequence
atgctgctgctgggcctgctgctgctgctgcccctgctggccggggcccggctgctgtggaactggtggaagctgcggagcctgcacctgctgcccctggcccctggcttcctgcacctgctgcagcctgacctgcccatctacctgctgggcctgacccagaagtttggccccatctaccgcctgcacctgggcctgcaggatgtggtggtgctgaacagcaagaggaccatcgaggaggccatggtgaagaagtgggccgactttgctggccggcctgagcccctgacctacaagctggtgtccaagaactacccagacctgagcctgggggactacagcctgctgtggaaggcccacaagaagctgaccaggtctgccctgctgctgggcatccgggacagcatggagcctgtggtggagcagctgacccaggagttctgtgagaggatgagggcccagcccggcacccctgtggccatcgaggaggagttcagcctgctgacctgcagcatcatctgctacctgaccttcggggacaagatcaaggatgacaacctgatgcctgcctactacaagtgcatccaggaggtgctgaagacctggagccactggagcatccagatcgtggatgtgatccccttcctgcgcttcttccccaaccctggcctgcggcggctgaagcaggccatcgagaagagggaccacatcgtggagatgcagctgcggcagcacaaggagagcctggtggccggccagtggagggacatgatggactacatgctgcagggcgtggcccagcccagcatggaggagggcagcggccagctgctggagggccacgtgcacatggctgctgtggacctgctgattggaggaacagagaccacagccaacaccctgtcctgggccgtggtgttcctgctgcaccaccctgagatccagcagaggctgcaggaggagctggaccacgagctgggccctggggccagcagcagccgggtgccctacaaggaccgggcccggctgcccctgctgaatgccaccatcgccgaggtgctgcggctgcggcctgtggtgcccctggccctgccccacaggaccacccggcccagcagcatcagcggctatgacatccctgagggcaccgtcatcatccccaacctgcagggcgcccacctggatgaaacagtgtgggagcggccccatgagttctggccagaccgcttcctggagcccgggaagaacagccgggccctggccttcggctgtggggcccgggtgtgcctgggggagcccctggcccggctggagctgtttgtggtgctgacccggctgctgcaggccttcaccctgctgcccagcggagatgccctgcccagcctgcagcccctgccccactgcagcgtcatcctgaagatgcagcccttccaggtgcggctgcagccccggggcatgggcgcccacagccctggccagaaccagtag

SEQ ID NO: 9889 - DNA, 1488 bp, Artificial Sequence
  derived and/or modified sequence
atgctgctgctgggcctgctgctgctgctgcccctgctggccggggcccggctgctgtggaactggtggaagctgcggagcctgcacctgccccccctggcccctggcttcctgcacctgctgcagcctgacctgcccatctacctgctgggcctgacccagaagtttggccccatctaccgcctgcacctgggcctgcaggatgtggtggtgctgaacagcaagaggaccatcgaggaggccatggtgaagaagtgggccgactttgctggccggcctgagcccctgacctacaagctggtgtccaagaactacccagacctgagcctgggggactacagcctgctgtggaaggcccacaagaagctgaccaggtctgccctgctgctgggcatccgggacagcatggagcctgtggtggagcagctgacccaggagttctgtgagaggatgagggcccagcccggcacccctgtggccatcgaggaggagttcagcctgctgacctgcagcatcatctgctacctgaccttcggggacaagatcaaggatgacaacctgatgcctgcctactacaagtgcatccaggaggtgctgaagacctggagccactggagcatccagatcgtggatgtgatccccttcctgcgcttcttccccaaccctggcctgcggcggctgaagcaggccatcgagaagagggaccacatcgtggagatgcagctgcggcagcacaaggagagcctggtggccggccagtggagggacatgatggactacatgctgcagggcgtggcccagcccagcatggaggagggcagcggccagctgctggagggccacgtgcacatggctgctgtggacctgctgattggaggaacagagaccacagccaacaccctgtcctgggccgtggtgttcctgctgcaccaccctgagatccagcagaggctgcaggaggagctggaccacgagctgggccctggggccagcagcagccgggtgccctacaaggaccgggcccggctgcccctgctgaatgccaccatcgccgaggtgctgcggctgcggcctgtggtgcccctggccctgccccacaggaccacccggcccagcagcatcagcggctatgacatccctgagggcaccgtcatcatccccaacctgcagggcgcccacctggatgaaacagtgtgggagcggccccatgagttctggccagaccgcttcctggagcccgggaagaacagccgggccctggccttcggctgtggggcccgggtgtgcctgggggagcccctggcccggctggagctgtttgtggtgctgacccggctgctgcaggccttcaccctgctgcccagcggagatgccctgcccagcctgcagcccctgccccactgcagcgtcatcctgaagatgcagcccttccaggtgcggctgcagccccggggcatgggcgcccacagccctggccagaaccagtag

SEQ ID NO: 9890 - DNA, 1488 bp, Artificial Sequence
  derived and/or modified sequence
atgctgctgctgggcctgctgctgctgctgcccctgctggccggcgcacggctgctgtggaactggtggaagctgcgaagccttcacctaccgcccttggcaccagggtttttgcatctactacagccggacctgccaatctatctcctcggactaacacagaaatttggtccaatatacagattgcatctagggctgcaagatgttgtggtgttaaactctaagagaaccatcgaggaggccatggtgaagaagtgggccgactttgccggacgcccggaacccctgacatacaagctggtttcccgaaactatcccgatctcagcctcggagactatagcctcctttggaaggcccacaaaaagctgaccagatctgctttactactaggcatcagggatagcatggagccagtcgttgagcagctgactcaagagttttgtgagaggatgagggcccagcccggaaccccggtagccatagaagaagaattctctttattgacctgcagtattatttgctatctaacattcggggataaaatcaaggatgataacttaatgccagcctattacaaatgtatccaggaggtcctcaaaacctggagccactggagtattcagattgttgatgtcattccatttctgcggttcttccctaacccaggcttaagacgcttaaaacaggctattgaaaaaagggaccatatcgtggaaatgcaattgagacaacataaagaatccctggtggcaggacagtggcgcgatatgatggattacatgctacagggtgtggctcagccatctatggaggagggatccgggcaactcttggaagggcacgtgcatatggccgctgttgaccttttgatcggtggcaccgagactacagctaatactctttcatgggccgtcgtattcctcttacaccatccggagattcagcagcggctgcaggaggagcttgaccacgaactcggccccggtgcaagttctagccgcgtgccttataaggaccgcgcgcggttgcccctcttgaatgctactatcgccgaagtactgcgccttaggcctgtggtacctttggccctgccccaccgcactacccggccaagttcaatttccgggtatgacatccccgaaggcacagtgatcattccaaacctccagggcgcacacctggacgaaactgtgtgggaacgccctcatgagttttggccagaccgtttcctagagcccggcaagaattctcgagcacttgccttcggatgcggggctagagtgtgtcttggcgaacctctggctcggctcgagttgtttgtggtactaacaaggttactgcaagcctttacgctgctcccttccggggacgctttgccttcactgcagccactcccccactgtagcgtgattctgaaaatgcagcccttccaggtgcggctgcagcctcggggtatgggcgcccatagtccagggcagtctcagtag

SEQ ID NO: 9891 - DNA, 1488 bp, Artificial Sequence
  derived and/or modified sequence
atgctgctgctgggcctgctgctgctgctgcccctgctggccggcgctaggctcctgtggaattggtggaagctgcgctctttgcacctcccgcccctagctcctgggttcctgcatctgttgcagcccgacctccctatctacttactaggcttgacacagaaattcgggccgatctaccgactccacctcgggctgcaggacgtggtggtcctcaactccaaacgcaccatagaagaggctatggtgaaaaaatgggcagatttcgcaggtcggcccgagcctcttacttataagttagtgtcgcgaaactaccccgacctctccctcggcgattacagtctcctgtggaaggcccacaaaaaacttacaaggagtgcccttctcttgggaatcagggattcaatggagccagtagtagaacagctcactcaggaattttgcgagagaatgcgggcccagcccggtacccctgtggcgattgaggaagagttcagcctcctgacttgtagcattatttgctacctaacttttggtgataagatcaaagacgataacctgatgccagcatactataaatgtatccaggaggtcctgaagacatggtcccactggtcaatccagatcgtggatgtgatccccttcttaagattcttccctaaccctggcttacggaggttaaagcaagccatagagaaacgcgatcacatcgtggagatgcagctcagacagcacaaagagtctctcgtggcaggccagtggagggacatgatggactatatgctgcagggggttgctcagccttcaatggaagagggcagcggacaactgctggaggggcacgtccacatggccgctgtcgatctactaataggtggcaccgagacaaccgccaacaccctcagctgggccgtggtgtttcttctgcaccaccctgagattcaacaacggctgcaggaggaactggatcatgagctggggcctggcgcatcaagttcacgagtcccttacaaggaccgcgccaggttgcccctgctcaacgctaccatcgctgaggtcctgcgactgcgaccagtcgttcccctcgccctcccgcaccggacaactagacctagttcgattagcggatatgacataccagaagggacggttatcattcccaaccttcagggcgcccatttggatgaaactgtgtgggagaggccacatgaattctggcccgaccgttttctggaacctggcaagaatagccgtgcacttgcattcggctgtggggcacgggtgtgcttgggagaaccccttgcaagactcgaactgtttgtggttcttacacgactgctgcaagcattcacactccttcccagcggagacgcgctaccgtcactccaaccacttccgcactgtagtgtgattctgaaaatgcaaccctttcaagttcgactgcagcccaggggcatgggcgctcactctcccgggcagagccagtag

SEQ ID NO: 9892 - DNA, 1485 bp, Artificial Sequence
  derived and/or modified sequence
atgctgctgctgggcctgctgctgctgcccctgctggccggcgcccggcttctttggaactggtggaagcttcggagcctccacctgcctcctctagctcctggtttcctacacctgctgcaacccgatctgccaatttacttactgggacttactcagaagtttggacctatttaccgattgcacctaggactgcaggatgtggtggtgttaaactctaagagaacgatcgaagaggccatggtcaagaagtgggcggacttcgccggtaggccagagcctctgacttataagctggtgtcgaagaattatcccgaccttagcctgggggactactccttgctctggaaagcccataaaaagttaactcgctctgcccttttactcggtatacgagactctatggagcctgtcgtggaacagctgacccaggaattctgcgaaagaatgagggcgcagccgggtaccccggttgcaatcgaggaggagttctctttactgacatgcagcatcatatgctatttgacattcggcgacaaaatcaaagatgataatctcatgccggcttactataaatgcatccaagaggtgttaaaaacttggagccactggagtattcagatagtagatgtcatccctttcctgcgcttctttccaaatccagggctgagaaggcttaaacaggcaattgaaaaacgtgaccacatcgtcgaaatgcagctgagacagcacaaggaatcactcgtcgcaggtcagtggcgggatatgatggactacatgttgcagggggtggcacaacccagcatggaagagggcagcggtcagctcttggagggccacgtgcatatggcagctgtcgaccttctgattggaggaacggaaacgactgccaatactttgagctgggctgtggttttcctcctgcaccaccctgagatccagcagagacttcaggaggaactcgaccacgagcttggacctggagcctcttccagtagagtaccttacaaggaccgcgccagactgcccctgctcaatgccaccatcgctgaggtccttcgtctccggcccgtagtgcccctcgccttgcctcatcgcacaacccgcccctccagcataagtggctatgacatcccggagggcacagtgatcataccaaatctgcaaggcgcccatctagacgaaacagtgtgggagcgaccacacgaattctggcctgaccgattcctcgagccaggcaagaactcccgggccttagcttttgggtgcggagctagggtgtgcttgggcgagccactcgctcgtctggagttgttcgtggtgttgacgagactgttgcaggcctttacattgcttccatcaggggatgcgcttccctccctccagcctcttccccattgctccgtcatactgaaaatgcagccatttcaggtgcgccttcagcctagaggcatgggggctcactcccctggtcagaatcagtag

SEQ ID NO: 9893 - DNA, 1485 bp, Artificial Sequence
  derived and/or modified sequence
atgctgctgctgggcctgctgctgctgcccctgctggccggcgccagacttctgtggaattggtggaaactgcgatctctacatcttccaccactggcacctggctttcttcacctccttcagcccgacctgcccatctatctcctcggcctgacccaaaagttcgggccgatttatcggctgcacctgggcctccaggatgtggtcgtgttgaatagcaaaagaacaatcgaagaggcaatggttaagaaatgggctgacttcgctggtaggcccgaacctctgacatataagctagtgtccaagaattatcccgatttaagcctgggtgactactcccttctgtggaaagcacacaagaagctgacaaggtcggccctactgctgggcatccgcgacagtatggaaccagtcgtggagcagctgactcaggaattttgtgagcgcatgcgggcgcagcctggaaccccagtggccatcgaggaggaattttcactcctgacatgctcaatcatatgttatcttacgtttggcgataagattaaggacgacaatctcatgcctgcctactacaagtgcattcaggaggtgcttaagacctggtctcactggagcatacaaattgtggatgttatccccttcctcaggtttttccccaatccaggactccggcggctgaagcaggcaatcgaaaagagggaccacatcgttgagatgcaacttcgtcagcacaaggagagtttggtcgcaggacagtggcgggacatgatggactacatgcttcagggagtagcccaaccatcaatggaggaggggagcggccagctgctggagggccacgttcacatggcggccgtggacctcctaattggagggactgagaccaccgccaatacactcagctgggcagtagtttttctgttgcaccacccggaaatccagcaacgccttcaggaagagctggatcacgagctggggccaggcgcctccagcagcagggttccatacaaagacagggcccgactgccgttactgaatgctactatcgccgaggtgctgagattacggcctgtcgtgcccttggctctgccacataggactacacgacccagctccatctccggctatgacattcctgagggcacagtcatcattccaaacttacagggcgcccatctggatgagactgtttgggaaaggccacacgagttttggcctgatcgttttctggagcccggaaaaaactctcgggcactggcctttggttgcggcgcccgcgtgtgcctcggtgaacccctcgctagactcgagctgtttgttgtgctgactcggctgctgcaggcttttacactcctgccaagcggggacgctctcccttccctgcagcccctgcctcactgctctgtgatcctcaaaatgcagccatttcaggttcggcttcagcctcgaggcatgggagcacattcccctggtcagaaccagtag

SEQ ID NO: 9894 - DNA, 1488 bp, Artificial Sequence
  derived and/or modified sequence
atgctgctgctgggcctgctgctgctgctgcccctgctggccggcgccagattgctgtggaattggtggaaactcaggtctctccacctccctccgctggcaccgggattccttcaccttttacagccggacctgcctatttacctgctgggcctgactcagaagtttgggcccatctaccggctgcacctggggctgcaagatgttgtggtactcaactccaagagaaccatcgaagaagccatggttaaaaagtgggccgatttcgcaggaaggcccgagcctctcacatacaagctcgtttccaggaattaccccgacctttccctgggcgactattctctgctatggaaagctcataaaaaacttacaaggtccgctttgctgctcggcatacgcgacagcatggagccagtagttgaacagttaacccaggagttttgtgagaggatgcgggcacagccgggcacacctgtggccatcgaggaagaatttagcctgcttacctgtagcattatttgctacctgaccttcggcgacaaaattaaggacgataatctaatgccagcttattataagtgcatacaagaggttctgaagacctggtcacattggagtattcagatcgtggacgtaataccttttctgcgcttcttccctaaccctggtctccgccggctcaagcaggccattgaaaaacgcgatcacatcgtcgagatgcagctgagacagcacaaggagtctctggtcgccggacagtggcgcgacatgatggattacatgctccagggtgttgcacagccgtccatggaagaggggtctggccagctgttggagggtcacgtacatatggcagccgtggacctgttaataggcggtaccgaaactacagccaacaccctgtcatgggctgttgtttttctcctgcatcacccggagattcagcagcggctccaagaggagctggaccatgaacttgggcctggagcctcctcaagccgcgtcccctataaggatcgagcgcgcttgccgctgttgaatgcaacaattgcagaagtcctgagactgcggcccgtagtgccactagcgctccctcaccgcacaactcggccgagcagcatttccggctatgatattcccgaaggaacagtcatcattcccaacctccagggcgctcatctagatgaaactgtgtgggaacgtcctcacgagttctggcctgaccgctttctggaacctgggaagaattcacgcgccctggcattcgggtgtggcgcccgggtatgcctgggcgagccactggcacgtctggagcttttcgtggtgctgacgaggttgttgcaagcattcactcttttaccctctggcgacgccctgcccagcctccagccgttgcctcattgctcagtgattctgaagatgcaaccctttcaggttcggctgcagccaaggggaatgggtgcacactcccctggacagagccagtag

SEQ ID NO: 9895 - DNA, 1488 bp, Artificial Sequence
  derived and/or modified sequence
atgctgctgctgggcctgctgctgctgctgcccctgctggccggcgcccgcttactatggaattggtggaaactgcgctccttgcatctgcttcctcttgcacccgggttcttgcatctactgcaacctgacctcccaatctatctgctgggcctgacccagaaattcgggcccatctataggttgcacctgggcctccaggatgtggtcgtgttgaattctaaaagaacaattgaagaggctatggtcaagaaatgggcggacttcgcaggacgaccagaaccccttacatacaaacttgtgtccaagaactaccctgacctctccctgggggactatagcctgctgtggaaagctcacaaaaaactcacaagaagcgcacttctcctgggcatcagagactctatggaacccgttgtagagcaactgactcaggaattttgtgagagaatgcgggcccaaccaggtacccctgtggccattgaagaggaattttccctgctgacctgttccattatttgttacctgaccttcggagacaagatcaaggatgataacctgatgcccgcatattacaagtgcatccaggaagtactcaagacttggagccactggagtatccagattgtggatgtgattcctttcctaagatttttcccaaatccgggcctgaggaggctgaagcaggctatagagaagcgcgaccatatcgtggagatgcagttaaggcagcataaagagtctttggtggctggacagtggcgggacatgatggattacatgctgcagggggtggcccagcccagtatggaggaaggcagcgggcaactgctcgaagggcatgttcatatggctgcagtggatctgctgatcggagggacagagaccactgctaacaccttatcttgggcggtggtgttcctactgcatcacccagagatccagcaaaggctgcaagaggagctcgaccatgagctgggacccggggcttcatcctcgagggtcccttataaagaccgggcccggctgcctcttctgaatgcaactattgccgaagtccttaggctacggcctgtggtgccactggccctaccacatagaacaacgcgcccatcatcgatctctggttacgatatccctgagggaaccgtgattattcctaacctccagggcgcacacctcgacgaaaccgtgtgggaacggccccacgagttttggcctgataggtttctggagccagggaaaaattctagggccttagcatttggctgtggtgctcgagtgtgtctgggcgaacctctggcccgcctcgagctctttgttgtgctcacgcggttactgcaggcctttacccttcttcctagcggagatgctttaccttccctccagcctctcccgcattgcagcgtcatcttgaagatgcagccctttcaggtccgcctccagccccggggaatgggagcacattctcctggacagaaccagtag

SEQ ID NO: 9896 - DNA, 1488 bp, Artificial Sequence
  derived and/or modified sequence
atgctgctgctgggcctgctgctgctgctgcccctgctggccggcgcccgattgctgtggaattggtggaaacttcggagccttcatcttccacctctggcccctgggttcctgcacctgctgcagcccgacttgcccatatatttactgggcctaactcaaaagtttggacccatctaccgactgcatcttggactgcaggatgtcgtggtgttaaacagcaaacgaacgatcgaagaggccatggtgaagaagtgggctgattttgctggccggcctgagccccttacttacaagcttgtaagtaagaattatccagacttgagtctgggtgactactcgctcttgtggaaggcccacaagaagctgaccagatcggccttacttcttggtattagagactcgatggagccagtcgtggagcagttgactcaggaattctgtgagcggatgagggcccaacccgggacacccgtggccatcgaggaggaattttccttgctgacgtgttcaataatctgctacctcacgtttggggataagataaaggatgataacctgatgccggcctattataagtgtattcaagaagtgctaaagacatggtctcattggtcaattcagattgtggacgtcatccccttcttgagattctttccaaaccctggtctgcgccgacttaaacaggccattgagaaacgggaccatattgtcgagatgcaactgcgccaacataaggagagcctggtggcgggccaatggagggacatgatggactatatgctccaaggcgtggcccagccgagcatggaagaaggctcgggccagctgctggaggggcatgttcacatggcagccgtggatctccttatcgggggaaccgaaaccaccgcgaatactctctcatgggcagttgtgtttctgctgcaccatcctgagatccagcaacgacttcaggaagagttagaccacgagctcggacccggcgcttcttcttcacgggttccatacaaagaccgggcccgcctgcctctcctgaacgccacaatcgcagaggtattgaggctgaggccagtggtcccgctcgccttgcctcacagaactactcgtccgtccagtatttctggatacgatatacctgagggcacagtgatcatccctaacctgcagggcgcacatttggatgagacagtatgggagaggccacacgagttctggcccgacagattcttggagcctggaaagaactctagagctctcgcatttgggtgcggggccagggtttgcctgggggagcctttggctagactcgagctctttgtggtgttgacgagactcttgcaggcatttaccctgctccccagcggtgatgctcttcccagcttgcaaccactccctcactgctcagtgatccttaagatgcagccattccaggtcaggctccaaccacggggcatgggggcccacagtccagggcagaaccaatag

SEQ ID NO: 9897 - DNA, 1488 bp, Artificial Sequence
  derived and/or modified sequence
atgctcctgctgggactgctgcttttgctgcccctcctcgctggcgctcgactcctttggaattggtggaaactgcgatctctgcacctgccccctctggcccctggctttctgcatttactccagccagacctccctatctacctcttgggcttaacccagaaattcggccctatctaccgactccatctcggccttcaggatgtggtggtgttaaacagtaagaggaccatcgaagaggccatggtgaagaaatgggcggactttgcgggaaggcctgaaccactgacgtacaagctggtgagccggaactatccggacctctctctgggggactacagtctgctctggaaagcccacaaaaagctgacccggtctgcattacttcttggtatccgtgactcaatggaacccgtggtggaacagctaacccaggaattctgtgaaagaatgcgggcacagccgggaacacctgtggccatcgaggaagagttctctttgttaacatgttccataatctgctatttaaccttcggggacaaaatcaaggacgacaatctgatgcccgcatattacaagtgcattcaggaggtgctaaaaacttggtctcactggtctatccagattgtggacgtgataccttttctgcgcttcttccccaaccctggtctccggagacttaagcaggcaatcgaaaaacgcgatcatattgtggagatgcaattgagacagcataaggagtccctggtcgccggacagtggagggacatgatggattatatgttgcagggagtggcacagccctccatggaagagggaagtggccagttactggaagggcacgtgcatatggcagccgtggacttgctaatcggaggaacagagactacagctaatacactgtcttgggcagtcgtttttcttctccatcatcccgaaatacagcagcggcttcaggaggagttggatcacgagctgggccctggagcctccagttcgcgagttccatataaggaccgtgctcgcctgccattgctcaatgctaccattgccgaggttctaagactcaggccagttgtccccctggccctcccccatagaacaactcggccttcttctataagtggctacgacatcccggagggcaccgtgattattcccaacctgcagggggcacatctcgacgagactgtgtgggagaggcctcacgagttttggcctgacaggtttctcgaaccaggaaagaactctcgcgcactagcgtttggctgcggcgcacgggtgtgcctgggcgagcctttggccagactagaactgttcgtcgtcttgactcggttgcttcaagccttcacattgctcccatccggggatgctcttccgtccttgcaacccttgcctcactgttccgtcatcctgaagatgcagcccttccaagtgcgattacagccaagaggtatgggcgctcattccccagggcaaagccagtag

SEQ ID NO: 9898 - DNA, 1488 bp, Artificial Sequence
  derived and/or modified sequence
atgttgttgctgggactccttctgctgctgcccttgttagccggtgctcgtctgctttggaattggtggaagctgcgatccttgcatctgcctccactggccccaggattccttcacttgctccagcctgaccttccaatctacctgctgggattaacccagaagttcgggcctatctatcgattgcacctcggcttgcaagacgttgtagttctaaacagcaaaaggaccatcgaggaggccatggtgaagaaatgggcggacttcgcagggagaccagagcctttaacctataagctggtgtcccgaaactatcccgacctcagcctgggggactatagtttgctctggaaagcccacaaaaagctgactcggagcgcattgctgttgggaatcagggattccatggaacctgtagtggagcagctcacccaggagttttgcgagagaatgcgcgcacagcctggcacaccagttgctatcgaggaagaattttccctgctgacctgttccattatctgttacctcactttcggcgataaaatcaaagacgataatctcatgcctgcttactacaaatgcattcaggaggtgttgaagacttggtcacactggagcatccagatagtagatgtgatccccttcttaaggtttttcccaaatccgggacttcgaaggctcaagcaggctatcgagaaacgagaccacattgttgaaatgcagctgagacagcacaaggagtccctggttgctggccaatggagggatatgatggactacatgttgcagggcgtcgcgcagcctagtatggaggagggctcaggacaactccttgaaggccacgtgcacatggctgccgtggatctcctgattggtggtactgaaaccaccgctaacactctatcctgggccgtcgtcttcctgctgcaccatccagagatacagcaacggttacaggaagagctcgaccacgagctgggaccaggcgctagcagctcccgggtcccctacaaagatagagcgagactgcctctcttgaatgccacgatcgctgaggtgctgagactgcgtccagtggttcccttggcccttccacacaggactactcggcctagttccattagcgggtacgacatccccgagggaacggtgataattcctaatctgcagggagcacacttggacgagacagtgtgggagcgaccccacgaattctggcccgaccggttcctggagcccggaaaaaactccagagccctggcgttcgggtgcggtgcccgagtgtgtctgggcgagcctttggcaaggctggaacttttcgtggtccttacaaggctgctgcaagccttcactcttctgccctctggagatgcgctgccttccctccagccactaccccattgttcagtaattttgaaaatgcagcccttccaggtgcgcctgcagcccaggggcatgggtgcccattctccaggacagtctcagtag

SEQ ID NO: 9899 - DNA, 1485 bp, Artificial Sequence
  derived and/or modified sequence
atgctcctcctcggcttgctgctgcttccactcttggctggcgcaaggcttttatggaattggtggaagctgcgctccttacacctgccgcctctggctccagggttcctccatctccttcaaccagatctgcctatttacctcctgggcctcactcaaaagttcggcccaatctatagactccacttaggcctgcaggacgtagtggtgctgaattccaaaagaaccattgaggaggcaatggtgaagaaatgggcagacttcgccggtagaccggaacctctaacatacaagttagtgtctaagaactatcccgatctgagtctcggagattatagcttactgtggaaagcccataagaagttaaccaggtccgccctgctactcggcattagggacagcatggaacctgtggtagagcagttgacccaggaattttgtgaacgaatgcgggctcaaccaggaacccctgtggcaatcgaagaggaattctccctcttaacctgctctatcatttgctacctgacctttggggacaagatcaaagatgataatttgatgcctgcctactacaagtgtatacaagaggtgcttaaaacttggtcacattggagtattcagatcgttgatgtaattccatttctgcgattttttccaaatcctggattgcgtaggctcaagcaagccatagagaaacgcgaccatatcgtggagatgcaattgcgccagcacaaggagtccctggtggcgggtcagtggcgggatatgatggattacatgttgcaaggggtcgcccaacctagtatggaggaaggatcgggccaattactggagggccatgtccacatggccgcagtggatctcttgataggagggactgaaacaacagctaacactctgagctgggctgtggtcttcctccttcaccatccagaaatccagcagagactgcaggaagagctggatcacgagctgggaccaggcgctagctcatccagggtgccttataaggatcgcgcacgtttaccacttttaaacgccactattgctgaagtgcttaggctaaggcccgtggtcccactcgcactccctcaccggacaacccgtccgtcctctataagcggatatgacattcccgagggaaccgtgataatccccaatctgcaaggcgctcaccttgacgagacagtctgggaacggccacacgaattctggccagacaggttcctggagcccggtaaaaactcccgcgcactggccttcggctgtggggcaagggtgtgcctaggcgaaccactggccagactggagttgttcgtcgtgttaacgcgactcctccaggctttcacgctgcttccgagcggcgacgcactgcccagtctccagccacttcctcactgctctgttatcctcaagatgcaaccctttcaggtgcgcttacagccaagaggaatgggggctcatagtcctggacagaaccaatag

SEQ ID NO: 9900 - DNA, 1485 bp, Artificial Sequence
  derived and/or modified sequence
atgctgctgctgggcctgctgctattgccactgcttgctggggcacggctgctatggaactggtggaagttacgctccctccatctgccacctctggccccaggatttctacatcttctccagccagatcttccaatctatctgctgggcttaacacaaaagttcggcccaatctaccgcttacacttgggcctccaggatgtcgtcgttctcaatagtaagagaaccatcgaggaagctatggttaaaaagtgggctgatttcgcgggacgcccagagccattgacctataagcttgtcagcaaaaattaccctgatttgagcttgggcgactactcactgctgtggaaggcacataaaaaactgacaagaagcgcgctgctgctggggattcgggactctatggaaccagttgtggaacagcttacccaggagttttgcgaacggatgcgggctcagccgggaacacccgttgctattgaggaggagtttagcctgctgacctgttccatcatctgctacctgacctttggggataagataaaagacgacaatctcatgcctgcatactacaaatgcattcaagaggttctgaaaacttggagccactggagtatacagatcgtggatgtcatcccttttctgcgctttttccctaatccagggttgcggaggctaaagcaggcgatagagaaaagagaccacatcgtcgaaatgcagcttaggcagcataaggagtcactggtggcgggacagtggcgcgacatgatggactacatgctacagggggtggcccagccttctatggaggaaggatcagggcagctcctggaaggccatgtccacatggctgcagtggatttgctgatcggcggaacagagacaactgcaaacacacttagctgggccgtcgtgttcttgctgcatcaccccgaaattcagcagagactacaggaggagctggatcacgaattagggccaggtgcatcctctagtagggttccttataaggaccgcgcaagactccccctgctcaatgcaaccattgccgaggtgctgcgcctgaggcccgtggttcctctggcgctgccacatagaactacccgcccttcatctatttcgggttatgatataccagaggggacggttatcatccccaacctgcaaggggctcacttagatgagacagtgtgggagcgaccccatgagttctggcccgacagatttcttgagcctggaaagaattcacgggctcttgccttcggctgtggcgcacgagtctgtctgggagagcctctcgccagactcgaactgtttgtcgttctgactcgactactgcaagcttttaccttgctcccttcaggggacgctctgcctagcttgcagcccctaccccactgctcagtgattctgaaaatgcagccttttcaggttagactgcagccaagaggcatgggtgcccattcacccggtcaaaatcagtag

SEQ ID NO: 9901 - DNA, 1488 bp, Artificial Sequence
  derived and/or modified sequence
atgttgttattaggtttactgcttttgctgccactgctagccggagcccgattgttgtggaattggtggaagcttcggtcactgcatctccccccattagccccaggtttcctgcatctactgcaacctgaccttcccatatacctgctagggctgacccagaagtttgggccaatttaccggctccatttgggactccaggacgtggtggtcttaaacagtaagcggacaatcgaagaagccatggtgaagaagtgggctgacttcgccggaagacccgagcctctcacatataagctcgtcagtcgcaattaccccgacctgagcctgggggactattcccttctgtggaaggctcacaaaaagctcacccggagcgccctgctgttgggaatccgggattccatggagccagtggtcgagcaactgacgcaagagttctgcgaacgaatgagagctcaacctggcaccccagtggccatcgaggaagaattctctctgctgacctgttcaattatctgctatcttacatttggcgacaagattaaggatgacaatctgatgcccgcttactataaatgcatacaggaggttttgaagacctggagtcactggtcgatccagattgtggacgtgatcccctttctgcgcttcttccccaatcccggactccggagattgaagcaggcgatcgagaagcgcgatcacatagtggagatgcagctcaggcagcataaagaaagccttgtcgcgggacagtggcgcgatatgatggattacatgctgcagggcgtggcacaaccgagtatggaggagggctctggccagttgctcgaggggcacgttcatatggctgctgtggatctactgatcgggggaaccgaaacgacagcaaacacactgtcgtgggctgtcgtgttcctgttgcatcatccagaaattcaacagaggctacaggaggaactcgaccacgagttgggccctggagcaagctcgagcagagtcccttataaggacagagcaagacttcctctgctgaacgctacgatcgccgaagttcttcggctgaggcctgttgtccccctggcattgccacaccgcaccactaggccatccagcatctcaggctacgatattcccgagggcaccgttattatccccaaccttcaaggcgctcacctcgacgaaactgtttgggaacgaccccacgagttctggcccgaccggtttctcgaacccggaaagaacagcagagccttagcttttggatgtggagctcgcgtatgcttgggagaaccactagctagacttgaactctttgtggttcttactagactgttgcaggcttttactcttctgccaagtggggacgctctgccttctttgcagccactgccacactgctctgtcattctgaaaatgcaacctttccaagtgcggttacaacctcgtggaatgggagcgcatagcccaggacaaagccagtag

SEQ ID NO: 9902 - DNA, 1488 bp, Artificial Sequence
  derived and/or modified sequence
atgctactgcttgggctcctactcctcctgcctctcctggccggtgccaggctgttgtggaattggtggaaattgaggagcttgcatttgctgcctctggctcccggtttcctgcatttgctacagccagacctgccaatttacctgctcggtttgacgcaaaaattcggtcctatttaccgtctgcacctgggtctgcaggacgtggttgtcctaaattctaagcgtacaatcgaggaggccatggttaagaagtgggcagacttcgccggaagacctgaaccattgacttataaacttgtgtccaaaaattatccggatctctccctcggcgactatagcctgctgtggaaagcgcacaagaagttaacacgctccgccctgctgttaggaatccgggattcaatggagcctgttgtagaacagctgacccaggagttctgcgagcgcatgcgcgcacaacctgggacacccgtcgctattgaagaggaattttccttgttaacctgcagcatcatttgttatttgacctttggggataagattaaagacgataacttaatgcccgcatactacaagtgcatccaggaagttcttaagacctggtcccattggtctatccagattgttgacgtcatcccgttcctgaggttctttccaaaccccggtctccggaggttgaagcaggcgatagaaaagcgagatcacattgtcgaaatgcaactgagacagcataaggagtcactggtcgcaggtcagtggcgggatatgatggattatatgctacagggcgtcgcccagccttcaatggaggagggttcaggccagctgttggagggtcacgtccatatggccgctgtcgacctgctcatcgggggaacagagactaccgctaacacgctgagttgggctgtagtttttctgctgcatcaccctgaaattcaacagcgtctgcaggaggaattggaccacgaactggggccaggggcttcatccagccgggtcccctataaagatagggcccgactccctcttttaaatgccacaatagcagaggtcctccggctccgacctgttgtacctctcgccctcccacacaggacaacacggccttccagtatcagcggatacgacatccccgagggcaccgtgatcattcctaatcttcagggcgctcatctggacgaaacagtctgggagcgccctcatgaattttggcccgatcgcttcctggaaccaggtaagaacagtagggcactggccttcgggtgtggtgcccgtgtgtgtctgggagagccccttgcccgattagagctctttgtggtattgacacgcctcctgcaggccttcacgctgctgccctcaggagatgctctgccgtccttgcagcctctgccacattgttccgtgatcttgaagatgcaaccattccaggtaagactccagcccaggggaatgggagcccatagcccaggtcagaaccagtag

SEQ ID NO: 9903 - DNA, 1488 bp, Artificial Sequence
  derived and/or modified sequence
atgctcctcctcggcttacttctcctgttgcctttgctcgctggggctcgcctcctgtggaactggtggaagctgcgcagtctgcatttacccccactcgctccaggattcttacacctgctgcaacccgacttgccaatctatctgctcggtctgacacaaaaatttggcccaatttatagactgcacttgggccttcaggacgttgttgtgctgaattctaaaagaacaattgaggaagctatggtcaagaagtgggccgactttgctggcaggcctgagccacttacctacaagctggtgtcaaaaaactaccctgatctctccctgggagactatagtctcctgtggaaggcccataagaaactgacccgaagcgcccttctactgggcataagagacagcatggaacccgtggttgaacagcttacacaggaattttgcgaaaggatgagagcacagcctggaactcccgtcgcaatcgaggaggagttctcactgctgacatgctctatcatatgttaccttacattcggcgacaaaattaaggacgacaacctcatgccggcttactacaagtgtatccaggaggtgctcaaaacatggtcacactggtccatccaaatcgtcgatgtcattcccttcctgaggttcttcccaaatccgggtctccggagactgaagcaggctatagagaagcgggatcatattgttgaaatgcagctgcggcagcacaaggaaagtttggtggcagggcagtggagagatatgatggactatatgctacagggtgtggcccagccatcaatggaggaaggctcaggccagctgctagagggacacgttcatatggccgcagtggacctccttatagggggaactgagacgacggcgaacacactgagctgggccgtggtctttcttcttcatcatccggaaatccagcagagattacaggaggagctagatcacgaactcggtcctggagcttcttcctcccgggtcccatacaaagatcgggctcgccttccattactgaacgccactattgcagaggtgctgcgcctgcgccctgttgtccctcttgcgctgcctcataggactacccgccctagctctatctcaggttacgacattccggaggggaccgttatcattcccaatcttcagggcgctcaccttgacgagactgtttgggaacgtccccacgaattttggcccgaccggttcctggagccaggtaagaattcccgtgcactggctttcggttgtggcgcaagagtgtgtttaggggaaccactggcgaggcttgaacttttcgtcgtcctcacccgtctgcttcaagcttttacgcttctgccgagtggcgatgccctgccctctctgcagccactgccccattgctctgtcatcctgaaaatgcaaccatttcaggtccggctccagccacggggaatgggtgctcattcgccgggacagaaccagtag

SEQ ID NO: 9904 - DNA, 2121 bp, Artificial Sequence
  derived and/or modified sequence
gggtcggtgggagggtacctgaaggtggggtcaagggaggccccaaaacagtctacacagcaggagggatggctggggctcttgagctataagtggcacctcagggccctgacgggcgtctcgccatgctgctcctgggcctgctgctgctgctgcccctgctggctggcgcccgcctgctgtggaactggtggaagctccggagcctccacctcccgcctcttgccccgggcttcttgcacttgctgcagcccgacctcccaatctatctgcttggcctgactcagaaattcgggcccatctacaggctccaccttgggctgcaagatgtggtggtgctgaactccaagaggaccattgaggaagccatggtcaaaaagtgggcagactttgctggcagacctgagccacttacctacaagctggtgtctaggaactacccggacctgtccttgggagactactccctgctctggaaagcccacaagaagctcacccgctcagccctgctgctgggcatccgtgactccatggagccagtggtggagcagctgacccaggagttctgtgagcgcatgagagcccagcccggcacccctgtggccattgaggaggaattctctctcctcacctgcagcatcatctgttacctcaccttcggagacaagatcaaggacgacaacttaatgcctgcctattacaaatgtatccaggaggtgttaaaaacctggagccactggtccatccaaattgtggacgtgattccctttctcaggttcttccccaatccaggtctccggaggctgaagcaggccatagagaagagggatcacatcgtggagatgcagctgaggcagcacaaggagagcctcgtggcaggccagtggagggacatgatggactacatgctccaaggggtggcgcagccgagcatggaagagggctctggacagctcctggaagggcacgtgcacatggctgcagtggacctcctgatcggtggcactgagaccacagcaaacaccctctcctgggccgtggtttttttgcttcaccaccctgagattcagcagcgactgcaggaggagctagaccacgaactgggccctggtgcctccagctcccgggtcccctacaaggaccgtgcacggctgcccttgctcaatgccaccatcgccgaggtgctgcgcctgcggcccgttgtgcccttagccttgccccaccgcaccacacggcccagcagcatctccggctacgacatccctgagggcacagtcatcattccgaacctccaaggcgcccacctggatgagacggtctgggagaggccacatgagttctggcctgatcgcttcctggagccaggcaagaactccagagctctggccttcggctgcggtgcccgcgtgtgcctgggcgagccgctggcgcgcctggagctcttcgtggtgctgacccgactgctgcaggccttcacgctgctgccctccggggacgccctgccctccctgcagcccctgccccactgcagtgtcatcctcaagatgcagcctttccaagtgcggctgcagccccgggggatgggggcccacagcccgggccagagccagtgatggggcaggaccgatgccagccgggtacctcagtttctcctttattgctcctgtacgaacccctcccctcccccctgtaaacacagtgctgcgagatcgctggcagagaaggcttcctccagcggctgggtggtgaaggaccctggctcttctctcggggcgacccctcagtgctcggcagtcatactggggtgcgagagaggtgggcagcagctcagcctccccccgctggggagcgaaagtttcttggtctcagcttcatttccgtgaagggcaccgagaactcgaagcccttccagtggtaccagctcactccctgggaaaggggttgtcaagagagagtcaaagccggatgtcccatctgctcttcccgttccccttaaggaggtagctcccagcactcaaccaacctccccgcagagctcccttcctgaccctccgctgcagaggattgaggcttaattctgagctggccctttccagccaataaatcaactccagctccctc

SEQ ID NO: 9905 - DNA, 2182 bp, Artificial Sequence
  derived and/or modified sequence
ggtgtcattccagaaaagggccactctgtgggcgggtcggtgggagggtacctgaaggtggggtcaagggaggccccaaaacagtctacacagcaggagggatggctggggctcttgagctataagtggcacctcagggccctgacgggcgtctcgccatgctgctcctgggcctgctgctgctgctgcccctgctggctggcgcccgcctgctgtggaactggtggaagctccggagcctccacctcccgcctcttgccccgggcttcttgcacctgctgcagcccgacctccccatctatctgcttggcctgactcagaaattcgggcccatctacaggctccaccttgggctgcaagatgtggtggtgctgaactccaagaggaccattgaggaagccatggtcaaaaagtgggcagactttgctggcagacctgagccacttacctacaagctggtgtctaggaactacccggacctgtccttgggagactactccctgctctggaaagcccacaagaagctcacccgctcagccctgctgctgggcatccgtgactccatggagccagtggtggagcagctgacccaggagttctgtgagcgcatgagagcccagcccggcacccctgtggccattgaggaggaattctctctcctcacctgcagcatcatctgttacctcaccttcggagacaagatcaaggacgacaacttaatgcctgcctattacaaatgtatccaggaggtgttaaaaacctggagccactggtccatccaaattgtggacgtgattccctttctcaggttcttccccaatccaggtctccggaggctgaagcaggccatagagaagagggatcacatcgtggagatgcagctgaggcagcacaaggagagcctcgtggcaggccagtggagggacatgatggactacatgctccaaggggtggcgcagccgagcatggaagagggctctggacagctcctggaagggcacgtgcacatggctgcagtggacctcctgatcggtggcactgagaccacagcaaacaccctctcctgggccgtggtttttttgcttcaccaccctgagattcagcagcgactgcaggaggagctagaccacgaactgggccctggtgcctccagctcccgggtcccctacaaggaccgtgcacggctgcccttgctcaatgccaccatcgccgaggtgctgcgcctgcggcccgttgtgcccttagccttgccccaccgcaccacacggcccagcagcatctccggctacgacatccctgagggcacagtcatcattccgaacctccaaggcgcccacctggatgagacggtctgggagaggccacatgagttctggcctgatcgcttcctggagccaggcaagaactccagagctctggccttcggctgcggtgcccgcgtgtgcctgggcgagccgctggcgcgcctggagctcttcgtggtgctgacccgactgctgcaggccttcacgctgctgccctccggggacgccctgccctccctgcagcccctgccccactgcagtgtcatcctcaagatgcagcctttccaagtgcggctgcagccccgggggatgggggcccacagcccgggccagagccagtgatggggcaggaccgatgccagccgggtacctcagtttctcctttattgctcccgtacgaacccctcccctcccccctgtaaacacagtgctgcgagatcgctggcagagaaggcttcctccagcggctgggtggtgaaggaccctggctcttctctcggggcgacccctcagtgctcggcagtcatactggggtgcgagagaggtgggcagcagctcagcctccccccgctggggagcgaaagtttcttggtctcagcttcatttccgtgaagggcaccgagaactcgaagcccttccagtggtaccagctcactccctgggaaaggggttgtcaagagagagtcaaagccggatgtcccatctgctcttcccgttccccttaaggaggtagctcccagcactcaaccaacctccccgcagagctcccttcctgaccctccgctgcagaggattgaggcttaattctgagctggccctttccagccaataaatcaactccagctccctctgcgaggctggcatgattgttccatttc

SEQ ID NO: 9906 - DNA, 2118 bp, Artificial Sequence
  derived and/or modified sequence
gggtcggtgggagggtacctgaaggtggggtcaagggaggccccaaaacagtctacacagcaggagggatggctggggctcttgagctataagtggcacctcagggccctgacgggcgtctcgccatgctgctcctgggcctgctgctgctgcccctgctggctggcgcccgcctgctgtggaactggtggaagctccggagcctccacctcccgcctcttgccccgggcttcttgcacttgctgcagcccgacctcccaatctatctgcttggcctgactcagaaattcgggcccatctacaggctccaccttgggctgcaagatgtggtggtgctgaactccaagaggaccattgaggaagccatggtcaaaaagtgggcagactttgctggcagacctgagccacttacctacaagctggtgtctaagaactacccggacctgtccttgggagactactccctgctctggaaagcccacaagaagctcacccgctcagccctgctgctgggcatccgtgactccatggagccagtggtggagcagctgacccaggagttctgtgagcgcatgagagcccagcccggcacccctgtggccattgaggaggaattctctctcctcacctgcagcatcatctgttacctcaccttcggagacaagatcaaggacgacaacttaatgcctgcctattacaaatgtatccaggaggtgttaaaaacctggagccactggtccatccaaattgtggacgtgattccctttctcaggttcttccccaatccaggtctccggaggctgaagcaggccatagagaagagggatcacatcgtggagatgcagctgaggcagcacaaggagagcctcgtggcaggccagtggagggacatgatggactacatgctccaaggggtggcgcagccgagcatggaagagggctctggacagctcctggaagggcacgtgcacatggctgcagtggacctcctgatcggtggcactgagaccacagcaaacaccctctcctgggccgtggtttttttgcttcaccaccctgagattcagcagcgactgcaggaggagctagaccacgaactgggccctggtgcctccagctcccgggtcccctacaaggaccgtgcacggctgcccttgctcaatgccaccatcgccgaggtgctgcgcctgcggcccgttgtgcccttagccttgccccaccgcaccacacggcccagcagcatctccggctacgacatccctgagggcacagtcatcattccgaacctccaaggcgcccacctggatgagacggtctgggagaggccacatgagttctggcctgatcgcttcctggagccaggcaagaactccagagctctggccttcggctgcggtgcccgcgtgtgcctgggcgagccgctggcgcgcctggagctcttcgtggtgctgacccgactgctgcaggccttcacgctgctgccctccggggacgccctgccctccctgcagcccctgccccactgcagtgtcatcctcaagatgcagcctttccaagtgcggctgcagccccgggggatgggggcccacagcccaggccagaaccagtgatggggcaggaccgatgccagccgggtacctcagtttctcctttattgctcccgtacgaacccctcccctcccccctgtaaacacagtgctgcgagatcgctggcagagaaggcttcctccagcggctgggtggtgaaggaccctggctcttctctcggggcgacccctcagtgctcggcagtcatactggggtgcgagagaggtgggcagcagctcagcctccccccgctggggagcgaaagtttcttggtctcagcttcatttccgtgaagggcaccgagaactcgaagcccttccagtggtaccagctcactccctgggaaaggggttgtcaagagagagtcaaagccggatgtcccatctgctcttcccgttccccttaaggaggtagctcccagcactcaaccaacctccccgcagagctcccttcctgaccctccgctgcagaggattgaggcttaattctgagctggccctttccagccaataaatcaactccagctccctc

SEQ ID NO: 9907 - DNA, 2114 bp, Artificial Sequence
  derived and/or modified sequence
gggtcggtgggagggtacctgaaggtggggtcaagggaggccccaaaacagtctacacagcaggagggatggctggggctcttgagctataagtggcacctcagggccctgacgggcgtctcgccatgctgctcctgggcctgctgctgctgcccctgctggctggcgcccgcctgctgtggaactggtggaagctccggagcctccacctcccgcctcttgccccgggcttcttgcacttgctgcagcccgacctcccaatctatctgcttggcctgactcagaaattcgggcccatctacaggctccaccttgggctgcaagatgtggtggtgctgaactccaagaggaccattgaggaagccatggtcaaaaagtgggcagactttgctggcagacctgagccacttacctacaagctggtgtctaagaactacccggacctgtccttgggagactactccctgctctggaaagcccacaagaagctcacccgctcagccctgctgctgggcatccgtgactccatggagccagtggtggagcagctgacccaggagttctgtgagcgcatgagagcccagcccggcacccctgtggccattgaggaggaattctctctcctcacctgcagcatcatctgttacctcaccttcggagacaagatcaaggacgacaacttaatgcctgcctattacaaatgtatccaggaggtgttaaaaacctggagccactggtccatccaaattgtggacgtgattccctttctcaggttcttccccaatccaggtctccggaggctgaagcaggccatagagaagagggatcacatcgtggagatgcagctgaggcagcacaaggagagcctcgtggcaggccagtggagggacatgatggactacatgctccaaggggtggcgcagccgagcatggaagagggctctggacagctcctggaagggcacgtgcacatggctgcagtggacctcctgatcggtggcactgagaccacagcaaacaccctctcctgggccgtggtttttttgcttcaccaccctgagattcagcagcgactgcaggaggagctagaccacgaactgggccctggtgcctccagctcccgggtcccctacaaggaccgtgcacggctgcccttgctcaatgccaccatcgccgaggtgctgcgcctgcggcccgttgtgcccttagccttgccccaccgcaccacacggcccagcagcatctccggctacgacatccctgagggcacagtcatcattccgaacctccaaggcgcccacctggatgagacggtctgggagaggccacatgagttctggcctgatcgcttcctggagccaggcaagaactccagagctctggccttcggctgcggtgcccgcgtgtgcctgggcgagccgctggcgcgcctggagctcttcgtggtgctgacccgactgctgcaggccttcacgctgctgccctccggggacgccctgccctccctgcagcccctgccccactgcagtgtcatcctcaagatgcagcctttccaagtgcggctgcagccccgggggatgggggcccacagcccaggccagaaccagtgatggggcaggaccgatgccagccgggtacctcagtttctcctttattgctcccgtacgaacccctcccctcccccctgtaaacacagtgctgcgagatcgctggcagagaaggcttcctccagcggctgggtggtgaaggaccctggctcttctctcggggcgacccctcagtgctcggcagtcatactggggtgcgagagaggtgggcagcagctcagcctccccccgctggggagcgaaagtttcttggtctcagcttcatttccgtgaagggcaccgagaactcgaagcccttccagtggtaccagctcactccctgggaaaggggttgtcaagagagagtcaaagccggatgtcccatctgctcttcccgttccccttaaggaggtagctcccagcactcaaccaacctccccgcagagctcccttcctgaccctccgctgcagaggattgaggcttaattctgagctggccctttccagccaataaatcaactccagctc

SEQ ID NO: 9908 - DNA, 2121 bp, Artificial Sequence
  derived and/or modified sequence
gggtcggtgggagggtacctgaaggtggggtcaagggaggccccaaaacagtctacacagcaggagggatggctggggctcttgagctataagtggcacctcagggccctgacgggcgtctcgccatgctgctcctgggcctgctgctgctgctgcccctgctggctggcgcccgcctgctgtggaactggtggaagctccggagcctccacctcccgcctcttgccccgggcttcttgcacttgctgcagcccgacctcccaatctatctgcttggcctgactcagaaattcgggcccatctacaggctccaccttgggctgcaagatgtggtggtgctgaactccaagaggaccattgaggaagccatggtcaaaaagtgggcagactttgctggcagacctgagccacttacctacaagctggtgtctaggaactacccggacctgtccttgggagactactccctgctctggaaagcccacaagaagctcacccgctcagccctgctgctgggcatccgtgactccatggagccagtggtggagcagctgacccaggagttctgtgagcgcatgagagcccagcccggcacccctgtggccattgaggaggaattctctctcctcacctgcagcatcatctgttacctcaccttcggagacaagatcaaggacgacaacttaatgcctgcctattacaaatgtatccaggaggtgttaaaaacctggagccactggtccatccaaattgtggacgtgattccctttctcaggttcttccccaatccaggtctccggaggctgaagcaggccatagagaagagggatcacatcgtggagatgcagctgaggcagcacaaggagagcctcgtggcaggccagtggagggacatgatggactacatgctccaaggggtggcgcagccgagcatggaagagggctctggacagctcctggaagggcacgtgcacatggctgcagtggacctcctgatcggtggcactgagaccacagcaaacaccctctcctgggccgtggtttttttgcttcaccaccctgagattcagcagcgactgcaggaggagctagaccacgaactgggccctggtgcctccagctcccgggtcccctacaaggaccgtgcacggctgcccttgctcaatgccaccatcgccgaggtgctgcgcctgcggcccgttgtgcccttagccttgccccaccgcaccacacggcccagcagcatctctggctacgacatccctgagggcacagtcatcattccgaacctccaaggcgcccacctggatgagacggtctgggagaggccacatgagttctggcctgatcgcttcctggagccaggcaagaactccagagctctggccttcggctgcggtgcccgcgtgtgcctgggcgagccgctggcgcgcctggagctcttcgtggtgctgacccgactgctgcaggccttcacgctgctgccctccggggacgccctgccctccctgcagcccctgccccactgcagtgtcatcctcaagatgcagcctttccaagtgcggctgcagccccgggggatgggggcccacagcccgggccagagccagtgatggggcaggaccgatgccagccgggtacctcagtttctcctttattgctcccgtacgaacccctcccctcccccctgtaaacacagtgctgcgagatcgctggcagagaaggcttcctccagcggctgggtggtgaaggaccctggctcttctctcggggcgacccctcagtgctcggcagtcatactggggtgcgagagaggtgggcagcagctcagcctccccccgctggggagcgaaagtttcttggtctcagcttcatttccgtgaagggcaccgagaactcgaagcccttccagtggtaccagctcactccctgggaaaggggttgtcaagagagagtcaaagccggatgtcccatctgctcctcccgttccccttaaggaggtggctcccagcactcaaccaacctccccgcagagctcccttcctgaccctctgccgcagaggattgaggcttaatcctgagctggtcctttccagccaataaatcaactccagctccctc

SEQ ID NO: 9909 - DNA, 2114 bp, Artificial Sequence
  derived and/or modified sequence
tgggaaggcacctgagggtggggtcaagggaggccccaaaacagtctacacagcaggagggatggctggggctcttgagctataagtggcacctcagggccctgacgggcgtcttgccatgctgctcctgggcctgctgctgctgctgcccctgctggctggcgcccgcctgctgtggaactggtggaagctccggagcctccacctcctgcctcttgccccgggcttcttgcacctgctgcagcccgacctccccatctatctgcttggcctgactcagaaattcgggcccatctacaggctccaccttgggctgcaagatgtggtggtgctgaactccaagaggaccattgaggaagccatggtcaaaaagtgggcagactttgctggcagacctgagccacttacctacaagctggtgtctaagaactacccggacctgtccttgggagactactccctgctctggaaagcccacaagaagctcacccgctcagccctgctgctgggcatccgtgactccatggagccagtggtggagcagctgacccaggagttctgtgagcgcatgagagcccagcccggcacccctgtggccattgaggaggaattctctctcctcacctgcagcatcatctgttacctcaccttcggagacaagatcaaggacgacaacttaatgcctgcctattacaaatgtatccaggaggtgttaaaaacctggagccactggtccatccaaattgtggacgtgattccctttctcaggttcttccccaatccaggtctccggaggctgaagcaggccatagagaagagggatcacatcgtggagatgcagctgaggcagcacaaggagagcctcgtggcaggccagtggagggacatgatggactacatgctccaaggggtggcgcagccgagcatggaagagggctctggacagctcctggaagggcacgtgcacatggctgcagtggacctcctgatcggtggcactgagaccacagcaaacaccctctcctgggccgtggtttttttgcttcaccaccctgagattcagcagcgactgcaggaggagctagaccacgaactgggccctggtgcctccagctcccgggtcccctacaaggaccgtgcacggctgcccttgctcaatgccaccatcgccgaggtgctgcgcctgcggcccgttgtgcccttagccttgccccaccgcaccacacggcccagcagcatctccggctacgacatccctgagggcacagtcatcattccgaacctccaaggcgcccacctggatgagacggtctgggagaggccacatgagttctggcctgatcgcttcctggagccaggcaagaactccagagctctggccttcggctgcggtgcccgcgtgtgcctgggcgagccgctggcgcgcctggagctcttcgtggtgctgacccgactgctgcaggccttcacgctgctgccctccggggacgccctgccctccctgcagcccctgccccactgcagtgtcatcctcaagatgcagcctttccaagtgcggctgcagccccgggggatgggggcccacagcccaggccagaaccagtgatggggcaggaccgatgccagccgggtacctcagtttctcctttattgctcccgtacgaacccctcccctcccccctgtaaacacagtgctgcgagatcgctggcagagaaggcttcctccagcggctgggtggtgaaggaccctggctcttctctcggggcgacccctcagtgctcggcagtcatactggggtgcgagagaggtgggcagcagctcagcctccccccgctggggagcgaaagtttcttggtctcagcttcatttccgtgaagggcaccgagaactcgaagcccttccagtggtaccagctcactccctgggaaaggggttgtcaagagagagtcaaagccggatgtcccatctgctcttcccgttccccttaaggaggtagctcccagcactcaaccaacctccccgcagagctcccttcctgaccctccgctgcagaggattgaggcttaattctgagctggccctttccagccaataaatcaactccagctccctc

SEQ ID NO: 9910 - DNA, 1965 bp, Artificial Sequence
  derived and/or modified sequence
gtcaagggaggccccaaaacagtctacacagcaggagggatggctggggctcttgagctataagtggcacctcagggccctgacgggcgtcttgccatgctgctcctgggcctgctgctgctgctgcccctgctggctggcgcccgcctgctgtggaactggtggaagctccggagcctccacctcccgcctcttgccccgggcttcttgcacttgctgcagcccgacctcccaatctatctgcttggcctgactcagaaattcgggcccatctacaggctccaccttgggctgcaagatgtggtggtgctgaactccaagaggaccattgaggaagccatggtcaaaaagtgggcagactttgctggcagacctgagccacttacctacaagctggtgtctaagaactacccggacctgtccttgggagactactccctgctctggaaagcccacaagaagctcacccgctcagccctgctgctgggcatccgtgactccatggagccagtggtggagcagctgacccaggagttctgtgagcgcatgagagcccagcccggcacccctgtggccattgaggaggaattctctctcctcacctgcagcatcatctgttacctcaccttcggagacaagatcaaggacgacaacttaatgcctgcctattacaaatgtatccaggaggtgttaaaaacctggagccactggtccatccaaattgtggacgtgattccctttctcaggttcttccccaatccaggtctccggaggctgaagcaggccatagagaagagggatcacatcgtggagatgcagctgaggcagcacaaggagagcctcgtggcaggccagtggagggacatgatggactacatgctccaaggggtggcgcagccgagcatggaagagggctctggacagctcctggaagggcacgtgcacatggctgcagtggacctcctgatcggtggcactgagaccacagcaaacaccctctcctgggccgtggtttttttgcttcaccaccctgagattcagcagcgactgcaggaggagctagaccacgaactgggccctggtgcctccagctcccgggtcccctacaaggaccgtgcacggctgcccttgctcaatgccaccatcgccgaggtgctgcgcctgcggcccgttgtgcccttagccttgccccaccgcaccacacggcccagcagcatctccggctacgacatccctgagggcacagtcatcattccgaacctccaaggcgcccacctggatgagacggtctgggagaggccacatgagttctggcctgatcgcttcctggagccaggcaagaactccagagctctggccttcggctgcggtgcccgcgtgtgcctgggcgagccgctggcgcgcctggagctcttcgtggtgctgacccgactgctgcaggccttcacgctgctgccctccggggacgccctgccctccctgcagcccctgccccactgcagtgtcatcctcaagatgcagcctttccaagtgcggctgcagccccgggggatgggggcccacagcccaggccagaaccagtgatggggcaggaccgatgccagccgggtacctcagtttctcctttattgctcccgtacgaacccctcccctcccccctgtaaacacagtgctgcgagatcgctggcagagaaggcttcctccagcggctgggtggtgaaggaccctggctcttctctcggggcgacccctcagtgctcggcagtcatactggggtgcgagagaggtgggcagcagctcagcctccccccgctggggagcgaaagtttcttggtctcagcttcatttccgtgaagggcaccgagaactcgaagcccttccagtggtaccagctcactccctgggaaaggggttgtcaagagagagtcaaagccggatgtcccatctgctcttcccgttcccctt

SEQ ID NO: 9911 - DNA, 1488 bp, Artificial Sequence
  derived and/or modified sequence
atgctgctgctgggcctgctgctgctgctgcccctgctggccggcgccagactgctgtggaactggtggaagctgagaagcctgcacctgccccccctggcccccggcttcctgcacctgctgcagcccgacctgcccatctacctgctgggcctgacccagaagttcggccccatctacagactgcacctgggcctgcaggacgtggtggtgctgaacagcaagagaaccatcgaggaggccatggtgaagaagtgggccgacttcgccggcagacccgagcccctgacctacaagctggtgagcagaaactaccccgacctgagcctgggcgactacagcctgctgtggaaggcccacaagaagctgaccagaagcgccctgctgctgggcatcagagacagcatggagcccgtggtggagcagctgacccaggagttctgcgagagaatgagagcccagcccggcacccccgtggccatcgaggaggagttcagcctgctgacctgcagcatcatctgctacctgaccttcggcgacaagatcaaggacgacaacctgatgcccgcctactacaagtgcatccaggaggtgctgaagacctggagccactggagcatccagatcgtggacgtgatccccttcctgagattcttccccaaccccggcctgagaagactgaagcaggccatcgagaagagagaccacatcgtggagatgcagctgagacagcacaaggagagcctggtggccggccagtggagagacatgatggactacatgctgcagggcgtggcccagcccagcatggaggagggcagcggccagctgctggagggccacgtgcacatggccgccgtggacctgctgatcggcggcaccgagaccaccgccaacaccctgagctgggccgtggtgttcctgctgcaccaccccgagatccagcagagactgcaggaggagctggaccacgagctgggccccggcgccagcagcagcagagtgccctacaaggacagagccagactgcccctgctgaacgccaccatcgccgaggtgctgagactgagacccgtggtgcccctggccctgccccacagaaccaccagacccagcagcatcagcggctacgacatccccgagggcaccgtgatcatccccaacctgcagggcgcccacctggacgagaccgtgtgggagagaccccacgagttctggcccgacagattcctggagcccggcaagaacagcagagccctggccttcggctgcggcgccagagtgtgcctgggcgagcccctggccagactggagctgttcgtggtgctgaccagactgctgcaggccttcaccctgctgcccagcggcgacgccctgcccagcctgcagcccctgccccactgcagcgtgatcctgaagatgcagcccttccaggtgagactgcagcccagaggcatgggcgcccacagccccggccagagccagtag

SEQ ID NO: 9912 - DNA, 1485 bp, Artificial Sequence
  derived and/or modified sequence
atgctgctgctgggcctgctgctgctgcccctgctggccggcgccagactgctgtggaactggtggaagctgagaagcctgcacctgccccccctggcccccggcttcctgcacctgctgcagcccgacctgcccatctacctgctgggcctgacccagaagttcggccccatctacagactgcacctgggcctgcaggacgtggtggtgctgaacagcaagagaaccatcgaggaggccatggtgaagaagtgggccgacttcgccggcagacccgagcccctgacctacaagctggtgagcaagaactaccccgacctgagcctgggcgactacagcctgctgtggaaggcccacaagaagctgaccagaagcgccctgctgctgggcatcagagacagcatggagcccgtggtggagcagctgacccaggagttctgcgagagaatgagagcccagcccggcacccccgtggccatcgaggaggagttcagcctgctgacctgcagcatcatctgctacctgaccttcggcgacaagatcaaggacgacaacctgatgcccgcctactacaagtgcatccaggaggtgctgaagacctggagccactggagcatccagatcgtggacgtgatccccttcctgagattcttccccaaccccggcctgagaagactgaagcaggccatcgagaagagagaccacatcgtggagatgcagctgagacagcacaaggagagcctggtggccggccagtggagagacatgatggactacatgctgcagggcgtggcccagcccagcatggaggagggcagcggccagctgctggagggccacgtgcacatggccgccgtggacctgctgatcggcggcaccgagaccaccgccaacaccctgagctgggccgtggtgttcctgctgcaccaccccgagatccagcagagactgcaggaggagctggaccacgagctgggccccggcgccagcagcagcagagtgccctacaaggacagagccagactgcccctgctgaacgccaccatcgccgaggtgctgagactgagacccgtggtgcccctggccctgccccacagaaccaccagacccagcagcatcagcggctacgacatccccgagggcaccgtgatcatccccaacctgcagggcgcccacctggacgagaccgtgtgggagagaccccacgagttctggcccgacagattcctggagcccggcaagaacagcagagccctggccttcggctgcggcgccagagtgtgcctgggcgagcccctggccagactggagctgttcgtggtgctgaccagactgctgcaggccttcaccctgctgcccagcggcgacgccctgcccagcctgcagcccctgccccactgcagcgtgatcctgaagatgcagcccttccaggtgagactgcagcccagaggcatgggcgcccacagccccggccagaaccagtag

SEQ ID NO: 9913 - DNA, 1488 bp, Artificial Sequence
  derived and/or modified sequence
atgctgctgctgggcctgctgctgctgctgcccctgctggccggcgccagactgctgtggaactggtggaagctgagaagcctgcacctgctgcccctggcccccggcttcctgcacctgctgcagcccgacctgcccatctacctgctgggcctgacccagaagttcggccccatctacagactgcacctgggcctgcaggacgtggtggtgctgaacagcaagagaaccatcgaggaggccatggtgaagaagtgggccgacttcgccggcagacccgagcccctgacctacaagctggtgagcaagaactaccccgacctgagcctgggcgactacagcctgctgtggaaggcccacaagaagctgaccagaagcgccctgctgctgggcatcagagacagcatggagcccgtggtggagcagctgacccaggagttctgcgagagaatgagagcccagcccggcacccccgtggccatcgaggaggagttcagcctgctgacctgcagcatcatctgctacctgaccttcggcgacaagatcaaggacgacaacctgatgcccgcctactacaagtgcatccaggaggtgctgaagacctggagccactggagcatccagatcgtggacgtgatccccttcctgagattcttccccaaccccggcctgagaagactgaagcaggccatcgagaagagagaccacatcgtggagatgcagctgagacagcacaaggagagcctggtggccggccagtggagagacatgatggactacatgctgcagggcgtggcccagcccagcatggaggagggcagcggccagctgctggagggccacgtgcacatggccgccgtggacctgctgatcggcggcaccgagaccaccgccaacaccctgagctgggccgtggtgttcctgctgcaccaccccgagatccagcagagactgcaggaggagctggaccacgagctgggccccggcgccagcagcagcagagtgccctacaaggacagagccagactgcccctgctgaacgccaccatcgccgaggtgctgagactgagacccgtggtgcccctggccctgccccacagaaccaccagacccagcagcatcagcggctacgacatccccgagggcaccgtgatcatccccaacctgcagggcgcccacctggacgagaccgtgtgggagagaccccacgagttctggcccgacagattcctggagcccggcaagaacagcagagccctggccttcggctgcggcgccagagtgtgcctgggcgagcccctggccagactggagctgttcgtggtgctgaccagactgctgcaggccttcaccctgctgcccagcggcgacgccctgcccagcctgcagcccctgccccactgcagcgtgatcctgaagatgcagcccttccaggtgagactgcagcccagaggcatgggcgcccacagccccggccagaaccagtag

SEQ ID NO: 9914 - DNA, 1488 bp, Artificial Sequence
  derived and/or modified sequence
atgctgctgctgggcctgctgctgctgctgcccctgctggccggcgccagactgctgtggaactggtggaagctgagaagcctgcacctgccccccctggcccccggcttcctgcacctgctgcagcccgacctgcccatctacctgctgggcctgacccagaagttcggccccatctacagactgcacctgggcctgcaggacgtggtggtgctgaacagcaagagaaccatcgaggaggccatggtgaagaagtgggccgacttcgccggcagacccgagcccctgacctacaagctggtgagcaagaactaccccgacctgagcctgggcgactacagcctgctgtggaaggcccacaagaagctgaccagaagcgccctgctgctgggcatcagagacagcatggagcccgtggtggagcagctgacccaggagttctgcgagagaatgagagcccagcccggcacccccgtggccatcgaggaggagttcagcctgctgacctgcagcatcatctgctacctgaccttcggcgacaagatcaaggacgacaacctgatgcccgcctactacaagtgcatccaggaggtgctgaagacctggagccactggagcatccagatcgtggacgtgatccccttcctgagattcttccccaaccccggcctgagaagactgaagcaggccatcgagaagagagaccacatcgtggagatgcagctgagacagcacaaggagagcctggtggccggccagtggagagacatgatggactacatgctgcagggcgtggcccagcccagcatggaggagggcagcggccagctgctggagggccacgtgcacatggccgccgtggacctgctgatcggcggcaccgagaccaccgccaacaccctgagctgggccgtggtgttcctgctgcaccaccccgagatccagcagagactgcaggaggagctggaccacgagctgggccccggcgccagcagcagcagagtgccctacaaggacagagccagactgcccctgctgaacgccaccatcgccgaggtgctgagactgagacccgtggtgcccctggccctgccccacagaaccaccagacccagcagcatcagcggctacgacatccccgagggcaccgtgatcatccccaacctgcagggcgcccacctggacgagaccgtgtgggagagaccccacgagttctggcccgacagattcctggagcccggcaagaacagcagagccctggccttcggctgcggcgccagagtgtgcctgggcgagcccctggccagactggagctgttcgtggtgctgaccagactgctgcaggccttcaccctgctgcccagcggcgacgccctgcccagcctgcagcccctgccccactgcagcgtgatcctgaagatgcagcccttccaggtgagactgcagcccagaggcatgggcgcccacagccccggccagaaccagtag

SEQ ID NO: 9915 - protein, 724 aa, Artificial Sequence
  derived and/or modified sequence
MAGLTAAAPRPGVLLLLLSILHPSRPGGVPGAIPGGVPGGVFYPGAGLGALGGGALGPGGKPLKPVPGGLAGAGLGAGLGAFPAVTFPGALVPGGVADAAAAYKAAKAGAGLGGVPGVGGLGVSAGAVVPQPGAGVKPGKVPGVGLPGVYPGGVLPGARFPGVGVLPGVPTGAGVKPKAPGVGGAFAGIPGVGPFGGPQPGVPLGYPIKAPKLPGGYGLPYTTGKLPYGYGPGGVAGAAGKAGYPTGTGVGPQAAAAAAAKAAAKFGAGAAGVLPGVGGAGVPGVPGAIPGIGGIAGVGTPAAAAAAAAAAKAAKYGAAAGLVPGGPGFGPGVVGVPGAGVPGVGVPGAGIPVVPGAGIPGAAVPGVVSPEAAAKAAAKAAKYGARPGVGVGGIPTYGVGAGGFPGFGVGVGGIPGVAGVPGVGGVPGVGGVPGVGISPEAQAAAAAKAAKYGVGTPAAAAAKAAAKAAQFGLVPGVGVAPGVGVAPGVGVAPGVGLAPGVGVAPGVGVAPGVGVAPGIGPGGVAAAAKSAAKVAAKAQLRAAAGLGAGIPGLGVGVGVPGLGVGAGVPGLGVGAGVPGFGAVPGALAAAKAAKYGAAVPGVLGGLGALGGVGIPGGVVGAGPAAAAAAAKAAAKAAQFGLVGAAGLGGLGVGGLGVPGVGGLGGIPPAAAAKAAKYGAAGLGGVLGGAGQFPLGGVAARPGFGLSPIFPGGACLGKACGRKRK

SEQ ID NO: 9916 - protein, 715 aa, Artificial Sequence
  derived and/or modified sequence
MHLLPALAGVLATLVLAQPCEGTDPASPGAVETSVLRDCIAEAKLLVDAAYNWTQKSIKQRLRSGSASPMDLLSYFKQPVAATRTVVRAADYMHVALGLLEEKLQPQRSGPFNVTDVLTEPQLRLLSQASGCALRDQAERCSDKYRTITGRCNNKRRPLLGASNQALARWLPAEYEDGLSLPFGWTPSRRRNGFLLPLVRAVSNQIVRFPNERLTSDRGRALMFMQWGQFIDHDLDFSPESPARVAFTAGVDCERTCAQLPPCFPIKIPPNDPRIKNQRDCIPFFRSAPSCPQNKNRVRNQINALTSFVDASMVYGSEVSLSLRLRNRTNYLGLLAINQRFQDNGRALLPFDNLHDDPCLLTNRSARIPCFLAGDTRSTETPKLAAMHTLFMREHNRLATELRRLNPRWNGDKLYNEARKIMGAMVQIITYRDFLPLVLGKARARRTLGHYRGYCSNVDPRVANVFTLAFRFGHTMLQPFMFRLDSQYRASAPNSHVPLSSAFFASWRIVYEGGIDPILRGLMATPAKLNRQDAMLVDELRDRLFRQVRRIGLDLAALNMQRSRDHGLPGYNAWRRFCGLSQPRNLAQLSRVLKNQDLARKFLNLYGTPDNIDIWIGAIAEPLLPGARVGPLLACLFENQFRRARDGDRFWWQKRGVFTKRQRKALSRISLSRIICDNTGITTVSRDIFRANIYPRGFVNCSRIPRLNLSAWRGT

SEQ ID NO: 9917 - DNA, 2148 bp, Artificial Sequence
  derived and/or modified sequence
atgcaccttctgcccgccttagccggggttcttgccacactggttttggcccagccctgcgaaggaaccgaccccgcgagcccaggagccgtcgagacatcagtgctgcgagactgcatagccgaggccaaacttctggtcgatgccgcctataactggacccagaagtccatcaagcagcggttgcgctccgggtctgcgtctcccatggatttgctgtcctactttaaacagcccgtggctgccaccaggactgttgtccgagcggcagactatatgcacgtagctctgggactactcgaggagaagctgcagccccagcgcagtggaccatttaacgtgacagatgtgttaaccgaaccacagttgcggttgttgagtcaggccagcggttgcgcactgagagaccaggcagagagatgttctgacaagtatagaactattacggggcggtgcaataacaagcgacgccctctgctgggcgccagcaaccaggccctcgctcgctggctgcccgcagaatatgaagatggcctctctctcccattcggatggacaccgtcccgaaggcgtaacgggttcctgctaccattggttcgtgcggtgtctaaccagatagttagatttcctaatgaacgtttgaccagtgaccgaggtagggcactcatgtttatgcagtggggccaattcatcgaccatgacctggacttctcccctgaatcccccgctagggtagcctttacggctggcgttgactgtgagaggacgtgtgctcaactgccaccatgcttccctattaaaataccacccaatgatccaaggatcaaaaatcagcgtgactgcattccgttttttaggagcgctccaagttgcccacagaacaagaatagggtcagaaaccagattaacgcgctcacttcttttgttgacgcatccatggtgtatgggtcagaggtttctctaagcctccggctgcgcaatcggacgaattatttaggactgttggccataaatcaaaggttccaggataacgggagggctctgctaccgttcgataatctccatgatgatccttgcctattaaccaatagatcagccaggattccgtgttttcttgccggggacaccaggtccaccgaaactcccaagctagccgcgatgcacactctgtttatgagagagcacaacaggctagccaccgagttacgcagactaaacccccgctggaacggcgacaagctgtacaacgaggcccgtaagatcatgggggccatggttcaaatcataacttacagggactttctgccattggtcctaggaaaggccagggccagaagaactcttgggcattatcgtggttactgctccaatgtagatcctcgggtggcaaacgtgttcacacttgcgtttcgatttggtcacaccatgcttcagccatttatgtttagattggacagccaatacagagcatccgctccaaacagccatgtgccattgagctccgcgttttttgcatcctggaggatcgtctatgaagggggcatcgatcccatcctgagaggcctgatggccacaccagccaagctgaacaggcaagacgcaatgctcgtggacgagctccgggatcgactcttcagacaagttcgaaggatcggattagacttagccgcgctcaatatgcagcggtctagggatcatggcctgcctggatataatgcctggaggcgattttgcggactgagtcagcctcgcaatctagcccagctgtctcgcgtgctgaaaaaccaggaccttgcaagaaaatttctgaatctgtacggcacaccagacaacatagacatctggatcggggcaattgccgagcctctccttcccggcgcccgagtcggtcctctgttagcatgccttttcgagaaccaattccggcgtgctagggatggagacagattttggtggcagaaaagaggggtattcacgaaaaggcagaggaaagcgctgagccgtatatcattatctaggatcatatgtgacaatacaggtatcactacagtgtcgcgggatatcttcagagcgaacatatatccacgggggttcgtgaattgcagccgaatcccccgcttaaacctaagcgcttggcggggcacttag

SEQ ID NO: 9918 - DNA, 2148 bp, Artificial Sequence
  derived and/or modified sequence
atgcacctgctgcctgccctggccggcgtgctggccaccctggtgctggcccagccctgtgagggcacagatcctgccagccctggagctgtggagacctctgtgctgcgggactgcatcgccgaggccaagctgctggtggatgctgcctacaactggacccagaagagcatcaagcagaggctgcggagcggcagcgccagccccatggacctgctgagctacttcaagcagcctgtggccgccaccaggacagtggtgcgggctgctgactacatgcacgtggccctgggcctgctggaggagaagctgcagccccagaggagcggccccttcaacgtgacagatgtgctgacagagccccagctgcggctgctgagccaggccagcggctgtgccctgcgggaccaggccgagcgctgcagcgacaagtaccgcaccatcaccggccgctgcaacaacaagaggcggcccctgctgggcgccagcaaccaggccctggcccgctggctgcctgcagaatatgaagatggcctgagcctgcccttcggctggacccccagcagaagaagaaatggcttcctgctgcccctggtgcgggctgtgagcaaccagatcgtgcgcttccccaatgaaaggctgaccagtgaccggggccgggccctgatgttcatgcagtggggccagttcatcgaccatgacctggacttcagccctgagagccctgcccgggtggccttcaccgctggggtggactgtgagaggacctgtgcccagctgcccccctgcttccccatcaagatccccccaaatgacccccgcatcaagaaccagagggactgcatccccttcttccgcagcgcccccagctgcccccagaacaagaacagagtgaggaaccagatcaatgccctgaccagctttgtggatgcctccatggtgtatggcagcgaggtgtccctgagcctgcggctgaggaacagaaccaactacctgggcctgctggccatcaaccagcgcttccaggacaatggccgggccctgctgccctttgacaacctgcatgatgacccctgcctgctgaccaacagaagtgcccgcatcccctgcttcctggccggggacaccaggagcacagagacccccaagctggccgccatgcacaccctcttcatgagggagcacaaccggctggccacagagctgcggcggctgaacccccgctggaatggagacaagctgtacaatgaggccaggaagatcatgggcgccatggtgcagatcatcacctacagagacttcctgcccctggtgctgggcaaggcccgggcccggaggaccctgggccactaccggggctactgcagcaatgtggacccccgggtggccaacgtgttcaccctggccttccgcttcggccacaccatgctgcagcccttcatgttccggctggacagccagtaccgggccagcgcccccaacagccacgtgcccctgagcagcgccttctttgcctcctggagaattgtgtatgaaggaggcatcgaccccatcctgcggggcctgatggccaccccagccaagctgaaccggcaggatgccatgctggtggatgagctgcgggacaggctcttccggcaggtgagaagaattggcctggacctggccgccctgaacatgcagaggagccgggaccacggcctgcccggctacaatgcctggaggcgcttctgtggcctgagccagcccaggaacctggcccagctgagccgggtgctgaagaaccaggacctggccaggaagttcctgaacctgtatggcaccccagacaacatcgacatctggattggagccatcgccgagcccctgctgcccggggcccgggtgggccccctgctggcctgcctgtttgagaaccagttccggcgggccagagatggagaccgcttctggtggcagaagaggggcgtcttcaccaagaggcagaggaaggccctgagccgcatcagcctgagccgcatcatctgtgacaacacaggcatcaccaccgtgtcccgggacatcttccgggccaacatctacccccggggctttgtgaactgcagccgcatcccccggctgaacctgagcgcctggaggggcacctag

SEQ ID NO: 9919 - DNA, 2148 bp, Artificial Sequence
  derived and/or modified sequence
atgcacctgctgcccgccctggccggcgtgctggccaccctggtgctggcccaaccttgcgagggcacggatcccgcaagccctggtgccgtggaaactagcgtcctgagggattgtattgcagaggccaagctactggtcgacgccgcttacaattggactcaaaaatctattaagcagaggttgagatctggctcagcgagccccatggatctgctctcttactttaagcagcctgttgccgccacacggaccgtggtccgcgccgcggactacatgcacgtcgctctagggcttctagaggagaagttacagcctcagcgcagcggaccttttaacgtgacagacgtgttaaccgagccccagctgagacttctctcacaggccagtggatgtgcactgcgggatcaagccgagcgctgctctgataaatacagaacaatcactgggcgatgcaataataagaggcgacccctcctgggggcctctaaccaggcactggccaggtggctacccgcagaatatgaagacgggctgtcactgccttttggatggaccccctcccgcaggaggaatggcttcctgttaccactggtccgagcagtgagcaaccagatagtgagatttcctaacgagcgcttgaccagcgacagaggacgcgccttaatgtttatgcagtggggccagttcatcgaccacgacctggacttttccccagaatcgccagcccgagtggcctttacggccggcgtggactgcgagcgtacatgcgctcagctgccgccttgctttcccattaaaatcccccctaacgatcccaggatcaaaaaccagagagactgtataccttttttcaggtccgcgccctcttgtccacagaataagaatagggtcagaaatcagattaacgctctcaccagcttcgtagatgcgagcatggtgtatggctcagaggtgagtttgtcactgcggctacgcaaccgtaccaactacttaggcctgctggctattaaccaacggttccaggataacggcagggcacttctccctttcgacaatctccacgatgatccatgtctgctgacgaaccgttccgcacggatcccatgtttcctggcaggcgatacaaggagcaccgagactccgaagctcgccgctatgcataccctgttcatgagagagcacaatcggctggccaccgagctaagacgccttaacccccgctggaatggtgacaaattatacaatgaggctcgcaagattatgggtgctatggtgcagataattacctaccgcgacttcctgccgctggtgctgggcaaagcaagagcccgaaggacattggggcactataggggatattgtagtaatgtcgatcccagagttgccaatgtcttcacactggcatttcgatttggtcacaccatgctccagccctttatgttccgtttagactcccagtaccgggctagcgcaccgaactcacatgtacccctgagcagtgctttcttcgcaagttggcggatcgtctacgaaggaggcatcgatccaatcctgcgaggcctcatggcaacaccagcgaaattgaaccgccaggacgccatgttggtggatgagctccgggacagactgttccgccaagtgagacgaatcgggcttgacttggctgcactgaatatgcaaagaagtcgcgaccacggactgcctgggtataatgcgtggagacggttctgtggattgtcccagcccagaaacctcgcgcaattgtctcgagtcctcaaaaaccaagacttagcacgcaaatttctcaatttgtacggtactcctgacaacatcgacatctggattggagccatagccgaacccctactgccaggagcacgtgttggtcctctgcttgcctgcttatttgagaaccaatttcgccgtgctcgggacggagaccggttttggtggcaaaaaaggggcgtcttcacaaagagacagcgtaaggccctcagccgcattagcctcagtcgcattatttgtgacaacaccggaattacgactgttagccgtgatattttccgcgccaatatttatccgcgggggtttgtgaattgcagccgcattcctcgcttaaacctgagcgcatggcgaggcacctag

SEQ ID NO: 9920 - DNA, 2148 bp, Artificial Sequence
  derived and/or modified sequence
atgcacctcctgcctgcacttgcaggagtgctcgcaacgcttgtgttagcccaaccatgcgaaggaactgatccggcttctccaggcgctgtcgagacttccgttttgcgcgactgtattgctgaagctaaactgctggtggatgcggcttacaactggacccaaaagtctattaaacagagactgcgtagtgggtcagcctctcctatggatctcctcagctacttcaagcagccggtcgctgcaacacgtacagtggttagggccgcagactacatgcacgtggccttgggacttcttgaagaaaagttacagccacagagatctgggccattcaacgtcaccgatgtgttaaccgagccacaactcaggctgttgtctcaagcttctggttgtgccctgcgtgaccaggcggaacgatgttctgacaaatacaggactatcactggcagatgcaacaacaagcgcagacctttactcggagcgagcaaccaggccctggcccgatggcttccggctgaatacgaagatggattaagcctacctttcggctggaccccatcccggaggcgcaatgggttccttttgcctctggttcgcgcagtttccaatcagattgttcgctttcccaacgaaaggttaacgagtgacaggggcagagccctgatgtttatgcagtgggggcagtttattgaccacgacctggatttctccccagaatcccctgcgagagtagccttcaccgccggagtagattgcgaaagaacgtgtgcccagctcccaccgtgctttcctattaaaatcccccctaacgaccctcgcataaaaaaccagagagattgcattcctttttttcgcagtgcacctagttgtccccagaataagaaccgcgttcggaaccagattaatgctctcacctcatttgtggatgcttctatggtgtatggaagcgaagtctcactgagcctgaggctgaggaatcggacaaattacctgggcctcctggcaatcaaccagagattccaggacaacgggagagcattactgccgttcgacaacctgcacgacgacccgtgtctcctgaccaaccgatctgcaaggatcccatgttttttagccggagatacacgtagtacagaaactccaaagctggccgctatgcacacactctttatgagggaacacaatcggcttgccaccgaacttcggagactgaacccccgatggaatggtgataagctgtataatgaggccaggaaaatcatgggagctatggttcagatcattacatacagggatttccttccattagttttagggaaggcacgcgcacggagaactttgggacattacagaggttattgttccaacgtagacccacgggtcgccaatgttttcactctcgcatttcggtttggccataccatgcttcagccgtttatgtttcgattggattcccagtacagggcttcggctcccaactcccacgtgcctctcagctctgccttctttgcgtcttggcgaatcgtttacgaagggggtatcgatccaatcctgaggggcttaatggccaccccagcaaagctaaataggcaggatgccatgcttgtggacgaactgagggataggctcttccgccaggttcggcgtatcggcctcgaccttgcagccctgaacatgcagcgcagcagagatcacggcctacctggatataatgcttggcggaggttctgtggcttatcacaacccagaaacttagctcagctatctcgggtactgaaaaaccaggacttggccaggaagttcctgaacctgtatggtacacctgacaatatcgacatctggatcggggctatcgcggagccgctgcttcctggggctcgcgtgggtcccctcctcgcttgcttattcgaaaaccagttcagaagagctagagatggcgacaggttttggtggcagaaaagaggggttttcactaaaaggcagcgaaaggcattgagtaggataagcctgagtaggattatctgcgacaacactgggattaccacagtttcaagggatatcttcagggccaacatctaccccagaggctttgtgaattgcagtcgaatcccccgtttgaatctgtctgcatggagagggacctag

SEQ ID NO: 9921 - DNA, 2148 bp, Artificial Sequence
  derived and/or modified sequence
atgcacctgctgcccgccctggccggcgtgctggccaccctggtgctggcccagccctgcgagggcaccgaccccgccagccccggcgccgtggagaccagcgtgctgagagactgcatcgccgaggccaagctgctggtggacgccgcctacaactggacccagaagagcatcaagcagagactgagaagcggcagcgccagccccatggacctgctgagctacttcaagcagcccgtggccgccaccagaaccgtggtgagagccgccgactacatgcacgtggccctgggcctgctggaggagaagctgcagccccagagaagcggccccttcaacgtgaccgacgtgctgaccgagccccagctgagactgctgagccaggccagcggctgcgccctgagagaccaggccgagagatgcagcgacaagtacagaaccatcaccggcagatgcaacaacaagagaagacccctgctgggcgccagcaaccaggccctggccagatggctgcccgccgagtacgaggacggcctgagcctgcccttcggctggacccccagcagaagaagaaacggcttcctgctgcccctggtgagagccgtgagcaaccagatcgtgagattccccaacgagagactgaccagcgacagaggcagagccctgatgttcatgcagtggggccagttcatcgaccacgacctggacttcagccccgagagccccgccagagtggccttcaccgccggcgtggactgcgagagaacctgcgcccagctgcccccctgcttccccatcaagatcccccccaacgaccccagaatcaagaaccagagagactgcatccccttcttcagaagcgcccccagctgcccccagaacaagaacagagtgagaaaccagatcaacgccctgaccagcttcgtggacgccagcatggtgtacggcagcgaggtgagcctgagcctgagactgagaaacagaaccaactacctgggcctgctggccatcaaccagagattccaggacaacggcagagccctgctgcccttcgacaacctgcacgacgacccctgcctgctgaccaacagaagcgccagaatcccctgcttcctggccggcgacaccagaagcaccgagacccccaagctggccgccatgcacaccctgttcatgagagagcacaacagactggccaccgagctgagaagactgaaccccagatggaacggcgacaagctgtacaacgaggccagaaagatcatgggcgccatggtgcagatcatcacctacagagacttcctgcccctggtgctgggcaaggccagagccagaagaaccctgggccactacagaggctactgcagcaacgtggaccccagagtggccaacgtgttcaccctggccttcagattcggccacaccatgctgcagcccttcatgttcagactggacagccagtacagagccagcgcccccaacagccacgtgcccctgagcagcgccttcttcgccagctggagaatcgtgtacgagggcggcatcgaccccatcctgagaggcctgatggccacccccgccaagctgaacagacaggacgccatgctggtggacgagctgagagacagactgttcagacaggtgagaagaatcggcctggacctggccgccctgaacatgcagagaagcagagaccacggcctgcccggctacaacgcctggagaagattctgcggcctgagccagcccagaaacctggcccagctgagcagagtgctgaagaaccaggacctggccagaaagttcctgaacctgtacggcacccccgacaacatcgacatctggatcggcgccatcgccgagcccctgctgcccggcgccagagtgggccccctgctggcctgcctgttcgagaaccagttcagaagagccagagacggcgacagattctggtggcagaagagaggcgtgttcaccaagagacagagaaaggccctgagcagaatcagcctgagcagaatcatctgcgacaacaccggcatcaccaccgtgagcagagacatcttcagagccaacatctaccccagaggcttcgtgaactgcagcagaatccccagactgaacctgagcgcctggagaggcacctag

SEQ ID NO: 9922 - DNA, 2716 bp, Artificial Sequence
  derived and/or modified sequence
agagctggaggaagtgagaggtcggctgggggtcctcaaagtgagaggggagcagaggatcctcccgtgcaggctgtggatgtcactcacttcccagctggtgaagcctcgctgcagagatgcatctgctcccagccctggcaggggtcctggccacactcgtcctcgcccagccctgtgagggcactgacccagcctcccctggggcagtggagacctcggtcctgcgagactgcatagcagaggccaagttgctggtggatgctgcctacaattggacccagaagagcatcaagcagcggcttcgcagcggttcagccagccccatggacctcctgtcctacttcaaacaaccggtagcagccaccaggacagttgttcgggccgcagattatatgcatgtggctttggggctgcttgaagagaagttacaaccccagcggtccggacccttcaatgtcactgatgtgctaacagaaccacagctgcggctgctgtcccaggccagtggctgtgctctccgggaccaggccgagcgctgcagcgacaagtaccgcaccatcactggacggtgcaacaacaagaggagacccttgctaggggcctccaaccaggctctggctcgctggctgcccgccgagtatgaggatgggctgtcgctccccttcggctggacccccagcaggaggcgcaatggcttccttctccctcttgtccgggctgtctccaaccagattgtgcgcttccccaatgagagactgacctccgaccgtggccgagccctcatgttcatgcagtggggccagttcattgaccatgacctggacttctccccggagtccccggccagagtggccttcactgcaggcgttgactgtgagaggacctgcgcccagctgcccccctgctttcccatcaagatcccacccaatgacccccgcatcaagaaccagcgtgactgcatccctttcttccgctcggcaccctcatgcccccaaaacaagaacagagtccgcaaccagatcaacgcgctcacctcctttgtggacgccagcatggtgtatggcagtgaggtctccctctcgctgcggctccgcaaccggaccaactacctggggctgctggccatcaaccagcgctttcaagacaacggccgggccctgctgcccttcgacaacctgcacgatgacccctgtctcctcaccaaccgctcggcgcgcatcccctgcttcctggcaggtgacacccgatcaacggaaacccccaaactggcagccatgcacaccctctttatgcgagagcacaaccggctggccaccgagctgagacgcctgaatccccggtggaatggagacaaactgtacaatgaggctcggaagatcatgggggccatggtccagatcatcacctaccgagactttctgcccctggttctgggcaaggcccgggccaggagaaccctggggcactacagggggtactgctccaatgtggacccacgggtggccaatgtcttcaccctggccttccgctttggccacacaatgctccagcccttcatgttccgcttggacagtcagtaccgggcctccgcacccaactcgcatgtcccacttagctctgccttctttgccagctggcggatcgtgtatgaagggggcatcgaccccatcctccggggcctcatggccacccctgccaagctgaaccgtcaggatgccatgttagtggatgagctccgggaccggctgtttcggcaagtgaggaggattgggctggacctggcagctctcaacatgcaacgaagccgggaccacggccttccagggtacaatgcttggaggcgcttctgtgggctctcccagccccggaatttggcacagcttagccgggtgctgaaaaaccaggacttggcaaggaagttcctgaatttgtatggaacacctgacaacattgacatctggattggggccatcgctgagcctcttttgccgggggctcgagtggggcctcttctggcttgtctgttcgagaaccagttcagaagagcccgagacggagacaggttctggtggcagaaacgaggtgttttcaccaaaagacagcgcaaggccctgagcagaatttccttgtctcgaattatatgtgacaataccggtatcaccacggtttcaagggacatcttcagagccaacatctaccctcggggctttgtgaactgcagccgtatccccaggttgaacctatcagcctggcgagggacatgaggcttctgcaggagtctatcccaagtctccaacttttggagacaaggggaaggggaggaccatgaggctgccttgtctccctggagcaagtgcaggctgctgacgcttctgctggctacagctcagagctgggttccccagccaggagtgaaggctgggggctcctatcagcaatggaccttcccgccttgggagcctcttaggtattaggctatgaatcagcgccacgtgcaaaggcttgggagccaagccatgtggtcttgcaccccaggcaagaaaagtcagctggagggtttacagcactttctactgtttcccagccctccctcccctccctcaccatgactaagagaccactcggtcctagcctccagacaccccacaatactcctctgagcctgaggccaggcagcatgctctgcttctaccaataaagcactgctaagggc

SEQ ID NO: 9923 - protein, 592 aa, Artificial Sequence
  derived and/or modified sequence
MEMQDLTSPHSRLSGSSESPSGPKLGNSHINSNSMTPNGTEVKTEPMSSSETASTTADGSLNNFSGSAIGSSSFSPRPTHQFSPPQIYPSNRPYPHILPTPSSQTMAAYGQTQFTTGMQQATAYATYPQPGQPYGISSYGALWAGIKTEGGLSQSQSPGQTGFLSYGTSFSTPQPGQAPYSYQMQGSSFTTSSGIYTGNNSLTNSSGFNSSQQDYPSYPSFGQGQYAQYYNSSPYPAHYMTSSNTSPTTPSTNATYQLQEPPSGITSQAVTDPTAEYSTIHSPSTPIKDSDSDRLRRGSDGKSRGRGRRNNNPSPPPDSDLERVFIWDLDETIIVFHSLLTGSYANRYGRDPPTSVSLGLRMEEMIFNLADTHLFFNDLEECDQVHIDDVSSDDNGQDLSTYNFGTDGFPAAATSANLCLATGVRGGVDWMRKLAFRYRRVKEIYNTYKNNVGGLLGPAKREAWLQLRAEIEALTDSWLTLALKALSLIHSRTNCVNILVTTTQLIPALAKVLLYGLGIVFPIENIYSATKIGKESCFERIIQRFGRKVVYVVIGDGVEEEQGAKKHAMPFWRISSHSDLMALHHALELEYL

SEQ ID NO: 9924 - DNA, 4341 bp, Artificial Sequence
  derived and/or modified sequence
aaaccaataaggttaggacaagagaatagctgtggtttgcgttgcaaaaaccaaaaaaaaaaaaaaaaaaaaaaaaagaaagccccgaggctccatgggcagacctacaaggctgcgcaaacaaatcgagggatgagattctgctgtttctttgtctagggttctcagatgctatctgccgctgctgtttggtggggaaggagcgctgggcgcaaagctgttaccaaacagaacggtgggagctgatggctccgagtttggggcgaggtagaaactctccagtgccacttccgactttaagccttcctgttgccgtccactgtggcgggtttcttcctggggaacacgttttcgctcagtcgctcggcagcccgagcctgcggcagcggccaggcgcctgccccctgcgccgagctttcccctgcagaggcgctccactcccagaagcgccgcggctgcaccagagcgcctgagagcccccgcgcgtacccatccaggagcaaaactatgtcaggaatggaggtttgctaacccagaaaattcgaaggaacacattaaactggtggatgcagcagatgtaagcgctgtgcaaacatctcaagccagttcagatgttgctgtttcctcaagttgcaggtctatggaaatgcaggatctaaccagcccgcatagccgtctgagtggtagtagtgaatcccccagtggccccaaactcggtaactctcatataaatagtaattccatgactcccaatggcaccgaagttaaaacagagccaatgagcagcagtgaaacagcttcaacgacagccgacgggtctttaaacaatttctcaggttcagcaattgggagcagtagtttcagcccacgaccaactcaccagttctctccaccacagatttacccttccaacagaccatacccacatattctccctaccccttcctcacaaactatggctgcatatgggcaaacacagtttaccacaggaatgcaacaagctacagcctatgccacgtacccacagccaggacagccgtacggcatttcctcatatggtgcattgtgggcaggcatcaagactgaaggtggattgtcacagtctcagtcacctggacagacaggatttctcagctatggcacaagcttcagtacccctcaacctggacaggcaccatacagctaccagatgcaaggtagcagttttacaacatcatcaggaatatatacaggaaataattcactcacaaattcctctggatttaatagttcacagcaggactatccgtcttatcccagttttggccagggtcagtacgcacagtattataacagctcaccgtatccagcacattatatgaccagcagcaacaccagcccaacgacaccatccaccaatgccacttaccagcttcaagaaccgccatctggcatcaccagccaagcagttacagatcccacagcagagtacagcacaatccacagcccatcaacacccattaaagattcagattctgatcgattgcgtcgaggttcagatgggaaatcacgtggacggggccgaagaaacaataatccttcacctcccccagattctgatcttgagagagtgttcatctgggacttggatgagacaatcattgttttccactccttgcttactgggtcctacgccaacagatatgggagggatccacccacttcagtttcccttggactgcgaatggaagaaatgattttcaacttggcagacacacatttattttttaatgacttagaagaatgtgaccaagtccatatagatgatgtttcttcagatgataacggacaggacctaagcacatataactttggaacagatggctttcctgctgcagcaaccagtgctaacttatgtttggcaactggtgtacggggcggtgtggactggatgagaaagttggccttccgctacagacgggtaaaagagatctacaacacctacaaaaataatgttggaggtctgcttggtccagctaagagggaagcctggctgcagttgagggccgaaattgaagccctgaccgactcctggttgacactggccctgaaagcactctcgctcattcactcccggacaaactgtgtgaatattttagtaacaactactcagctcatcccagcattggcgaaagtcctgctgtatgggttaggaattgtatttccaatagaaaatatttacagtgcaactaaaataggaaaagaaagctgttttgagagaataattcaaaggtttggaagaaaagtggtgtatgttgttataggagatggtgtagaagaagaacaaggagcaaaaaagcacgcgatgcccttctggaggatctccagccactcggacctcatggccctgcaccatgccttggaactggagtacctgtaacagcgctcggcactttgacagcgcacagctgctctgtgaccagggacagatccagcaggccccagtctcgcatcagcgccggcctccagaacttagcaatttccgcctggtgatgcgcagttgctgtcagtcttgacctctgcctttgtggtgaatggaggaccacgtctatttcatcagaacagctgttgactctagtactgtgaatccagtgaaaataagccatgagaatgttttagcacagcgttatgtgtctgccacattaactacacggttcaaacctgtgaagaaaggacctgcaaacgcttcagttgttagcattttcaatgtgatataaacagcttctccaatacagcaaacctaattgcacaacagagactgaaatgtgtttcctgaataccagtggaggaattttcttgtaaagaaggtttactttttggtgtctcatacccagggtaatctgtacatctctacttatttatgaacagactttttttaaaaagataaaaaaacagctttattgaggtataattcacccaccagacttttttaaacatcaaataattgaagagacaatagcattagaaataagtgattaaaggcctctgcctcacaacatggcaagtacagtactttgaattttagcacattgcatagtagttttaagtatgtctaatttaaacgtataatatgtacatcactgagacaatcatgtacagaaagaatttttggtgtaaatttgtaataatggataattcttttacatattgtttagggaaatgatattgaaaggtagcaatgcctggatagtgaagcatgaggcagcacgtgcacaaattcatgtgccgtgccttatctgagttttcggtataaatatgtagataatggattttttttttttagataatgttgtcaagaccaaaagcatggatgtcaagtgtcagtaaggattttgttttctaaaattttttcctgcatcagttcttctgagggccttgatgaaataacacagcagtttcttaaacaatttgaaacaaaatgagctctcctaccacctcactttttcatttccacactaatgtattatatgtaactacttggaaaaaataattattcaaatgcttcttcccacaaagaatatagatgatagtagatatattttattaataaaatggttcatgaatcggagactaacaaagttttcatgtgctcagaattattaattatcgtgtctgcattttctttcgataaaggaagacacacgatgctaatccggaaatcagcaaactttgcattactccctatgtgcgtattttctctttcttcctgtcaccctgaggaaggttcattgccattgtcatcaccatggaaacaacgttcctctccacctgcattatgtactacatgacaggcatcaatctggggaaataataaaattatcacctttgtcagaccataagagtttctccaaaagtggtcagtttggctgggcaatattttctctcatctaacaaacacaatccattgtcatgaaattacccttaggatgagtcttctttaatcaatcatatattgggcgggaaaaacaccagctttgacccgaagtagttgaagagctacttcattcttttctgaagttgtgtgttgctgctagaaatagtcatttgtgaattatccaaattgtttaaattcacaattgaattagttttttcttcctttttgcttgaagcaaacagttgacaatttttaaccttttcattttatgtttttgtactctgcagactgaaaagacaaagtttatcttggccttactgtataaaggtgtgctgtgtccaccgttgtgtacagaatttttcttcattaattttgtgtttaagttaataaaatttatttgtgatgtactgtaaaaaaaaaaaaaaaaa

SEQ ID NO: 9925 - DNA, 4326 bp, Artificial Sequence
  derived and/or modified sequence
aaaccaataaggttaggacaagagaatagctgtggtttgcgttgcaaaaaccaaaaaaaaaaaaaaaaaaaaaaaaagaaagccccgaggctccatgggcagacctacaaggctgcgcaaacaaatcgagggatgagattctgctgtttctttgtctagggttctcagatgctatctgccgctgctgtttggtggggaaggagcgctgggcgcaaagctgttaccaaacagaacggtgggagctgatggctccgagtttggggcgaggtagaaactctccagtgccacttccgactttaagccttcctgttgccgtccactgtggcgggtttcttcctggggaacacgttttcgctcagtcgctcggcagcccgagcctgcggcagcggccaggcgcctgccccctgcgccgagctttcccctgcagaggcgctccactcccagaagcgccgcggctgcaccagagcgcctgagagcccccgcgcgtacccatccaggagcaaaactatgtcaggaatggaggtttgctaacccagaaaattcgaaggaacacattaaactggtggatgcagcagatgtaagcgctgtgcaaacatctcaagccagttcagatgttgctgtttcctcaagttgcaggtctatggaaatgcaggatctaaccagcccgcatagccgtctgagtggtagtagtgaatcccccagtggccccaaactcggtaactctcatataaatagtaattccatgactcccaatggcaccgaagttaaaacagagccaatgagcagcagtgaaacagcttcaacgacagccgacgggtctttaaacaatttctcaggttcagcaattgggagcagtagtttcagcccacgaccaactcaccagttctctccaccacagatttacccttccaacagaccatacccacatattctccctaccccttcctcacaaactatggctgcatatgggcaaacacagtttaccacaggaatgcaacaagctacagcctatgccacgtacccacagccaggacagccgtacggcatttcctcatatggtgcattgtgggcaggcatcaagactgaaggtggattgtcacagtctcagtcacctggacagacaggatttctcagctatggcacaagcttcagtacccctcaacctggacaggcaccatacagctaccagatgcaaggtagcagttttacaacatcatcaggaatatatacaggaaataattcactcacaaattcctctggatttaatagttcacagcaggactatccgtcttatcccagttttggccagggtcagtacgcacagtattataacagctcaccgtatccagcacattatatgaccagcagcaacaccagcccaacgacaccatccaccaatgccacttaccagcttcaagaaccgccatctggcatcaccagccaagcagttacagatcccacagcagagtacagcacaatccacagcccatcaacacccattaaagattcagattctgatcgattgcgtcgaggttcagatgggaaatcacgtggacggggccgaagaaacaataatccttcacctcccccagattctgatcttgagagagtgttcatctgggacttggatgagacaatcattgttttccactccttgcttactgggtcctacgccaacagatatgggagggatccacccacttcagtttcccttggactgcgaatggaagaaatgattttcaacttggcagacacacatttattttttaatgacttagaagaatgtgaccaagtccatatagatgatgtttcttcagatgataacggacaggacctaagcacatataactttggaacagatggctttcctgctgcagcaaccagtgctaacttatgtttggcaactggtgtacggggcggtgtggactggatgagaaagttggccttccgctacagacgggtaaaagagatctacaacacctacaaaaataatgttggaggtctgcttggtccagctaagagggaagcctggctgcagttgagggccgaaattgaagccctgaccgactcctggttgacactggccctgaaagcactctcgctcattcactcccggacaaactgtgtgaatattttagtaacaactactcagctcatcccagcattggcgaaagtcctgctgtatgggttaggaattgtatttccaatagaaaatatttacagtgcaactaaaataggaaaagaaagctgttttgagagaataattcaaaggtttggaagaaaagtggtgtatgttgttataggagatggtgtagaagaagaacaaggagcaaaaaagcacgcgatgcccttctggaggatctccagccactcggacctcatggccctgcaccatgccttggaactggagtacctgtaacagcgctcggcactttgacagcgcacagctgctctgtgaccagggacagatccagcaggccccagtctcgcatcagcgccggcctccagaacttagcaatttccgcctggtgatgcgcagttgctgtcagtcttgacctctgcctttgtggtgaatggaggaccacgtctatttcatcagaacagctgttgactctagtactgtgaatccagtgaaaataagccatgagaatgttttagcacagcgttatgtgtctgccacattaactacacggttcaaacctgtgaagaaaggacctgcaaacgcttcagttgttagcattttcaatgtgatataaacagcttctccaatacagcaaacctaattgcacaacagagactgaaatgtgtttcctgaataccagtggaggaattttcttgtaaagaaggtttactttttggtgtctcatacccagggtaatctgtacatctctacttatttatgaacagactttttttaaaaagataaaaaaacagctttattgaggtataattcacccaccagacttttttaaacatcaaataattgaagagacaatagcattagaaataagtgattaaaggcctctgcctcacaacatggcaagtacagtactttgaattttagcacattgcatagtagttttaagtatgtctaatttaaacgtataatatgtacatcactgagacaatcatgtacagaaagaatttttggtgtaaatttgtaataatggataattcttttacatattgtttagggaaatgatattgaaaggtagcaatgcctggatagtgaagcatgaggcagcacgtgcacaaattcatgtgccgtgccttatctgagttttcggtataaatatgtagataatggattttttttttttagataatgttgtcaagaccaaaagcatggatgtcaagtgtcagtaaggattttgttttctaaaattttttcctgcatcagttcttctgagggccttgatgaaataacacagcagtttcttaaacaatttgaaacaaaatgagctctcctaccacctcactttttcatttccacactaatgtattatatgtaactacttggaaaaaataattattcaaatgcttcttcccacaaagaatatagatgatagtagatatattttattaataaaatggttcatgaatcggagactaacaaagttttcatgtgctcagaattattaattatcgtgtctgcattttctttcgataaaggaagacacacgatgctaatccggaaatcagcaaactttgcattactccctatgtgcgtattttctctttcttcctgtcaccctgaggaaggttcattgccattgtcatcaccatggaaacaacgttcctctccacctgcattatgtactacatgacaggcatcaatctggggaaataataaaattatcacctttgtcagaccataagagtttctccaaaagtggtcagtttggctgggcaatattttctctcatctaacaaacacaatccattgtcatgaaattacccttaggatgagtcttctttaatcaatcatatattgggcgggaaaaacaccagctttgacccgaagtagttgaagagctacttcattcttttctgaagttgtgtgttgctgctagaaatagtcatttgtgaattatccaaattgtttaaattcacaattgaattagttttttcttcctttttgcttgaagcaaacagttgacaatttttaaccttttcattttatgtttttgtactctgcagactgaaaagacaaagtttatcttggccttactgtataaaggtgtgctgtgtccaccgttgtgtacagaatttttcttcattaattttgtgtttaagttaataaaatttatttgtgatgtactgtaa

SEQ ID NO: 9926 - DNA, 3907 bp, Artificial Sequence
  derived and/or modified sequence
gagacctcaacttaaagacaatatgcctttcactgctgcagtatcctcctttttctcttttggttaaaagagagcattgtcgttctcagccatgtgctctgtataattaagagctgacactgaagcagagtaacaacatcttctaatttttttacccctgatcacaggtgcaaacatctcaagccagttcagatgttgctgtttcctcaagttgcaggtctatggaaatgcaggatctaaccagcccgcatagccgtctgagtggtagtagtgaatcccccagtggccccaaactcggtaactctcatataaatagtaattccatgactcccaatggcaccgaagttaaaacagagccaatgagcagcagtgaaacagcttcaacgacagccgacgggtctttaaacaatttctcaggttcagcaattgggagcagtagtttcagcccacgaccaactcaccagttctctccaccacagatttacccttccaacagaccatacccacatattctccctaccccttcctcacaaactatggctgcatatgggcaaacacagtttaccacaggaatgcaacaagctacagcctatgccacgtacccacagccaggacagccgtacggcatttcctcatatggtgcattgtgggcaggcatcaagactgaaggtggattgtcacagtctcagtcacctggacagacaggatttctcagctatggcacaagcttcagtacccctcaacctggacaggcaccatacagctaccagatgcaaggtagcagttttacaacatcatcaggaatatatacaggaaataattcactcacaaattcctctggatttaatagttcacagcaggactatccgtcttatcccagttttggccagggtcagtacgcacagtattataacagctcaccgtatccagcacattatatgaccagcagcaacaccagcccaacgacaccatccaccaatgccacttaccagcttcaagaaccgccatctggcatcaccagccaagcagttacagatcccacagcagagtacagcacaatccacagcccatcaacacccattaaagattcagattctgatcgattgcgtcgaggttcagatgggaaatcacgtggacggggccgaagaaacaataatccttcacctcccccagattctgatcttgagagagtgttcatctgggacttggatgagacaatcattgttttccactccttgcttactgggtcctacgccaacagatatgggagggatccacccacttcagtttcccttggactgcgaatggaagaaatgattttcaacttggcagacacacatttattttttaatgacttagaagaatgtgaccaagtccatatagatgatgtttcttcagatgataacggacaggacctaagcacatataactttggaacagatggctttcctgctgcagcaaccagtgctaacttatgtttggcaactggtgtacggggcggtgtggactggatgagaaagttggccttccgctacagacgggtaaaagagatctacaacacctacaaaaataatgttggaggtctgcttggtccagctaagagggaagcctggctgcagttgagggccgaaattgaagccctgaccgactcctggttgacactggccctgaaagcactctcgctcattcactcccggacaaactgtgtgaatattttagtaacaactactcagctcatcccagcattggcgaaagtcctgctgtatgggttaggaattgtatttccaatagaaaatatttacagtgcaactaaaataggaaaagaaagctgttttgagagaataattcaaaggtttggaagaaaagtggtgtatgttgttataggagatggtgtagaagaagaacaaggagcaaaaaagcacgcgatgcccttctggaggatctccagccactcggacctcatggccctgcaccatgccttggaactggagtacctgtaacagcgctcggcactttgacagcgcacagctgctctgtgaccagggacagatccagcaggccccagtctcgcatcagcgccggcctccagaacttagcaatttccgcctggtgatgcgcagttgctgtcagtcttgacctctgcctttgtggtgaatggaggaccacgtctatttcatcagaacagctgttgactctagtactgtgaatccagtgaaaataagccatgagaatgttttagcacagcgttatgtgtctgccacattaactacacggttcaaacctgtgaagaaaggacctgcaaacgcttcagttgttagcattttcaatgtgatataaacagcttctccaatacagcaaacctaattgcacaacagagactgaaatgtgtttcctgaataccagtggaggaattttcttgtaaagaaggtttactttttggtgtctcatacccagggtaatctgtacatctctacttatttatgaacagactttttttaaaaagataaaaaaacagctttattgaggtataattcacccaccagacttttttaaacatcaaataattgaagagacaatagcattagaaataagtgattaaaggcctctgcctcacaacatggcaagtacagtactttgaattttagcacattgcatagtagttttaagtatgtctaatttaaacgtataatatgtacatcactgagacaatcatgtacagaaagaatttttggtgtaaatttgtaataatggataattcttttacatattgtttagggaaatgatattgaaaggtagcaatgcctggatagtgaagcatgaggcagcacgtgcacaaattcatgtgccgtgccttatctgagttttcggtataaatatgtagataatggattttttttttttagataatgttgtcaagaccaaaagcatggatgtcaagtgtcagtaaggattttgttttctaaaattttttcctgcatcagttcttctgagggccttgatgaaataacacagcagtttcttaaacaatttgaaacaaaatgagctctcctaccacctcactttttcatttccacactaatgtattatatgtaactacttggaaaaaataattattcaaatgcttcttcccacaaagaatatagatgatagtagatatattttattaataaaatggttcatgaatcggagactaacaaagttttcatgtgctcagaattattaattatcgtgtctgcattttctttcgataaaggaagacacacgatgctaatccggaaatcagcaaactttgcattactccctatgtgcgtattttctctttcttcctgtcaccctgaggaaggttcattgccattgtcatcaccatggaaacaacgttcctctccacctgcattatgtactacatgacaggcatcaatctggggaaataataaaattatcacctttgtcagaccataagagtttctccaaaagtggtcagtttggctgggcaatattttctctcatctaacaaacacaatccattgtcatgaaattacccttaggatgagtcttctttaatcaatcatatattgggcgggaaaaacaccagctttgacccgaagtagttgaagagctacttcattcttttctgaagttgtgtgttgctgctagaaatagtcatttgtgaattatccaaattgtttaaattcacaattgaattagttttttcttcctttttgcttgaagcaaacagttgacaatttttaaccttttcattttatgtttttgtactctgcagactgaaaagacaaagtttatcttggccttactgtataaaggtgtgctgtgtccaccgttgtgtacagaatttttcttcattaattttgtgtttaagttaataaaatttatttgtgatgtactgtaa

SEQ ID NO: 9927 - DNA, 1779 bp, Artificial Sequence
  derived and/or modified sequence
atggagatgcaggacctgaccagtccccactccagactgtctggtagctccgagagcccatccggccctaagctcggcaattctcatattaactcaaactctatgaccccaaacggaaccgaggtgaaaacggagccaatgagctcctccgaaactgcaagcacaactgccgacggtagcctgaataacttctcgggaagtgcaatcggctcaagctcgttctctcccagacccacccaccaattctctcccccacagatctacccttcaaacaggccttacccgcatatattgccgacgccttctagccagactatggcagcctatggccagacgcagttcaccacaggaatgcaacaagccacagcatacgctacctacccacagcccggacagccctatgggatcagttcttatggtgcgctctgggctggaatcaagactgagggggggctatctcaaagccagtcaccaggacagaccgggtttctgtcatatggcacttccttcagcacccctcagcctggacaggctccctactcttatcagatgcagggctcttccttcacgacaagtagcggcatctacactggcaacaatagcctcactaactcatccggcttcaatagctctcaacaggactaccccagctacccttcattcggtcagggtcaatatgcccagtactacaactcttccccttatcccgctcattacatgacatcatcgaacacctcaccaaccacacctagtaccaacgccacgtaccaactccaggagccaccatccggcattacgagtcaagcggttacagaccctactgctgaatattccaccattcattcaccttcaacccctatcaaggatagcgatagtgatcggttacgtcgcggctccgatggcaaaagtagaggccgcggccgtcggaacaataatccttcccccccaccagattcagacctggaaagagtgtttatttgggatcttgacgaaaccataatagtgttccacagcttgttaaccggatcctacgccaaccgatatggtcgggatccacccacctctgtgagcctggggctgcgcatggaagaaatgatatttaatttagccgacacccatcttttttttaacgacctggaagagtgcgaccaggtgcacattgatgacgtgagctctgacgataacggtcaggacctcagcacatataactttggtaccgatggattccctgccgcagctacatctgccaatctctgtctggctactggagtgcggggtggcgtagattggatgaggaagctcgcttttcgatacagacgggtaaaagaaatttataacacttataaaaataatgtgggcggcctcctaggacccgcaaagcgggaggcgtggttacaactgagggcagaaattgaggccttgacagattcctggctaactctcgccttgaaggcactgtctctcatacacagtagaacaaattgcgtgaacattctcgtcaccaccacccagctgataccagccctggcaaaggtactgctttacggactgggcatcgtcttccctattgaaaacatttacagcgctactaaaatcgggaaagaatcgtgcttcgagcgaatcattcaacggtttggacgcaaggtggtctatgtggttattggagatggagttgaagaagaacaaggtgccaaaaagcacgccatgccgttctggcgcatttccagccacagcgatctgatggctctgcaccacgctttagagctcgagtacctctag

SEQ ID NO: 9928 - DNA, 1779 bp, Artificial Sequence
  derived and/or modified sequence
atggaaatgcaggatctaacctcacctcatagtcgcttatcgggttccagcgagtccccctccggaccaaaactggggaatagccacataaactctaattctatgacacctaacggaactgaagtgaagaccgaacccatgtcttccagcgaaaccgcctctacaaccgcggatggcagtctgaacaacttcagcggaagtgccattgggtccagctccttttcaccacgaccaacccatcagttttctccccctcagatctatccaagcaataggccgtatccacatattctgccaacccccagctcccagaccatggccgcctacggacaaactcagtttaccaccggcatgcagcaagccacagcatatgccacttacccacagccaggccagccctacgggataagcagttatggagccctctgggccggcattaaaactgagggaggactctcacagagtcagagtcctggccagacggggtttctgtcatatggcacctcttttagcacaccccagcctggccaagccccttactcataccagatgcaaggatcatcgttcaccacatcgtccggaatctacacaggaaataacagtctgaccaattccagcggtttcaattcatctcagcaagattaccctagttaccccagtttcggacagggccaatatgctcagtactataatagcagcccctatccagcccactatatgactagttccaatacaagtcccacaactccgtccaccaatgcaacataccagctgcaggagcccccctctgggattacctcacaggccgtgaccgaccccacagcagagtacagtaccattcacagcccctctacacccattaaggacagtgattcagaccggctccggagggggtctgacggcaagtcccgcggaagaggaagaagaaacaacaatccgtctccaccgccagacagcgacctcgaaagggtcttcatttgggatctggacgagactatcattgttttccatagtcttctcactggatcctacgcgaacagatacgggcgggatccacccacaagcgttagcctcggactccggatggaagagatgatctttaacctggccgacacacacctcttcttcaacgatctagaggagtgtgaccaggtccacattgacgatgtgagctccgacgacaacgggcaggatctgtccacctataacttcggcacggatggcttcccggcagctgcaacctctgctaacctgtgcctcgccacaggcgttcggggtggcgtggactggatgcggaaactggcctttaggtaccgccgggtgaaggaaatctataacacatacaaaaacaatgtgggcggcctgttgggtcccgccaaaagagaggcctggcttcagctgagagctgaaatagaggctctcactgatagctggctcactctggccctgaaggcactgtctctgatccatagccgcacaaattgtgtgaatatcctggtcaccaccacccaactcattccggcactcgcgaaggtgctgttgtatggcttgggcattgttttcccgatcgaaaatatctatagcgccacaaagataggaaaagaatcttgttttgaacggattatccagcgctttggaagaaaggtcgtgtacgtagtcataggcgatggagttgaagaggagcagggggccaagaagcacgccatgcccttttggcggataagcagtcattctgatctgatggcgttgcaccatgctttggaactggagtacctctag

SEQ ID NO: 9929 - DNA, 1779 bp, Artificial Sequence
  derived and/or modified sequence
atggagatgcaggacctgaccagcccccacagccggctgagcggcagcagcgagagccccagcggccccaagctgggcaacagccacatcaacagcaacagcatgacccccaacggcacagaggtgaagacagagcccatgagcagcagcgagacagccagcaccacagcagatggcagcctgaacaacttcagcggcagcgccatcggcagcagcagcttcagcccccggcccacccaccagttcagccccccccagatctaccccagcaaccggccctacccccacatcctgcccacccccagcagccagaccatggccgcctacggccagacccagttcaccaccggcatgcagcaggccacagcctatgccacctacccccagcccggccagccctacggcatcagcagctatggagccctgtgggccggcatcaagacagagggcggcctgagccagagccagagccctggccagacaggcttcctgtcctatggcaccagcttcagcaccccccagcccggccaggccccctacagctaccagatgcagggcagcagcttcaccaccagcagcggcatctacacaggcaacaacagcctgaccaacagcagcggcttcaacagcagccagcaggactaccccagctaccccagctttggccagggccagtatgcccagtactacaacagcagcccctacccagcccactacatgaccagcagcaacaccagccccaccacccccagcaccaatgccacctaccagctgcaggagcccccatctggcatcaccagccaggccgtgacagaccccacagctgagtacagcaccatccacagccccagcacccccatcaaggacagcgacagcgaccggctgcggcggggcagtgatggcaagagccggggccggggcagaagaaacaacaaccccagccccccaccagacagcgacctggagagggtcttcatctgggacctggatgagaccatcatcgtgttccacagcctgctgaccggcagctatgccaacagatatggccgggacccccccacctctgtgtccctgggcctgaggatggaggagatgatcttcaacctggccgacacccacctgttcttcaatgacctggaggagtgtgaccaggtgcacattgatgatgtgtccagtgatgacaatggccaggacctgagcacctacaactttggaacagatggcttccctgctgctgccaccagcgccaacctgtgcctggccaccggggtgcggggcggcgtggactggatgaggaagctggccttccgctacagaagagtgaaggagatctacaacacctacaagaacaacgtgggcggcctgctgggccctgccaagcgggaggcctggctgcagctgcgggcagaaattgaggccctgacagacagctggctgaccctggccctgaaggccctgagcctcatccacagcaggaccaactgtgtgaacatcctggtgaccaccacccagctgatcccagccctggccaaggtgctgctgtatggcctgggcatcgtgttccccatcgagaacatctacagcgccaccaagattggcaaggagagctgctttgagcgcatcatccagagatttggaaggaaggtggtgtatgtggtgattggagatggagtggaggaggagcagggcgccaagaagcacgccatgcccttctggaggatcagcagccacagcgacctgatggccctgcaccacgccctggagctggagtacctgtag

SEQ ID NO: 9930 - DNA, 1779 bp, Artificial Sequence
  derived and/or modified sequence
atggagatgcaggacctgaccagcccccacagccggctgagcggctcatccgaaagccccagcggtcctaagttaggcaatagccacatcaattccaattctatgaccccgaacggaacggaggtgaagaccgaacccatgtcatccagtgagaccgcctcaactaccgcagacgggagtcttaacaatttctccggcagtgctattggctctagtagcttctcaccgaggcctacccatcagttcagccccccccagatctacccaagcaatagaccgtacccccacatcctgcctacaccttcatctcagactatggccgcatatggtcagacccagttcaccacagggatgcagcaggcgacggcgtacgctacgtatccacagccagggcagccttatggcatctcttcatacggggcactctgggccggcatcaaaactgaaggtggtctgagccagtcccagtctccaggccagacaggattcctcagttacggcaccagctttagtaccccgcagcccgggcaggccccctactcataccagatgcagggatcttcctttactacctcctccggcatctacacaggcaacaactccttaaccaacagtagcgggttcaacagcagccagcaagactatccaagctacccttcctttggccaaggacagtatgcccagtactacaacagtagtccgtaccccgctcattacatgacgagttccaacaccagtcctaccactccaagtaccaatgcgacgtatcagttacaggagccaccttctgggattacctctcaagccgtgaccgatcccacagccgaatactccaccatacattcaccctcaacaccaattaaggactctgattctgatagattacggcgcggctccgatggtaagtcacgcgggagaggccggagaaataacaatccatcaccgccccccgactccgaccttgaacgcgtctttatctgggatctagacgagaccatcatcgtgttccattctctcctaactggaagctacgcgaatagatacggcagagatccccctacatcagtctctctggggctcagaatggaggagatgatcttcaatctcgccgatactcatttgttttttaatgacttggaagaatgtgatcaggttcacattgacgacgtctcaagcgatgacaacggccaggacctgagtacatataattttggcacagacggttttccagctgccgccacatcggctaatctgtgcctggccacgggagttcgtggaggggtggattggatgaggaagctcgcttttcgatacaggcgcgttaaggagatttataatacatacaagaacaacgtgggcgggctgctgggcccagctaaaagggaggcttggcttcagttgagggctgaaattgaggcactgaccgactcttggctgacactggccctgaaggccctgtccctgattcattcgcgcactaattgcgtgaacattctggtcacaacaactcagttgatacctgccttggccaaggttttactgtatgggctcggcatcgtgttcccaattgagaatatatatagtgccacaaaaatcgggaaggagtcctgcttcgagcgaatcattcaaaggttcggacgcaaagtggtgtacgtggtgatcggagacggtgttgaagaggaacagggcgccaagaaacacgcaatgcccttttggagaatctccagccattccgacttgatggctctgcaccatgcattggagttagagtatctgtag

SEQ ID NO: 9931 - DNA, 1779 bp, Artificial Sequence
  derived and/or modified sequence
atggagatgcaggacctgaccagcccccacagccggctgagcggctcttcggaatcccccagtggacctaagttgggcaactctcacataaattctaactcgatgacccctaacggcacagaggtaaagacagagcccatgtctagttctgaaaccgcatcgaccaccgccgatggatcactgaataatttttcggggagtgcgatcggatcatcatctttcagccctaggcctactcatcagttttctcctccccagatttatccctctaaccgaccttacccacatatccttccgacacccagttctcagaccatggctgcttatggccagactcagttcactaccggaatgcagcaggcgaccgcctatgctacctacccacaaccaggacagccatatggcatttcatcatatggcgccctgtgggcaggaatcaaaaccgagggcggactcagccaatcccagtcgcctgggcagactggtttcctgagctacgggactagcttttccacgccccagcccgggcaggccccctatagctaccagatgcaaggcagcagcttcactacgagcagcggaatttacaccggcaacaattccctcaccaacagctccggtttcaattcttcccagcaggattacccctcttacccgtccttcggccaggggcagtacgcgcagtattataactccagcccctaccctgcccactacatgacatcttccaatacatctccaacgacacctagtaccaatgcgacttaccagttacaggaacctccctccggtataaccagccaagccgtgactgacccaactgccgagtactcgacaatccacagcccaagtaccccaatcaaggactcagatagtgacaggctgcgtagaggaagtgatgggaagagccgtggaagggggcgccggaataacaacccctcaccacctccagatagcgaccttgagcgggtgtttatctgggacctagatgaaactatcattgtgtttcactccttactcaccgggagttatgccaaccggtacgggagggatcctccaacgagtgtgtcactcggtctgagaatggaggagatgatttttaacctggccgatacacacctgttttttaatgacttggaggaatgtgaccaggtacacatcgacgatgtgagtagcgatgataatggtcaggatttatctacatacaatttcggaacggacggctttcccgccgctgccacatcagccaacttgtgtcttgctaccggggtgcgcgggggagttgattggatgaggaaacttgcatttcggtaccgcagagtgaaagaaatatacaatacttacaagaacaatgtcggaggcctcctggggcctgcaaagagagaggcatggctgcaactgcgagcagagattgaagctttaactgacagctggcttactctcgcacttaaggcattgtccttgatccattctaggacgaattgtgttaacattctggtgaccacaacacagctgatccccgcccttgcaaaggttctgctctatggactggggatcgtgttccctattgaaaacatctactcggccacaaaaatcggcaaggagtcgtgctttgagagaatcattcagcggtttggacgcaaggtggtttacgtggtgattggcgacggagtggaagaggaacagggagcaaaaaaacacgcaatgcccttttggcgtattagctcgcattctgacctgatggcactgcatcatgcactcgagctagaatacctttag

SEQ ID NO: 9932 - DNA, 1779 bp, Artificial Sequence
  derived and/or modified sequence
atggagatgcaggaccttacatcaccgcactcacgccttagtggctcatcagagagcccaagtggcccaaaacttggcaattcccatatcaatagcaactccatgacccccaacggaacggaggtgaaaacagagccgatgtcttcctccgaaactgccagtaccactgcagacggatccctgaacaacttttcgggcagcgcaatagggtcctcctcgttttctcccagaccaacacaccagttctcgccgcctcaaatctatccatcaaacaggccatacccacacattctgcccacacccagctcacagactatggctgcttacggccagacccaattcaccacagggatgcagcaagcaacggcgtatgccacatatccccagcccggtcagccttatggtatatcctcctatggagcactgtgggctggaatcaagacggaggggggtctttctcaatctcagtctcctggacagactgggttcctcagctacgggacatctttctccaccccacaacctgggcaggcaccttacagctaccagatgcaggggagctcattcacaacaagcagcgggatttacactggcaacaatagtcttactaattccagcggcttcaactcgtcacagcaggattatccaagttacccatctttcggacagggacagtatgctcaatactacaacagctccccttaccccgctcactacatgacctccagcaacacatccccaactaccccaagcacaaacgctacataccagttgcaggagcccccatccgggatcacgtcccaagcggtgaccgaccccacagccgaatactcaaccatccactccccttccacccctattaaggatagcgatagtgatcgtctccgcaggggctctgacgggaaatcacgaggtcggggacggagaaacaataatccctcccctcctccggacagcgatctcgagcgggtctttatctgggacctggacgaaactatcatcgtttttcacagtctgctgactggctcttacgctaatcgatacggacgcgacccaccgacatctgtgagtctgggacttcgtatggaagaaatgatcttcaatcttgctgacacacacctcttctttaacgatcttgaagagtgcgaccaagtgcatatagacgacgtgagctccgacgataatggccaagacctgtctacatacaatttcgggacagatggctttcctgcggctgctacaagcgcaaatttatgccttgcaacaggagtgcgcggaggcgtagactggatgcgcaaactggcattccggtataggagagtgaaagagatctataatacatacaaaaacaatgtaggcggattactcggtcccgctaagcgggaggcgtggctgcagcttagggccgaaattgaggcgttgacagatagctggctaaccttggctctgaaagctctaagcctaattcactctcggacaaactgtgtcaatattctggtgaccacgactcagctgatccccgcactagcaaaggtgttgctgtacgggctggggatcgtgttccccattgagaatatatacagcgccacgaaaatcggcaaagaaagttgctttgaaaggatcattcagcgcttcggcaggaaagtagtatacgttgttataggggatggggtagaggaggagcaaggggctaagaagcatgcaatgccattttggcgcatctcaagccatagtgaccttatggccctgcatcatgcactggaacttgagtacttgtag

SEQ ID NO: 9933 - DNA, 1779 bp, Artificial Sequence
  derived and/or modified sequence
atggagatgcaggacttaacctcacctcactcccgtctctccggctctagcgagtcccccagcggtcccaagctgggaaattcccacatcaacagcaattcgatgacaccaaacggcacggaagtaaaaacggaacccatgtcatcttcagaaacagcttcaacaactgctgatgggagtctcaataacttctcggggagcgccattgggtccagcagcttctcgccaaggccgactcaccagttctcgcccccacagatctacccttccaatcgtccttacccacatatcctccccacccccagcagtcaaactatggccgcttacgggcagactcaatttacaacaggtatgcagcaggccacagcatacgcaacttatcctcaacccggacagccgtacggaatcagttcctacggtgctctgtgggcaggaattaagaccgaaggcggtttgagccagagccagagtccaggccagaccggcttcctgtcatatggcacttccttttcaaccccccagcctggacaggcgccttatagctaccagatgcaaggatcttcctttactaccagctcaggtatctatacagggaataatagcctcacaaatagctccgggttcaattcatcccagcaggattacccttcctatcccagtttcggacaggggcaatacgcacagtactacaactcatctccataccccgcacactatatgacctcttctaacacatcccctaccacacccagtacaaatgcaacctaccagctgcaggagcctcctagcggcatcaccagccaggcagtcacggacccgactgccgaatactcaacaatacactccccttctacaccgatcaaagacagtgacagcgaccgcctccgccgtggctctgatgggaaaagtaggggcaggggaaggagaaataataacccttccccaccgccagactccgatttggagagagtatttatctgggatcttgacgaaacaataatcgtgttccactctctgcttacaggctcatatgccaatagatatggtagggatcctcccactagtgtgtccttgggcctcagaatggaggagatgatatttaacctggccgacacgcatctcttctttaatgacctcgaagagtgcgaccaggtccatatcgatgatgttagtagcgacgataacggacaggatttaagcacatacaacttcggcacggatgggtttcctgctgctgccacctcggccaacctgtgcctggccaccggcgtccggggtggcgttgactggatgagaaagctagcctttcgttacaggcgcgtcaaggagatttacaatacttacaaaaacaatgtggggggtctcctcggcccagctaaaagggaggcctggttacaattgcgcgctgaaattgaggcgcttaccgacagctggttaaccctggctctcaaggctctgtcattgattcactcgagaaccaattgcgtgaacattcttgttactaccacccagctcattccagccctggcaaaagtattattatacggcctgggaatcgtgttccccatcgagaacatctatagcgcgacaaagatcggcaaggagagctgcttcgagcgtattattcagcgattcggccgtaaagtcgtctacgttgtcatcggggatggggtggaggaggagcaaggcgctaaaaagcatgcaatgccgttctggcgcatctcaagtcactcggatctgatggctctgcaccatgcacttgagctcgagtacctctag

SEQ ID NO: 9934 - DNA, 1779 bp, Artificial Sequence
  derived and/or modified sequence
atggagatgcaggacctgaccagcccccacagcagactgagcggcagcagcgagagccccagcggccccaagctgggcaacagccacatcaacagcaacagcatgacccccaacggcaccgaggtgaagaccgagcccatgagcagcagcgagaccgccagcaccaccgccgacggcagcctgaacaacttcagcggcagcgccatcggcagcagcagcttcagccccagacccacccaccagttcagccccccccagatctaccccagcaacagaccctacccccacatcctgcccacccccagcagccagaccatggccgcctacggccagacccagttcaccaccggcatgcagcaggccaccgcctacgccacctacccccagcccggccagccctacggcatcagcagctacggcgccctgtgggccggcatcaagaccgagggcggcctgagccagagccagagccccggccagaccggcttcctgagctacggcaccagcttcagcaccccccagcccggccaggccccctacagctaccagatgcagggcagcagcttcaccaccagcagcggcatctacaccggcaacaacagcctgaccaacagcagcggcttcaacagcagccagcaggactaccccagctaccccagcttcggccagggccagtacgcccagtactacaacagcagcccctaccccgcccactacatgaccagcagcaacaccagccccaccacccccagcaccaacgccacctaccagctgcaggagccccccagcggcatcaccagccaggccgtgaccgaccccaccgccgagtacagcaccatccacagccccagcacccccatcaaggacagcgacagcgacagactgagaagaggcagcgacggcaagagcagaggcagaggcagaagaaacaacaaccccagccccccccccgacagcgacctggagagagtgttcatctgggacctggacgagaccatcatcgtgttccacagcctgctgaccggcagctacgccaacagatacggcagagacccccccaccagcgtgagcctgggcctgagaatggaggagatgatcttcaacctggccgacacccacctgttcttcaacgacctggaggagtgcgaccaggtgcacatcgacgacgtgagcagcgacgacaacggccaggacctgagcacctacaacttcggcaccgacggcttccccgccgccgccaccagcgccaacctgtgcctggccaccggcgtgagaggcggcgtggactggatgagaaagctggccttcagatacagaagagtgaaggagatctacaacacctacaagaacaacgtgggcggcctgctgggccccgccaagagagaggcctggctgcagctgagagccgagatcgaggccctgaccgacagctggctgaccctggccctgaaggccctgagcctgatccacagcagaaccaactgcgtgaacatcctggtgaccaccacccagctgatccccgccctggccaaggtgctgctgtacggcctgggcatcgtgttccccatcgagaacatctacagcgccaccaagatcggcaaggagagctgcttcgagagaatcatccagagattcggcagaaaggtggtgtacgtggtgatcggcgacggcgtggaggaggagcagggcgccaagaagcacgccatgcccttctggagaatcagcagccacagcgacctgatggccctgcaccacgccctggagctggagtacctgtag

SEQ ID NO: 9935 - protein, 488 aa, Artificial Sequence
  derived and/or modified sequence
MGRPLHLVLLSASLAGLLLLGESLFIRREQANNILARVTRANSFLEEMKKGHLERECMEETCSYEEAREVFEDSDKTNEFWNKYKDGDQCETSPCQNQGKCKDGLGEYTCTCLEGFEGKNCELFTRKLCSLDNGDCDQFCHEEQNSVVCSCARGYTLADNGKACIPTGPYPCGKQTLERRKRSVAQATSSSGEAPDSITWKPYDAADLDPTENPFDLLDFNQTQPERGDNNLTRIVGGQECKDGECPWQALLINEENEGFCGGTILSEFYILTAAHCLYQAKRFKVRVGDRNTEQEEGGEAVHEVEVVIKHNRFTKETYDFDIAVLRLKTPITFRMNVAPACLPERDWAESTLMTQKTGIVSGFGRTHEKGRQSTRLKMLEVPYVDRNSCKLSSSFIITQNMFCAGYDTKQEDACQGDSGGPHVTRFKDTYFVTGIVSWGEGCARKGKYGIYTKVTAFLKWIDRSMKTRGLPKAKSHAPEVITSSPLK

SEQ ID NO: 9936 - DNA, 1464 bp, Artificial Sequence
  derived and/or modified sequence
atgggccgccccctgcacctggtgctgctgagcgccagcctggccggcctgctgctgctgggcgagagcctgttcatccgccgcgagcaggccaacaacatcctggcccgcgtgacccgcgccaacagcttcctggaggagatgaagaagggccacctggagcgcgagtgcatggaggagacctgcagctacgaggaggcccgcgaggtgttcgaggacagcgacaagaccaacgagttctggaacaagtacaaggacggcgaccagtgcgagaccagcccctgccagaaccagggcaagtgcaaggacggcctgggcgagtacacctgcacctgcctggagggcttcgagggcaagaactgcgagctgttcacccgcaagctgtgcagcctggacaacggcgactgcgaccagttctgccacgaggagcagaacagcgtggtgtgcagctgcgcccgcggctacaccctggccgacaacggcaaggcctgcatccccaccggcccctacccctgcggcaagcagaccctggagcgccgcaagcgcagcgtggcccaggccaccagcagcagcggcgaggcccccgacagcatcacctggaagccctacgacgccgccgacctggaccccaccgagaaccccttcgacctgctggacttcaaccagacccagcccgagcgcggcgacaacaacctgacccgcatcgtgggcggccaggagtgcaaggacggcgagtgcccctggcaggccctgctgatcaacgaggagaacgagggcttctgcggcggcaccatcctgagcgagttctacatcctgaccgccgcccactgcctgtaccaggccaagcgcttcaaggtgcgcgtgggcgaccgcaacaccgagcaggaggagggcggcgaggccgtgcacgaggtggaggtggtgatcaagcacaaccgcttcaccaaggagacctacgacttcgacatcgccgtgctgcgcctgaagacccccatcaccttccgcatgaacgtggcccccgcctgcctgcccgagcgcgactgggccgagagcaccctgatgacccagaagaccggcatcgtgagcggcttcggccgcacccacgagaagggccgccagagcacccgcctgaagatgctggaggtgccctacgtggaccgcaacagctgcaagctgagcagcagcttcatcatcacccagaacatgttctgcgccggctacgacaccaagcaggaggacgcctgccagggcgacagcggcggcccccacgtgacccgcttcaaggacacctacttcgtgaccggcatcgtgagctggggcgagggctgcgcccgcaagggcaagtacggcatctacaccaaggtgaccgccttcctgaagtggatcgaccgcagcatgaagacccgcggcctgcccaaggccaagagccacgcccccgaggtgatcaccagcagccccctgaag

SEQ ID NO: 9937 - DNA, 1467 bp, Artificial Sequence
  derived and/or modified sequence
atgggcagacccctgcacctggtgctgctgagcgccagcctggccggcctgctgctgctgggcgagagcctgttcatcagaagagagcaggccaacaacatcctggccagagtgaccagagccaacagcttcctggaggagatgaagaagggccacctggagagagagtgcatggaggagacctgcagctacgaggaggccagagaggtgttcgaggacagcgacaagaccaacgagttctggaacaagtacaaggacggcgaccagtgcgagaccagcccctgccagaaccagggcaagtgcaaggacggcctgggcgagtacacctgcacctgcctggagggcttcgagggcaagaactgcgagctgttcaccagaaagctgtgcagcctggacaacggcgactgcgaccagttctgccacgaggagcagaacagcgtggtgtgcagctgcgccagaggctacaccctggccgacaacggcaaggcctgcatccccaccggcccctacccctgcggcaagcagaccctggagagaagaaagagaagcgtggcccaggccaccagcagcagcggcgaggcccccgacagcatcacctggaagccctacgacgccgccgacctggaccccaccgagaaccccttcgacctgctggacttcaaccagacccagcccgagagaggcgacaacaacctgaccagaatcgtgggcggccaggagtgcaaggacggcgagtgcccctggcaggccctgctgatcaacgaggagaacgagggcttctgcggcggcaccatcctgagcgagttctacatcctgaccgccgcccactgcctgtaccaggccaagagattcaaggtgagagtgggcgacagaaacaccgagcaggaggagggcggcgaggccgtgcacgaggtggaggtggtgatcaagcacaacagattcaccaaggagacctacgacttcgacatcgccgtgctgagactgaagacccccatcaccttcagaatgaacgtggcccccgcctgcctgcccgagagagactgggccgagagcaccctgatgacccagaagaccggcatcgtgagcggcttcggcagaacccacgagaagggcagacagagcaccagactgaagatgctggaggtgccctacgtggacagaaacagctgcaagctgagcagcagcttcatcatcacccagaacatgttctgcgccggctacgacaccaagcaggaggacgcctgccagggcgacagcggcggcccccacgtgaccagattcaaggacacctacttcgtgaccggcatcgtgagctggggcgagggctgcgccagaaagggcaagtacggcatctacaccaaggtgaccgccttcctgaagtggatcgacagaagcatgaagaccagaggcctgcccaaggccaagagccacgcccccgaggtgatcaccagcagccccctgaagtag

SEQ ID NO: 9938 - DNA, 1467 bp, Artificial Sequence
  derived and/or modified sequence
atgggtcgccccctgcatttggtgttgctgagtgcttcccttgccggtctactgctgcttggggagtccttattcattagacgtgaacaggccaacaatatccttgcacgagtgacccgggccaactcgtttctcgaagaaatgaagaaaggacacctggagagggagtgtatggaagagacctgcagctacgaagaagctagggaagtattcgaggactcagataagacgaatgaattctggaacaagtacaaggacggggatcagtgcgaaacctccccatgccagaaccagggcaagtgcaaagacggtctgggcgagtacacctgtacatgtctggaggggtttgagggaaagaattgcgagctctttactcggaaactgtgctctttggataacggcgattgtgaccagttttgtcacgaggagcagaattcggtcgtctgttcttgtgccagaggatacactctcgcagacaacggaaaggcctgcatacccaccggaccctatccctgtggtaaacagacactggaacgtagaaagagatccgttgcacaggccacgtctagcagtggagaggctcccgacagcataacgtggaagccgtacgatgccgccgatctggaccccacggaaaaccccttcgacttgctcgacttcaatcagactcagccggagcgcggcgacaacaacttaacacgaatcgttggcggccaggagtgtaaagacggggaatgcccctggcaagctttgctgattaacgaagaaaacgaaggattctgcggtggtaccatcctgagcgaattctatattctgaccgctgcacactgcctgtatcaagcgaagcgcttcaaagtgagagtgggcgatcgcaataccgaacaagaggagggtggggaggccgttcatgaggttgaagtggtgatcaagcacaatcggttcaccaaggagacatacgacttcgacatagcagtactgcggctgaaaactccaattaccttccgcatgaacgtggctccagcttgcttgcctgagcgcgactgggcggagagcactctgatgactcaaaaaacagggatcgtttccggcttcgggcggacccacgagaaaggcaggcaatccaccagactaaaaatgctggaggtaccatacgtggaccgtaatagctgcaaactctcttcctcattcatcattacccagaacatgttctgcgcaggttatgatacaaaacaggaggatgcttgccagggggattctggaggcccccacgtgacacgattcaaggatacttactttgtgacaggcatagtctcatggggtgaggggtgcgcacggaaggggaagtatggcatttacactaaggtgacagcctttctaaaatggatcgataggtcgatgaagacgcgaggcctgccaaaggccaaatctcatgctcctgaagtgatcacatctagtcccttgaaatag

SEQ ID NO: 9939 - DNA, 1509 bp, Artificial Sequence
  derived and/or modified sequence
gcctgtcccagtgaggacagggacacagtactcggccacaccatggggcgcccactgcacctcgtcctgctcagtgcctccctggctggcctcctgctgctcggggaaagtctgttcatccgcagggagcaggccaacaacatcctggcgagggtcacgagggccaattcctttcttgaagagatgaagaaaggacacctcgaaagagagtgcatggaagagacctgctcatacgaagaggcccgcgaggtctttgaggacagcgacaagacgaatgaattctggaataaatacaaagatggcgaccagtgtgagaccagtccttgccagaaccagggcaaatgtaaagacggcctcggggaatacacctgcacctgtttagaaggattcgaaggcaaaaactgtgaattattcacacggaagctctgcagcctggacaacggggactgtgaccagttctgccacgaggaacagaactctgtggtgtgctcctgcgcccgcgggtacaccctggctgacaacggcaaggcctgcattcccacagggccctacccctgtgggaaacagaccctggaacgcaggaagaggtcagtggcccaggccaccagcagcagcggggaggcccctgacagcatcacatggaagccatatgatgcagccgacctggaccccaccgagaaccccttcgacctgcttgacttcaaccagacgcagcctgagaggggcgacaacaacctcaccaggatcgtgggaggccaggaatgcaaggacggggagtgtccctggcaggccctgctcatcaatgaggaaaacgagggtttctgtggtggaaccattctgagcgagttctacatcctaacggcagcccactgtctctaccaagccaagagattcaaggggaccggaacacggagcaggaggagggcggtgaggcggtgcacgaggtggaggtggtcatcaagcacaaccggttcacaaaggagacctatgacttcgacatcgccgtgctccggctcaagacccccatcaccttccgcatgaacgtggcgcctgcctgcctccccgagcgtgactgggccgagtccacgctgatgacgcagaagacggggattgtgagcggcttcgggcgcacccacgagaagggccggcagtccaccaggctcaagatgctggaggtgccctacgtggaccgcaacagctgcaagctgtccagcagcttcatcatcacccagaacatgttctgtgccggctacgacaccaagcaggaggatgcctgccagggggacagcgggggcccgcacgtcacccgcttcaaggacacctacttcgtgacaggcatcgtcagctggggagagggctgtgcccgtaaggggaagtacgggatctacaccaaggtcaccgccttcctcaagtggatcgacaggtccatgaaaaccaggggcttgcccaaggccaagagccatgccccggaggtcataacgtcctctccattaaagtgagatcccactc

SEQ ID NO: 9940 - DNA, 1517 bp, Artificial Sequence
  derived and/or modified sequence
gtcccagtgaggacagggacacagtactcggccacaccatggggcgcccactgcacctcgtcctgctcagtgcctccctggctggcctcctgctgctcggggaaagtctgttcatccgcagggagcaggccaacaacatcctggcgagggtcacgagggccaattcctttcttgaagagatgaagaaaggacacctcgaaagagagtgcatggaagagacctgctcatacgaagaggcccgcgaggtctttgaggacagcgacaagacgaatgaattctggaataaatacaaagatggcgaccagtgtgagaccagtccttgccagaaccagggcaaatgtaaagacggcctcggggaatacacctgcacctgtttagaaggattcgaaggcaaaaactgtgaattattcacacggaagctctgcagcctggacaacggggactgtgaccagttctgccacgaggaacagaactctgtggtgtgctcctgcgcccgcgggtacaccctggctgacaacggcaaggcctgcattcccacagggccctacccctgtgggaaacagaccctggaacgcaggaagaggtcagtggcccaggccaccagcagcagcggggaggcccctgacagcatcacatggaagccatatgatgcagccgacctggaccccaccgagaaccccttcgacctgcttgacttcaaccagacgcagcctgagaggggcgacaacaacctcaccaggatcgtgggaggccaggaatgcaaggacggggagtgtccctggcaggccctgctcatcaatgaggaaaacgagggtttctgtggtggaaccattctgagcgagttctacatcctaacggcagcccactgtctctaccaagccaagagattcaaggtgagggtaggggaccggaacacggagcaggaggagggcggtgaggcggtgcacgaggtggaggtggtcatcaagcacaaccggttcacaaaggagacctatgacttcgacatcgccgtgctccggctcaagacccccatcaccttccgcatgaacgtggcgcctgcctgcctccccgagcgtgactgggccgagtccacgctgatgacgcagaagacggggattgtgagcggcttcgggcgcacccacgagaagggccggcagtccaccaggctcaagatgctggaggtgccctacgtggaccgcaacagctgcaagctgtccagcagcttcatcatcacccagaacatgttctgtgccggctacgacaccaagcaggaggatgcctgccagggggacagcgggggcccgcacgtcacccgcttcaaggacacctacttcgtgacaggcatcgtcagctggggagagggctgtgcccgtaaggggaagtacgggatctacaccaaggtcaccgccttcctcaagtggatcgacaggtccatgaaaaccaggggcttgcccaaggccaagagccatgccccggaggtcataacgtcctctccattaaagtgagatcccactcaa

SEQ ID NO: 9941 - DNA, 1450 bp, Artificial Sequence
  derived and/or modified sequence
gcctgtcccagtgaggacagggacacagtactcggccacaccatggggcgcccactgcacctcgtcctgctcagtgcctccctggctggcctcctgctgctcggggaaagtctgttcatccgcagggagcaggccaacaacatcctggcgagggtcacgagggccaattcctttcttgaagagatgaagaaaggacacctcgaaagagagtgcatggaagagacctgctcatacgaagaggcccgcgaggtctttgaggacagcgacaagacgaatgaattctggaataaatacaaagatggcgaccagtgtgagaccagtccttgccagaaccagggcaaatgtaaagacggcctcggggaatacacctgcacctgtttagaaggattcgaaggcaaaaactgtgaattattcacacggaagctctgcagcctggacaacggggactgtgaccagttctgccacgaggaacagaactctgtggtgtgctcctgcgcccgcgggtacaccctggctgacaacggcaaggcctgcattcccacagggccctacccctgtgggaaacagaccctggaacgcaggaagaggtcagtggcccaggccaccagcagcagcggggaggcccctgacagcatcacatggaagccatatgatgcagccgacctggaccccaccgagaaccccttcgacctgcttgacttcaaccagacgcagcctgagaggggcgacaacaacctcaccaggatcgtgggaggccaggaatgcaaggacggggagtgtccctggcaggccctgctcatcaatgaggaaaacgagggtttctgtggtggaaccattctgagcgagttctacatcctaacggcagcccactgtctctaccaagccaagagattcaaggtgagggggaccggaacacggagcaggaggagggcggtgaggcggtgcacgaggtggaggtggtcatcaagcacaaccggttcacaaaggagacctatgacttcgacatcgccgtgctccggctcaagacccccatcaccttccgcatgaacgtggcgcctgcctgcctccccgagcgtgactgggccgagtccacgctgatgacgcagaagacggggattgtgagcggcttcgggcgcacccacgagaagggccggcagtccaccaggctcaagatgctggaggtgccctacgtggaccgcaacagctgcaagctgtccagcagcttcatcatcacccagaacatgttctgtgccggctacgacaccaagcaggaggatgcctgccagggggacagcgggggcccgcacgtcacccgcttcaaggacacctacttcgtgacaggcatcgtcagctggggagagggctgtgcccgtaaggggaagtacgggatctacaccaaggtcaccgccttcctcaagtggatcgacaggtccatgaaaaccaggggctt

SEQ ID NO: 9942 - DNA, 1467 bp, Artificial Sequence
  derived and/or modified sequence
atgggccggcccctgcacctggtgctgctgagcgccagcctggccggcctgctgctgctgggggagagcctcttcatcagaagagagcaggccaacaacatcctggcccgggtgacccgggccaacagcttcctggaggagatgaagaagggccacctggagcgggagtgcatggaggagacctgcagctatgaggaggcccgggaggtgtttgaggacagcgacaagaccaatgagttctggaacaagtacaaggatggagaccagtgtgagaccagcccctgccagaaccagggcaagtgcaaggatggcctgggggagtacacctgcacctgcctggagggctttgagggcaagaactgtgagctgttcaccaggaagctgtgcagcctggacaatggagactgtgaccagttctgccacgaggagcagaacagcgtggtgtgcagctgtgcccggggctacaccctggccgacaacgggaaggcctgcatccccaccggcccctacccctgtgggaagcagaccctggagaggaggaagaggtctgtggcccaggccaccagcagcagtggagaggccccagacagcatcacctggaagccctatgatgctgctgacctggaccccacagagaacccctttgacctgctggacttcaaccagacccagcctgagcggggggacaacaacctgaccagaattgtgggcggccaggagtgcaaggatggagaatgtccctggcaggccctgctgatcaatgaggagaatgaaggcttctgtggcggcaccatcctgtctgagttctacatcctgacagctgcccactgcctgtaccaggccaagcgcttcaaggtgcgggtgggggacaggaacacagagcaggaggagggcggggaggccgtgcatgaggtggaggtggtgatcaagcacaaccgcttcaccaaggagacctatgactttgatattgctgtgctgcggctgaagacccccatcaccttcaggatgaatgtggccccagcctgcctgcctgagcgggactgggccgagagcaccctgatgacccagaagacaggcatcgtgtctggcttcggccgcacccatgagaagggccggcagagcacccggctgaagatgctggaggtgccctacgtggacaggaacagctgcaagctgagcagcagcttcatcatcacccagaacatgttctgtgccggctatgacaccaagcaggaggatgcctgccagggcgacagcggcggcccccacgtgacccgcttcaaggacacctactttgtgacaggcatcgtgtcctggggcgagggctgtgccaggaagggcaagtatggcatctacaccaaggtgacagccttcctgaagtggattgaccgctccatgaagacccggggcctgcccaaggccaagagccacgcccctgaggtgatcaccagcagccccctgaagtag

SEQ ID NO: 9943 - DNA, 1467 bp, Artificial Sequence
  derived and/or modified sequence
atgggccggcccctgcacctggtgctgctgagcgccagcctggccgggttgctccttttgggcgaatccctatttataagaagggagcaggccaacaacattctggccagagtcacccgggccaactcttttctggaggagatgaagaaggggcatctcgagcgcgaatgcatggaagagacatgctcatatgaggaggcccgcgaggtgtttgaagattccgacaagactaacgagttctggaataagtataaagacggcgaccaatgtgagacatccccgtgtcaaaaccaaggtaagtgcaaggatggtttgggcgaatatacttgtacgtgtctggaaggctttgaaggaaaaaattgtgaactgttcacaaggaagttgtgtagtctcgataacggtgattgtgatcagttttgccacgaagagcaaaattccgtggtgtgcagttgtgcaagaggctacacactggcagataacggaaaggcatgcattcctaccggcccatatccctgcggcaaacagacactagaaagaagaaaaagaagcgtggctcaagcaacatctagcagcggcgaggcgccagactccatcacttggaagccttacgatgctgccgacctggacccaacagagaaccctttcgatctactggacttcaaccaaacccaacccgagcggggagataataacctgacacgcatcgttggggggcaggagtgcaaggacggggagtgtccctggcaagcccttttaattaatgaggaaaacgagggcttttgcggtggcaccatcctgagcgaattttacatactcacagccgcccattgcctctaccaggccaagcgattcaaagtgcgcgtaggagatcgaaacacagagcaggaggaaggcggagaggccgttcatgaggtcgaggttgtcatcaagcacaatagatttacaaaggagacctatgatttcgatatcgccgtcctcagattgaaaaccccaatcacattccggatgaacgtggcacctgcttgtttgccggagcgtgactgggctgagtccactctcatgacacagaaaactgggattgtgtcaggcttcggcagaacacacgagaaaggtaggcagtcgacacgccttaagatgcttgaggtgccatacgtcgacaggaattcctgcaaactctcctccagctttatcatcacacagaatatgttttgtgccggttacgacaccaaacaggaggacgcatgccagggagactcagggggaccccatgtcacacgtttcaaggatacttactttgtgacagggatagtgtcttggggcgaaggatgtgctagaaaggggaagtacggtatctatacaaaggtgactgcctttttaaagtggatcgaccgttcaatgaagacacggggcctgccaaaggccaaaagccatgccccagaggtgattacaagcagtcccttaaagtag

SEQ ID NO: 9944 - DNA, 1467 bp, Artificial Sequence
  derived and/or modified sequence
atgggcaggccacttcacttggtgctgttgagcgcctcactagcaggcctcctcttactaggggagtctctgtttattagaagagagcaggccaacaatatactggctagggtgactcgggcaaatagttttctcgaggaaatgaagaagggacacctagagagagagtgcatggaagaaacatgcagctacgaagaggccagagaagtatttgaggacagcgacaagactaatgagttttggaataaatataaagacggcgatcaatgcgagaccagtccatgtcaaaaccaggggaaatgcaaggatgggttgggtgaatacacctgcacttgcctggaagggttcgaggggaagaattgtgagctctttactcggaagttgtgctcacttgataatggagattgtgatcagttctgtcatgaagagcaaaattcagttgtgtgtagctgtgcccgtggctatactctggcagataacggtaaggcatgcatccctaccggcccttacccttgcggcaagcaaactcttgaacgcaggaagaggagtgttgcacaagcgactagttcaagcggagaggcccctgacagtatcacctggaagccatatgatgcagcggacctggacccaacagagaaccccttcgatctacttgacttcaaccagacacagccagagcgcggtgacaataacctgacaagaattgtcggcggacaagaatgtaaggatggcgagtgtccttggcaggcccttctcattaatgaagagaacgaaggtttttgcggagggacaattctctccgagttttatatccttacggccgcacactgtttgtatcaggcgaagagattcaaagtaagagttggagacagaaatacggagcaggaggaaggcggtgaagctgtgcatgaggtcgaagtggtcataaagcacaacagatttacaaaggaaacttacgacttcgacatagcagtgctccgtctcaaaacccctataacgtttaggatgaatgtggcccctgcctgtctgccagagagagattgggctgagtcaacgctgatgacacagaagacaggcatcgtgtctggcttcggcaggacacacgaaaaaggaagacagtcgactcggcttaagatgctggaggttccctatgttgatcgcaactcctgtaagttgtcaagctccttcatcataacacagaatatgttctgtgcagggtatgacacaaaacaggaggacgcttgtcagggcgactccgggggtccacatgttactcggtttaaagatacttattttgtgaccggtatcgtaagttggggagaagggtgtgccagaaaaggcaagtacggtatttatacaaaggtgacagcatttctgaagtggattgacaggtcaatgaagactcggggactacccaaggctaaaagtcacgctcccgaggtgattacctcgagtcctctgaaatag

SEQ ID NO: 9945 - DNA, 1467 bp, Artificial Sequence
  derived and/or modified sequence
atgggaagacccctgcatctcgtcttacttagtgcaagtcttgccggtcttctcctgctgggcgaaagtctgttcattcgaagggaacaggccaacaatattctggcacgcgtgactcgtgccaattcttttctggaggaaatgaaaaagggccacctagaacgtgaatgcatggaagaaacatgctcttatgaggaggcgcgggaagtgtttgaggatagtgacaagaccaacgagttctggaataaatacaaggatggcgatcagtgtgaaacgtccccctgtcagaaccagggcaaatgtaaggatggacttggggagtatacttgtacatgtctcgagggctttgaaggcaagaactgcgagctgttcactcggaagctttgtagcttggacaatggcgactgtgaccagttctgtcacgaggagcagaactcggtggtgtgttcttgtgcgagaggatacaccctggctgacaatggtaaggcttgtatacctaccggcccatacccctgcgggaaacagaccttagagaggcgcaagagatctgtggcacaggccaccagtagctctggcgaggcgcctgattctatcacttggaaaccctacgacgctgctgatcttgacccaactgagaatcccttcgacttactcgattttaatcagacacagccggaacgaggagataataatctaacccgcatcgtgggaggtcaggaatgcaaagacggcgaatgcccctggcaagccttgttgatcaatgaggaaaatgaaggtttctgtgggggaacgatcttgagtgagttctacattcttactgccgctcattgtctgtaccaggccaaacgttttaaagtgcgtgtcggggaccgcaacaccgaacaagaagagggcggagaagccgtccacgaggtagaagtggtgattaagcataataggtttaccaaggaaacctacgatttcgatattgctgtcctgaggctcaagacacctataacctttcgcatgaacgttgctcctgcatgtctgcctgagagagattgggcagaatcgacacttatgacacagaaaacaggaattgttagtgggttcggacgcacgcacgaaaaagggagacagtctacaagactgaagatgctagaagtgccgtatgttgacaggaatagttgtaagctgagctcgtcttttatcataacacagaacatgttctgcgctggctacgatacgaaacaagaggatgcttgtcagggtgactcagggggcccgcacgtgactagatttaaagatacatactttgtgactgggatagtgtcttggggagaggggtgtgcccgtaaaggcaagtatgggatctatacaaaagtcactgcgtttttgaaatggatagaccggtctatgaagactaggggacttcccaaggccaagtctcacgctcctgaagtgatcacttcctctcctcttaagtag

SEQ ID NO: 9946 - DNA, 1467 bp, Artificial Sequence
  derived and/or modified sequence
atgggccgccctttacatttggttttactgagtgcatcattggccggattgcttttgctgggggaatctctatttattcggagagaacaagccaacaacatactggcccgtgtgactagagcaaatagttttctcgaagaaatgaagaaagggcacctggagagagaatgcatggaagaaacctgttcatatgaagaagcccgggaggtgttcgaagactctgataaaaccaacgaattctggaacaagtacaaagacggggaccagtgcgaaacctccccctgccagaaccagggtaagtgtaaagacggactgggcgaatacacttgcacgtgtttagagggatttgaaggtaagaattgtgaattatttacaaggaaactctgctccctggacaacggagattgcgatcaattctgtcatgaagaacaaaactcagtcgtgtgttcctgtgcccgcggctacaccctcgcagataatggaaaagcctgcatccctactggcccttacccctgtgggaagcaaactcttgagcgaaggaagcgctcagtggctcaggccacctcctctagcggagaggctcctgacagcatcacctggaaaccctacgacgctgctgatcttgacccaactgagaatcccttcgacttactcgattttaatcagacacagccggaacgaggagataataatctaacccgcatcgtgggaggtcaggaatgcaaagacggcgaatgcccctggcaagccttgttgatcaatgaggaaaatgaaggtttctgtgggggaacgatcttgagtgagttctacattcttactgccgctcattgtctgtaccaggccaaacgttttaaagtgcgtgtcggggaccgcaacaccgaacaagaagagggcggagaagccgtccacgaggtagaagtggtgattaagcataataggtttaccaaggaaacctacgatttcgatattgctgtcctgaggctcaagacacctataacctttcgcatgaacgttgctcctgcatgtctgcctgagagagattgggcagaatcgacacttatgacacagaaaacaggaattgttagtgggttcggacgcacgcacgaaaaagggagacagtctacaagactgaagatgctagaagtgccgtatgttgacaggaatagttgtaagctgagctcgtcttttatcataacacagaacatgttctgcgcaggctacgatacgaagcaggaagacgcttgccaaggggattctggaggtccgcatgtgactcgcttcaaagatacgtatttcgtcaccggtatcgtcagctggggcgaaggctgtgcacggaaggggaagtacggaatctataccaaagttactgcatttcttaaatggattgatagatcaatgaaaaccagaggacttcctaaagccaaaagccacgcccccgaagtcattacaagttcacctttaaagtag

SEQ ID NO: 9947 - DNA, 1464 bp, Artificial Sequence
  derived and/or modified sequence
atgggtcggccactccatcttgtcctgctttcagcgtcgttggcgggccttcttcttctgggtgagtcgctctttatacgacgcgaacaagctaataacattctggccagagtcacccgcgcaaattcatttcttgaagaaatgaaaaagggacatctggaaagagaatgcatggaagagacgtgttcgtacgaagaggcccgagaggtctttgaagattccgataaaacgaatgagttctggaacaagtacaaggacggagatcagtgcgagactagcccttgtcaaaaccagggcaagtgtaaggacgggcttggggaatacacttgtacgtgcctcgaggggtttgaaggaaaaaactgtgaacttttcaccaggaaactttgttccctggataacggagattgtgatcagttctgtcacgaagaacagaactccgtcgtgtgctcatgtgcacgcggctacactctggctgacaacggcaaagcatgtattccgactggaccttacccctgcggtaagcaaacgctggagcgtcggaagagatccgtcgcacaagcaacttcgtcctcaggggaagcaccagattccattacttggaagccatacgacgctgccgacctcgatccaactgaaaatccttttgatctgctcgatttcaaccagacccaacctgaacggggcgacaacaaccttactcggattgtcggcggacaggagtgtaaagatggcgaatgtccttggcaggcattgctcattaacgaagagaacgagggtttttgtggtggtaccattctctccgagttctatatcctgactgcggcacattgtctttaccaagcaaagcgttttaaggtaagggtgggagacagaaacacggaacaagaggaaggtggtgaagcagtccatgaagtcgaagtggtgatcaaacacaatcggttcaccaaggaaacttacgattttgacatcgccgtgctgcgccttaagacccctattacctttcgaatgaatgtggcaccggcctgcttgcccgagagagattgggctgagagcacccttatgacgcaaaaaactggaatcgtgtcaggttttggtagaacccatgaaaaaggccgtcagtcaaccagacttaagatgctcgaagttccctacgtggatagaaatagctgtaagctgagttcctcgttcatcataacccaaaacatgttctgcgctggttacgacaccaagcaagaggatgcatgtcaaggcgattccgggggacctcacgtgaccaggtttaaagatacttactttgtgaccggaatagtaagctggggggagggatgcgctcggaagggcaagtacggaatctacaccaaagtgactgcattccttaaatggattgacagatcgatgaaaactagaggccttccgaaggctaagtcccacgccccagaggtgattacttcctcaccattgaaa

SEQ ID NO: 9948 - DNA, 1464 bp, Artificial Sequence
  derived and/or modified sequence
atgggacggccgctgcatctggtccttctgagcgcttcgttggcaggactgcttctgcttggcgaatccctctttattcgccgggaacaagcaaacaacattttggcgcgggtgaccagagcgaactcgtttctcgaagagatgaagaagggccacctcgaaagagaatgcatggaggaaacctgttcgtacgaagaggcaagagaagtatttgaagattcagacaagactaatgaattttggaacaaatacaaggatggagatcagtgcgaaacctccccatgtcaaaatcagggaaagtgtaaggacggattgggggaatacacctgcacttgtctcgaaggattcgaaggtaagaactgtgagctgttcaccagaaagctctgcagcctggataatggagattgtgaccagttttgccatgaagaacaaaattcagtggtgtgttcatgcgcgagagggtacacccttgccgataacggaaaggcatgtattccgaccggaccttacccttgtggtaagcagaccctcgaaagacgcaagcgctccgtggcccaagcgacgtcatcatccggcgaagcaccagactcgatcacctggaagccctacgatgcggcagatctcgatcctaccgaaaaccccttcgaccttctggacttcaaccagacccaacctgaaaggggtgacaataaccttactcggatcgtggggggacaagaatgcaaggatggtgaatgcccctggcaggcacttcttatcaacgaggaaaacgagggattttgtggaggtaccatcctgagcgagttttacatccttactgcagctcactgtctttaccaagcgaagcgtttcaaagtccgcgtgggtgatagaaacaccgaacaagaggaaggaggagaagccgtccatgaagtggaagtggtgattaaacacaatagattcaccaaggaaacctacgactttgatatcgcagtgctccgccttaagaccccaattacctttcgcatgaatgtggcaccagcctgtctgccggaaagagactgggcagagagcactcttatgactcaaaaaactggaatcgtgtcggggtttgggcggacccatgagaagggccggcaatccactcgtctgaaaatgcttgaagttccatacgtggatagaaattcgtgtaaactgtcctcgagctttatcattacccagaacatgttttgtgccggttacgataccaagcaagaggatgcgtgtcaaggagactcagggggaccacatgttactcggtttaaagatacgtacttcgtcaccggcattgtctcatggggtgaaggttgcgcacgcaaaggaaagtacggaatttacactaaggtgaccgcattcctcaagtggatagaccgcagcatgaaaaccagaggactgcctaaggcgaaaagccatgcccctgaagtgattacttcatcacccctgaag

SEQ ID NO: 9949 - DNA, 1464 bp, Artificial Sequence
  derived and/or modified sequence
atgggaagaccactacatcttgttcttttatcagcatctttagctggacttttgttattaggagaaagtttatttattagaagagaacaagctaataatattttagcacgagttacaagagcaaatagttttttagaagaaatgaaaaaaggacatttagaaagagaatgtatggaagaaacttgtagttatgaagaagcacgtgaagttttcgaagactcagataaaaccaatgagttttggaataagtataaagatggtgatcaatgtgaaacttcaccttgtcaaaatcaaggtaaatgtaaagatggattaggagaatacacctgtacatgtttagaaggattcgaaggtaagaattgtgaattgtttactagaaaattgtgttcacttgataacggagattgtgaccaattctgtcatgaagaacaaaattctgttgtatgttcatgtgcaagaggttatacattagccgacaatggaaaggcatgtattccaactggtccatatccatgtggaaaacaaactttagaaagacgaaaaagatcagttgctcaagcaacctcttcttctggagaagctccagattctattacctggaaaccatatgatgctgcagatcttgatccaactgaaaatccattcgatttattagattttaaccaaactcaaccagaacgaggagataataaccttacaagaatagtaggtggacaagagtgcaaggatggtgaatgtccatggcaagctcttttaattaatgaagaaaatgaaggattttgtggtggaactattttatctgaattttatattttaacagcagctcattgtttatatcaagctaaacgatttaaagttagagtaggtgatagaaatacagaacaagaagaaggtggagaagctgtacatgaagttgaagtagttattaagcataatagatttactaaagaaacatacgattttgatatagcagttttacgtttaaaaacacctataacatttcgtatgaatgttgcacctgcatgtcttccagaaagagattgggctgaatcaacacttatgacacaaaaaactggaatagtttcaggatttggtcgaactcatgaaaaaggaagacaatcaactagattaaaaatgttagaggttccatatgtcgatagaaattcatgcaaactttcatcttctttcattattacacaaaatatgttttgtgcaggatatgatacaaaacaagaagatgcatgtcaaggggattcaggtggaccacatgttacaaggtttaaggacacatattttgttaccggaatagtttcatggggagaaggatgcgcaagaaaaggaaaatatggaatttatacaaaagtaacagcatttcttaaatggattgatagatcaatgaaaacacgtggattaccaaaagctaaaagtcatgctcctgaagtaattacatcatcaccattaaaa

SEQ ID NO: 9950 - DNA, 1464 bp, Artificial Sequence
  derived and/or modified sequence
atgggtagacctctgcatttggtgttgttgagcgcatcgctggccgggcttctgcttctgggagaatcattgtttatcagacgagaacaagcaaataacatcctggcacgagtgacgagagcaaactcctttctcgaggagatgaagaaaggccacttggaaagagagtgtatggaggaaacttgctcttacgaagaggcgagggaagtgtttgaggactctgacaaaacgaacgaattctggaacaagtacaaggacggtgatcagtgcgaaacttccccttgccaaaaccaggggaagtgtaaggatggactcggcgaatacacctgtacctgtctggaaggtttcgagggtaaaaactgtgaactgtttaccagaaaactttgtagccttgataatggtgattgtgaccaattctgtcacgaagaacaaaattcagtggtctgtagctgcgcaagaggatataccctggcggataatggaaaagcctgtattccaaccggcccatacccctgcggtaagcagaccctggagcgaagaaagagatcggtggcgcaagccacctcgagctccggtgaggcacctgattccataacttggaagccttacgacgcagccgatcttgacccaaccgaaaacccatttgatcttcttgactttaaccagactcaacctgaacggggggacaacaatcttaccagaatcgtcggaggccaggaatgcaaagatggagaatgtccttggcaggctctgttgattaacgaggaaaacgaaggtttttgtggagggaccattctgtccgaattctacatacttactgccgcacattgcctttaccaggcaaagagatttaaggtccgggttggggatcgcaatactgaacaagaggagggaggagaggcagtccatgaggtggaagttgtgatcaaacataaccggttcaccaaggaaacctacgattttgacattgctgtccttaggctcaagactccaatcacctttcgcatgaatgtggcgccggcctgccttccggaacgcgattgggccgagtccacgctgatgactcaaaagactggaatcgtgagcgggttcggtcggacccatgagaaagggagacaatcgaccaggctgaagatgttggaagtcccttatgtggatcgaaactcatgcaagctctcatcatcctttatcatcactcagaatatgttttgtgcaggctacgacactaagcaggaagatgcatgtcaaggggatagcgggggcccacatgtgactcgttttaaggatacttacttcgtcacgggtattgtgtcgtggggggagggatgtgcgcgtaagggtaaatacggcatatacaccaaggtgaccgcattcctgaagtggatagatcgatcgatgaaaacgagaggccttcctaaggcaaaatcccacgccccggaagtgattacctcgtcgccactcaaa

SEQ ID NO: 9951 - DNA, 1464 bp, Artificial Sequence
  derived and/or modified sequence
atgggccgaccacttcatctggtgcttctgtcggcgagcctggcagggcttcttctccttggagaatccctgtttatcagacgggaacaagccaacaatattctggctagagtgaccagggccaactccttcctggaggaaatgaaaaaaggacatctggaaagggagtgcatggaggaaacctgttcatacgaggaggcaagggaagtttttgaggactcggacaaaaccaacgagttttggaacaagtataaggatggcgaccaatgtgaaacctcgccatgtcaaaatcagggaaagtgtaaagacggactgggagagtacacttgtacctgtttggagggattcgaagggaaaaactgtgaactttttaccaggaagctgtgcagcctggataatggtgattgtgatcaattttgccatgaagaacaaaatagcgtggtgtgctcatgtgcgcgcggttacacccttgctgacaatggcaaggcatgtattcctactggtccctacccttgcggaaagcaaaccctggaacgtcggaagcgatccgtggcgcaggcgacctcgtcgtcgggcgaggctccagacagcatcacttggaaaccttacgatgcagcagacctcgaccctaccgaaaacccttttgatcttcttgactttaaccaaacccaacccgagcgtggagataacaatctgactcggattgtcggtggccaggaatgcaaggatggagaatgcccttggcaggcgcttctgattaacgaggaaaacgaagggttctgtggagggaccatactgtcggaattctacatcttgaccgctgcccactgtctttaccaggcaaagcgtttcaaagtccgggtgggagatcgaaacaccgaacaagaagagggtggagaagcagttcatgaagtcgaggtggtgataaagcataaccggttcaccaaggagacttatgattttgatatcgccgtccttcgcctgaaaacgccaattacgtttagaatgaacgtcgcaccagcttgtttgcctgagcgcgactgggccgaatcgactcttatgacccaaaaaaccggcatagtctcgggattcggacgtacccacgagaaggggcgtcagtcgacccgcctcaagatgctggaagtgccttacgtcgataggaacagctgcaaactgtcctcatcgttcataatcactcagaatatgttctgcgcaggctacgacaccaagcaagaagatgcatgtcagggagattccggcggcccacatgtgaccagatttaaggatacctactttgtgactggaattgtgtcgtggggagaaggttgtgcgagaaaggggaagtacgggatttacaccaaggttactgcatttctgaagtggatcgatagatccatgaaaacgcgaggactgcctaaggctaagtcacacgcgccagaagtcatcacttcctccccgctgaaa

SEQ ID NO: 9952 - DNA, 1464 bp, Artificial Sequence
  derived and/or modified sequence
atgggacgcccacttcatctcgtgctcctgagcgcctccctcgcgggactgctgctgctgggtgagtccctcttcatcaggcgcgagcaggccaacaatatcctggcgcgagtcactagagcaaattcatttctggaggaaatgaaaaagggacacttggagcgtgagtgtatggaagagacgtgcagctacgaggaagcgagagaagtgttcgaggactccgataaaactaacgaattctggaacaagtacaaggacggggaccagtgtgagacttcgccatgccagaaccagggaaagtgcaaggacggtctgggcgaatacacctgcacttgcttggaggggttcgaagggaagaactgtgaactgttcacccggaagctgtgctcgcttgacaatggggattgcgaccagttctgccacgaagaacagaattcagtcgtgtgcagctgtgcgagaggttacaccctggcagacaacggtaaagcctgcatcccgacgggcccatatccgtgcggcaagcaaaccctggagcgccgtaaacgaagcgtcgcgcaagcaacctcgtccagcggagaggccccagattcaatcacctggaagccgtacgacgcagccgatctcgacccaaccgagaacccattcgatctccttgatttcaatcaaacccagcccgaaagaggagataacaacctgaccaggatcgtgggagggcaggaatgcaaggacggcgagtgtccttggcaagccctgctcatcaatgaagagaacgagggattctgtggcggaaccatcctcagcgagttctacatcctcaccgccgctcattgtctgtatcaggccaaacggttcaaagttcgcgtgggcgaccgcaacactgagcaagaagaaggaggcgaggctgtgcacgaagtggaggtggtgattaaacacaacaggtttaccaaggaaacctacgactttgatatcgcagtgctgagactcaagaccccaatcacctttcgcatgaatgtcgccccagcttgcctgccggagcgggattgggccgaaagcacgctgatgacccaaaaaaccggaatcgtgagcggctttggccggactcacgaaaaaggcaggcagtctactaggctgaagatgctggaggtgccgtacgtcgaccggaattcttgtaagctctcaagctcgttcatcattacccagaatatgttttgcgctgggtacgatacgaagcaagaggacgcctgccaaggagactccggcgggccgcatgtgactaggttcaaggatacttacttcgtcaccggaattgtctcctggggggaaggatgcgccaggaaggggaaatacggcatttacaccaaggtgactgcgttcctgaagtggattgacaggtcgatgaaaacccggggactgccgaaggcgaagagccatgccccggaggtgatcacgagctcaccactgaag

SEQ ID NO: 9953 - DNA, 1464 bp, Artificial Sequence
  derived and/or modified sequence
atggggcgcccgctccacctcgtgctcctctcggcatctctggcgggacttctacttttgggcgaatccctttttatacgaagggagcaggcgaataatatcctagctagagtgacaagagccaattcttttttagaagagatgaagaaagggcatctggagcgcgagtgcatggaggaaacctgctcatacgaggaggcccgcgaagtctttgaagactctgacaagaccaatgagttttggaataaatataaggatggagaccagtgcgagacgtccccctgccagaatcagggtaagtgtaaagacggcctgggcgaatacacttgtacctgtctggaggggttcgagggtaagaattgtgagctgtttacgcgtaagctgtgtagtctggacaacggagactgcgatcagttttgccacgaagagcagaactctgtggtctgctcttgcgcgagaggctacaccttggcagacaatgggaaagcctgcattcccactggtccatacccctgcggcaaacagaccctggagcgccgcaagagatccgtcgcccaggctaccagcagcagcggtgaggcccccgactctataacttggaagccctacgatgccgccgatcttgatcccacggagaatcctttcgatcttctcgacttcaaccagacacagccagagcgaggggataataacctcactagaattgtaggcggacaagaatgtaaagatggagaatgtccgtggcaggccctcttaattaatgaggaaaatgaaggattttgtggtggcaccattctgtccgaattttatatcctgacagctgcccattgtttgtatcaggctaagcgatttaaggtgcgggttggagatagaaacacagaacaggaagaaggaggcgaggcagtccatgaggtggaggtggtgattaagcataatcggttcaccaaggagacctacgatttcgacattgctgtgcttagattaaaaacacccataacgttcagaatgaacgtggcccccgcatgcctcccggagagggactgggcagaatccacactgatgacgcagaagacaggaatagtttcaggcttcggccgtacccacgagaagggcaggcagagtaccaggttaaagatgctggaggtaccctatgtggatcgtaattcgtgcaagctgtcttcttcatttatcatcactcagaacatgttttgcgccggctacgacaccaagcaggaggacgcttgtcaaggggattcgggggggccccatgtcactcgattcaaagacacatattttgtcacaggaatcgtgtcttggggcgaagggtgtgctcgtaaaggaaagtacggcatttatacaaaggttactgcattcctgaagtggattgaccgttccatgaagacacgtggtcttccaaaggccaagtcacatgctcctgaggtgattacttcaagccccctgaag

SEQ ID NO: 9954 - DNA, 1464 bp, Artificial Sequence
  derived and/or modified sequence
atgggccgcccactgcatctggtgctactttccgccagtttagctggtctgctgctcttaggagagtctctcttcataaggagggaacaggctaataacattctggcgagggtgacgcgggctaacagctttctggaggaaatgaagaagggacatctggaaagagagtgcatggaggaaacctgttcttacgaggaggcacgcgaggtgttcgaggacagcgataaaactaatgagttctggaataagtataaagacggcgatcaatgcgagacaagtccgtgtcaaaaccagggcaagtgcaaagacgggctgggtgagtacacttgcacttgtctcgaagggttcgagggcaagaactgcgagttgtttacccggaagctttgtagcctggacaatggcgactgcgaccagttctgccatgaggagcaaaatagcgtagtgtgcagctgcgcccgcggctacaccctagctgacaacggcaaggcgtgtatccccacagggccctatccgtgcggcaaacagactttagagagacgcaagcggtcagttgcccaggctacttcttcatccggagaggctcctgacagtattacttggaaaccttacgacgccgccgacttggatcccactgaaaacccgttcgatttgctagatttcaatcagacacagccagagcgcggcgataacaacctgacccgaattgtcggcggtcaggagtgcaaagatggcgaatgcccatggcaagcccttctgatcaatgaggaaaacgaaggcttctgcggaggaaccattctgagtgagttctatattctgaccgctgctcattgtctgtaccaggctaaacgcttcaaagtgcgggtgggagatcggaacacagaacaggaggaaggtggcgaagcagtgcacgaggtggaagtcgtgattaaacacaaccggtttactaaggagacctatgacttcgatattgccgtactgagacttaagacaccaatcactttccgaatgaacgtggcacccgcctgtctacctgagcgggactgggccgagtcaaccttaatgacccagaaaacaggcatcgtgtccggattcgggagaacgcatgagaagggccgccagtctacccggctaaagatgctggaagtaccctacgttgatcggaattcctgcaagctctcctcatcattcatcatcacccagaatatgttctgcgctggttatgataccaagcaagaggatgcttgccagggtgattcaggaggacctcacgtgacacgcttcaaagacacctacttcgtcacaggcatcgtgagttggggagagggatgtgccagaaaaggaaaatatggtatttacactaaggtgaccgcttttcttaaatggatagataggagcatgaagacacggggtctccctaaggccaaaagccatgcccccgaggttattacttccagccctctcaaa

SEQ ID NO: 9955 - DNA, 1464 bp, Artificial Sequence
  derived and/or modified sequence
atgggacgcccgctccatctggtcctgctgagcgcgtcactcgcaggcctcctgcttctcggcgagtcgcttttcatccggcgagagcaggcgaacaatatcctcgcccgggtcactcgggccaatagcttcctcgaagagatgaagaaaggacatctggaaagagagtgcatggaggagacttgtagctacgaagaagcgcgagaagtgtttgaggattcggacaagactaacgagttctggaacaaatacaaggacggagatcagtgtgaaacctccccttgtcagaaccaaggaaaatgcaaagacggactgggggagtacacttgcacctgcctcgagggattcgaaggcaagaattgtgagctgtttaccaggaagctgtgctcattggacaacggagactgcgaccagttctgccacgaagagcagaattcggtggtctgcagctgtgcgcggggctacaccctggcagacaacggcaaagcctgtattcctactggcccttacccgtgcggcaagcaaactctcgaacgccgcaagcgctcagtggctcaagccacttcgtcatctggggaagcgccagactcaatcacttggaagccttacgatgccgctgacctcgacccgaccgaaaacccgttcgacttgcttgactttaaccagacgcaaccggagcggggagacaacaatctcactcggattgtgggaggtcaggaatgcaaggatggggaatgcccatggcaagccctgctgatcaacgaagagaatgagggattctgtggcggtactatcctgtccgaattctacatcctcaccgctgcccattgtctgtaccaggcgaaaagattcaaggtgcgagtcggagatcggaatacggaacaggaagaaggtggcgaagcagtccatgaagtggaggtcgtcatcaagcataacagatttactaaggagacttacgacttcgacatcgcagtgctgagactcaagactcccatcactttccgcatgaatgtggcaccagcctgcttgccggagcgggactgggctgaaagcaccctgatgactcagaaaaccggaatcgtgagtgggttcggaaggactcatgagaaggggagacaatcgactagactgaagatgctggaagtcccctatgtggaccgcaactcatgtaagctgtcgtcgtcgttcatcatcactcaaaacatgttctgtgctgggtacgataccaaacaggaggacgcgtgccagggggactcaggaggaccgcacgtcactcgcttcaaggacacttacttcgtgactgggatcgtgagctggggtgagggatgcgcgcggaagggaaaatacggaatctacaccaaagtgaccgctttcttgaagtggatcgaccgctcgatgaaaactcggggcctcccgaaagcgaagtcacacgcaccggaagtgattacctcgtccccactgaag

SEQ ID NO: 9956 - DNA, 1464 bp, Artificial Sequence
  derived and/or modified sequence
atgggccggcctctgcatcttgttctgttgagcgctagtctggcgggcctgctgctgctgggtgaaagtctgtttattaggcgagagcaggccaataatatactcgccagagtcaccagagctaattccttcctggaggaaatgaagaaaggacatctggagcgagagtgcatggaagagacttgttcctacgaggaagccagagaggtctttgaggatagcgacaaaacaaacgagttttggaacaaatacaaagacggagatcagtgcgagacctccccttgccaaaaccaaggtaagtgcaaggatggactgggggagtacacatgcacctgtttggaaggatttgaaggaaaaaactgtgaactctttacaaggaaactgtgcagtctggacaacggcgactgtgaccagttttgccacgaagagcagaactccgtggtttgtagctgcgccagaggctatacacttgcagacaacggcaaggcctgtatacccactggcccctatccatgtggcaaacaaactctcgagcgacggaaaaggagtgtcgctcaggctacaagctctagcggagaagccccagattcaattacctggaagccatacgacgctgctgacttggaccccacagaaaatccgttcgacctcttggatttcaatcagacccagccagagcggggtgacaataatcttactcgaatcgtgggtgggcaggaatgcaaggatggggaatgtccatggcaggctctgctcatcaacgaggagaacgagggcttttgtgggggtaccatcttgagcgaattttacattcttacagcagcacattgcctttaccaggctaagcgcttcaaagtgcgcgtgggagatcggaataccgaacaagaagaaggcggagaggccgtgcacgaggtcgaagtggttatcaagcataatagatttacaaaggagacctacgactttgacatcgccgtgcttaggctgaagacaccaatcacattccggatgaacgttgcgcctgcctgccttcccgaacgagactgggccgagtccacattgatgacgcagaagaccggaatcgtaagtggatttggccggactcatgaaaaaggcagacaaagtactcggctgaagatgctcgaggtcccatacgttgatcgcaattcttgcaagctgtcttcatcctttatcataacacagaacatgttctgtgctggctatgacaccaagcaggaggacgcttgccagggcgactccggcggcccccatgtcacaaggtttaaagatacatatttcgtgacgggaattgtcagctggggcgaaggctgtgcacggaaaggaaagtacggcatctacaccaaggttacggcctttctgaaatggattgacaggagtatgaagactagaggactcccaaaagctaagtctcatgcccccgaggtcataacgagttcccccctcaaa

SEQ ID NO: 9957 - DNA, 1464 bp, Artificial Sequence
  derived and/or modified sequence
atgggtaggccactgcaccttgtcctcttgagcgcctccttggcaggtctgctccttctcggagaatccctgtttattcgccgcgagcaggccaacaacattcttgcacgtgtgaccagagccaattcgttccttgaggaaatgaaaaagggccacctggaacgtgaatgcatggaagaaacttgctcgtacgaagaagcacgtgaagtgtttgaagattcagataaaaccaacgagttttggaataagtacaaggatggggatcaatgtgaaacttcaccctgccagaatcaaggtaaatgtaaggatggtttgggagagtacacttgtacctgtctcgaaggctttgaaggaaagaactgtgagctgttcactcgcaagctgtgctcgttggacaacggcgattgtgatcagttctgccatgaggagcaaaactcggtggtgtgttcctgtgcacgcggatacaccttggcagacaatggaaaggcctgtattccaactgggccttatccctgcggtaagcaaactctcgagagacgcaagaggtcggtggcgcaggcaacttcgtcctcaggcgaagccccagatagcataacctggaagccctacgacgcagcagacctggatcccaccgaaaacccctttgacctcctggacttcaaccaaacgcagcctgagcggggagacaataatcttaccaggatagtcgggggacaagagtgtaaggacggggagtgtccttggcaagcccttttgataaacgaagagaacgaaggattttgtggaggcacgattctcagcgagttttacatccttactgcggcacactgcctttaccaagccaagcgcttcaaggttcgcgtgggcgaccggaacactgaacaagaggagggtggagaggcagtgcacgaagtggaagtcgtcattaagcacaacaggttcaccaaggaaacctatgattttgacattgcagtgctgagattgaaaacccctatcaccttccgtatgaacgttgcacccgcgtgcctgccagagcgcgattgggcagagtcaacccttatgacccagaaaactggtattgtgtcaggatttggaagaactcacgaaaagggacgacagagcacccggctgaaaatgctggaagtcccgtacgttgataggaatagctgcaaactttcttcatcatttatcatcactcagaatatgttttgtgccggctacgacacgaaacaggaggatgcatgtcaaggcgattcaggaggccctcatgtgacccgcttcaaagacacgtactttgtgactgggattgtgtcatggggtgaaggttgcgccagaaaagggaaatacgggatctacactaaggtgaccgccttcctgaagtggattgataggagcatgaaaacccgaggtctgcctaaagcaaagtcacatgccccggaggtcatcaccagctctcctctgaaa

SEQ ID NO: 9958 - DNA, 1464 bp, Artificial Sequence
  derived and/or modified sequence
atgggaagacctcttcacctcgtgctcctgtcagcttcgctggctggtctcctgcttctgggtgaatctctgttcatccgcagggagcaggcaaataacatcctcgcaagagtgacgcgtgccaattcgtttttggaagaaatgaaaaagggccatcttgagagagaatgcatggaagagacctgcagttacgaggaggcacgagaggtgttcgaggacagcgataaaacaaacgagttctggaacaaatacaaggatggagatcagtgtgagaccagtccctgccagaatcaggggaagtgcaaggacgggctcggcgagtatacatgtacctgcctcgaggggttcgaggggaagaactgtgaactttttaccagaaagctgtgctcgctggacaacggcgactgtgatcaattctgccacgaagaacagaattccgttgtctgcagttgtgcacgaggctacaccctggcagacaacgggaaagcgtgcatccccacgggaccttacccgtgcggaaaacagactctggagcgcaggaaacggagcgtggcgcaggcaacttcttcttctggagaggccccagatagtatcacttggaagccatacgatgccgcagatctcgaccccaccgaaaatcctttcgacctgcttgatttcaaccagacacaacccgaacggggcgataacaacctgactcgcatcgtcggaggacaggaatgtaaggatggcgaatgtccctggcaagcactcttgatcaacgaggaaaatgagggattttgtgggggaacaatcctctccgaattctatatactcactgcagcccattgtctctaccaggcaaagaggttcaaagtccgcgtcggcgatagaaacacagagcaggaagaagggggagaggcggtgcatgaagtggaggttgtgattaagcataataggtttactaaagaaacatacgacttcgatatcgccgtccttcgcctcaaaacacccatcacgttcaggatgaatgtcgcccctgcatgtttgcctgagagagattgggcagagtctacattaatgactcagaagaccggtatcgtatctggtttcggcaggacacacgaaaaaggaaggcaatcgacccgtcttaagatgcttgaggttccatacgtagatcgcaatagctgtaaactgtcttcctcgtttatcatcacacagaatatgttttgtgcaggatacgatactaaacaggaggatgcttgtcagggcgatagcggggggcctcatgtgacaaggttcaaagatacatatttcgttaccggcatcgtgagctggggtgaggggtgtgcgcgcaaagggaagtatggcatttacacaaaggtgacggcctttttaaaatggatagatcggtccatgaagacgagagggctaccaaaggccaagtctcacgctccagaagtaatcacttccagtccactgaag

SEQ ID NO: 9959 - DNA, 1464 bp, Artificial Sequence
  derived and/or modified sequence
atgggacgcccgctgcacctggtgctcttgtcggcatcacttgcgggacttctcctgctcggtgagtccctgttcatccgtagggaacaggccaacaatatcctggccagagttactcgagcaaattccttcctggaagagatgaagaagggacaccttgagcgcgagtgcatggaagaaacttgcagctatgaggaagcccgcgaagtgtttgaagattccgacaagaccaacgaattttggaacaagtacaaggacggagatcagtgcgaaacttccccgtgccaaaatcagggaaaatgtaaagacggtctgggcgaatacacctgcacttgcctcgagggattcgaaggcaaaaactgcgagctgtttacgagaaagttgtgcagcctcgacaatggggactgcgatcagttttgtcacgaggagcagaactcggttgtctgctcctgtgcccgcggatacacccttgcggacaacggaaaggcctgcattccaaccgggccgtacccctgtgggaagcaaactctggagcggaggaagcggtccgtggcgcaagctactagctcgtccggggaagccccagactcaatcacgtggaagccttacgatgcggcggatctggaccctactgaaaatccattcgacctgctcgacttcaaccagacccaaccggaacgcggagataacaacctgacccggattgtgggaggccaggaatgtaaggatggggagtgtccgtggcaggcactgctcatcaacgaagagaacgaaggcttctgcggagggacgatcctctcggaattctacatcctgaccgccgcccactgcctgtatcaggctaagcgctttaaagtgcgggtgggcgacagaaacaccgagcaagaagaaggaggtgaggcagtccatgaggtggaggtcgtgatcaagcataatcgcttcaccaaggaaacctacgacttcgacatcgcagtgttgagactcaagaccccgattaccttcagaatgaatgtggccccagcttgcttgcctgaacgggactgggcggaatccactctgatgactcaaaagaccggaatcgtctctggcttcggacgcacccatgagaagggaaggcaaagcactcgcctgaagatgctggaagtcccgtacgtggaccggaactcgtgcaagctgtcgtcatcattcatcatcacgcagaatatgttctgcgccggttacgacaccaaacaggaggatgcgtgccagggtgatagcggcggaccacacgtgactagatttaaagatacttacttcgtgactggaattgtctcgtggggcgagggctgtgcacgcaaaggaaagtacggaatctacaccaaagtgactgctttcctcaagtggatcgatcggtcgatgaaaactcgggggctccccaaggctaagtcacatgcccctgaggtcatcaccagcagcccgctgaaa

SEQ ID NO: 9960 - DNA, 1464 bp, Artificial Sequence
  derived and/or modified sequence
atgggacgcccacttcatctcgtgctgttgtccgcgtctctcgcgggacttctcctgctgggagagtccctgttcatcaggagagaacaggccaacaatatcctggctcgagtgacccgcgcaaactcattcctcgaggagatgaagaagggacatctggaacgcgaatgtatggaggaaacctgctcctacgaggaagcccgcgaggtgttcgaggactccgacaaaaccaacgaattctggaacaaatacaaggacggcgatcagtgtgaaacttccccatgccagaaccaaggtaaatgtaaggatggtctgggagaatacacgtgtacgtgcttggagggctttgagggcaaaaactgcgagctgttcactagaaaactttgctcgctggacaacggtgattgcgatcaattttgccacgaagagcagaatagcgtcgtgtgtagctgcgcacgggggtacactctggcggacaatgggaaggcatgcatcccgactggaccctacccgtgcggaaagcagactcttgagcgcaggaaaagatcagtggctcaggctacctcatcgtccggagaggcgccagactcgatcacgtggaagccttacgatgcggcggacttggatccaactgagaatccgttcgacctgctcgacttcaatcagactcaaccggagcgtggggacaataacctgacccgaattgtggggggacaagaatgtaaggacggcgaatgcccttggcaggccctgctgatcaacgaggaaaatgagggattctgcggtggaaccattctttccgagttctacatcctgaccgcagcgcactgcctttaccaagccaagagattcaaagtcagagttggggatcgcaacactgagcaggaagaaggcggggaagcggtccatgaagtggaggtcgtgattaagcacaataggttcaccaaggaaacctatgatttcgacatcgccgttctgcggctcaaaaccccgatcacctttcggatgaatgtggcaccggcctgcctgccggagagagactgggcggagtcgacgcttatgacccaaaagactggcatcgtgagcggatttggaagaactcatgaaaagggtcggcagtctactcgactgaagatgctggaagtgccctacgtggatcggaacagctgcaagctctctagctccttcatcatcacccaaaacatgttctgcgccggatatgacacgaagcaggaagatgcttgccaaggagattcaggaggcccacacgtcacgcgctttaaggatacttacttcgtcactggaatcgtctcatggggcgaagggtgtgctcgcaaaggcaaatacggtatctacactaaggtcaccgcctttttgaagtggatcgaccggtccatgaaaacgaggggcctccccaaagctaagtcacacgccccagaggtcataacttcgtctccgcttaag

SEQ ID NO: 9961 - DNA, 1464 bp, Artificial Sequence
  derived and/or modified sequence
atgggccgtccactgcacctcgtgctgctgtcagcatcattggccggcctgcttcttctcggcgagagcctgttcatccgcagggagcaggctaacaatattctcgcgagggtgacaagagccaacagctttctggaagaaatgaaaaagggccatcttgagagggaatgcatggaggagacctgttcctatgaggaagccagggaagtgtttgaagactcagataagactaatgagttttggaataagtacaaggacggggatcagtgcgagacttccccttgccagaatcagggaaagtgtaaggacgggttgggggagtatacttgcacgtgcttagagggatttgagggcaaaaactgcgagctgttcacccgtaaactctgttcgctcgataatggcgattgcgaccagttctgtcatgaggagcagaatagtgtagtgtgctcttgcgcgagggggtatactctcgcagataatggcaaggcctgtatcccgaccggcccatacccatgtggcaagcagactctggagcggcgtaagcgctcagtcgcccaggccacatctagtagcggggaggctcccgactctattacctggaagccttacgatgctgcagatctcgatccaaccgagaacccattcgacttgctcgatttcaaccagactcagcccgagcggggggacaacaatttaacacgtatcgtgggcggccaggaatgtaaggacggcgagtgcccctggcaggcgcttctgataaatgaagagaatgagggcttctgtggcgggacgattctgtcggaattttatatccttaccgcagcccattgcctctatcaagccaagcggttcaaggttagggtcggcgatagaaatacagagcaagaggagggcggcgaggctgtccacgaggtagaggttgtgattaaacacaatcgttttaccaaggaaacctatgacttcgacatcgcagtgctgcgtctcaagacccccatcacatttcgcatgaacgtcgcccccgcctgcctaccggaacgagactgggccgagagtacgctgatgacacagaagactgggattgtgtccggttttgggcgcacacatgaaaaaggacggcaaagcactagactaaagatgcttgaggtaccttacgtggatagaaactcttgtaagctcagtagtagttttataattacccaaaacatgttttgtgccggatatgacactaagcaagaagatgcctgtcagggagacagtggcggcccccacgtgacacgcttcaaagacacgtatttcgttaccgggattgtgtcctggggggaaggatgcgctagaaaggggaaatacggtatttatacgaaagtcactgcatttcttaagtggattgacaggtctatgaaaacaaggggactgccgaaagcgaaatcacacgccccagaggtgataacgtcaagcccccttaag

SEQ ID NO: 9962 - DNA, 1464 bp, Artificial Sequence
  derived and/or modified sequence
atgggtcggcccctgcaccttgtgcttctaagcgcttccctcgccggtctcttactactgggagaatctttgttcatcagacgtgaacaggccaataatatcctagcacgagtgacacgcgcaaatagcttcctggaggaaatgaaaaagggtcacctggagagagagtgcatggaagagacctgtagctatgaggaagctagagaagtgttcgaggactccgacaagacgaatgagttttggaataaatataaagacggtgaccagtgtgagacgagcccatgccagaaccagggcaaatgcaaagatggattgggagagtacacatgcacttgcctggagggatttgagggtaagaattgtgagctgtttacaaggaaactgtgttcattggacaacggcgactgcgatcagttttgtcacgaggagcagaacagtgtggtgtgctcttgtgcccggggatacactctagctgacaacggcaaagcgtgtatcccgacagggccatacccatgcggtaaacagacattggaacggagaaagaggtccgtcgcccaggcaacgtcctcctccggagaggcaccagacagtattacctggaagccctacgatgctgccgatctggatcccaccgaaaaccccttcgatctgctagacttcaaccagacacagcccgaaaggggagataataacctgactcgtattgtgggcggccaggagtgtaaagatggtgaatgcccgtggcaggcgttattgattaatgaagagaacgagggtttttgtggcggcactatcctatccgaattctacatcctaaccgccgcccattgcttgtaccaggccaagcgctttaaggttagagtcggagacaggaatacagaacaggaggaaggcggcgaggcagtgcacgaagtagaggttgtgatcaaacataatcggtttaccaaggagacctatgacttcgacatcgcagtccttcggctgaagacacctatcacttttagaatgaatgtggcccctgcttgcctcccagaaagggactgggcagaatcaaccctgatgacccaaaaaaccggtatcgtatccgggttcggccggactcacgagaagggacgacagtctactagacttaaaatgctcgaggtcccctacgtggacaggaattcttgtaagttgtccagcagctttatcatcacacaaaacatgttttgtgccggctacgataccaaacaggaggacgcatgccagggcgacagtggcggtccgcacgtaactcgcttcaaagatacgtacttcgtcaccggtattgtgtcgtggggtgaaggctgcgctcgtaaaggcaaatatgggatctacacaaaggtaaccgcattcctgaagtggatcgatcgaagcatgaagaccagaggcctgcctaaggcaaagtcacatgcacccgaagtgattacttcatctcccttgaaa

SEQ ID NO: 9963 - DNA, 1464 bp, Artificial Sequence
  derived and/or modified sequence
atgggacgcccactgcacttggtcctgctgagcgcttcgctggctggcttgctgctgctcggcgagagcttgttcatccggcgcgaacaagccaacaatatcttggcccgggtgacccgggctaattcctttctcgaggaaatgaaaaagggccatcttgagcgggagtgtatggaagaaacctgttcctacgaggaggcccgagaagtgtttgaggattcggataagaccaatgaattctggaataagtataaggacggcgatcagtgcgaaacctccccttgccagaatcagggcaagtgcaaggacggactcggagagtacacctgcacttgcctggaggggttcgagggaaagaactgtgaactgttcactcggaagctgtgctcactcgacaacggcgattgcgaccagttctgccatgaggaacagaacagcgtggtctgctcgtgtgcgcggggctacactctcgcagacaatggaaaggcctgcatcccgaccggtccgtacccatgcggaaagcaaactctggaacgccgcaagcggtcagtggcccaggcaacctccagctcaggagaagctccggacagcatcacctggaagccgtacgatgcggccgatctcgaccctactgagaatcctttcgacctcctggacttcaaccagacccaaccggaacgcggtgacaacaacctgacccgcatagtcggaggtcaggaatgcaaagacggagagtgtccgtggcaagctcttctgattaacgaagaaaatgaaggattctgcgggggtactattctgtctgagttctacatcctgaccgccgcacactgcctgtatcaggcgaagaggttcaaggtgcgcgtgggtgatcggaatactgaacaggaggagggcggagaggccgtccacgaggtggaggtggttatcaagcataaccggttcactaaggagacttacgacttcgatatcgcggtcttgcgtcttaagacccccatcaccttccggatgaacgtggcaccggcgtgtctgccggagcgcgactgggcagagagcactctcatgactcaaaagaccggcatcgtgtcgggattcggacggacccacgagaagggaaggcagtccactcgcctgaagatgctggaggtgccatacgtcgaccgcaattcctgcaaactctcgtcctcctttatcattacccagaatatgttttgcgccggatacgacactaagcaggaggacgcctgccagggggatagcggaggaccacatgtgactcgattcaaggacacttactttgtcactggcatcgtgtcctggggagagggctgcgcacgcaagggcaagtacggcatctacaccaaggtgaccgccttcctcaagtggatcgataggtccatgaaaactagaggactccctaaagcaaagtcccacgccccagaagtcattacgtccagcccactgaag

SEQ ID NO: 9964 - DNA, 1464 bp, Artificial Sequence
  derived and/or modified sequence
atgggtcgtccccttcatcttgtgctgctttcagcctcccttgcaggactgctgctgctcggagagtctctgtttatccggagggagcaagcaaacaatattctggcccgtgtcactagagcaaactcattcctcgaagagatgaaaaaaggccacctggaaagggaatgtatggaggaaacgtgttcatacgaagaagcacgggaagtctttgaggattccgacaagacgaacgagttttggaataagtacaaggatggagatcagtgcgaaaccagcccctgccaaaatcaaggcaagtgtaaggatggactgggcgaatacacttgtacgtgtctggagggcttcgaaggaaagaactgtgagttgtttactagaaagttgtgcagccttgacaacggggactgcgaccaattctgtcatgaagaacaaaactcggttgtctgcagctgtgcacgaggatacaccctggcagataacggaaaggcttgtattcctactggtccctacccttgtggtaaacagacccttgagcgacgcaagcggtcggttgcacaggcgacctcctcgtcgggagaagctcctgattccatcacttggaagccctacgacgcagccgatcttgacccaactgaaaaccctttcgatcttcttgatttcaaccaaactcaaccagaacgtggcgacaacaaccttacccggatcgtcggagggcaagaatgtaaagatggagaatgtccatggcaagcgcttctcattaatgaagaaaacgaaggcttctgcggtggaactattctttccgaattctacattcttaccgcagctcactgtctgtaccaagccaaaagattcaaggtgcgagtgggagacaggaataccgaacaggaagaaggcggcgaagcagtgcacgaagttgaagtggtcattaagcataatcgatttactaaagagacttacgatttcgatattgcagtgcttaggttgaaaactcccatcacttttcggatgaacgtggcaccagcatgtctccctgaacgtgactgggccgaatccaccctgatgacccaaaagacgggaatcgtcagcggtttcggaaggacccacgagaagggtaggcagtcgacccggctgaagatgcttgaagtgccttatgtggacagaaacagctgtaagctctcgtcgtcattcatcattacgcagaatatgttttgtgcaggctacgataccaaacaagaggacgcctgtcagggagattccggtgggccacatgtgactcgctttaaagatacttacttcgtgaccggaattgtctcatggggtgaaggatgtgcaagaaagggcaaatacggaatctatactaaggtaactgcgtttctgaagtggatcgacaggtcgatgaaaactagaggacttcctaaggcaaagagccatgcccctgaagtcattactagctccccccttaag

SEQ ID NO: 9965 - DNA, 1464 bp, Artificial Sequence
  derived and/or modified sequence
atgggacggcctcttcaccttgtgttgctctcagcatctctggccgggttgctgctcttgggagaaagcctgtttattcggcgagagcaagcaaacaatatcctggcaagggtgactcgggcgaactcctttctggaggagatgaaaaagggtcatctggaaagagaatgcatggaggaaacctgcagctatgaagaggcccgtgaagttttcgaagattccgataagaccaacgaattctggaataagtataaggatggggaccaatgtgaaacctcgccgtgccaaaaccagggtaagtgcaaagatggacttggtgagtacacctgtacctgcctggagggctttgaaggaaaaaactgtgagcttttcacgagaaagctgtgttcgctggacaacggtgattgcgaccagttttgtcatgaagaacagaattcggtcgtgtgtagctgtgcccgaggttacaccctggccgataatggcaaggcatgtatacccactggtccgtacccttgtggtaaacaaaccctcgagagacgtaagaggtcagtggcacaggccacttcatcatccggtgaggccccagattcgattacctggaaaccttacgatgccgcagatttggatcctactgaaaatccattcgacctgctcgacttcaaccaaactcaaccagagagaggtgacaataaccttacgagaattgttggtggccaagaatgcaaggatggtgaatgtccatggcaggccctcctgattaacgaggagaacgaaggattttgtggtggcaccattttgtcggagttttacattctgactgctgcgcattgtctgtaccaagcaaagcgttttaaggtgcgtgtgggggatcgtaataccgaacaggaagaaggaggtgaagctgtgcacgaggtggaagtggtgataaagcacaaccggtttacgaaagaaacttacgacttcgatattgccgtccttagactgaaaacccctatcacctttcgcatgaacgtggcacctgcatgtctcccagagagagattgggcagagagcactctgatgacccaaaaaaccggaattgtgtcaggcttcggcagaacccacgaaaaaggtagacaatcgacccggctgaagatgcttgaggtcccttacgtggataggaattcgtgtaaacttagctcctccttcatcattactcagaatatgttttgtgcaggatacgataccaaacaggaggatgcatgccagggggattcggggggtccacatgtgaccagatttaaggatacctacttcgtcaccggaattgtctcgtggggagaaggatgtgcgcgaaagggtaagtacgggatatacactaaagtgaccgcctttcttaaatggatcgacaggtcaatgaaaactagaggtctgcctaaggccaagagccacgcaccggaagtgattactagctcgccgctcaag

SEQ ID NO: 9966 - DNA, 1464 bp, Artificial Sequence
  derived and/or modified sequence
atgggtcggccgctgcacctcgtgctgttgtccgcatcattggcgggtctgctgctgctgggggagtccttgttcatccgccgcgaacaggccaataacatcctggctcgcgtgacccgagctaactctttcctggaggagatgaaaaaaggtcacctggaaagagaatgcatggaggaaacttgcagctacgaggaggcccgcgaggtctttgaggattcagacaagactaacgagttctggaacaaatacaaagatggagatcaatgcgaaacttcgccatgccagaatcaggggaagtgcaaggacggactgggggaatacacctgcacgtgccttgaaggcttcgagggcaagaattgtgagctgttcactcgcaagctgtgcagtctggataacggcgactgtgaccagttctgtcacgaagaacaaaactccgtcgtttgctcatgcgctcgcggctacactttggcagacaacggaaaggcttgcatcccgaccggcccgtacccttgcgggaagcagaccctggaacggagaaagagatcggtggcccaggctacctcatcatccggtgaagccccagactccatcacctggaagccgtacgacgccgcggacctggatccaacggaaaacccattcgatctcctcgacttcaatcaaacccagcccgaacggggcgacaataacctgacgaggatcgtgggaggacaagaatgtaaggatggggaatgcccgtggcaggccctgctcatcaatgaagagaacgaaggattctgcggaggcactatcctgtcagagttttacatactcaccgcggctcattgtctctaccaggccaaaagatttaaggtacgagtgggcgatcggaataccgaacaagaagaagggggagaggcagtgcacgaagtcgaggttgtcatcaagcataaccgcttcaccaaggagacttacgacttcgatattgctgtgctgaggctgaaaaccccaattacctttcggatgaatgtcgcgcccgcctgccttccggagagggactgggcggaatcgacgttgatgactcaaaaaacgggaatcgtgagcggttttggaaggacgcatgaaaagggtcgccaatcgacccgccttaagatgcttgaagtgccttacgtggaccggaactcgtgcaagctgagcagctcttttatcatcacgcagaatatgttctgtgcgggatacgacaccaaacaggaggatgcatgccagggtgattccggaggtccgcacgtcactcgttttaaggacacctatttcgttaccggcatcgtgagctggggagaggggtgtgcgagaaaaggaaagtacggaatctacactaaagtaactgccttcctcaaatggatcgatcgctcaatgaaaactaggggactgccgaaggctaaatcccacgctcctgaagtgattacttcttcgccgttgaag

SEQ ID NO: 9967 - DNA, 1464 bp, Artificial Sequence
  derived and/or modified sequence
atgggccggccattgcacctagtgttgcttagtgcttcgctggcaggtttacttttgcttggggagagcctttttattcgccgagaacaggctaacaatatcctggctcgggttacaagagcaaacagtttcctcgaggagatgaagaaggggcacctggagcgtgagtgcatggaagagacgtgttcttacgaagaagcgcgtgaggtgtttgaagattctgacaaaactaacgagttctggaacaaatataaggatggcgatcagtgtgaaaccagcccatgtcagaatcagggaaaatgcaaggacggtctcggcgaatacacatgcacctgtctggagggctttgaaggcaagaattgcgagctgttcacccgcaagctttgtagcctagataacggagactgcgatcagttctgtcacgaggagcagaactcagtggtatgttcatgtgccagaggatacaccctggcagacaacgggaaagcatgcattccaaccggcccatatccatgcggcaaacagacactggaacgacggaaacggtctgttgctcaagcaactagcagctcgggtgaagcacctgactccattacatggaagccatacgacgccgcagatctggatcctaccgagaatccttttgatctgcttgattttaaccaaacccaaccagagagaggagacaacaacctgacccggattgtgggtggccaggagtgtaaggatggcgagtgcccatggcaggccctgcttatcaacgaagaaaatgaagggttttgcggtggtaccatccttagcgagttctatatattaaccgcagcccactgtctataccaagctaaaaggttcaaggttcgcgtcggtgacaggaacacagagcaagaagaggggggggaggctgtacatgaggtcgaggtcgtcattaaacacaaccggttcacaaaggagacttatgactttgacattgctgtcttgcgccttaagactccaatcacgttcaggatgaacgtggctcctgcttgtcttccagaaagagattgggccgaatctacactgatgacacagaaaactgggattgtgtccggtttcggccgcacacacgaaaaaggcaggcaatctacgagactcaagatgctcgaggtcccatacgtagataggaattcttgcaaactctcttccagctttattatcacccagaatatgttttgtgccggctacgacacaaagcaggaggacgcttgtcaaggggatagcgggggaccacacgtcactcgcttcaaggacacatacttcgtcaccggaatcgtttcgtggggtgagggctgtgcccgcaaagggaaatacgggatttatactaaggtgaccgcatttcttaaatggatcgaccggtctatgaaaacccgtgggctccctaaggcaaagtcacacgcgccagaggtcattactagctcaccattaaaa

SEQ ID NO: 9968 - DNA, 1464 bp, Artificial Sequence
  derived and/or modified sequence
atgggtagaccactgcacctggtgctgctctccgcctcgctcgccggattgcttcttttgggagaaagcctctttatcagaagggaacaagcgaacaatattctcgccagagtcacgcgcgcaaactcgtttctggaggagatgaagaagggtcaccttgaaagagaatgcatggaagagacttgctcatacgaggaggccagggaagtgtttgaagattcggataagaccaatgaattctggaacaagtataaagatggagatcagtgtgaaacctcaccatgtcagaaccaagggaaatgcaaagatggactgggggaatacacttgtacttgtcttgaaggatttgaaggcaagaattgtgaactgttcaccagaaaactttgttccctcgataacggtgattgtgatcagttctgtcatgaggagcagaactcggtggtctgcagctgcgccagaggatacaccctcgcggataacggtaaagcgtgtattcccaccgggccttacccttgtggaaaacaaaccttggagaggcgaaaacgctccgtggcacaagcaacgtcatcgtcgggcgaagcacccgattcgattacctggaagccgtacgatgcagccgaccttgatccaacggagaatccattcgaccttctggatttcaatcagacccaacccgagcgcggcgacaataacctgacgcggatcgtcgggggacaggagtgtaaagacggcgaatgtccttggcaggccctgcttatcaatgaagagaacgaagggttttgtggtggtaccattctttcggagttttacattctgactgcagcccattgcctgtaccaagcaaagcgctttaaagtccgcgttggtgaccggaatactgagcaagaggaaggaggggaggcagtgcacgaagtcgaagtggtgataaagcacaatagattcactaaagaaacttacgatttcgatatagcagtcctgcgtcttaaaaccccaataacgtttcgcatgaacgtggcaccggcatgccttccagagagagactgggctgagtcaactctgatgactcagaaaaccggaatcgtgagcggatttggtagaactcacgagaaggggagacaatctacccgcctgaaaatgctcgaggtcccttacgtcgacaggaattcatgtaaactttccagctccttcattatcactcagaatatgttttgcgccggttacgacaccaagcaggaggacgcctgtcaaggagactcgggcgggccccacgtgactcggttcaaggatacttacttcgtcactggtatcgtgtcatggggggaaggttgtgcaaggaagggcaagtacggtatctatactaaggtgaccgcattcttgaagtggatcgaccggtccatgaaaacgagaggtctgccaaaggcaaagagccatgcgcctgaagttatcacctcatcccctctgaag

SEQ ID NO: 9969 - DNA, 1464 bp, Artificial Sequence
  derived and/or modified sequence
atgggacgccctctgcatttggttctcctctcggcctctttggcgggtctgctgcttctcggggagtccctgttcattcgcagagaacaggccaacaatatcctggcgagagtgacccgcgcgaattcgttcctggaagaaatgaagaaaggacatctcgaaagagaatgtatggaagaaacttgttcatacgaggaggcacgcgaggtctttgaggactctgataagactaatgagttctggaataagtataaggacggtgaccaatgcgagacgagcccgtgtcaaaaccagggcaagtgtaaggacggactgggagaatacacctgcacgtgcctcgaaggttttgaagggaagaactgcgagctgtttaccaggaaactctgcagcctggacaacggcgactgcgatcagttctgtcatgaagaacagaactcggtggtatgctcctgcgcccgggggtacactttggcggacaacggaaaggcctgcatccccactggcccatacccatgcggaaagcagactttggagcggagaaagcggtcagtcgcccaagcgactagtagctcgggcgaggcccctgactcgattacttggaagccgtacgacgctgctgatctggacccaactgagaacccgttcgatctgttggacttcaatcagactcagcccgaacgcggcgacaacaatttgacccgcattgtgggaggacaggagtgcaaggatggggagtgcccgtggcaggccctgctgatcaacgaggaaaacgaaggattttgcggagggaccatcttgtccgaattctacatccttactgcagcccactgcctgtatcaagccaaacgctttaaagtgcgtgtcggagatagaaacaccgaacaggaagaaggaggagaagccgtccacgaagtggaagtggtgatcaaacacaaccggttcactaaagaaacttacgacttcgacatcgccgtcctgcgcctcaagactccgataaccttcagaatgaacgtggccccagcctgtctcccagaacgggactgggctgagtccactctgatgacccaaaagaccggtatcgtgagcgggttcggtagaactcacgaaaagggacgccagagcactcggctgaagatgttggaagtaccgtacgtggaccgaaattcctgcaaactcagctctagcttcattatcactcagaatatgttttgcgcgggctacgacaccaagcaagaggacgcgtgtcagggagattccggaggaccgcatgtgacccgctttaaggacacgtacttcgtcaccgggatcgtctcatggggcgagggatgtgctcggaagggcaaatacggaatctacactaaggtcactgccttcctgaaatggatcgataggtccatgaaaacccgcggcctgcctaaagcaaagagccatgcaccggaggtcatcactagctcaccactgaaa

SEQ ID NO: 9970 - DNA, 1464 bp, Artificial Sequence
  derived and/or modified sequence
atgggcaggcccttgcaccttgtcctgctgtctgccagcttggctggactgctgttgcttggcgagagtctgttcattcgcagggagcaggcaaataatattctcgcacgtgttaccagggctaacagctttttggaggagatgaaaaaaggtcaccttgagagggagtgtatggaggagacatgttcctacgaggaggcaagagaagtttttgaggattccgacaaaaccaacgagttttggaacaaatacaaggacggtgaccagtgtgagactagcccttgccagaaccagggaaagtgtaaggatggcctcggtgagtacacctgcacttgtctggagggtttcgagggaaaaaactgcgaactcttcaccaggaaattgtgctctctcgacaatggtgattgcgaccaattctgccatgaggaacaaaattctgtcgtgtgcagctgtgcccgtggttacaccctggcagacaacggaaaagcctgcatccctaccggtccttacccatgtggaaagcagaccctggaacgtagaaaaagatccgtggcacaagcaaccagcagcagtggcgaggccccagacagcatcacttggaaaccatacgatgcagccgacctcgacccaactgaaaatccttttgatctcctcgacttcaaccagacacagcctgaacgcggagacaacaatcttactaggattgttggtggtcaagagtgtaaggacggtgaatgcccatggcaggcactgctgatcaacgaagagaacgagggcttctgtggcggcaccatactgtctgagttctatattcttaccgctgcccactgtctgtaccaagccaagcgcttcaaagtccgcgtcggtgacagaaacactgagcaggaggaaggcggtgaggctgttcacgaggtcgaggttgtcataaaacataacaggttcaccaaagagacctatgactttgacattgccgtgctgagattgaaaactccaatcacattcaggatgaacgtggcaccagcttgcctgccagaacgcgactgggccgagagtacactcatgacccagaaaactggaatcgtatccggcttcggtcgcacccatgaaaagggccgccagtcaactaggctgaagatgcttgaggtcccctacgtggatcgtaactcctgcaaactgagctccagcttcatcattacccaaaatatgttttgcgctggctacgatactaagcaagaggatgcttgtcaaggtgattccggtggtccccatgtgacaagattcaaggacacctattttgtgactggcatcgtgagttggggtgagggctgtgcacgcaaaggaaaatacggaatctacactaaagtgaccgctttcctgaagtggattgaccgcagcatgaaaacccgtggcctccccaaggcaaagtcccacgctcccgaagtaatcacatcatctcctttgaaa

SEQ ID NO: 9971 - DNA, 1464 bp, Artificial Sequence
  derived and/or modified sequence
atgggtcgtccgctacatttagtattactatcggcgtcgttagcgggtttactactattaggtgaatcgttatttatacgtcgtgaacaagcgaataatatattagcgcgtgtaacgcgtgcgaattcgtttttagaagaaatgaaaaaaggtcatttagaacgagaatgtatggaagaaacgtgttcgtatgaagaagcgcgtgaagtttttgaagattcggataaaacgaatgaattttggaataaatataaagatggtgatcaatgtgaaacgtcgccgtgtcaaaatcaaggtaaatgtaaagatggtctaggtgaatatacgtgtacgtgtttagaaggttttgaaggtaaaaattgtgaactatttacgcgaaaactatgttcgttagataatggtgattgtgatcaattttgtcatgaagaacaaaattcggttgtttgttcgtgtgcgcgaggttatacgttagcggataatggtaaagcgtgtataccgacgggtccgtatccgtgtggtaaacaaacgttagaacgtcgtaaacgatcggtagcgcaagcgacgtcgtcgtcgggtgaagcgccggattcgataacgtggaaaccgtatgatgcggcggatctagatccgacggaaaatccgtttgatttactagattttaatcaaacgcaaccggaacgtggtgataataatctaacgcgaatagtaggtggtcaagaatgtaaagatggtgaatgtccgtggcaagcgctattaataaatgaagaaaatgaaggtttttgtggtggtacgatattatcggaattttatatattaacggcggcgcattgtctatatcaagcgaaacgatttaaagtacgagtaggtgatcgaaatacggaacaagaagaaggtggtgaagcggtacatgaagtagaagtagtaataaaacataatcgttttacgaaagaaacgtatgattttgatatagcggtactacgtttaaaaacgccgataacgtttcgtatgaatgtagcgccggcgtgtttaccggaacgagattgggcggaatcgacgttaatgacgcaaaaaacgggtatagtatcgggttttggtcgtacgcatgaaaaaggtcgtcaatcgacgcgtttaaaaatgttagaagtaccgtatgtagatcgaaattcgtgtaaactatcgtcgtcgtttataataacgcaaaatatgttttgtgcgggttatgatacgaaacaagaagatgcgtgtcaaggtgattcgggtggtccgcatgttacgcgttttaaagatacgtattttgttacgggtatagtatcgtggggtgaaggttgtgcgcgtaaaggtaaatatggtatatatacgaaagtaacggcgtttttaaaatggatagatcgatcgatgaaaacgcgaggtctaccgaaagcgaaatcgcatgcgccggaagtaataacgtcgtcgccgctaaaa

SEQ ID NO: 9972 - DNA, 1464 bp, Artificial Sequence
  derived and/or modified sequence
atgggaagaccacttcatttggtgctgctgagcgccagcctcgcaggtctgctgctgctgggcgagagtctgttcataaggcgcgagcaggcaaacaacatcctggcgcgggtgacccgcgcaaacagtttccttgaggaaatgaagaaaggccacctcgaaagagagtgtatggaagagacatgtagttatgaggaggccagagaggtctttgaagatagcgacaaaacgaatgagttctggaacaagtacaaagatggcgaccagtgcgagactagcccttgccaaaatcagggtaaatgtaaggatggactgggcgagtacacatgtacgtgccttgaggggtttgagggtaaaaactgcgagctctttactcggaagctgtgtagcctggataacggggactgcgatcagttctgtcacgaagagcaaaacagcgtagtgtgtagttgcgcacgcggctatactctcgctgacaacgggaaggcatgcattcctaccggcccgtatccttgtggtaagcagaccctggagagaaggaaaagaagtgtagcgcaggcaacatcaagctccggggaggcccccgattcaatcacatggaagccatacgatgccgctgacctggatcccaccgaaaaccctttcgacttgttggatttcaaccagacccagcctgagagaggggacaacaatttgaccagaatagtgggcggacaggaatgtaaagacggagaatgtccttggcaggctctgctcataaatgaggagaatgaaggtttttgtggaggtacgatcctgtctgagttctacatactgacggctgctcactgtctgtaccaggccaagagatttaaggtcagggtgggggacagaaacacagagcaagaagagggcggtgaggcagtccatgaggtggaggttgtcatcaagcataaccgcttcacaaaagagacctacgactttgacattgccgtcctgcggctcaagactcccattacgttccgcatgaatgtggcaccagcctgcctgcccgagcgagattgggcagaatctacactcatgactcagaagaccggcatcgtgtccggcttcggtcgcacgcacgagaaggggaggcagagcacaaggctgaaaatgttggaggtgccatatgtcgataggaattcttgtaagctcagctcctccttcattataacccagaacatgttttgcgcaggttacgacacaaagcaggaagatgcctgccagggcgatagcggaggcccacacgtaacgcggtttaaagatacctattttgtgactgggatagtgagctggggagagggatgcgctcggaagggtaaatacggcatctacaccaaggtcacagctttcctgaagtggatagatcgctcaatgaagactagagggctgccaaaagccaagtctcatgctcccgaagtgattactagctcaccactgaag

SEQ ID NO: 9973 - DNA, 1464 bp, Artificial Sequence
  derived and/or modified sequence
atgggtaggcccctgcacttggttttactaagtgcttcgctggccggcctgctgctgcttggcgagagcctttttattcgcagagagcaggctaacaacattctagctcgagttacccgggccaattcattcctcgaagaaatgaagaaggggcatctggagcgggaatgtatggaagaaacttgctcatatgaggaagctcgtgaggtcttcgaagattctgacaagaccaacgaattctggaacaagtataaagacggggaccagtgtgagaccagtccgtgtcagaatcaaggcaaatgcaaggacggtctcggagagtacacctgtacgtgcctggaaggcttcgaggggaagaattgtgaactttttacaaggaagctgtgctcacttgataatggcgattgtgaccagttttgtcatgaggaacagaactctgtcgtgtgctcctgcgctagggggtacacactcgcagacaatggtaaggcctgcatccctaccggcccctacccttgtgggaagcagacgctagagcgccgcaagcgatctgtggcacaagcaacctcttcatctggagaagccccggactccattacttggaaaccatacgatgcggccgatctcgatccgacagaaaaccccttcgatttgctggactttaaccaaacccagccagagcggggcgacaataacctcacgcgcattgttggaggccaagagtgtaaagacggtgaatgcccctggcaggcgcttctgataaacgaggaaaacgagggtttttgcggcggcaccattctgagcgagttctacatcctaaccgcggctcactgtctctaccaagccaagagattcaaggttcgcgtgggtgaccggaatacagagcaagaggagggaggggaggcggtgcatgaagttgaagttgttattaaacataatcgctttacgaaagagacatatgacttcgatattgccgtgctgaggttgaagacacccatcacgttccgcatgaatgtcgcccctgcttgcctgccagaacgcgattgggctgagtcaaccctgatgacacagaaaacaggcattgtgtcaggctttggcagaactcatgaaaaaggccggcagtccacaagactgaagatgctggaagtcccgtatgtcgacaggaattcctgcaagctgtcaagtagcttcataatcacccaaaacatgttttgcgctgggtatgatacgaaacaggaggatgcctgtcagggggacagcgggggccctcatgttaccagatttaaggatacctacttcgtcacgggcatagtatcctggggcgagggttgcgcgcgcaagggaaaatatggcatctataccaaagttactgcattcctgaaatggattgaccgcagcatgaagaccagagggctccctaaggctaaatctcacgctccagaggttatcactagctcgccccttaaa

SEQ ID NO: 9974 - DNA, 1464 bp, Artificial Sequence
  derived and/or modified sequence
atgggtcggcctttacatttagtccttctgtctgcctcacttgccggactccttctccttggagaatcattgttcattcgacgtgagcaggctaataatatattggctcgagtgacacgagcaaatagttttttggaagaaatgaagaaaggacatttggagagagaatgtatggaagaaacatgctcctatgaagaggctagagaagtgtttgaggattcggataagacaaacgaattttggaacaagtataaggatggtgatcaatgtgaaaccagtccgtgtcaaaatcaaggtaaatgtaaggatggactgggagaatacacatgcacatgtctagaaggcttcgagggtaagaactgcgagctttttacacgaaaattgtgttcacttgataacggagactgcgatcagttttgccatgaagagcaaaactctgtggtctgttcttgtgcacgtggatacactctcgctgacaatggaaaggcttgcattccaactggcccatatccgtgtggaaaacaaaccctcgaacgaagaaaacgttcagttgcacaggcgacttcgtcctcgggtgaagcaccagattctatcacgtggaagccatacgacgcggctgatttagacccaactgaaaatccattcgatctgttggattttaatcagacacaaccggaacgaggagataataatctcacacgtatcgtaggaggccaagaatgcaaagatggtgaatgcccatggcaagcacttcttattaatgaagagaatgaaggattttgtggagggactatcctttcagaattctacattctcacggcggctcattgcttgtaccaagccaaacgatttaaagttcgtgttggtgacagaaatactgaacaagaagaagggggtgaagcggttcacgaagtagaagtcgtaattaagcacaatcgtttcacaaaggaaacctatgatttcgatatcgccgtgctgagacttaaaacacctataacctttcgcatgaatgtggctccagcctgtctgccagaaagagattgggccgagtcaaccctgatgactcagaagactggcattgtatcgggcttcggtagaacacacgagaagggaaggcaatcaactagactgaagatgttggaggtgccatacgtggatagaaattcatgtaaactgtcctctagtttcatcatcacacagaatatgttttgcgcgggatatgatactaagcaagaagatgcttgtcaaggggattctggaggaccgcatgtaacacgattcaaagatacgtacttcgttacgggaattgtgtcctggggcgagggttgcgctagaaaaggaaaatacggtatatacacaaaggttactgccttccttaaatggattgacagatcaatgaagacgcgtggattaccgaaagctaaatctcatgcgccagaagtcataacgtcttcaccattgaaa

SEQ ID NO: 9975 - DNA, 1464 bp, Artificial Sequence
  derived and/or modified sequence
atgggacgccctttgcatctcgtgctcttgtctgcatcgctggctggtctgcttcttcttggggaatcactctttatacgccgggagcaagcaaacaatatcctcgcacgcgtgaccagggcaaactcctttctggaggagatgaagaaaggccatctcgaacgggaatgtatggaggaaacctgctcatacgaggaggcgcgggaggtgttcgaagatagcgataagactaatgagttttggaacaagtacaaggatggtgaccaatgcgaaacctcgccctgtcaaaaccaagggaaatgcaaggatgggcttggagagtacacttgtacctgtctcgaaggcttcgagggaaagaactgcgagctctttacccgtaagctgtgcagccttgataatggcgactgtgatcagttctgtcatgaggaacagaactccgtggtttgctcctgtgcacgaggttacaccctcgcagataacggaaaagcctgtatccctactggaccatatccatgcggtaagcagacgcttgaacgtagaaagcgctccgtcgcacaagctacctcatcatccggagaggcacctgactcaattacttggaagccctatgacgcagcagacctggatccaactgaaaatccgtttgaccttctggatttcaaccagactcaacctgaaagaggcgacaataatctgactaggatagttggtggacaagaatgtaaagacggagaatgtccatggcaagctctgctgattaatgaggagaacgaagggttttgtggtggcaccattctttctgaattctacatcctgaccgcggcacattgcttgtaccaagcaaaacgttttaaggtcagagtcggagatcgcaacactgaacaggaagaagggggagaagcagtgcatgaagtggaagtggtgattaaacacaataggtttaccaaggaaacgtacgactttgatattgcggtgttgcgacttaaaaccccaataacctttagaatgaacgtggcacctgcctgtctcccagaacgggactgggcggaatcgaccctcatgacccagaaaaccggaattgtctcgggattcggtagaacccatgaaaaggggcgtcaatcgactcgccttaagatgctcgaagtgccatacgtggatcgtaactcctgtaaactttcttcatcctttatcatcacccagaatatgttctgtgccggttacgatactaagcaagaagatgcatgtcagggtgactccggaggtcctcatgtgaccagatttaaggatacttactttgtcaccggtatcgtgtcgtggggagaaggatgcgcacgcaaaggcaagtacggtatttacactaaggtgactgcctttcttaagtggatcgataggtcgatgaaaacgcggggactgcctaaggcaaagtcacatgctcctgaagtgattacctccagccctcttaag

SEQ ID NO: 9976 - DNA, 1464 bp, Artificial Sequence
  derived and/or modified sequence
atgggtaggcccctgcatttggttctactgtctgcaagtctggcaggcctgttactgcttggagagagtctgtttatccggagggaacaggccaacaatatcctggcacgggtgacccgggccaacagcttcctggaagagatgaagaaaggtcacttggagcgggaatgcatggaagagacttgttcctacgaggaggcaagggaggtgttcgaagacagcgacaagactaatgaattttggaataaatacaaggacggggatcagtgcgagactagcccatgccagaaccagggtaagtgtaaagacggtttgggggagtatacctgtacatgtttggaaggttttgaaggtaaaaattgcgaactcttcacaagaaaactctgttccctggataatggagattgtgatcagttttgccatgaagagcagaattcggtggtgtgctcatgtgcccgcggttacacccttgctgacaacgggaaggcctgtatccccaccgggccatacccatgcgggaaacaaacgctggagagacgaaaaaggtcagttgcccaagcgacgtcatcaagcggcgaagctcctgactccattacgtggaagccgtacgatgctgcggatctggacccaactgagaacccctttgatctgctggactttaatcaaacacagcccgaaagaggtgataacaatctgactcgcatcgtgggtggtcaggaatgcaaggacggggagtgtccatggcaggcactactaatcaacgaggaaaacgagggtttctgtggcggcaccatcttgtctgagttttacattttgaccgccgctcattgtctctaccaggcaaaacgatttaaagttcgggttggggatcggaatacagaacaggaagagggcggcgaggcagtgcacgaggtagaggtagtaattaagcacaatcgcttcactaaagagacgtatgacttcgatatcgcagtcctccgcttgaagacacctataacatttcgcatgaacgttgcccctgcctgtctgcccgagcgcgactgggccgagagtacattaatgacccagaagacgggaattgtctctggcttcggtagaacacatgagaagggaagacagtccacacgccttaaaatgctggaagtgccctacgtcgatcgcaactcctgtaagctgtccagctctttcataattactcaaaacatgttttgcgcaggatacgacacaaagcaggaggacgcatgccagggagattcaggcggaccccacgtaacacgcttcaaggatacctacttcgtgactgggatcgtgtcatggggagaagggtgcgcccggaagggaaaatacggcatctacacgaaggtaaccgccttcctgaaatggatcgaccgctctatgaagactcgcgggctgcccaaggcaaaatctcacgctcctgaggtaatcactagttctccattgaag

SEQ ID NO: 9977 - DNA, 1464 bp, Artificial Sequence
  derived and/or modified sequence
atggggcgccccctccatctggtgctgctgtcagctagccttgctggactgttactgctcggggaaagcctgtttataaggagagaacaggctaacaacatcctggcacgggtgaccagagccaatagcttcctcgaggagatgaagaaggggcatcttgagcgggagtgtatggaggaaacctgctcgtacgaggaggcccgggaagtctttgaggactctgataagacaaatgaattctggaacaagtacaaggatggagaccagtgcgagacaagcccttgtcagaaccaggggaagtgtaaagacgggctgggggaatatacctgcacgtgcctcgagggttttgagggcaagaactgcgaattgtttacccgtaaattgtgtagcctggacaatggcgactgtgaccagttttgccatgaggagcaaaacagcgtagtctgctcgtgtgcacggggctatactttggccgataacggcaaggcctgcatacccacaggtccttatccatgtgggaaacagactctggaaaggaggaaacgatctgtcgcacaggcgaccagcagctctggcgaggcccccgactcgattacttggaagccttatgacgctgccgaccttgatcccactgagaacccctttgacctgctggatttcaaccagacacagccagaacgtggcgacaacaacttgacacggatagtaggtgggcaggagtgtaaggacggagagtgtccctggcaggccctcctgatcaacgaggaaaacgaagggttctgtggtggcactatcctgtcggagttctacatcttgaccgccgctcattgcctctaccaagccaagaggttcaaggtgcgagttggcgaccgaaacacggagcaggaggagggtggagaggcagtacacgaggtcgaggtggtgattaagcacaaccgcttcacaaaggaaacatacgatttcgatatcgccgtgctccgcctgaagactcctatcacttttcggatgaacgttgcaccggcatgcttacccgagcgtgattgggctgaatctactctgatgacacagaagactgggatagtttctgggttcggccggacgcatgagaaggggcgccaatccacgaggctcaagatgttagaggtgccctatgtggataggaactcttgtaagctgtctagcagtttcatcataactcaaaatatgttctgcgccggatacgacacgaaacaggaagatgcctgccagggagactcaggggggccacatgtgactagattcaaggacacgtactttgttacaggcatagtttcatggggggaggggtgcgcacggaaggggaaatatgggatctacaccaaggtgaccgccttcctcaagtggatagataggagcatgaagacgcgaggtctgcctaaggccaaaagccacgcacctgaagtaataacctccagtcctctaaag

SEQ ID NO: 9978 - DNA, 1464 bp, Artificial Sequence
  derived and/or modified sequence
atgggccgacctcttcatctggtattgctgtcagcatcgctcgccgggctgcttcttctgggagagtcgctgtttattcggagggagcaggctaacaacattctggcacgggtgactcgcgccaatagctttctggaggaaatgaagaaggggcatctcgaaagagagtgtatggaggaaacctgttcctacgaagaggcgcgcgaggtgtttgaggattccgataagaccaacgaattttggaacaagtacaaagacggcgatcaatgtgaaacctccccatgtcagaaccaaggcaagtgtaaggacggactgggtgaatatacctgtacctgcctcgaaggtttcgagggaaagaactgcgaacttttcaccaggaagctgtgctcgcttgataatggtgattgtgatcaattctgccacgaggaacagaacagcgtcgtctgttcatgcgccagaggatacactttggccgacaacggaaaagcgtgcattccgactggcccttacccatgtggtaagcagactctggaaagaagaaaacgtagcgtcgcacaggcaacttcctcaagcggagaagcccccgattctattacctggaagccttatgatgcagccgatcttgatcctactgaaaatccctttgacctgctggactttaaccaaactcaaccagaaaggggcgataacaatcttacccggattgtgggtggtcaggagtgtaaagacggggaatgtccgtggcaggcacttctgattaatgaagaaaatgaaggcttttgcggcggtaccattctgagcgagttttacatcttgactgccgcacactgtctgtaccaggcaaaacggtttaaagtgcgggtgggcgatcgaaacaccgaacaggaagaaggaggagaggcagtgcatgaggtggaagtagtgatcaagcacaatagattcactaaggagacttacgattttgatatagcggtcctccggctcaaaactccaataaccttcagaatgaatgttgcacctgcctgtctgccagagcgggactgggccgaatcaaccctgatgacgcaaaaaactggaatcgtgtcaggcttcggccgaacccatgaaaagggcagacagtcgactagacttaagatgcttgaagttccgtacgtcgataggaattcgtgtaagctctcaagcagctttatcataacccaaaacatgttctgcgcagggtacgataccaagcaagaggacgcgtgccaaggagatagcgggggtccacatgtgactcggttcaaggacacctactttgtgaccggaattgtgtcctggggagagggttgtgcacgcaagggcaagtacggtatttacactaaagtgactgcctttctgaagtggatcgataggtcaatgaaaacgcggggactcccaaaagctaagtcacatgcccccgaagtcattacctcatcgcctctgaag

SEQ ID NO: 9979 - DNA, 1464 bp, Artificial Sequence
  derived and/or modified sequence
atgggcagacccttgcacctggtgttgctgtcggccagcctcgccggactcctgctcctgggggaaagcctcttcatcagaagagagcaagcaaataacattctggcaagagtgacccgggcaaattcgttcctcgaggagatgaaaaaagggcatctcgaacgggaatgcatggaagaaacttgttcgtacgaggaggctcgagaggtgttcgaggacagcgacaagactaacgaattctggaacaagtacaaggacggggaccagtgcgaaacctcaccgtgccagaaccaaggaaagtgcaaggatggactcggagaatacacctgtacctgccttgaaggattcgagggtaagaattgcgagctgttcactagaaaactgtgctccctggataacggtgattgtgatcaattctgtcatgaagagcagaatagcgtcgtgtgttcgtgcgctaggggctacactctcgctgacaatggaaaagcatgcatcccgaccggtccgtacccctgcggaaagcagacgctggaacgccgcaagagatcggtcgcccaagccacttccagctcgggcgaagccccagactcgattacttggaagccgtacgatgctgcggatttggatcctaccgagaacccgttcgacctcctggacttcaaccagacccagccggagcgcggcgacaataacctgactcggatcgtcgggggacaggaatgcaaggacggagagtgtccgtggcaggcccttctcatcaatgaagaaaatgaagggttctgcggaggtaccatcctcagcgagttttacatcctgaccgctgctcactgcctctatcaagcaaagcgctttaaagtgcgggtcggagacaggaacacggaacaggaagaggggggtgaggcagtgcacgaagtggaagtggtcatcaagcacaatcgcttcacgaaggaaacctacgatttcgacatcgctgtgctgaggctgaaaactccaatcaccttcagaatgaatgtggctccagcatgcctgccagagcgcgactgggctgaatccactctgatgacccaaaagacgggaattgtgtcgggatttggacggactcatgagaaaggccgccagtccacccggttgaaaatgctggaagtcccttacgtggacaggaacagctgtaaactgagcagcagctttatcattactcaaaacatgttctgcgccggatacgatactaagcaggaagatgcgtgccaaggagatagcgggggaccgcatgtgactagatttaaggatacttacttcgtgactggaattgtgtcctggggagaaggctgcgcccggaaaggaaagtacggcatctacaccaaagtgacggcgttcctgaagtggattgacaggtcgatgaaaacccggggcctgccaaaggcgaagagtcacgcgcccgaggtgataacttcgagccctctcaag

SEQ ID NO: 9980 - DNA, 1464 bp, Artificial Sequence
  derived and/or modified sequence
atgggtaggcctttgcacctggtgctactcagcgcatccttagcaggcctcctgctcctgggcgaatctctgttcattcgcagagaacaggctaacaacattctggccagagttacaagagctaatagctttttggaggagatgaaaaaggggcacctggagagggaatgtatggaagaaacatgcagttatgaggaggctagggaagtttttgaggactctgacaagaccaatgaattctggaataagtacaaggacggggaccagtgcgaaacttccccctgccaaaaccaggggaaatgtaaggacggcttgggggaatacacctgtacgtgtttggaagggttcgaagggaaaaattgtgagctgttcacacggaaactttgctctcttgacaacggcgactgcgatcagttctgccacgaggaacagaacagtgtggtttgtagctgtgccaggggttacacccttgccgacaatggcaaagcctgtatccccacaggaccatacccttgtggcaaacagaccctcgagcggagaaagcgatcggttgcccaggcgacctcatcttctggggaagcccctgactctatcacatggaagccatacgacgcagccgaccttgaccctaccgagaacccttttgacttactggactttaatcaaacacagcctgagcggggggataacaatttaactcgaatcgtgggtggtcaggaatgtaaggatggggagtgcccttggcaagccttgctgatcaatgaagaaaatgaaggattctgcggcggcactatactctccgaattttacattttgactgcagctcactgtctctaccaagctaaaagatttaaggtgcgagtgggggataggaatacagaacaagaggaaggcggtgaggccgtacacgaagtggaggttgtgatcaagcacaacaggtttacgaaggagacatatgacttcgacattgctgttttgcgactgaaaactcctattacgtttaggatgaacgtggccccagcttgcctgccggagcgggattgggcggaatccaccctcatgacacaaaaaacaggtatcgtgtcaggattcgggagaactcacgaaaagggacgacaatctaccaggctgaaaatgcttgaggtaccgtatgtggacaggaactcctgtaagctgtcctcatcgtttatcatcacccaaaatatgttctgtgccggatatgacacaaagcaggaagatgcatgccagggcgatagcggggggccacatgtgacgcgatttaaagatacctatttcgtaaccggcatcgtatcatggggcgaagggtgcgcccgaaaaggcaagtatgggatctacacaaaggtgacagccttcttaaaatggattgataggtcaatgaagacaagaggattgcctaaagcaaagtcacacgctcccgaggtaattaccagctccccactcaaa

SEQ ID NO: 9981 - DNA, 1464 bp, Artificial Sequence
  derived and/or modified sequence
atgggccggcctctgcatctggtgctgttatcggcatcactcgcgggcctcctgcttctgggtgaatcactttttattcgcagggaacaggccaacaatattcttgctcgcgtcacccgcgcaaatagctttctcgaagagatgaagaagggtcatcttgagcgcgagtgcatggaggagacctgtagctacgaggaagccagggaggtgttcgaggatagcgataaaaccaatgagttctggaataaatataaggacggcgatcagtgcgagacttccccctgtcagaatcaaggtaaatgcaaggatggcttaggcgagtacacctgtacctgcctggagggcttcgagggcaagaactgcgaattattcaccaggaagctgtgctccctggacaatggtgactgcgatcagttctgtcatgaggagcaaaactccgtcgtctgcagttgtgcccggggatataccctggccgataatgggaaagcttgtatcccaaccggtccgtatccctgtggaaaacaaacactggagaggcggaaacgcagcgttgctcaggccacgagcagtagcggcgaagctccagacagcatcacctggaaaccttatgacgctgcagatttggatcccactgaaaacccgtttgacctgcttgattttaatcaaacccagcctgagcgcggggacaataatcttacccgcattgtcggcggtcaggagtgcaaggatggcgaatgcccatggcaggccctgttgatcaatgaagagaacgaggggttctgcggcggcaccattttatcagaattctacattttgacagctgcacactgtctgtaccaggccaagagattcaaagttagggttggcgatcgaaataccgagcaggaggagggaggagaagcagttcacgaagttgaagttgtaataaaacataatagattcactaaggagacctatgactttgatattgctgtgttgcggctgaagaccccgattaccttccggatgaatgttgctcctgcttgccttcccgaaagggactgggcggagagcacgttaatgacccagaaaacggggatcgtgtccgggttcggtcggactcatgagaaaggccggcagtccaccagactaaaaatgctggaggtgccctacgttgacagaaactcttgtaagctttcctctagctttataataacccagaacatgttctgcgcaggttacgatacaaaacaggaagacgcctgccagggggattcgggcggacctcacgtgactcgtttcaaggacacttatttcgtcaccggcatcgtgtcttggggggagggatgcgctaggaaaggtaaatatggcatctatacaaaggttacagccttcttgaaatggattgatcgatcaatgaagacaaggggcctacccaaggcgaaaagccatgctcccgaggttattacatcttcacccctgaag

SEQ ID NO: 9982 - DNA, 1464 bp, Artificial Sequence
  derived and/or modified sequence
atggggcgacctctccatctcgtgttgctgagtgcttctctggccgggcttctgctgctgggggagtcccttttcattcggcgggagcaggctaataacatcctggccagagtgactcgcgctaattcgttcctggaagagatgaaaaaggggcacctcgagcgggagtgtatggaagagacctgctcttacgaggaggcaagggaggtgttcgaggattcagacaaaaccaacgagttctggaataagtataaagatggggaccagtgcgagacttcaccctgccagaaccaagggaagtgcaaggatggtctaggtgagtacacatgtacctgtctagaaggatttgaaggcaagaactgtgaactctttacacgcaagctgtgctctctggacaatggcgactgcgatcagttttgccatgaggaacagaattccgtggtgtgcagttgcgcacggggttacactctcgcagataatgggaaggcatgtatcccaaccggcccttatccatgcggcaagcagacattagaaaggcgaaaacggtctgtggcgcaggcaacaagctccagtggtgaggcaccagatagcatcacttggaaaccctacgatgcagcagatttggaccctactgagaacccctttgatctactcgacttcaaccagacacagcctgaacggggggataacaatttgactcggatcgtggggggccaagagtgcaaggatggagaatgtccctggcaggccctgctcatcaatgaggaaaatgagggattctgcggcggaaccattctttcagagttctatatactcacagcggcccactgcctataccaggctaagagatttaaggtgcgcgttggagaccgtaatactgagcaagaggagggaggcgaagcagtgcatgaggtggaggtggttatcaagcataaccgatttacaaaggagacctacgattttgatattgctgtgctgagacttaagacccccatcacgttcaggatgaatgtggccccggcatgtctcccagagagagattgggctgagtctacactgatgacacaaaaaaccggaatcgtgagcggttttgggcgcacccacgagaagggacgccaatctaccaggctcaaaatgctggaggtgccgtatgtagatcggaacagctgcaagctgagcagttccttcattatcactcagaatatgttttgcgctggttatgacacaaagcaagaggacgcatgtcagggagacagtggcggaccacacgtgacacgctttaaggatacctacttcgtcaccggaatcgtgtcctggggggaggggtgcgctagaaaagggaaatacggcatttatacaaaggtgaccgcctttctgaaatggatcgaccgcagcatgaagacacgaggtctgccgaaagcaaagagccatgcaccggaggtgatcaccagttctcccttgaag

SEQ ID NO: 9983 - DNA, 1464 bp, Artificial Sequence
  derived and/or modified sequence
atggggagaccacttcacctggtactgctgtcagcttctttagccggcctcttgttgcttggcgagagcctcttcatccggagggagcaggccaacaatattctagcccgagtgacccgtgccaatagcttcctggaggagatgaaaaagggccacctagaacgagagtgcatggaggagacgtgttcttacgaggaggccagagaagtattcgaggattccgataaaaccaatgagttttggaataaatataaagatggcgaccaatgtgagacatctccctgccagaaccagggcaaatgcaaagacggcctcggagagtacacctgtacctgcctggaaggctttgaggggaaaaattgtgaactcttcacccgcaagctctgttctttagacaacggggactgcgatcagttctgccatgaagagcagaactccgttgtatgctcatgcgcccgggggtacacgctcgccgataatggaaaggcttgtattccaactgggccctatccttgcggaaaacagaccctcgaacggagaaaacgaagcgtggctcaggctacctctagctctggtgaggcaccagatagcatcacatggaaaccctacgatgcagcggatcttgatcccaccgaaaaccccttcgatctgctcgatttcaatcagactcagccagagaggggcgataacaaccttactagaatcgttgggggtcaggagtgcaaggacggcgaatgcccttggcaggccttgctgataaatgaagagaatgaggggttctgtggcggcactatcctgagtgaattctatatccttaccgctgctcattgcctttatcaggcaaagagattcaaagtgagggtaggtgacagaaacactgagcaagaggaagggggagaagctgttcatgaggtggaggtggtgatcaagcataaccgcttcaccaaagagacctatgacttcgacattgccgtactgaggctgaaaacacccattacctttcgcatgaacgtcgcacctgcatgcctgcccgagcgcgactgggcggagtccacattgatgacacaaaaaactggcatcgtttccggcttcgggcgcactcatgaaaaaggccggcaatcgacccggctcaaaatgctggaagtaccatatgtggaccggaatagttgcaaactgtccagttcttttatcattacccagaatatgttctgtgcaggttacgatacaaagcaagaggatgcctgccagggagactctggcggcccccacgtcacccgcttcaaggacacatacttcgtgaccggtatagttagttggggggaaggatgcgctcggaagggaaagtacgggatctacacaaaggtgactgccttccttaaatggatcgatcgttcaatgaaaacccggggacttcccaaggcaaagagccacgcgcctgaggtgattacgtcttcccctcttaag

SEQ ID NO: 9984 - DNA, 1464 bp, Artificial Sequence
  derived and/or modified sequence
atggggcgaccgttgcacctggtgctgctgagcgcgtcgctggcgggactcctgttgctgggcgaatctctgttcattcgacgcgagcaggccaacaatatcctggcgcgggtgaccagagcaaactcattcctggaagaaatgaaaaaggggcacctcgagcgcgaatgtatggaggaaacgtgttcctacgaggaggcccgcgaagtttttgaggattccgacaagaccaatgaattctggaacaagtacaaggatggggaccaatgcgaaacttcgccatgccaaaaccagggaaaatgcaaggacggcctcggtgagtacacttgtacctgccttgaaggattcgagggcaaaaactgcgaactctttacgagaaagctctgcagcctggacaacggagattgcgatcaattctgtcatgaagaacagaactccgtggtgtgttcgtgcgcgcgggggtacacccttgccgataatggcaaggcctgcattcccactggaccttacccatgcggcaagcagactctggaaagacgcaaaaggtccgtggctcaggccacttcgagctcaggggaagcccctgattcgatcacctggaagccatacgacgctgccgatctcgatccaacggaaaatcccttcgacctcctggatttcaaccagactcagcctgaacgcggcgacaacaatctgacgcgcatcgttggaggacaggaatgcaaagatggagagtgcccgtggcaggcgctgcttatcaatgaggaaaatgagggtttttgtggtggaaccatcctgtccgagttttacatcttgaccgcagcacattgtctgtaccaagcgaagaggttcaaagtcagagtgggcgaccggaatacggagcaggaggaaggaggcgaggccgtccacgaagtagaggtcgtcatcaaacacaaccggttcacgaaagaaacctacgatttcgatatcgccgtgctgaggctcaagaccccgatcacctttcgcatgaacgtcgctccggcgtgcctgcccgaaagggactgggcagaatcgaccctgatgacccagaaaaccggaatcgtgtctggctttgggaggactcatgaaaagggccgccaaagcaccagactcaaaatgctggaggtgccttatgtggacagaaatagttgcaaattgtcctcctcatttatcatcacccagaacatgttttgtgccggctacgacactaagcaggaagatgcctgccaaggagactcgggaggacctcatgtgacccgcttcaaggacacctacttcgtgaccggaattgtgtcgtggggcgaaggatgcgcgagaaagggaaagtacggtatatacacgaaggtgaccgccttccttaagtggatcgaccgatcgatgaaaactcggggcctcccgaaagccaaatcgcacgcgccggaggtgattacttcaagcccactgaag

SEQ ID NO: 9985 - DNA, 1464 bp, Artificial Sequence
  derived and/or modified sequence
atgggacgacctctgcacctagtgctgcttagtgcatccctggccggcctgctgctcctaggtgaaagtctcttcatccgtcgggagcaagccaacaacatactcgccagagttaccagggccaatagttttctagaggaaatgaagaagggccacttggagcgggagtgcatggaagagacatgcagttacgaagaggctcgggaagtgtttgaggattcagacaagactaacgagttctggaataaatacaaggatggagatcagtgcgaaaccagcccttgtcaaaaccagggcaagtgtaaagacggactgggagagtacacatgtacctgcctagagggatttgaaggcaagaattgtgaactgttcaccagaaagctgtgcagcctggataacggagactgcgaccagttttgccacgaggaacagaactccgttgtgtgctcctgcgcacgaggatacactctggctgacaatggcaaggcatgtattcctaccggaccttatccctgtggaaagcaaaccttagaaagacgcaagaggagtgtggcacaggctacatctagttcaggcgaagcaccagattctatcacttggaagccatacgacgccgcagacctagatccaaccgaaaaccctttcgatctcctggacttcaatcagacccagccagagcgtggagacaacaatctaactcgcatcgtaggtggacaggagtgtaaggatggagaatgtccatggcaggctctgctgataaacgaggagaacgaggggttttgtgggggtactattctgtctgaattttacatcttgaccgcagcacattgtctgtatcaggccaagcggtttaaagtcagggtgggagatagaaacaccgagcaggaggaaggcggagaagccgtgcatgaggttgaggtggtcataaaacacaacagatttactaaggaaacctacgacttcgatatcgccgttttacgattaaagacccctatcaccttccgcatgaatgtggcccctgcctgcctgccagaacgcgactgggccgagtctaccctgatgactcagaagacaggcatagttagtggcttcggcagaactcacgagaaaggccggcaaagcacccggctaaaaatgctggaggtcccttatgtggacaggaactcttgcaaactgagtagctcattcatcatcacacagaatatgttctgtgctggctatgataccaaacaggaagatgcatgccagggtgatagtggtggacctcacgttacccgctttaaggatacctatttcgtgaccgggatcgtttcctggggcgaggggtgcgctcgtaagggcaagtatggaatctacacaaaagtaacagccttcctgaagtggattgatagatccatgaagacacggggactgcctaaagctaagagtcatgcccccgaggtgataacatcaagtccactcaag

SEQ ID NO: 9986 - DNA, 1464 bp, Artificial Sequence
  derived and/or modified sequence
atgggacggcctctccatttagtgctcctgagcgcttctctggccggtctcctgctgttaggcgagtccctcttcatccggcgcgagcaggcgaacaacatattggcgagagtgacgagagctaactcctttcttgaagaaatgaaaaagggccatctggagcgggaatgtatggaggagacctgctcatacgaggaagcacgagaagtgttcgaagactccgacaagacgaacgagttttggaacaaatataaagatggagatcagtgcgagacaagcccttgccagaaccagggaaaatgtaaggatggcctgggcgaatacacctgtacatgtctagagggctttgagggcaagaattgcgaattatttacccgaaagctgtgttccttagacaatggagactgcgaccagttttgccacgaagagcagaattctgtagtctgctcgtgcgccaggggctataccttggctgataatggtaaagcttgcattccgacgggcccatatccctgcggcaagcagacactcgagcggaggaagagatctgttgcacaagctacaagctcttccggggaggccccagatagcatcacctggaagccttatgacgcagctgacctcgaccccaccgagaatcccttcgacctgctcgatttcaaccagacgcagcctgaacgaggggataacaacctaaccaggatcgttggtggtcaagaatgtaaggacggagagtgtccttggcaggcactgctgattaacgaagaaaacgaagggttttgtggcgggacaatcctgtcagagttctacattctgacggccgcccactgcctgtatcaggccaaacgttttaaagttcgcgtgggagaccggaatactgaacaagaggagggcggagaggcggtgcacgaagtggaggtggttataaagcataatcggttcaccaaagaaacttacgactttgatattgcagtgctgcgcctgaagacccccatcacattcaggatgaacgtagcaccagcctgcttacccgagcgggattgggccgagagcacgctgatgactcagaaaaccgggattgtgagcggttttggtagaacacatgagaagggacgccagagcaccaggttgaagatgctggaagttccatatgtggatcggaactcatgcaagctgtcatccagttttataatcactcagaatatgttctgcgccggatacgacacaaaacaggaagacgcctgccagggagactcaggcggcccccacgttacgagattcaaagacacctacttcgttacagggattgtcagctggggcgagggttgcgcccggaaaggaaagtatggcatctatacgaaggtgactgcttttctaaaatggatcgatcgtagtatgaagaccagaggtttaccaaaagctaaaagtcatgccccagaagtgataacgtcctcccctttaaag

SEQ ID NO: 9987 - DNA, 1464 bp, Artificial Sequence
  derived and/or modified sequence
atgggaaggcctcttcatttagttctcctctccgcctccctcgccgggttgctccttctcggggagtccctcttcatcagacgagaacaggctaataacatcctcgcgcgagtcacaagagcaaactctttcctggaagaaatgaagaaaggacatttagaacgagaatgtatggaagagacatgcagttatgaagaggcgagagaagtgtttgaggatagtgataagactaacgaattttggaacaaatacaaagatggagatcaatgtgaaacaagtccatgtcaaaaccaaggaaaatgcaaagatgggctaggggaatatacatgcacttgtcttgaagggtttgaaggaaaaaattgtgaactgttcacacggaagctgtgttctctggataacggggactgtgatcagttctgtcatgaagagcagaatagtgtagtgtgttcctgtgctcggggatatactctcgccgataatggaaaagcatgtattccaactggaccttacccatgtggaaaacagacacttgaacggagaaaacgatctgtggcacaggccactagttcttctggggaagcccctgactccatcacttggaaaccttatgatgcagctgatctggatccaacagagaacccctttgacctgttggattttaatcagactcagcccgagcggggagataacaatctaacaaggatcgtgggggggcaggaatgtaaagatggagaatgtccctggcaggctcttttaataaacgaagaaaacgagggattttgtggggggactatcctttccgaattttatatcctcacagcggctcattgtttatatcaggccaagcggtttaaagtccgggtcggggataggaacacagaacaggaagaagggggagaagctgttcacgaagttgaggtggtcatcaagcacaaccgcttcacaaaagaaacttatgatttcgatatagccgtacttcggctcaagacaccaataacatttaggatgaacgttgcaccagcatgtctcccagaacgagattgggcagaatctacacttatgacacagaagacagggatagtatctgggtttgggcggactcatgaaaaaggacgacagtctactcggctgaaaatgctcgaagtaccttacgtggatcgaaactcttgcaaactatcttcatcctttatcattacacagaacatgttctgtgctgggtatgatactaaacaggaagatgcttgtcagggggattctggagggcctcatgtaacaaggtttaaagatacgtattttgtgacaggaatcgtgagttggggggaagggtgcgcccgcaaagggaaatacgggatttatacaaaagtgacagccttcttgaaatggattgaccgctctatgaaaactagggggctccctaaagcaaaatcacacgcacccgaagttattacatcgtctcccctcaag

SEQ ID NO: 9988 - DNA, 1464 bp, Artificial Sequence
  derived and/or modified sequence
atgggtaggccgctccacctggtgctcctttccgcttcgctcgctggcctcctgctgctgggagagagccttttcatccgcagagaacaggctaacaacatcctggctcgagtcacccgcgcgaactccttcctcgaggagatgaagaaaggacatctcgaacgcgaatgcatggaagaaacgtgcagttacgaggaggcccgcgaggtgttcgaggactcggataaaactaatgaattctggaataagtacaaagacggcgaccagtgcgaaacctccccatgccagaaccaagggaagtgtaaggacggcctgggagaatacacgtgcacctgcctcgaaggtttcgaagggaaaaactgtgagctcttcacccgcaagctctgcagcctggataacggagactgtgaccaattttgtcacgaggagcagaactcagtcgtgtgctcctgtgcccgcggctacactcttgccgacaacggcaaagcatgcatccccaccgggccatacccatgtggaaaacagaccctggaacgccggaagagatctgtggcgcaggcgacgtcatcctccggtgaagcccccgatagcatcacctggaagccttacgacgccgcagatttggatccgaccgaaaaccccttcgatctcctcgactttaaccagacccaaccagaacgaggagacaataacttgactcggattgtgggaggacaggagtgcaaagacggagagtgcccgtggcaagcgttgctgatcaacgaagaaaacgaaggattctgcggcggcactatcctgtcggagttttacatcctcactgcggcccactgtctgtaccaagcgaaacgcttcaaggtccgcgtgggcgaccgcaacacggagcaagaagagggaggagaagccgtgcacgaggtggaggtggtgataaaacacaacaggtttactaaggagacgtacgatttcgatattgcagtgctgcggctcaagacccctatcacttttcggatgaatgtggcgccagcttgcctcccagaacgggattgggcagaatcgaccctgatgacccaaaagaccggaatcgtgtccggattcggacggacccatgagaaaggacgccagtccactcgcctgaaaatgcttgaggtgccctatgtggacagaaattcgtgcaagctgtcctcgtcgttcatcatcactcagaacatgttttgtgctggttacgacaccaagcaggaagatgcttgccagggagactcggggggcccgcacgtcaccagattcaaagatacttatttcgtcactggcatcgtgtcatggggagaaggatgtgcgcgcaagggaaagtacggaatctacactaaggtgactgcttttctcaaatggatcgatcggtcgatgaaaacccgcgggctgccgaaggcaaaaagccacgccccagaagtgatcacctcttccccactgaaa

SEQ ID NO: 9989 - DNA, 1464 bp, Artificial Sequence
  derived and/or modified sequence
atgggaagacccttgcacctagttttattgtccgcctctctggccgggcttcttcttctgggcgagagtttgttcatcagaagagagcaggcgaataacattctcgccagggttacgagagcaaactccttcctggaagagatgaagaaaggtcacttggaacgtgagtgtatggaagaaacatgctcatacgaggaagcacgcgaagtgttcgaagactccgataaaacaaacgaattttggaataaatataaagatggagaccagtgtgagacttcaccctgtcagaaccaggggaagtgcaaggatggccttggcgagtatacatgtacctgcctggagggttttgagggcaagaactgcgaactgttcacaagaaagctgtgttccctagacaatggggattgtgaccagttctgccatgaggagcagaattcagtggtgtgttcttgtgcccgagggtatacactggcagacaacgggaaggcgtgcatccccacagggccttatccctgtggtaagcagactctggaacgtagaaaaaggtccgtggcacaggctacatcttccagcggcgaagctccagactccatcacctggaaaccctacgatgccgctgatctggatcccaccgagaaccctttcgacctcctggactttaatcagacacagcccgaaaggggggataacaatctcacacgaatagtgggcgggcaagaatgcaaagatggtgagtgcccttggcaggcactgcttattaatgaagagaatgaaggattttgcggcgggactatcctgagcgaattttacatccttactgccgcccactgcctctaccaagcgaagagatttaaggtccgggtcggtgatcgaaacacagaacaggaagaggggggggaggccgtccatgaagtcgaggtagttataaaacataaccggttcactaaggaaacatatgactttgatattgctgtgctgagactgaaaacacctattaccttccgaatgaatgtggctcccgcttgtctacctgagagggattgggcggaatctacactgatgacgcagaaaacaggaatagtctctgggttcggccgtacacatgagaaagggaggcagtccactaggctcaagatgctggaagtaccttacgtggaccgaaattcttgcaagttgagcagtagttttatcattacacagaatatgttctgcgctggctatgacacgaaacaggaggatgcttgtcagggcgactcaggaggcccccacgtaacacgctttaaggatacgtacttcgtgacgggaattgtctcatggggagagggatgcgcaagaaagggcaagtacgggatctacacaaaagtaacggcgttcttgaaatggatcgaccgctcaatgaaaacaagaggactgcctaaagcaaagtcacacgctcccgaggtcataaccagctcacccctcaag

SEQ ID NO: 9990 - DNA, 1464 bp, Artificial Sequence
  derived and/or modified sequence
atgggtagaccactccatctggtccttctctcagcatcacttgctggcctgcttcttctcggagaatcacttttcatcaggcgcgaacaagccaacaacatcctcgcacgggtcaccagagcaaactcatttcttgaagaaatgaagaagggtcacttggagagggagtgtatggaggagacttgctcgtacgaagaagcaagggaggtgtttgaggactccgataagaccaatgaattttggaacaagtacaaggacggggatcaatgcgaaacctcaccatgtcaaaaccaaggcaagtgtaaggatgggctcggtgaatacacctgcacttgtctggaaggtttcgaaggaaagaattgcgagttgtttaccagaaagctgtgttcgctggataatggagattgtgaccaattttgtcatgaagaacagaactccgtcgtgtgctcctgtgcaaggggttacacgctggccgacaacggaaaagcatgtattcccaccggaccatacccatgcggaaagcagacgctggaacggagaaagcgttcggtcgcacaagctacctcgtcatccggcgaggcgcctgatagcatcacctggaagccatacgatgcagccgacctcgacccgactgagaatcctttcgacctgcttgatttcaaccaaacccaacccgagagaggcgacaataatctgacccgtattgtcggaggacaggagtgtaaggacggtgaatgcccgtggcaggcgctgcttatcaacgaagaaaacgagggtttttgtgggggcacgattctctccgaattctacatacttactgccgcccattgtctctaccaggcaaagagatttaaggtgagggtgggtgaccgcaacactgaacaagaggaagggggcgaagctgtgcatgaagtggaggtcgtcataaagcataatagatttaccaaagagacttacgactttgatattgccgttctgcggcttaaaacgcctatcacctttagaatgaacgtcgcacccgcatgtctgcctgagcgagattgggccgaatccactcttatgacccaaaagaccggaattgttagcgggtttggaaggacccatgagaagggaaggcagagcacccggcttaagatgctcgaggtcccatacgtcgaccgcaactcgtgtaaactcagctcctcgttcattatcacgcagaatatgttttgcgcaggttacgacaccaaacaggaggatgcctgccagggagattccgggggtccacatgtgactagatttaaggatacctacttcgtgactggaattgtgtcgtggggagaaggttgcgctagaaagggaaagtacggtatctacaccaaggtcaccgcatttcttaagtggattgaccgaagcatgaaaacgcgcggactcccaaaggcaaagtcgcatgcgcctgaggtgattaccagctcgcccttgaag

SEQ ID NO: 9991 - DNA, 1464 bp, Artificial Sequence
  derived and/or modified sequence
atgggacgaccgctccatctggtgctgctctcggcttcgctcgccggcctgctgctcctcggggaaagcctgttcatccggagagaacaagcaaacaacatcttggctcgcgtcactcgggccaacagcttcctcgaagagatgaagaaaggtcatctggagagagaatgcatggaagagacttgctcctacgaagaggcaagggaggtgttcgaggatagcgacaaaaccaacgagttctggaacaaatacaaggatggcgatcaatgcgaaacttcgccttgccaaaaccagggaaagtgtaaggacggactgggtgagtatacctgcacctgtctggaagggtttgagggtaagaattgcgaactttttactagaaagctgtgctcgctggataatggggactgcgaccagttctgccacgaagagcagaactcggtggtgtgctcttgcgcgaggggatacaccctggctgacaacggaaaggcatgtatccctaccggtccatacccatgtggaaagcagactcttgaacggcggaagagaagcgtggcgcaagcgacttccagctccggggaagccccagactcaatcacttggaagccatacgacgccgccgatctggacccgacggaaaatccgttcgacctcctggactttaatcaaacccagccggagagaggggataacaacctgactcgaatcgtcggcggacaagagtgtaaagacggcgagtgcccgtggcaggcgcttttgattaacgaggaaaacgagggattttgcggtggaacgattctctcagagttctacatcctgactgccgcgcactgcctctaccaggcaaagcgcttcaaggtgagagtgggagatcgcaacactgaacaggaggaaggaggtgaggctgtgcacgaggtggaagtggtcatcaagcataatagattcaccaaggaaacttacgacttcgatattgccgtcctgaggttgaaaaccccgattaccttccgcatgaacgtggccccggcctgcctgccagaaagagactgggcggaaagcaccctcatgactcagaaaaccggaatcgtgtcaggcttcggaaggacccatgagaagggtcgccaaagcacgcggctgaagatgctcgaagtgccatacgtcgatcggaactcctgcaagctgtcgtcctcgttcatcattacccagaatatgttctgcgccggatacgacaccaaacaggaggacgcatgccagggagatagcggcggaccgcacgtcacccggttcaaagatacttacttcgtcaccggcattgtgagctggggtgagggctgtgcaaggaagggaaagtacggtatatacaccaaggtgactgcctttctcaaatggatcgaccgctctatgaaaacgcggggactgccgaaggccaaatcccacgctccggaggttatcacctcttcaccgttgaaa

SEQ ID NO: 9992 - DNA, 1464 bp, Artificial Sequence
  derived and/or modified sequence
atgggtagacccttgcatcttgtgcttttgagcgcctcgttagccggcttgttgctccttggtgagagtctgtttattcgcagggagcaagcaaacaatatcttggcccgtgttacgcgagccaacagctttctggaagaaatgaagaagggccatttggaacgcgagtgcatggaagagacatgctcttacgaagaggcccgagaagtttttgaggacagtgacaaaacgaatgaattctggaacaagtacaaagatggagatcagtgcgagacttccccctgccaaaaccaggggaagtgcaaagatggtttaggcgagtacacctgcacttgtctggagggcttcgaagggaaaaactgtgagctgttcacacgaaagctgtgctcgctcgataacggcgattgcgaccaattctgtcatgaggagcagaacagcgtggtttgctcgtgtgcccgcggctacaccctagccgataacggaaaggcctgcatccccactggtccatatccgtgtggcaagcagaccctggagcgcagaaagcgctccgtggcgcaagctacatcgtcgtccggcgaagcgccggattccattacgtggaaaccctatgacgccgccgatcttgaccccaccgaaaacccgttcgatctgctggactttaaccaaacacaaccggagcgtggggataacaacctgactcgtattgttggcggccaggagtgcaaggatggagagtgcccctggcaggccctgttaataaacgaagagaacgagggattttgcggaggcaccattttgtcagagttttatatcctgacagctgctcactgtttgtatcaggcaaagcgatttaaggtgcgagtgggcgaccgaaatactgagcaagaggaaggcggagaggccgtccatgaggtggaggttgtgatcaagcataaccggtttaccaaggagacctacgacttcgacatcgccgtgttgagactgaaaacgcccattacgttcaggatgaatgtggctccagcttgcctcccagagagggattgggcggaatcgaccctgatgacccaaaagaccggcattgtttccggcttcggacgcacacatgaaaagggacgccaatcgacccgcctgaagatgctcgaagtgccctacgtggatcgaaatagctgcaagctatcgtcgagtttcatcatcacccagaacatgttctgcgcgggatatgatacaaaacaggaggatgcatgccagggggatagcggaggaccccacgtgacccgcttcaaggacacgtatttcgtcactggtatcgtctcttggggcgagggttgcgccaggaaggggaagtatggtatctacactaaggtgacggcattcctcaagtggattgaccgctcgatgaagacccgcggacttcccaaggccaaaagccacgccccggaggtgattacctcctcccctctgaaa

SEQ ID NO: 9993 - DNA, 1464 bp, Artificial Sequence
  derived and/or modified sequence
atgggccggccgctgcacttggtgctcctgtccgcctcactcgcagggctgttactgctcggagaatctttattcatccggagggaacaggccaataacatactggccagagtgacgcgcgctaacagttttctcgaagaaatgaagaaggggcatctggagcgtgaatgtatggaagagacctgttcttacgaggaggcgcgtgaggtgtttgaggactcggataagaccaatgagttctggaataaatataaagatggtgaccagtgtgaaacctccccttgtcaaaatcaaggtaaatgtaaggatggcctgggtgaatacacttgcacatgtttggaggggtttgaggggaagaattgtgaactatttaccaggaagctatgctccctggacaacggcgactgcgaccaattctgccacgaggagcagaactcggtcgtatgctcttgcgccaggggatacactctcgctgacaacggaaaagcctgcattccgacagggccgtacccctgtggcaaacagaccctggaacggcgcaaacggtcagtggcccaggctactagttccagtggcgaggcccccgattctattacttggaagccatacgatgcggctgacctggacccaactgagaaccctttcgacctattagacttcaaccaaacccagcccgaaagaggtgacaataatctgacgcgcatcgtgggaggccaggagtgcaaggacggcgagtgtccctggcaggccttattgatcaacgaggaaaatgaagggttttgtggaggcacaatcttgagcgagttttatatcctgacagcggcgcattgcttgtaccaggcgaagcggtttaaagtgcgtgtgggggatcggaatactgagcaggaggagggcggagaggctgtgcacgaagtagaagtcgtaataaagcacaaccggttcactaaagaaacctatgacttcgatattgctgtgctgagattgaaaacccctattacttttagaatgaacgtcgcccctgcctgcctgccagagcgcgattgggccgagagtaccttgatgactcagaagactggaattgtcagcggttttggtaggacgcatgagaaggggaggcagtcgacccggctgaaaatgcttgaagtaccctacgtggatcgtaacagttgtaagctatcaagctccttcattatcacccagaatatgttctgtgccggctacgacaccaagcaggaggacgcttgccaaggggactccggtggtcctcacgtgactagatttaaggacacttattttgtgacgggaattgtgagttggggagaaggctgtgctcggaaggggaaatatgggatatacacgaaggtcaccgcatttctgaagtggatagatcgatcgatgaaaacgaggggcctcccaaaggcaaaaagtcacgcccccgaggtgatcacgtcgtccccactgaag

SEQ ID NO: 9994 - DNA, 1464 bp, Artificial Sequence
  derived and/or modified sequence
atgggacgccctctacacctggttctgctcagcgctagtctggccgggctgttgctgctcggggagtctctgtttatccggagagagcaggcgaacaacattctggctagggtcacccgcgcgaattccttccttgaagagatgaagaaggggcatctggagcgcgaatgcatggaggagacctgctcctacgaagaagccagggaagtgttcgaagactcagataagacaaacgagttttggaataagtacaaagatggggatcagtgtgaaacatcaccatgccaaaatcaaggtaaatgtaaggatgggctcggcgaatacacctgcacctgccttgaaggcttcgagggaaaaaactgcgagcttttcacacggaagttgtgcagtctggacaacggtgattgcgaccagttttgccacgaagagcagaactctgtagtatgtagctgcgctagaggatatactctcgctgacaacgggaaagcctgtattcccaccgggccatatccatgtggcaaacagaccctggagaggaggaaacggtctgtggctcaggcgacaagttccagtggtgaggcacccgattctataacatggaagccatatgacgccgcggacctggatccaacggagaaccccttcgacctcttagactttaatcaaactcagccagagaggggtgacaataacctcaccagaattgtggggggccaggagtgcaaagacggagagtgcccctggcaggccctgctgatcaatgaggaaaatgagggtttttgtgggggcaccatcctcagcgagttctacattctgaccgccgcccactgtctctaccaagcaaagcgatttaaggttcgcgtcggagaccgcaacaccgagcaggaagaggggggcgaggcagttcacgaagttgaggtcgtgatcaaacacaatagattcactaaggaaacatatgactttgacatcgctgttttacggctcaagactcccatcaccttccggatgaacgtggcccctgcttgcttgcccgagcgggattgggctgaatctacccttatgacacagaaaacgggaattgtttctgggttcggccggacacacgaaaaaggtcgacagtctaccagactcaaaatgctggaagttccttacgtggatcgaaactcatgtaagctgtcatctagttttatcatcacccagaatatgttctgtgctggatacgatacaaagcaggaagacgcgtgccagggggattcaggaggccctcacgttactcggttcaaggacacgtacttcgtcaccggcattgtcagctggggcgagggctgcgcccgaaagggtaaatatggaatttatacgaaggtcactgcgttcctgaaatggatcgatcggtctatgaagaccagaggattgccgaaagcaaagtctcacgcccctgaagtgataaccagctctcctttgaag

SEQ ID NO: 9995 - DNA, 1464 bp, Artificial Sequence
  derived and/or modified sequence
atgggaagacctttgcaccttgtcttgttgagtgctagtcttgccggtttactcctgttgggtgagtcactgtttatcagacgggagcaagcaaacaacatacttgccagggtgactcgggctaactccttcctggaggagatgaaaaagggacatttagagcgcgagtgcatggaggagacatgttcctacgaagaggcgagagaggtctttgaggattccgataaaaccaatgaattttggaataaatacaaagacggagatcaatgtgaaacctccccttgtcaaaaccagggaaaatgtaaggacggactgggcgagtacacctgcacatgtcttgaaggatttgaaggaaaaaactgtgagctgttcaccaggaaattgtgttctctggacaacggagactgtgatcagttttgccatgaagagcagaacagtgttgtctgcagctgcgcgcggggttatacacttgccgataacggaaaagcgtgcatccctaccggcccttacccttgcggcaaacaaacccttgagagacgaaagagatctgtggctcaggcaaccagcagctcaggagaagctccagactcaataacgtggaagccatatgatgcagctgatctcgacccaacagagaacccttttgatctgctcgacttcaatcaaactcaaccggaacggggcgataataatttgactcggatcgtgggtggacaagaatgtaaggacggggaatgtccgtggcaggctctgctgatcaacgaggagaacgagggcttctgcggaggcaccatcctctcggagttctacatcttgactgctgcacactgtctttaccaggcaaagcgctttaaagtgagagtaggagaccggaacaccgaacaggaagagggcggagaggccgtgcacgaggtcgaagtggttattaagcacaacagatttacaaaagagacctatgacttcgacatagctgtcctcaggctgaaaacccccatcacatttagaatgaacgtggcgcctgcttgcctgccagagcgtgactgggccgagtctaccctgatgacccaaaaaactggcatcgtgtctgggtttggaaggacccatgaaaagggccgtcagagcacacgcttgaaaatgctggaggtaccctacgtggacaggaactcctgcaaattgagttcaagctttattattactcagaacatgttctgtgctggatatgacacaaaacaggaagatgcttgccagggcgattccggaggccctcacgtcactaggttcaaggacacttatttcgttaccggcatcgtaagctggggtgaaggctgcgcccggaagggaaagtacgggatatatactaaggtgactgcttttctcaaatggattgatagaagcatgaagacaaggggactccctaaggctaagtcacacgcccctgaggtgatcaccagcagtccactcaaa

SEQ ID NO: 9996 - DNA, 1464 bp, Artificial Sequence
  derived and/or modified sequence
atggggaggccgcttcatctggtgttgctctccgcgtcgctggctggactcttgctgcttggggaatcgttgttcattaggcgcgagcaagccaataacatcctggcccgggtgactcgtgccaattcgttcctggaagaaatgaagaaaggtcaccttgagagggaatgcatggaggaaacgtgttcgtacgaagaagctcgggaggtgtttgaggactccgacaaaacgaacgaattctggaacaagtacaaggacggtgatcagtgcgagacttcaccatgccagaaccaaggaaagtgcaaggatggactgggggaatacacctgcacctgtctggagggcttcgagggaaagaactgcgagctgtttacccgcaaactgtgttccttggacaacggcgactgcgatcaattctgccacgaagagcagaattcggtcgtgtgttcctgtgcacgcggttacaccctcgcggataacggaaaggcctgcatccctactggtccctacccctgcggcaagcaaaccctggagcgacgcaagcggagcgtcgctcaggccaccagtagctctggagaagcgccagattcaatcacctggaaaccatatgatgccgcagatcttgatcctacggaaaatccattcgacctgctggatttcaatcagacgcaaccggaacgcggcgacaacaatctcactagaatcgtgggaggacaggaatgcaaagacggtgaatgcccgtggcaggcgcttctgatcaacgaagagaacgaaggtttctgcggaggaactatcctgtccgagttttacattctgacggccgctcattgcctctaccaggccaaaaggtttaaggtccgcgtgggtgaccgcaacactgagcaggaagagggaggagaggcagtgcatgaagtagaggtggtgattaagcacaacagattcactaaggaaacttacgatttcgatattgctgtgctccggctcaagacccctatcactttccgaatgaatgtcgcgccggcttgcctgcccgaacgcgactgggccgagtctactctgatgactcaaaaaaccgggatcgtgagcggcttcggaagaacccacgagaagggccgccaatcaacgagactcaaaatgctggaagtgccgtatgtcgacaggaacagctgcaaactttcatcctcgttcatcatcacccagaacatgttttgcgcggggtacgacaccaagcaagaggacgcctgtcagggagactccgggggacctcacgtcaccagattcaaggacacgtacttcgtgactggaatcgtcagctggggcgagggctgtgcgcgtaaggggaagtacggaatctacaccaaggtgaccgccttcctgaagtggatcgaccggtccatgaaaaccagaggcctcccgaaagcaaagagtcatgccccggaagtaataactagcagccccctcaag

SEQ ID NO: 9997 - DNA, 1464 bp, Artificial Sequence
  derived and/or modified sequence
atgggccgcccgctgcacctggtgctcctctcagcatctctggctggactgttgttgcttggagagtccttgttcattaggagggaacaggcaaataatatactcgctagagtgacacgcgctaacagcttcctcgaagaaatgaaaaagggtcatttggaaagagaatgtatggaggagacatgcagctatgaggaggcccgcgaagtcttcgaagactctgacaagactaacgagttctggaataaatacaaggatggtgatcagtgcgagactagcccttgtcaaaaccagggcaagtgcaaggatggactgggagagtacacttgtacatgcctggagggatttgagggtaagaactgcgagctttttactagaaaactctgtagcctcgacaacggtgactgtgaccaattctgccacgaagagcagaactccgtcgtgtgttcatgcgccagaggttacaccctggcagacaatggtaaagcctgcattcccactggcccttacccgtgcggaaagcaaaccctcgaaagaaggaaacgctcagtggcccaagccacatcaagttctggcgaggcccctgactcaattacttggaagccatacgatgctgcagacctggacccaacagagaatcctttcgacctgttggacttcaatcagacccagcccgagagaggagacaacaatcttacacgcatcgtaggcggtcaagaatgtaaagatggcgagtgcccatggcaagctctgttgataaatgaggagaatgaaggtttttgcggaggaaccattctttctgagttctatatcttgacggcggcccattgcctctaccaagccaaaaggtttaaagtaagagtcggcgaccgcaataccgaacaggaagagggtggcgaggctgtacatgaagtggaggtggtcattaaacataaccgctttaccaaggagacctacgacttcgatatcgccgtactgaggctgaagactccaatcacattcagaatgaacgtggcaccggcttgcctgccagagcgcgactgggctgagagcaccctgatgactcagaagaccggtattgtctccggcttcggtcgcacccatgagaagggaagacaatctaccagactcaagatgctggaggtcccctacgttgacaggaactcatgtaagctgagctcatcatttatcatcacccaaaatatgttctgtgctggctatgatactaagcaggaagacgcttgccaaggcgatagtggtggtccccatgttacccgctttaaggacacttatttcgtgaccggaatagtgagttggggtgagggctgcgcacgcaaaggcaagtatggcatctacacgaaggttacggcttttctgaagtggatcgataggtccatgaaaactagaggattgccaaaggccaagagccacgcgcctgaggttataacatccagccccctgaag

SEQ ID NO: 9998 - DNA, 1464 bp, Artificial Sequence
  derived and/or modified sequence
atgggccggcctctgcacttggtcctgttgtcagcatcccttgcaggtcttctgctgcttggggaaagcctttttattcgtcgggagcaggctaataacatcctcgcgcgcgttacccgggctaactctttcctggaggagatgaagaaagggcacttggagcgcgaatgcatggaggaaacatgttcctacgaggaggccagggaggtgttcgaggactcagacaaaacaaatgagttttggaataagtataaggatggggatcagtgcgaaactagtccttgtcagaaccagggcaagtgcaaagacggactcggagaatacacttgcacgtgcttggagggcttcgagggcaagaactgcgaactgtttactagaaaactgtgttccttggacaacggagactgcgaccagttctgccacgaggaacagaactctgtcgtgtgttcctgcgcacgcgggtatacactcgctgataatggcaaagcgtgtattccaaccggcccatatccttgcggaaagcagactctagagagaaggaagaggtcagttgcgcaggcaaccagctcttccggcgaggcaccggatagcattacctggaaaccttacgatgccgcggatctcgacccgacggagaacccattcgatttgcttgattttaaccagacccagcctgaaagaggggataacaatctcacacgtattgtcggaggtcaggagtgcaaggacggagaatgtccttggcaggcccttttaatcaacgaagagaacgaaggtttttgtggcggcaccatcctgtcagagttctatatcttgactgccgcacactgcctctaccaggcaaagaggttcaaggttagagtcggcgaccgcaacaccgagcaggaagaaggaggggaggcagtccatgaagtcgaggtcgtgatcaagcataacaggtttaccaaggagacctatgactttgacatcgccgtactaaggctcaagaccccgataaccttccgcatgaatgtcgctcctgcttgcctgcccgaacgggactgggctgagtccactctgatgacccagaagactggcattgtaagcggctttggacggacacacgaaaaggggcgccagagtacaaggttaaagatgctggaagtgccttacgtggatagaaattcatgtaaactctccagcagttttatcatcactcagaatatgttctgcgcaggttatgacacgaaacaggaggatgcatgccaaggggattcaggtgggccccacgtgactcgtttcaaggacacttacttcgttaccggaattgtaagttggggcgagggttgcgcaaggaaaggtaagtatggcatttatactaaggtgactgcgttccttaagtggattgatcggagcatgaaaactagaggtctgccgaaggccaagtcccacgcgcctgaagtgattactagctcccccctcaaa

SEQ ID NO: 9999 - DNA, 1464 bp, Artificial Sequence
  derived and/or modified sequence
atggggcggcccctccacctggtgttgttgagcgcttcgctggccggactgctgcttcttggagaaagcctcttcatccggagggaacaagcaaacaacattctggctcgcgtcactcgagccaacagctttctggaagagatgaagaagggccatctcgaacgggaatgcatggaagaaacgtgctcatacgaagaagcccgcgaggtgtttgaggatagcgacaaaactaacgagttctggaacaaatacaaggacggagatcaatgcgaaacttcgccttgccaaaaccaaggtaaatgcaaggatgggctgggagaatacacgtgcacctgccttgaaggattcgagggaaagaattgtgagctgtttactcggaagctctgctcattggataatggagactgcgatcagttctgccacgaggaacagaattccgtggtctgttcctgcgcgcgcggatacaccctggcggataacggcaaggcctgcatccctacgggtccttacccatgtgggaaacagacccttgagaggaggaagcgctcagtcgctcaggctacttcttcgtccggagaagcccctgattcaatcacttggaagccatacgacgcagccgacctcgacccgaccgagaatccgtttgacctcctcgacttcaaccagacccagcccgaacgcggagataacaatcttacccggatcgtcggcggacaggaatgcaaagacggtgaatgtccttggcaggccctcttgataaacgaagagaacgaaggcttctgcggagggaccatcctgtccgagttctacattctcactgcagcccattgcttgtaccaagccaagcggttcaaagtgcgggtgggcgacagaaataccgaacaagaagaaggaggggaagcagtgcatgaggtggaagttgtgatcaagcacaacagatttaccaaggagacttatgacttcgacatcgcggtcctgagacttaagactccgatcactttccgcatgaacgtcgcaccggcatgtctgccggaaagggattgggccgagtccacccttatgacgcagaaaactggaatcgtctccggattcggccggactcatgagaagggaaggcagagcactcggttgaagatgctcgaggtgccgtatgtcgatcgcaattcatgcaagctgtcatcatcttttatcatcacccagaatatgttttgcgcaggatacgataccaagcaggaagatgcgtgccaaggagacagcggtggtccccacgtgacccggttcaaggatacttatttcgttacgggaattgtctcgtggggagaaggatgtgcgagaaaaggaaagtacggtatctacaccaaggtgaccgcattcctgaaatggattgatcggtccatgaaaacgagaggcctgcccaaagcgaaatcccacgctccagaggtcatcaccagctcgccactgaag

SEQ ID NO: 10000 - DNA, 1464 bp, Artificial Sequence
  derived and/or modified sequence
atgggacggcctctgcacctagtattgctgtccgcctctcttgcaggactcctgctgctgggggagagcctattcatcagacgcgagcaagccaataatattctcgcccgggtcacacgggcgaattcatttctcgaggaaatgaaaaaggggcacctagagcgcgagtgcatggaggaaacttgtagttacgaagaggctcgagaggttttcgaagacagcgataagacaaatgagttttggaataaatataaggacggcgaccagtgtgagacaagcccttgccaaaatcagggaaaatgcaaggacggcctcggggagtacacctgtacctgtttggaaggctttgaggggaaaaattgtgaactattcacaaggaagctctgcagccttgataatggagattgcgatcaattttgtcacgaggagcagaatagcgtggtctgttcttgcgctcgggggtatacgctggccgacaacgggaaagcatgcattccaacaggtccctatccttgtggcaagcaaacactagaacgccgcaagcggtcagtggcccaggccactagctctagcggtgaagctcccgacagtatcacttggaagccctatgacgccgccgatctcgacccaactgagaaccctttcgacctgttggatttcaatcagacccagccggaacgaggtgacaacaacctgacacggatcgtcgggggacaggagtgtaaagatggggagtgcccttggcaggccctcttgattaacgaggaaaatgaagggttctgcggcggcacgatactttctgaattctacatacttaccgccgcacactgtctatatcaagccaaacgcttcaaagtgcgtgtgggtgatagaaacacagagcaagaagagggcggcgaagccgttcatgaagtggaagttgtgatcaagcataaccgcttcacaaaggaaacctacgatttcgatattgccgttctacggctcaagactccgattaccttcaggatgaacgtagcaccggcttgtttgccggagcgtgattgggcggaaagcactctgatgacccagaagacgggaatagtttcaggatttggaaggactcatgagaaaggacgccagagtaccaggctgaagatgctggaagtgccttatgtcgatcgcaattcatgcaaactctccagctcttttatcattacgcagaatatgttttgtgctggctatgacactaagcaggaagatgcctgccagggggatagcgggggcccacatgtcactaggtttaaggacacatacttcgtcaccggcatcgttagctggggagaaggctgtgcgcgaaaggggaagtacggaatttacactaaagtgaccgcgttcctgaagtggatagatagaagcatgaagacacgcggtctgcccaaggcgaaatcacacgctcctgaggttatcaccagttctccactcaaa

SEQ ID NO: 10001 - DNA, 1464 bp, Artificial Sequence
  derived and/or modified sequence
atgggaagaccattgcatctggtactgctcagcgctagcctggcaggcctgctcctactgggtgaaagcctgttcattaggcgagaacaggccaacaatattctggctcgggtcacacgggctaatagctttctggaagaaatgaagaaaggccaccttgaacgggagtgtatggaagagacttgttcatacgaagaggcacgagaagtctttgaggacagcgataaaaccaacgaattttggaacaaatacaaggacggcgaccagtgtgaaaccagcccatgccagaaccaagggaaatgtaaggacggcctcggagagtatacatgtacgtgcttggaaggttttgaggggaagaattgtgagctgtttacacgtaaactgtgttcgctggacaacggggactgcgaccagttttgccatgaggaacagaattccgttgtctgttcatgcgccagaggatacaccctggctgataatggcaaagcttgtatcccaacgggtccgtatccttgtggaaagcagaccttagaaagacgaaaacggagcgtggcccaggcaacgtcttccagcggagaggcacctgattctattacctggaagccctatgacgcagcggacctagatccgaccgagaatccattcgacctactcgatttcaaccagacccagcctgaaagaggagacaataatcttactcgcattgtgggtggacaggaatgtaaggatggcgagtgtccttggcaagctctgttaatcaacgaggagaatgagggattctgcggcgggaccatactgagcgagttttatatcttgaccgcagctcattgcttataccaggccaaacggtttaaggtccgggtcggtgatcgcaacactgagcaagaggaggggggggaggccgtacatgaagtcgaagtcgtcattaaacacaaccgttttacaaaagagacctatgatttcgacatcgcggtgctgaggctcaaaacaccaattacattccggatgaacgtggctccagcttgtctgcccgagcgggactgggctgagtcgacactaatgacacagaaaacgggcatcgtgtcaggcttcgggcgcactcacgaaaagggtcgacagagtactaggttaaagatgctcgaggttccatatgtcgaccgaaactcttgtaaattgagctcatccttcatcatcacgcagaacatgttctgcgctggatatgacaccaagcaggaggatgcttgtcagggggatagcggtggaccccatgtgacaaggttcaaggacacgtacttcgttacgggaattgtgagttggggcgagggatgcgcaagaaagggcaagtacggcatctatacgaaggtaactgccttcctgaaatggatcgaccgctcaatgaaaactcgaggcctacccaaagcaaaaagccacgccccagaggtgatcacatcctctccactgaag

SEQ ID NO: 10002 - DNA, 1464 bp, Artificial Sequence
  derived and/or modified sequence
atgggccggcccctgcatttagtcttgttgagtgcctctctggctgggcttctcctgttgggagagtctctgttcatcagacgtgaacaggcaaacaacatccttgccagagtgacacgagccaatagcttcctcgaagaaatgaagaagggacacctggaacgcgagtgtatggaggagacctgctcctatgaagaagccagagaggtcttcgaagactctgacaaaactaacgagttctggaacaagtacaaggacggagaccaatgcgaaacatccccctgccagaatcagggaaaatgtaaagatggcctgggggagtacacatgtacatgcctggagggctttgagggaaaaaattgtgagctgtttactcggaaactttgtagcctggataacggagactgcgatcagttttgtcatgaagagcagaatagcgtggtgtgttcgtgtgcacgcggctacacactcgccgacaatggcaaggcgtgtatcccaaccggcccatatccttgtgggaagcagacgttagaaaggagaaaacggtccgtggcccaagctactagctccagcggggaggccccggattctattacttggaaaccttacgacgctgccgatctagatccaacagaaaatccctttgacctcttggatttcaaccaaactcagcccgagcggggcgataataacctcactagaattgtgggcggacaggagtgtaaagacggcgagtgtccgtggcaggccttgttgatcaacgaagagaacgagggtttttgtgggggtactatcctcagcgagttctatatcttgaccgcagcccactgtctgtaccaagctaagagattcaaagtgagagtaggcgatagaaacactgaacaggaggaaggaggggaggccgtacacgaggttgaggtggtgattaagcacaaccggttcaccaaagagacatatgatttcgatattgcagtattacgcttgaagaccccaatcacttttaggatgaacgtggctcctgcctgtttaccagagagggactgggcagaatccactctgatgacgcagaagaccggtatagtttcagggttcggcaggacccatgaaaaaggacggcaatccactcgattgaagatgttggaggttccctatgttgataggaactcttgtaagctatcctcgagttttatcatcactcaaaatatgttctgtgccgggtacgacactaagcaggaagatgcttgccagggggattctgggggaccccatgtgaccagattcaaagatacgtatttcgtgacggggatcgtgagctggggcgaaggctgcgcccgtaagggtaagtatgggatctatactaaggtgacggccttcctaaaatggatagatcggagtatgaagactaggggcctcccgaaagcaaaatcgcacgctccagaggtgatcacaagttccccactgaaa

SEQ ID NO: 10003 - DNA, 1464 bp, Artificial Sequence
  derived and/or modified sequence
atgggtcgacccctgcatctcgttcttttgagtgcatctctggctggcctgctgctgctgggcgagagcctgtttatccggagggaacaagcaaataacattctcgcccgagtcactagggccaatagctttctggaggaaatgaagaagggacaccttgagcgcgaatgtatggaagaaacgtgtagctacgaagaggcaagagaggtgttcgaggactccgacaaaaccaatgagttctggaataagtacaaggatggcgaccagtgtgagactagcccatgccagaatcagggtaaatgcaaagatggattgggggagtacacgtgcacctgcttggaaggctttgagggcaagaactgcgagctgtttacccgcaagctctgctccctcgacaacggggattgcgaccaattttgccatgaggaacagaactccgttgtttgcagctgcgcaaggggctatacactcgcggataacggtaaggcctgcatcccaaccggaccctacccctgcggtaagcaaacattggagagacgtaagcgctcagtggcccaggctacctcctcgagtggggaggctccagactccattacgtggaagccatacgatgcggccgacctggacccaacagagaacccattcgatctcttggacttcaaccaaacccagccagaacgtggagataataacctgacaagaatcgtgggcgggcaggagtgtaaggacggcgagtgcccgtggcaagctttgttgataaacgaggaaaacgagggattctgcggtggtaccatcttgagtgagttctacatcctgacggccgcccattgtctctatcaggctaagcgattcaaagtccgcgtaggcgatcggaacacagagcaagaagagggcggcgaagctgtccacgaggtggaggtcgtcatcaaacataacaggttcacgaaggagacttatgacttcgatatagctgtcctacgactgaagacacccataacctttaggatgaatgtggctcccgcttgtcttcctgagagagattgggctgagtcgaccttgatgacccagaaaaccggaattgtgtctggattcgggagaactcacgagaaaggccgacagagcactagactgaaaatgttggaggttccttatgtggaccgtaattcttgcaaacttagcagctcattcattatcactcaaaatatgttctgtgccgggtatgacacaaagcaggaggatgcctgtcagggggattccggcgggccacacgttactaggtttaaggacacctacttcgttactggcatagtatcttggggcgagggatgcgccaggaaggggaaatatggaatttatacaaaagtcaccgcctttttgaaatggatcgatcgatcaatgaagacacgggggctgcccaaggccaagtcccacgcacccgaagtgatcacaagtagtcccctcaaa

SEQ ID NO: 10004 - DNA, 1464 bp, Artificial Sequence
  derived and/or modified sequence
atgggtagaccacttcacttagtactattgtccgcaagtctcgcaggcctattgcttcttggtgaatcattgttcatcaggcgggaacaggcaaacaatattctcgctcgggtgactagggctaactcctttttggaagagatgaagaagggtcatttggaaagagaatgcatggaggaaacctgctcctatgaggaggcaagagaagtgttcgaagatagcgataagaccaatgagttctggaacaagtataaggacggggatcaatgtgagacaagtccttgccaaaaccagggcaagtgtaaggatggcctcggggagtacacttgcacttgtttggagggcttcgagggtaaaaattgtgaattattcactaggaaactttgctctttggataacggcgactgtgatcaattctgccatgaagaacagaactcagtggtttgttcctgcgcccgcggttacaccctcgccgataacggaaaggcgtgcatccccactggtccatacccttgcggaaagcagacgttggagcgcagaaagcgttctgttgcgcaagcgaccagctcatccggcgaagccccagattctatcacttggaagccgtacgatgctgcggatctagatccgacagaaaaccctttcgacttgttggattttaaccaaacacaaccggagcgaggagacaataatctaacgcgtatcgtcggggggcaagagtgtaaagacggagaatgcccctggcaagctctattaattaacgaagagaacgaagggttctgcggtggcaccatactttccgaattttacatcctcactgccgcacattgcctttatcaggctaagagatttaaagttcgcgtgggggatcgtaataccgaacaagaagaaggaggagaggcagtccatgaggtagaggttgtgatcaaacataatcgtttcacgaaggaaacatatgattttgatatcgcagttttgagattgaagactcctatcacgtttaggatgaatgtcgcaccagcctgcctgcccgagcgtgattgggctgagtctactttaatgacccagaaaacgggcattgtaagcggatttggtcgtacccatgagaagggacgccaatccaccagacttaagatgcttgaggttccctatgtggataggaatagttgcaagctttcgtcttcatttatcatcactcagaacatgttctgtgcagggtacgatactaagcaggaagacgcatgtcagggcgatagtggaggcccgcatgtcaccaggttcaaagatacgtattttgtgacgggcatagtgtcttggggagaaggttgtgctagaaaaggcaagtatgggatttataccaaggtaactgcatttttgaagtggatagaccgctcaatgaagactaggggacttcctaaagccaaaagtcatgctcctgaggttatcacgtccagccctcttaag

SEQ ID NO: 10005 - DNA, 1464 bp, Artificial Sequence
  derived and/or modified sequence
atgggacgtccactgcatctggtgctcttgagcgcatcgttggcaggattgctcctcctgggtgaatccttgtttatcagaagagagcaagcgaacaacattctcgcgcgcgtgacccgcgctaattcgtttctggaggagatgaagaaaggacaccttgaaagagaatgtatggaagagacttgcagctacgaggaagcaagagaggtctttgaagattcagataaaactaatgaattttggaacaaatacaaggacggtgatcaatgcgagacttccccttgtcagaaccaggggaaatgtaaggatgggctcggagagtacacctgcacttgcctcgagggctttgaaggcaaaaactgcgaactgttcactagaaagctgtgttcactcgacaacggcgattgtgatcagttctgtcatgaggaacagaactccgtcgtctgctcatgtgcaaggggatatacccttgcggacaatggtaaggcgtgtatccctaccggaccctacccatgtggtaaacagactttggagagaaggaagagatccgtggctcaggcaacctcgtcctcgggagaagcgcctgattcaatcacctggaaaccctacgatgcagcagatcttgatccaaccgagaacccctttgacctgctggactttaaccaaacccaaccagaaagaggggacaataaccttaccagaatagtcggaggacaagagtgtaaggacggagaatgtccttggcaagcactccttatcaacgaggagaacgaaggcttctgtggaggtactattctgagcgaattctacatcctcaccgctgcccattgtctctaccaggcaaagcggtttaaagtcagagtcggggacagaaatactgaacaggaagaaggtggcgaggcagtgcatgaagtcgaagtggtgattaagcataatcggtttacgaaggagacgtacgattttgacattgcagtccttcggctcaagactccaataacctttcggatgaatgtggcaccagcatgcctgcccgaacgcgattgggctgagtccactctcatgacccagaaaactggaatcgtgtccggtttcggaaggacccatgagaaaggccggcaatccactagacttaagatgcttgaggtgccttacgtggatcggaactcttgcaagctctcgtcgtccttcatcataactcagaatatgttttgtgcaggatacgatactaagcaggaggacgcctgccagggagattcgggcgggccacatgtgacccgctttaaggatacttactttgtgaccggtattgtgtcatggggagaaggatgtgcacgcaaggggaaatacgggatctataccaaggtcactgcttttctgaaatggattgatcgctcgatgaaaaccaggggtctgccaaaggcaaagtcgcacgcacccgaagtgatcacgtcaagcccactgaag

SEQ ID NO: 10006 - DNA, 1464 bp, Artificial Sequence
  derived and/or modified sequence
atgggccgtcccctacatttagttctgctctccgcgtccttggctggtctgctcctgctgggagagagcctctttatccgacgagaacaggccaacaacatcctagcccgtgtcactagggctaactccttcctggaagaaatgaagaagggccacctcgagcgagagtgcatggaggagacctgttcgtacgaagaggcccgcgaagtcttcgaagattcggacaagaccaacgagttctggaacaagtacaaggacggcgaccaatgcgagacctccccgtgtcaaaatcagggcaagtgtaaggatggcctgggtgagtatacctgcacttgtctggagggctttgaaggcaagaattgcgaacttttcacccgtaagctgtgcagcctggacaacggcgactgcgatcagttctgccacgaggaacagaactccgtcgtctgtagttgcgcccgcggctatacactggccgataacggtaaggcctgcatccccacgggaccgtacccgtgcggcaagcagaccctggagcgccgcaagcgcagcgtggcacaggccacgtccagctccggcgaggctcccgacagcatcacctggaagccctacgacgccgccgatctggaccctactgagaacccgttcgacctcctcgatttcaaccagacccaacctgagcggggcgacaacaaccttacccgcatcgttggcggacaggagtgcaaggacggggaatgcccttggcaagccctcctcatcaacgaagagaacgagggcttctgcggaggtactatcctcagcgaattttacatcttgacggcagcccactgtctctaccaagccaagcgtttcaaggtccgggtcggtgatcgaaataccgagcaagaggagggtggcgaggccgttcacgaagtggaagtagttatcaagcacaaccgctttaccaaggagacctacgattttgacatcgccgtcctcaggctcaagacccctatcacctttcgtatgaacgttgcccctgcttgtctgcctgaacgcgattgggccgagtccactctgatgacccaaaagacaggcattgtctcggggttcggacgaacccacgaaaagggccgccagtccactcgcttgaagatgctcgaagtcccctacgtcgaccgcaactcttgcaaattgagcagttccttcatcatcacgcagaacatgttttgtgccggctacgacaccaagcaggaagacgcgtgtcagggtgacagtggaggaccacacgtaacccgattcaaggatacctatttcgtgactggaatcgtctcctggggggagggttgtgcccgaaaaggcaagtacggtatctacacgaaggtgactgctttcctcaagtggattgataggtccatgaagactcgcggtctgcctaaggccaaatctcacgcgccggaggtgatcacatcctcgcctcttaaa

SEQ ID NO: 10007 - DNA, 1464 bp, Artificial Sequence
  derived and/or modified sequence
atgggacgtccattgcacctggttctcctgagtgcatccctcgcaggcctgctgctccttggcgaatccctctttatcagacgcgaacaggctaataatatactggctagggtgacaagagcgaatagttttttggaagagatgaaaaaagggcatctggaacgcgagtgtatggaagagacgtgtagctatgaagaagctagagaagtttttgaagacagcgataagacgaacgagttctggaacaaatacaaggacggagatcagtgtgagacatcgccgtgtcaaaaccaggggaaatgcaaagacggtttgggggagtacacgtgcacgtgtttggaaggatttgaaggtaaaaactgcgaattgttcacaaggaagttgtgctctcttgacaatggcgattgtgatcagttttgtcatgaagaacagaattcggttgtttgttcctgcgctagaggctacactcttgcggataatgggaaggcttgcattcctacgggcccatatccgtgcgggaaacaaacgctagaaaggaggaaaagatcggtggcgcaggcaacatctagttcaggagaagcgccggactcaatcacatggaaaccctatgacgcggccgacctagacccaacagaaaatccctttgacctgttggattttaatcaaacgcaacctgaacgcggagataataatttaacaagaattgtgggtggtcaggagtgcaaagatggcgaatgcccgtggcaggccttactgatcaatgaggaaaatgaaggattttgcgggggaactattttgtccgagttttatatcttaactgctgcgcactgtctttatcaagctaagagatttaaagtccgggtcggagatcgaaatacagaacaagaagaaggtggcgaagccgttcatgaagtggaagtcgttatcaagcacaatcgcttcacaaaagaaacatatgactttgatattgcagtcttacgtcttaaaacgccgataacatttcgtatgaatgtcgcgcctgcttgcctccctgaacgggattgggcagagtcgacgcttatgacacagaagacaggaatcgtttctggcttcggacggactcatgaaaaaggccgtcaatctacgcgactaaaaatgttagaggttccatatgtggatcggaattcttgcaaacttagttcatcttttattatcacacagaacatgttttgcgcgggctatgatacaaagcaagaggatgcttgccagggagatagtgggggacctcatgtgacccgttttaaagacacttattttgtgacaggaattgtcagctggggtgagggctgcgcacgaaagggaaagtatggcatttacacaaaggtcacggctttcttgaaatggatcgatcgctccatgaagacaagaggcttgccaaaggctaaatcccatgcacctgaagtgattacaagcagcccattaaaa

SEQ ID NO: 10008 - DNA, 1464 bp, Artificial Sequence
  derived and/or modified sequence
atgggccgccccctccatttggttcttctttcagccagccttgccggattattgttactgggcgagtcattgttcatacgccgagagcaggccaacaacatcctcgctagagttactcgggcaaatagcttcctcgaagagatgaagaaggggcatctggagagagaatgcatggaggagacatgctcctacgaagaggccagggaagtcttcgaagactctgacaagacaaatgagttctggaacaaatataaagatggagaccagtgtgagacaagtccctgccagaaccagggtaagtgcaaagacggactgggagagtacacgtgtacttgtttggagggatttgagggcaaaaactgtgagctgtttaccagaaaactgtgttcacttgataacggagattgtgaccagttctgccacgaggagcagaactctgtggtgtgcagctgcgcgagaggttacaccctcgctgataacgggaaggcctgtattccgacaggcccctacccttgcggcaagcaaacccttgagcgtaggaagaggtcagtggctcaggcaactagttcttccggcgaagctccggacagcattacctggaaaccatacgacgctgcagacctggaccctaccgaaaaccctttcgacctgttggactttaaccaaacacagcccgagcggggcgataataaccttaccagaatcgtaggagggcaggaatgtaaagatggcgaatgtccttggcaggctctgctgatcaatgaggaaaatgaggggttctgcggggggaccatattgtctgagttttacatccttactgctgcccactgcctttatcaggccaaaagattcaaggtgagggttggggaccggaataccgaacaggaagagggaggtgaagcagtgcacgaggtagaagtggtcattaagcataacaggttcaccaaagaaacatatgacttcgatatcgctgtgcttcgccttaaaacaccgatcacgttcaggatgaatgtggccccagcctgtttgcctgagcgagactgggcagagtccacactcatgacacagaagaccggtatcgtttccgggtttgggaggacccacgagaagggtcggcagtctacgcgactcaaaatgttggaggtgccctacgtggatcggaatagttgtaagctgtcaagcagcttcattatcacgcagaacatgttctgcgctgggtacgatactaaacaggaggacgcctgccagggagatagtggaggaccacacgtgactcgattcaaggacacatactttgtgaccggaatcgtcagctggggtgagggatgtgcccggaaaggaaagtatggcatttatacgaaggtcactgcattcctcaaatggatcgaccgctctatgaaaacccgggggttgccgaaggccaaatctcacgccccggaagtgatcacgagtagccccttaaag

SEQ ID NO: 10009 - DNA, 1464 bp, Artificial Sequence
  derived and/or modified sequence
atgggacgccctttgcatctggtgcttctcagcgcctcactggcaggcctgttgctgctgggcgagtcccttttcatccggagagagcaggcaaacaacattctcgcacgggtgacccgagccaatagctttcttgaggagatgaagaaggggcacctggagagagagtgtatggaagagacgtgttcgtacgaagaggcgagggaggtgtttgaggattcagataagaccaacgaattttggaataagtacaaggacggggatcaatgtgagacttcaccatgtcagaaccaggggaagtgtaaggatggcctcggtgaatacacctgtacttgcctggaagggtttgagggtaagaactgcgagctttttaccagaaagctgtgctctctggacaacggagattgtgatcagttttgccatgaagaacaaaattccgtggtctgttcctgtgcaagaggttatacccttgcggataatggcaaggcttgcatacctactggtccgtacccgtgcggaaagcaaacgttggagcgtcgcaagcgtagcgtggcgcaagcgacgtcctccagcggcgaagcacctgattcaataacgtggaagccgtacgatgcagccgatcttgatcctacggaaaacccttttgacctgttggatttcaaccaaacgcaacccgaaagaggggataacaacctgactcgcatcgtcggaggtcaggaatgtaaagatggagagtgcccatggcaggctcttctcatcaatgaagaaaatgagggattttgcggtggaactatacttagcgaattctacattcttactgcagcccattgtctctaccaggcaaaacgtttcaaagtccgtgtgggagatcgcaacaccgaacaagaagaaggaggtgaagcagttcatgaagtggaagtcgtcattaagcacaataggttcaccaaagagacgtacgattttgatatcgctgtgttgcgattgaaaacccccattacttttcgcatgaacgtggcaccagcatgtctccctgagagggactgggcagagtcgacccttatgacgcagaaaactggtatcgtgtcaggatttggacgcactcatgaaaaagggagacagtccactcggctgaagatgcttgaggtcccgtacgttgacaggaactcgtgcaagctctcttcgtcgttcataatcacccagaatatgttctgcgcaggttacgacaccaagcaagaggatgcatgtcaaggcgactcgggtgggccccacgtaacgaggttcaaagatacctacttcgtgactggaatcgtgagttggggtgaaggttgcgcacggaagggaaagtatggaatttacaccaaggtcaccgcatttcttaaatggattgatcgttccatgaaaacgcggggacttcctaaagcaaagtcccatgcccctgaggtgattactagctccccccttaag

SEQ ID NO: 10010 - DNA, 1464 bp, Artificial Sequence
  derived and/or modified sequence
atgggacgccctctgcacttggtactcctgtcagccagtctagctggactgctactcctgggggaatctctgtttatacggcgcgagcaggccaataacatactcgcacgcgtcacaagagcaaattcatttcttgaagaaatgaaaaaaggacacctcgaacgagaatgcatggaagaaacatgttcgtatgaggaagcccgcgaagtgttcgaagactcggataaaactaacgaattctggaataaatataaagatggagatcagtgcgaaacgtccccttgtcagaaccagggaaaatgtaaagatgggctcggggagtatacttgtacttgtctagaagggtttgaaggaaaaaactgtgaactgttcactcggaaactatgttctctggataatggggactgcgatcagttctgccatgaagagcagaactcagtggtctgttcatgcgctagggggtatacactggccgataacgggaaagcttgtatacctactggaccctatccttgcggaaaacagactctagaaaggaggaagcgttctgttgcccaggccactagttcttctggagaggcccccgactccatcacatggaaaccctacgatgccgctgatttagatcccacagaaaacccattcgatctcctggatttcaaccagacacagcctgaacggggagataacaatttaactagaattgtaggggggcaggaatgtaaagatggggaatgtccttggcaggctcttctaattaacgaagaaaacgagggattctgcggagggactatcctgtccgaattttatatcctgactgctgcccactgtctgtaccaagctaaacgctttaaggtgcgggtaggggataggaacactgaacaggaagaagggggagaggctgttcacgaagtagaagtggtaattaagcataaccgctttactaaggaaacatatgatttcgacatcgccgttctgcggcttaaaactcctataactttcaggatgaacgtggcacccgcttgtctacctgaaagggattgggcagaatccactttaatgactcagaaaactggaatagtgtccggatttggaagaacacatgaaaaaggacggcagtctactagactgaaaatgctcgaagtcccctatgtggatcgcaactcatgcaaactatcatcaagtttcataataactcaaaatatgttctgtgcaggatacgatactaaacaggaagatgcctgtcagggggactctggggggccacacgtgactcggtttaaagatacatattttgtaacaggaatagtttcatggggagaagggtgtgccaggaaaggaaagtatggaatttatacaaaagtcacagcctttttgaaatggatcgataggtccatgaaaacaaggggattacccaaagccaaatcccacgcccctgaggtaatcactagttcccctctcaaa

SEQ ID NO: 10011 - DNA, 1464 bp, Artificial Sequence
  derived and/or modified sequence
atgggtagacccctgcacctggtgctgctctccgcgtcgctggccggcctcctgctgctcggggagtcgctgtttattcgccgcgaacaggcgaataacatcttggcccgcgttactagagctaactccttccttgaagaaatgaagaaggggcacctggaacgggagtgtatggaggagacgtgcagctacgaagaagcccgcgaagtgttcgaggacagcgataagaccaacgaattctggaacaagtacaaggacggcgaccaatgcgaaacttctccttgtcagaaccaaggtaaatgtaaggacgggctcggggaatacacctgcacctgccttgaagggttcgaaggcaagaattgcgagctttttactcgcaagttgtgctcgctggataatggcgattgtgaccaattctgccatgaggagcagaactccgttgtctgcagctgcgccagaggctacacgctggcagataatggaaaggcttgcatcccaactgggccatatccgtgcggaaagcagacgctcgaaagaagaaagagatcagtggcgcaagctacttctagcagcggagaggcgcccgactccatcacctggaagccatacgacgcggccgacctggatccgaccgaaaacccattcgacctccttgacttcaaccagactcagcctgaaagaggagataacaatctgactcgcatcgtgggaggacaggaatgcaaagatggtgaatgtccatggcaggccctcctgatcaatgaggagaacgagggattctgtggaggtaccatcctcagcgagttttacattttgaccgcggctcactgcctttaccaagccaaacgcttcaaggtgagggtgggggatcgcaacactgaacaggaagagggaggagaagccgtgcatgaggtcgaggtcgtgatcaaacataacaggttcacgaaggaaacgtacgatttcgacatcgccgtgctccggctgaaaactcctatcacttttcgcatgaatgttgcccctgcctgtttgcctgaaagagactgggcagagtccacgttgatgactcagaaaacgggaatcgtgtcgggattcggcaggacccacgagaagggacggcagtccactagactcaagatgctggaggtgccatacgtggaccgcaactcctgcaaactgagctcatcgtttatcattacccaaaacatgttctgtgccggatacgataccaagcaagaggacgcatgccagggagactcgggaggacctcacgtcaccaggttcaaggacacttactttgtgaccggaattgtctcgtggggagaaggatgcgccaggaaaggcaaatacggaatctacaccaaagtgactgcattcctgaagtggatagaccggtcaatgaaaacgcggggcctgcctaaggcgaagtcgcatgccccagaagtgatcacctcatcgccgctcaag

SEQ ID NO: 10012 - DNA, 1464 bp, Artificial Sequence
  derived and/or modified sequence
atgggtagacctctgcacctggtgctgctttccgcgtccctggcagggcttctgcttctgggcgagagccttttcataagaagagagcaggcaaacaacattttggcgagagttacgagggctaattcgttccttgaagagatgaagaaaggtcacttggaacgggaatgtatggaagaaacttgttcatacgaagaagcgagggaggtgtttgaggattccgataagactaacgagttctggaacaagtacaaggacggggatcaatgtgaaaccagcccctgtcaaaatcaagggaaatgtaaggatggtttgggagagtacacttgtacttgtctcgaaggctttgaagggaagaactgtgaacttttcacccggaagctgtgctcccttgataacggtgattgtgatcagttctgtcacgaagaacaaaacagcgtggtgtgttcgtgtgcaagggggtacacccttgcagacaatggaaaagcatgtattccaaccggaccgtacccatgcggaaagcagaccctcgaaagaagaaaaaggagcgtggcacaagccactagctcatctggtgaagcaccggatagcattacttggaagccttacgatgctgcagatctggatcccactgagaacccctttgatctcctggatttcaaccagactcaacctgaaagaggtgataacaacctcacccggattgtcggagggcaagaatgtaaggacggtgaatgtccgtggcaggcacttttgattaacgaggagaacgaaggattctgcggtggcactattctgtccgagttttacattcttacggccgcgcattgtctttaccaagcaaaacgctttaaggtccgcgtgggcgacagaaacactgaacaggaggagggcggcgaggcggtccacgaggtggaagtggtgattaaacataaccggtttaccaaagaaacctatgatttcgatatcgcagtgctgagacttaaaactccaataaccttccggatgaacgtggcaccagcctgtttgccagaacgggactgggcagagtcgaccctgatgacccaaaagacggggattgtgtcgggatttggtcggactcatgaaaagggacggcaatcgactcgactgaagatgcttgaagtcccctacgtcgatagaaactcgtgcaagctctcctcgtcgtttatcattacgcagaacatgttttgcgccgggtacgatactaagcaggaggacgcttgtcaaggggactcggggggccctcatgtcactcgtttcaaggacacctattttgtcacgggtatagtctcatggggagaaggctgcgcacgaaagggcaagtacggaatctacaccaaggtgactgccttccttaaatggattgatcgttccatgaaaacgcggggactgccaaaagcgaaaagccacgcacctgaagtgataacctcctcaccacttaaa

SEQ ID NO: 10013 - DNA, 1464 bp, Artificial Sequence
  derived and/or modified sequence
atggggaggcctctccatcttgtcctgctttccgcctcgctcgccggcctgcttctgcttggagagagcctatttattcgcagagaacaagcgaacaatatactggccagagtcacacgggccaacagtttcttggaggagatgaaaaagggtcacctggaaagggaatgtatggaagaaacctgcagctacgaggaagctcgggaggtgttcgaagattcggataagactaacgaattctggaataaatacaaggacggcgaccagtgtgagactagcccatgtcagaatcaagggaaatgcaaagacggcctgggtgagtatacatgtacttgtctggagggatttgaaggaaaaaattgcgaactttttactcggaaactttgcagtctggacaacggggactgtgaccagttttgtcatgaggagcagaactccgtagtctgctcttgcgcccgtggatatactctagcagacaacggtaaagcctgtattccaaccggcccatacccgtgtgggaaacagacactggaaagacgcaagcgctctgtggcacaggccacatccagttcgggagaagcaccagactccatcacctggaaaccttacgatgccgccgacctcgatcctacagagaaccctttcgatctactggatttcaatcagactcaacctgagcgtggggacaataacctgacacgaatcgttggcggtcaggaatgtaaagatggcgagtgtccgtggcaggccctgctgattaacgaggagaacgaggggttctgcggggggacaattctatcggagttctacattctgacagcagcacactgcctgtaccaagccaagaggttcaaggtaagggtgggcgatcgaaatactgagcaagaggaagggggcgaggcagttcacgaagtagaggtagtcataaaacacaacaggttcacaaaagagacctacgactttgatatcgccgtgcttaggcttaagacacccataacattccgcatgaatgttgccccagcctgcctccctgagcgagattgggccgagagtaccctcatgacacagaagactggaatcgtcagtgggtttgggcgtacacatgagaaggggaggcagtcgacacgcctgaaaatgctggaagtaccttatgtggacagaaactcatgcaaactgagctctagttttatcataacccagaacatgttctgcgccgggtacgatactaagcaggaagatgcctgccagggagatagcggcggcccacacgtgacacgattcaaggacacctatttcgtcactggaattgtatcatggggagagggctgcgcccggaaagggaagtacgggatttatactaaagtgacagcatttcttaaatggatcgatcgctccatgaagacacggggccttccgaaagcaaaaagtcatgcgcccgaagtgataacctccagtccactgaag

SEQ ID NO: 10014 - DNA, 1464 bp, Artificial Sequence
  derived and/or modified sequence
atgggccgaccgctgcatcttgtgctactctccgcctctcttgcagggcttctgttgctcggtgagtcgcttttcattcgccgagagcaagcgaataatattttagcacgcgttactagggctaattcgtttctggaggagatgaagaagggtcatctggaacgtgaatgcatggaagagacctgttcttatgaggaggcccgtgaggttttcgaggattccgataagacaaacgaattctggaataagtacaaggatggtgaccagtgcgagacatccccctgccagaatcagggtaaatgtaaggatggattgggtgagtacacgtgcacctgtctggagggattcgaaggcaaaaattgtgaactgttcacaaggaaactctgttcactggacaacggcgattgcgaccaattctgtcatgaggagcagaatagtgtcgtctgtagttgtgcccgcggctacaccctcgcggacaacggcaaagcttgcatccccaccggtccctacccgtgcggtaagcagacacttgagcgccgaaagcgatctgtggcgcaggcaacctcatcaagcggagaagcacctgactcaatcacttggaagccttacgacgcagccgacttggaccctactgaaaacccatttgacttactggattttaaccaaacacagcccgagagaggcgacaataatctaacacgaatagtgggcggtcaggagtgtaaggatggagaatgcccatggcaggcactgctcattaacgaggaaaatgaggggttctgcggcgggacaattctgtctgaattctatattctaacagctgcccactgtctttatcaggcgaaaagattcaaagttcgcgtcggagatcgcaacacggaacaggaggaaggtggagaggcagtgcatgaggtcgaggtggtgataaaacataaccggttcaccaaggaaacctacgactttgatatagcagttttgcgcttaaagacacccatcacctttcgcatgaacgtggcaccagcctgtctgcctgaacgcgactgggctgagagcacattgatgacgcaaaaaacaggtattgtgagcggtttcggacgcacccatgagaagggacgccagtccacccgactgaagatgctggaggtgccctatgtcgatcggaactcatgcaaattgtcctcatcgtttatcattacacagaacatgttttgcgctggctacgacactaagcaggaggacgcatgtcagggggactccggcggacctcatgtaacgagattcaaagacacctattttgttacggggatcgtaagctggggggagggttgcgcacggaagggaaagtacggcatttataccaaagtgacagccttcctgaagtggatcgaccggtcaatgaaaacacggggcctaccaaaggccaagtcacatgctcccgaggttataacctcaagcccattgaag

SEQ ID NO: 10015 - DNA, 1464 bp, Artificial Sequence
  derived and/or modified sequence
atgggtagacctctgcacctcgtgctgctctcagcctccctggccggacttctccttttgggagaaagcctctttattcggcgagagcaggctaacaacatcctggcccgggtgaccagagcaaactcgttcctggaagaaatgaaaaagggacacctggaacgcgagtgcatggaggaaacttgttcctatgaagaagcgcgggaagtgttcgaagattcggataagactaatgaattctggaacaagtacaaggatggagatcaatgcgagacttcgccctgtcagaatcaggggaagtgcaaggacggactgggagaatacacgtgcacctgcctggaggggttcgaagggaagaactgtgagctgttcactcgcaaactttgttcgctggacaacggagactgtgaccaattttgccatgaagaacaaaactccgtggtgtgctcatgcgcacgcggctacaccctggcggacaacggaaaggcgtgcatcccgactggcccttacccgtgcggcaagcagactctggaacgccggaagagatccgtggcccaagccacttcctcgtcgggagaggcaccagactcaatcacttggaagccgtacgacgcagcggacctcgatccgactgaaaacccgttcgatctcttggatttcaatcagacgcagccggagcggggcgacaataacctgactcggatcgtgggaggacaggaatgtaaagacggtgaatgcccatggcaggcactgctgatcaatgaggagaatgagggattttgtgggggaacgatcctgtccgagttctacatcctgaccgccgcacattgcctgtatcaagccaagcggttcaaggtgcgggtgggggaccgcaacaccgaacaggaagaaggaggcgaagcagtgcatgaagtcgaggtggtgatcaagcataaccgcttcaccaaggaaacctacgacttcgatatcgcggtgctgcggctgaaaactcctattacctttcggatgaatgtcgcccctgcatgtctccctgagagagactgggcagaatcgaccctcatgactcaaaagaccggaatcgtgtcgggtttcggtcggactcatgagaaaggtaggcaatctaccagactgaagatgctcgaggtcccgtacgtggatcggaactcatgtaagttgtcatcgagcttcatcattacccaaaacatgttctgcgcaggctacgatactaagcaggaagatgcttgccaaggggactctggcggaccgcacgtgacccggtttaaagacacttacttcgtcactggaatcgtgtcatggggggaggggtgcgcgcgcaaggggaaatacggaatctacactaaggtcactgcattcctgaagtggatcgaccggtccatgaaaactcgcggcctccctaaggccaagagccacgccccggaagtgataacgtcgagcccacttaag

SEQ ID NO: 10016 - DNA, 1464 bp, Artificial Sequence
  derived and/or modified sequence
atgggcaggccactccacctggtcctgctgagcgctagcctcgcgggcctgttgctgttgggagaaagcctgttcattcgcagggagcaggctaacaatatcctggcccgtgttacccgagccaattcttttctggaagagatgaaaaaaggtcacctggaacgcgagtgcatggaagagacttgcagttacgaagaagctcgcgaggtcttcgaagactcagacaaaactaatgagttctggaataaatataaagacggtgaccagtgtgaaacttcaccatgtcaaaatcagggaaagtgcaaggatggcctcggagagtacacctgcacatgtctggagggttttgagggcaagaactgtgagctattcacgcgtaagttgtgctccctggataatggagattgcgatcagttctgccacgaggagcagaactccgtggtgtgtagctgcgcgcgcggttacaccctggcagacaatggcaaggcatgtatcccgaccggtccttatccgtgcggtaagcaaaccctggagagaaggaaaagaagcgtcgcacaagctactagctcctccggagaggctccagattccatcacctggaagccttatgatgcagccgatctggatccaactgaaaatccattcgaccttttggattttaatcagacccagcccgaacgtggcgataataacctcacccgcatcgttggcggccaggaatgtaaggatggcgagtgtccatggcaggcgctgttaattaacgaagagaacgaagggttttgcggcggtacaatactctcggagttttatattctgacagcagctcactgcctttaccaggccaaacgctttaaagtgcgcgtcggtgaccgcaataccgagcaggaggagggcggtgaggccgtccatgaggtggaggtcgttattaaacacaacaggttcaccaaggaaacatacgatttcgacattgctgtactgcgcctgaaaacgccgatcacgtttcgcatgaacgtggctccggcatgtctgcctgaacgcgactgggctgaatccaccctgatgacccagaagaccggcattgtgagcggtttcggacggacacacgagaaaggccgtcagagcacccggctgaagatgcttgaggtgccgtacgtcgaccgcaatagctgtaagctctcttcatcctttattatcacccagaatatgttttgcgcaggctacgacacgaagcaggaagatgcgtgccagggagattctgggggcccacacgttaccaggttcaaggacacatactttgtgacgggaatcgtttcttggggggagggatgcgcaaggaagggtaaatacggtatatatacgaaggtgacagcatttctaaaatggatcgaccgcagcatgaagacccgcgggctcccgaaggcaaagtcccacgcaccagaagttataacgtctagcccgctgaag

SEQ ID NO: 10017 - DNA, 1464 bp, Artificial Sequence
  derived and/or modified sequence
atggggcgaccattgcacctggtcctgctcagtgccagcctggccggtctgctactcttaggagagtccttattcatccggcgagagcaagcaaacaacatcctagccagggttacgagggcaaacagcttcttggaggagatgaaaaaaggccaccttgagcgtgagtgcatggaagaaacgtgctcatacgaggaagcacgggaagtgtttgaggatagcgacaaaactaacgagttctggaataagtataaagatggagaccaatgcgagacaagtccgtgtcaaaatcaaggcaaatgcaaggacggcctgggagagtacacttgcacctgtctggagggattcgaaggaaaaaactgtgaactgtttacaaggaagctgtgtagtttggacaatggagattgcgatcaattctgccatgaagagcaaaatagcgtggtgtgtagctgcgctaggggatatacactggctgacaatggtaaagcttgcattccaaccggcccatatccctgcggcaagcagacgctggagcgcaggaagagaagcgtggctcaggccacttcttcttcaggggaggcccccgattccatcacttggaagccttacgacgcagccgatctcgacccaactgaaaatccttttgatctgcttgatttcaatcagacccagcctgagcggggcgataacaatcttacccgtattgtcggaggtcaagagtgtaaggatggcgagtgcccctggcaagctttgttaatcaatgaagaaaacgagggattctgtggggggacaattcttagcgagttctacattcttaccgccgcacattgcctgtatcaggcaaagagatttaaagtaagggtgggtgataggaacacggagcaggaagagggaggtgaagccgtccatgaggtcgaggtggtgattaaacacaacagattcaccaaggagacctacgacttcgacattgcagtcctgaggctcaaaacccctatcactttccgcatgaacgtagcaccggcctgtttaccagaacgggattgggcagaatctacactcatgacgcaaaagaccggaattgtcagtgggttcggaagaacccacgaaaaaggaaggcagtccacacggctgaaaatgttggaggtgccttacgtcgatcgaaacagctgtaaactgagctctagctttatcatcacacagaatatgttttgtgctggatatgacaccaagcaggaggacgcgtgtcagggagactcagggggccctcatgtaaccaggttcaaggatacttatttcgtgacaggaatcgtgagctggggggagggttgtgcccggaaggggaagtacggtatttacacaaaagtgacggccttcttgaagtggattgaccggagtatgaaaacgagaggcctcccaaaagctaagagtcacgctccggaagtgattaccagctcgccgctgaaa

SEQ ID NO: 10018 - DNA, 1464 bp, Artificial Sequence
  derived and/or modified sequence
atgggacggccactgcatcttgtcctactatctgcctcgctcgctggtctgctgctcctcggggaatccttgttcatccgccgtgaacaggccaacaatatacttgcgcgagtcacaagggctaatagcttcctggaagagatgaagaaaggccatctggagagggaatgcatggaagagacttgtagctacgaggaggcccgtgaggtttttgaggacagtgacaagacgaatgaattctggaataagtacaaggatggtgaccaatgtgaaacatctccatgtcagaaccaaggtaagtgcaaggacggtctaggcgagtatacatgtacttgccttgagggctttgaaggaaagaattgcgagctgtttactcgtaaactgtgctctctggacaatggcgactgcgatcaattttgtcatgaggagcagaactccgtcgtgtgttcgtgtgcccggggttatacattggcagacaacggcaaagcctgcatccctacggggccatacccatgtggtaaacagacgttggagcgacgcaagcgaagtgttgcacaggcaacctcgtcctctggcgaggccccagactctataacctggaaaccatatgacgcggctgacttagatccaactgaaaacccattcgatctactggatttcaaccagacgcaaccggaacgaggagataacaatctgaccagaatcgtgggtggacaggaatgcaaggacggggagtgtccctggcaagcgcttctaataaacgaagagaacgagggcttctgcggaggaacgatcttgtcggagttttacatcttaacggctgctcattgtctttatcaggccaagcgattcaaagttcgcgttggggaccgtaacacagaacaagaagaaggcggcgaggcagtccatgaagtggaggtcgtcattaagcataaccggtttacgaaagagacatatgattttgacatagctgttttgcggcttaaaaccccaataacattccgaatgaacgtggctcctgcatgtctgccagaacgggactgggcagaatcaacactgatgacccaaaagaccggcattgtgtccggattcggacgtacacacgagaaaggcagacaaagtactcgtttgaagatgctggaggtaccttatgtcgaccgcaattcgtgtaaactatcttcgtccttcattattacccagaacatgttctgcgccggatacgacacaaagcaggaagatgcgtgccaaggcgacagtggggggccgcacgtgacaaggtttaaggatacgtactttgtcacgggtatcgtctcgtggggggaggggtgcgcgaggaaaggcaaatacgggatctatacgaaggtgactgccttcctaaagtggatcgatcgttctatgaagacgcgcggacttcctaaagcgaagagccatgctccggaagtcataacatcatctccactcaag

SEQ ID NO: 10019 - DNA, 1464 bp, Artificial Sequence
  derived and/or modified sequence
atggggcgccccttgcatctggtcctgctgtctgcgtcccttgccggcctgcttttgcttggcgaaagtttgtttattaggagagagcaggccaataacatactggctcgggtcactcgggcaaactcgtttctggaggaaatgaagaaaggacatctcgagcgggaatgtatggaagagacttgctcctatgaggaggcaagggaggtatttgaggattcagataaaacaaatgagttctggaacaaatacaaggacggtgaccagtgtgagacctcaccatgtcagaatcaaggcaagtgtaaagacggactgggagagtacacttgtacctgtttggaaggatttgaaggaaaaaattgtgagttatttactcgcaagctctgtagcctagacaatggggactgcgatcagttctgtcacgaagaacagaattccgtagtgtgctcttgtgcgaggggctatacacttgccgacaacggaaaagcctgtatcccgacggggccctatccctgcgggaaacagactctcgaacgccgcaaacgctccgtggcacaggccacatcaagttctggcgaagcccccgactcaatcacttggaaaccctacgacgctgcagatctagatcccactgagaaccctttcgatctgctggatttcaaccaaacacaacctgagaggggagataataacctcactcgaatagtgggcggtcaggagtgcaaggacggcgagtgtccatggcaggctctgctgatcaacgaggagaacgagggtttttgcggcgggaccattctctcagagttctatattttgacagcggctcactgcctgtaccaggcgaaaaggttcaaggttcgcgttggggacagaaacacagaacaggaagaaggaggggaagctgtgcacgaggtcgaggtcgtcataaagcacaacaggtttacaaaagaaacctacgacttcgacattgcagtgctaaggctgaaaaccccaatcaccttccgcatgaatgtggctcctgcctgtctcccagaacgcgattgggccgagagtacgttaatgactcagaagacaggcatcgtgtccggtttcggcaggacacacgagaagggccgccagagcaccaggctgaaaatgctggaagtgccatacgttgatcgcaactcttgcaagctgagttccagcttcatcataactcaaaatatgttttgtgccggatacgatactaaacaggaagatgcctgccagggggatagcggaggtcctcacgtgactcgattcaaagacacctacttcgtcacgggcatcgtctcctggggagagggctgcgccaggaaagggaagtacgggatctacactaaggtgaccgcgttcctcaaatggatcgataggtccatgaaaacacgtggacttcctaaagctaagtcacacgcaccagaggtgataacgtcctcccctctcaaa

SEQ ID NO: 10020 - DNA, 1464 bp, Artificial Sequence
  derived and/or modified sequence
atgggaaggcccctgcatctggtcctcctttccgcgtcgcttgctggattgctgctgcttggcgaatcgcttttcatcagaagagagcaggcaaacaatatacttgccagggttaccagggccaactcgtttctggaggagatgaaaaaaggccatttggagagagagtgtatggaggaaacttgttcctacgaagaagcacgggaagtgtttgaggattcagacaagaccaatgagttttggaacaagtacaaagatggagatcaatgtgagacttctccttgtcaaaatcagggtaaatgcaaggacggattgggtgaatacacttgcacttgtcttgaggggtttgaaggcaaaaactgtgaactctttactcgcaagctgtgtagcttggataatggagactgtgaccaattttgtcatgaggaacaaaactcggtcgtgtgctcatgtgcaagagggtacacccttgcggacaatggcaaggcatgtattccgactggaccatacccatgtggaaaacagacgctggaacggcggaaaagaagcgtggctcaagcgacttcatcctcgggtgaagcaccggattccatcacttggaaaccatatgacgccgccgatcttgatcctactgagaatccatttgacctgctggactttaaccaaacccaacccgaaagaggcgacaacaatctgactagaatcgtgggtggacaagaatgtaaggatggcgaatgcccttggcaggcgttgttgataaacgaggagaacgaaggcttttgtggggggaccattctgtcagaattctacattctgaccgcagctcactgcctctatcaggccaagcgcttcaaggtgcgggtgggtgatcggaacaccgaacaagaggaaggtggagaagcagtccacgaagtcgaggtcgtcataaagcataaccggttcaccaaggaaacctacgatttcgatatcgcagttcttagacttaagacccccattaccttccgtatgaacgtggcacctgcctgcctgccagaacgggactgggcggaaagcaccctgatgactcaaaagactgggatagtgtctggttttggtcgaactcatgaaaaaggtcggcagtccacgcggctcaaaatgctggaagtgccatacgtggatcgcaattcgtgcaaactttcatctagcttcataatcactcaaaacatgttctgcgcgggatacgatactaagcaggaagatgcatgccaaggggattccggaggaccgcatgtcactagatttaaggatacctacttcgtgacgggcattgtgtcatggggtgaagggtgtgcacgaaagggaaagtacgggatctacaccaaggtgaccgcatttctgaaatggattgaccgctccatgaaaaccaggggtttgcctaaggcaaagtcgcacgcgcctgaggtcattacctcgtcgcctcttaag

SEQ ID NO: 10021 - DNA, 1464 bp, Artificial Sequence
  derived and/or modified sequence
atgggccgcccgcttcacttggtcctgctgtcagcctccttggcaggactgctgctgctgggcgagagcctgtttatcagaagagaacaggccaataacatccttgcacgggtgactcgggcgaacagtttcctggaagagatgaagaagggacacctcgaacgcgagtgcatggaggaaacctgtagttacgaagaagcccgggaagtctttgaggactcagataagactaatgagttctggaacaaatacaaggatggagatcaatgcgaaacttcgccgtgccaaaatcagggaaaatgcaaagatggattgggtgagtacacctgcacctgcctcgaaggatttgagggaaagaattgtgagttgttcactcgcaagctctgctcattggacaatggtgactgcgaccagttctgtcacgaagaacagaacagcgtggtctgctcatgcgcccgcggatacaccctggccgacaatggcaaggcttgcattccaactggcccttacccttgcggaaagcaaaccctcgaacgccgtaaacgctccgtcgcccaggctacctcatcatcgggcgaggcgcccgattccattacttggaagccgtacgacgccgcagatctggacccaaccgagaacccgttcgacctcctggacttcaaccagacccagccggaaaggggagacaacaatctgactcgaatcgtaggaggacaggaatgtaaggacggagaatgcccatggcaggctctgctcatcaacgaagaaaacgaagggttctgcggggggaccatcctctcggagttctatatcctgacggcggcccattgcctgtaccaagcaaaacggtttaaagttcgcgtgggcgaccgcaacactgaacaagaagaaggcggggaggcggtgcacgaagtggaggtggtgatcaagcacaaccggttcaccaaggaaacctacgatttcgatatcgccgtgctgcgcctgaaaactccgatcaccttcagaatgaacgttgctcccgcgtgcctgccagaacgggactgggcagagtcgacccttatgacgcaaaaaactggaatcgtttcaggattcggacgcactcacgagaagggcagacaatccacccgcctgaagatgctcgaagtcccttacgtggatcgcaattcgtgcaaactgtcgtcctcattcatcatcactcagaatatgttctgtgcgggatacgataccaagcaggaggacgcctgtcaaggagattcaggaggaccgcacgtcacccgcttcaaggatacctactttgtgaccgggatcgtgtcctggggcgagggatgtgcgaggaaggggaaatacggcatctacacgaaggtcaccgcattcctcaaatggatcgaccgcagcatgaaaacccgcggcctgccaaaggccaaatcgcacgcaccagaagtcatcacctcttcgccacttaag

SEQ ID NO: 10022 - DNA, 1464 bp, Artificial Sequence
  derived and/or modified sequence
atgggacgacctcttcatttggtgctgctgagcgccagccttgctggactcctgctgctgggcgaatcgctgttcatcaggagagagcaggcaaacaacatcctggcaagagtcactagagcgaactcatttctggaagagatgaagaaaggacatcttgagcgtgaatgcatggaggaaacctgttcgtacgaagaagcaagagaagtgttcgaagattccgataagaccaatgagttttggaacaagtacaaggatggtgaccagtgcgagacgtccccttgccaaaaccaagggaagtgtaaggacggcctgggggaatatacctgtacctgtctggagggattcgaaggtaagaactgtgaactttttactcgtaagctgtgttcactggataacggtgattgtgaccagttctgccacgaggagcagaattcggtggtctgttcgtgcgcgcgtggctacaccctggcagacaatggaaaagcctgcattccgactggcccttacccctgtgggaagcaaactctggaacgacgtaagaggtctgtggcgcaagccacctcgtcgtccggagaagcaccagattcgattacttggaagccatacgatgcggccgatcttgatccgaccgagaacccttttgaccttctggatttcaaccaaacccagccggagagaggagacaataaccttactcgaatcgtgggtggtcaagagtgtaaagacggcgaatgcccttggcaggcacttttgattaacgaagaaaacgaaggcttttgtggtggcaccatactttcggaattctacatcctcacggcggcacactgtctttaccaggcaaagagatttaaggttcgcgtcggcgatcgtaacacggagcaagaagagggaggggaggcagtccacgaagtggaagtggtgatcaaacataatcggtttaccaaggagacttacgattttgatattgcagtgttgcgccttaagacccctattacgtttcgcatgaacgtcgcgcctgcgtgtctgccggaacgcgattgggcagaaagcactctcatgacccaaaaaaccgggattgtgtcaggttttggacggacccacgaaaaagggcgacaaagcacgcgcctgaaaatgcttgaggtgccatacgtggacagaaactcttgcaagctctcgagctccttcatcataactcagaacatgttttgtgcaggttacgatactaagcaggaagatgcatgccaaggcgactccggcggacctcatgtgactagatttaaggacacctacttcgtgaccggaattgtcagctggggcgagggttgtgcaagaaaaggaaaatacggaatatacaccaaggtaaccgcatttcttaagtggattgaccgctcgatgaaaacgcgtggactccccaaggcgaagtcacacgcacctgaagtcataacctcgtcgcctctgaag

SEQ ID NO: 10023 - DNA, 1464 bp, Artificial Sequence
  derived and/or modified sequence
atgggccgaccgctccatctggtcctgctgtccgcctcgcttgccggactgctcctgttgggagagtccctcttcatccggcgcgagcaggccaataacattctcgcgagagtgactcgcgcgaactcattcctggaagaaatgaagaagggacatttggagagagaatgtatggaagagacttgctcgtacgaagaggctcgcgaagtgtttgaggattcggacaagaccaatgaattctggaacaaatacaaggatggcgaccagtgcgaaacgtcgccgtgccagaatcagggcaaatgcaaggatggactcggggagtacacctgcacttgcctggaaggattcgaaggaaaaaactgtgaactgttcacccggaaactgtgctcccttgacaatggggattgtgaccaattttgccatgaagaacagaattcggtggtgtgtagctgcgcacgcggatacaccctggcagacaacggaaaggcctgcattcctactgggccttacccgtgcggaaagcagactctcgaacggcggaagagatcggtggcacaggcgacttcgtcgagcggagaagccccggattccatcacctggaaaccgtacgatgccgcggacctggacccaacggaaaacccgttcgacctgttggacttcaaccaaactcagcctgaaagaggtgacaacaacctcacccggattgtgggaggtcaggagtgtaaggatggagaatgcccatggcaagcactcctgatcaacgaggagaatgagggcttctgcggcggcactatcctgtctgaattctacatccttactgccgcgcattgcctctaccaagccaagcgcttcaaggtgcgcgttggagatcggaacactgagcaggaggagggcggagaagctgttcacgaagtggaggtcgtgattaagcacaatcggttcactaaggagacttacgatttcgacatcgcagtcctgaggctgaaaaccccaatcaccttccggatgaacgttgccccggcctgtctgccagaacgcgactgggccgaatccaccctcatgacccaaaaaactggtatcgtctccggatttggacggacccacgaaaagggtaggcaatccactcggctgaagatgctggaagttccttacgtggatagaaactcctgcaagctgagctcctcattcatcattactcaaaacatgttctgtgcgggatacgacactaagcaggaagatgcttgccaaggggattccggcggcccgcacgtgaccagattcaaggacacctacttcgtgactggcatcgtcagctggggcgagggctgcgcgcggaagggcaagtacggcatttacaccaaggtcaccgcgtttctcaagtggatcgatagatcaatgaaaaccagaggactgcctaaggccaaatcgcatgctccagaagtgataacttccagcccactgaag

SEQ ID NO: 10024 - DNA, 1464 bp, Artificial Sequence
  derived and/or modified sequence
atgggtagaccgcttcatctggtgctcctgtccgcctccctggcgggactgctgctcctgggcgaatcgctgtttatccggcgcgagcaggctaacaatatcctggctagggtcacccgggccaactcattcctggaggagatgaaaaagggccacctcgaacgggagtgcatggaagagacttgctcgtacgaggaagctcgggaagtctttgaggactcagacaaaaccaacgaattctggaacaaatacaaggatggagatcaatgtgaaacttccccatgccagaatcaaggaaagtgtaaggacgggctgggagaatacacttgcacgtgtctggagggcttcgagggcaagaattgcgaactgttcacccggaagctgtgttcgctggataatggcgattgcgatcaattctgtcacgaagagcaaaactcagtggtgtgttcctgcgcgcgcggatacaccctcgctgataacgggaaggcgtgcattccgactggaccgtacccttgcggaaagcagaccctggaacgcaggaagcgctcagtggcacaggcgactagttcatcgggtgaagccccagattccatcacctggaagccttacgatgcggcggacctggacccaactgaaaacccattcgatctcctcgactttaatcaaactcaaccggagcgcggagacaacaacctcaccagaatcgtgggcggacaggaatgtaaggacggagagtgcccatggcaggcgctgcttatcaatgaagaaaatgaaggtttttgcggcgggaccatcctgtccgagttttacatcctgaccgcggcccactgtctctaccaggccaaacgctttaaggtgagagtgggggatcggaacactgaacaggaagagggcggtgaggcagtgcatgaagtggaggtcgtgatcaagcacaacaggttcactaaagaaacctacgatttcgacatcgctgtcctccgcctgaaaacgccaatcacgttcaggatgaacgtggcccctgcctgcctcccagagcgcgactgggccgaatcaactctcatgactcagaaaaccggaatcgtctcgggattcggccggacccatgaaaagggtagacaatctactaggcttaagatgctggaggtgccctacgtggatcgcaactcttgtaaactgtccagctcgtttatcattactcagaatatgttttgcgctggatacgataccaagcaggaggacgcctgccaaggagattccggaggcccacacgtcaccagattcaaggacacttatttcgtgactggaatagtctcatggggcgagggctgcgccaggaaggggaaatacggaatctacaccaaggtgaccgccttcctgaagtggatcgataggtccatgaaaactcggggactgcctaaggcgaagtcacacgcaccggaagtgatcacctcaagcccgctgaag

SEQ ID NO: 10025 - DNA, 1464 bp, Artificial Sequence
  derived and/or modified sequence
atggggcgccccctccacctcgtcctactgagcgcgagcctggctgggctgctgctcctcggggaatccctgtttatcagaagagagcaagcaaacaacatcctggctcgggtgactcgggcaaactcatttctagaggaaatgaagaaaggacatctggagcgtgaatgtatggaagaaacctgtagttacgaagaggcgagagaagttttcgaagattcagataaaactaacgagttttggaacaagtataaggacggtgatcagtgcgagacatccccatgtcagaaccagggcaaatgtaaagatggtcttggtgaatatacctgcacatgtctggaaggattcgagggaaagaattgcgaactgtttactcggaaactctgctcattggataacggagactgcgaccagttttgccacgaagaacaaaactccgtcgtgtgttcttgcgccaggggctacactctggcggataatggaaaggcctgtatccctacaggaccgtacccctgtggtaaacagacacttgagcggcgaaagaggtctgttgctcaagccacatctagctcaggggaggctcctgactccatcacgtggaaaccctatgacgcagccgatctcgacccgaccgagaatcccttcgatctgcttgattttaaccagactcaaccagagcggggcgacaacaacctcactcgaatcgtgggagggcaggagtgcaaggacggcgagtgcccttggcaggccctcctcattaatgaggagaatgagggattctgtggcggcacaatacttagtgagttttacatcctcacagctgcccactgcctgtaccaggcaaagcgatttaaggttcgcgtgggcgacaggaacactgaacaggaggaaggaggagaggctgtccacgaagtggaagtcgtgatcaaacacaaccgcttcactaaagaaacttatgactttgatatcgccgtcctaaggttgaagactcccataacctttcgcatgaatgtggccccggcttgcctgccagagcgtgattgggccgagtcaaccctcatgacacaaaaaacaggtattgtgtcgggtttcggacggactcatgagaagggacgtcaatcaaccagactgaaaatgttggaagtcccatacgtggacaggaatagctgcaagcttagtagtagcttcattataacccagaacatgttttgtgccggatacgataccaagcaagaggatgcatgccagggagacagtgggggcccccatgtgacacgcttcaaggacacatatttcgtgaccggaatcgtgtcctggggggagggatgcgccagaaagggcaagtacgggatttacactaaggtcactgcctttctgaagtggatagaccgcagtatgaagaccagaggcttgccaaaggccaaaagccatgcaccggaagtgatcaccagttcgccccttaag

SEQ ID NO: 10026 - DNA, 1464 bp, Artificial Sequence
  derived and/or modified sequence
atggggcgcccactgcacctggtccttttgtccgcctccctggccggactcctgctgttgggcgagagcctgttcatcagacgcgaacaagccaacaacatccttgcacgggtgactagagcaaattcgttcctcgaagaaatgaaaaaaggacatttggaacgcgaatgtatggaggagacttgttcatacgaggaagctcgggaggtgttcgaagatagcgacaagaccaacgagttctggaacaagtataaggatggagatcaatgcgaaacctcgccgtgtcagaatcagggcaagtgtaaggatggactgggagagtacacttgcacgtgcctcgagggattcgagggaaaaaactgcgaactgttcactcgcaagctgtgctctcttgacaacggagattgtgaccaattttgccatgaagagcaaaactcagtggtgtgctcgtgcgcgagaggatataccctggcagataatggaaaggcctgcatcccgaccggtccttacccatgtggcaagcagactttggaacgcagaaagcggagcgtggcccaggcaacctcgtcttcgggagaagcaccggattccatcacctggaagccatacgatgctgccgatctggaccccactgagaacccatttgaccttctggacttcaatcagacccagccggagagaggagacaacaacctcactcggatcgtgggcggacaggagtgtaaggacggcgaatgcccctggcaggccctgcttatcaatgaggaaaatgaaggattctgcggaggaactattctgagcgagttctacatcctgaccgccgctcactgcctttaccaagctaaacggtttaaggtgcgcgttggggaccgcaataccgaacaggaggaaggaggcgaggctgtgcatgaagttgaggtcgtgatcaaacataaccggttcactaaagaaacctacgacttcgatatcgcggtacttagacttaagactccgatcactttcagaatgaacgtggccccagcatgccttcctgaaagggactgggctgagagcaccctcatgacccaaaaaactggtatagtgtcggggttcggacgcacccacgagaaaggacggcagtcaactcgactgaagatgctcgaagtgccctacgtggaccggaactcctgcaagctctccagctcattcatcattacccagaatatgttctgtgctggttacgacaccaagcaggaggacgcttgtcaaggagactcgggaggaccccatgtgaccagattcaaggacacctactttgttactggcattgtctcgtggggcgaaggatgtgcccgcaaaggtaaatacggtatctacaccaaggtcaccgcctttctgaagtggatcgatcggtcaatgaagactcgggggctgccaaaggccaagagccatgcccctgaagtcatcacgagcagtccgttgaag

SEQ ID NO: 10027 - DNA, 1464 bp, Artificial Sequence
  derived and/or modified sequence
atggggcgtccactgcaccttgtactgctgagcgcctcccttgcaggactcttgttgctgggagaatccttgttcatcaggagggaacaggccaataatatcctggctagggttactagagctaatagctttctggaggagatgaaaaaaggacacctcgagagggagtgtatggaggagacctgcagctatgaggaggcaagggaagtcttcgaagactcagacaaaacaaacgaattttggaacaaatataaagacggagaccagtgtgaaacatctccctgtcaaaaccaaggaaaatgcaaggacgggttaggagagtacacctgcacctgccttgagggcttcgaaggaaaaaactgcgaactgtttaccagaaaactgtgttcccttgataacggtgattgcgatcagttctgccacgaggagcaaaatagcgtggtgtgcagctgtgctcggggctacacattggcggataacggaaaggcatgcataccaaccggtccatacccttgcgggaaacagactctcgaacgtcgaaaaagaagtgttgcacaagccactagtagctcaggcgaagcacctgatagtatcacctggaaaccctatgatgctgccgatcttgatcccacagaaaacccatttgacctcctggactttaaccagacacagccagagagaggtgacaataatctgactaggatcgtgggcggacaggagtgtaaagacggagaatgtccatggcaggccctcctcattaacgaggagaacgaaggattttgtgggggtacaattcttagcgaattttatatcctgaccgcagcgcactgtctgtatcaggcgaaaaggtttaaggtacgcgtgggcgacaggaacactgaacaagaagaaggaggcgaagctgtgcacgaagttgaggtcgtcatcaaacataacagatttacgaaggagacatatgatttcgacatcgcagttctacgcctgaagacaccaattaccttcagaatgaacgttgccccagcctgtttaccagagagagattgggccgagagcactctcatgacacagaaaacagggatagtgagcgggtttggaaggactcatgaaaaaggcagacagagcaccaggctgaaaatgcttgaagtcccttacgtcgaccgcaactcttgcaaactgtcatctagctttattatcacccagaacatgttctgcgcaggctatgataccaagcaagaggacgcatgtcagggagatagtgggggtcctcatgtcacaagattcaaggatacctacttcgttacaggaatagtgtcctggggagaagggtgcgcaaggaagggcaagtacggcatttacactaaagtgactgctttcttaaagtggatcgacagaagcatgaagaccagaggactgcctaaagccaaaagccacgcgccagaggttatcacaagctctcccttaaag

SEQ ID NO: 10028 - DNA, 1464 bp, Artificial Sequence
  derived and/or modified sequence
atgggaaggcccctgcatcttgttctgctgagcgcctcgctcgccggcctccttctcctaggggagagtctcttcattcggcgggagcaggcaaacaacattctggcacgagtcacccgggctaacagcttcctggaagagatgaagaagggccatctggagcgcgagtgcatggaggagacctgctcttatgaggaggcacgggaagtgtttgaagattcagacaaaacaaatgagttctggaataaatacaaagatggcgatcagtgcgagacgtctccatgtcagaaccaaggaaaatgcaaggatgggttgggggagtatacctgcacgtgtctagaggggttcgagggcaagaattgtgaactatttacccgaaaactgtgcagcctcgataacggggactgtgaccagttctgccatgaggagcagaattctgtggtttgctcttgcgccagagggtatactcttgcagacaatgggaaggcttgtatccccacgggaccttacccgtgcgggaaacagacactggaacgacggaagcggtcggtggcacaagccacgagcagctccggggaagcaccagactctataacctggaagccgtacgatgctgccgacctggaccccacagagaaccccttcgacttgctggactttaaccagacacagcctgaacggggcgataataaccttacaaggatcgttggaggacaggaatgtaaagatggtgaatgcccctggcaggctctgctgattaacgaagaaaatgagggcttttgtgggggaaccatcttgtctgaattctacattttaaccgcagcgcattgtctgtatcaggcgaaaagattcaaagtgagagtaggcgataggaataccgaacaggaagaggggggcgaagccgtgcacgaggttgaggttgtcatcaagcacaataggtttacgaaagagacatatgattttgacattgccgtcttaagactaaaaaccccaattactttcagaatgaatgtggcgcctgcgtgcctgccagagagggattgggccgaatcaactctaatgacccagaaaacagggattgtcagcggtttcggccggactcacgaaaaaggacggcagagcacaagactcaagatgctcgaggtcccctatgtggaccgaaactcttgcaagctaagttcgtcgttcatcattacccagaatatgttttgcgctggttatgatacaaagcaagaagatgcatgccaaggtgatagcggtggcccacacgtcacgcgcttcaaagatacctattttgtgacagggattgtgtcctggggtgaaggatgcgcccgcaagggaaaatacgggatttatactaaggtgactgccttcttgaaatggatcgacaggtctatgaagacaagaggcttacctaaggccaagagccatgccccagaagtcatcacttcatcccccttgaag

SEQ ID NO: 10029 - DNA, 1464 bp, Artificial Sequence
  derived and/or modified sequence
atgggcaggcctcttcacctcgttctgcttagcgcttctctagccggattgctgctgctcggcgaatcattattcattcgccgagagcaggctaataacatcctcgctcgggtcacccgcgccaactcattccttgaggagatgaagaaggggcatttagagcgcgagtgcatggaagagacgtgcagctacgaagaggcccgcgaggtgttcgaggactcggataaaacgaacgaattttggaacaagtacaaggacggagatcagtgcgagacttccccttgccagaatcaggggaagtgcaaggacggactgggtgagtatacctgtacctgtttggagggcttcgaagggaagaattgcgaattattcacaaggaaattgtgttcattagacaatggagactgtgaccagttctgccacgaggagcaaaactcggtcgtctgctcctgcgcaagggggtacacgctcgccgataatggtaaagcctgtatccctacggggccctatccatgcggaaaacagaccctggagcgccgaaagagatccgtggcccaggccacatcctctagcggggaggctccagactcaatcacctggaaaccctatgacgcggcagatctggatcctacagagaatccctttgacctcctggactttaaccagactcaaccagaaaggggcgataataaccttacgcgcatcgtgggcggccaggagtgcaaggatggggaatgtccgtggcaggcccttctgattaatgaggaaaatgagggattctgtggcggaactatcctgtccgagttctatatcttgactgccgctcattgcctatatcaggcaaagcggttcaaggtgcgcgtgggcgacaggaatactgagcaggaagaaggaggagaggctgtgcacgaagtggaggtggtcattaagcacaacaggtttacaaaagagacgtatgacttcgatattgctgtgcttcgcttaaagactccaattacttttcgtatgaacgtcgcgcctgcctgcctccctgaacgagactgggccgaatccacgctgatgactcagaagaccggcatcgtgagcggattcgggcgcacccatgaaaagggcagacagtccacaagactgaaaatgctggaagtcccctacgttgaccgaaattcctgcaagctgtcatcttcttttatcattacccagaacatgttttgcgccggctatgacaccaagcaggaggacgcttgccaaggcgattccgggggccctcatgtcacccgcttcaaagatacctacttcgtgaccggcatcgttagctggggagagggttgcgctagaaagggtaagtacggcatctatactaaggtgaccgccttcctgaaatggatcgaccgtagtatgaaaacccggggcctgccaaaagctaaaagtcatgcacccgaggtcattacgagttcaccgctgaag

SEQ ID NO: 10030 - DNA, 1464 bp, Artificial Sequence
  derived and/or modified sequence
atgggaaggccccttcacctcgtgctcctgtccgcatcgctggcagggcttctgcttctgggagagtccctgttcatccgaagagaacaagcaaacaacattctcgcacgggtgacgcgtgcaaactcattcctcgaagaaatgaagaagggacatctcgaacgcgagtgcatggaggagacttgttcgtatgaagaagcacgggaagtctttgaagatagcgacaaaaccaatgagttttggaacaagtacaaggatggtgatcaatgtgagacgtccccgtgtcaaaatcaaggaaagtgtaaggacggattgggagaatacacctgtacttgtctcgagggatttgaaggtaagaactgcgaactcttcacgaggaaactctgttcccttgataacggagactgtgatcagttctgtcacgaggagcagaactcggtggtgtgttcgtgcgcccgaggctacaccctggccgataatggaaaggcatgcatcccaactggcccatatccgtgcggcaagcagactcttgaacgccggaaacgctccgtcgcacaggcaactagctcctccggcgaagctccagattcgatcacctggaagccatacgacgcagcagacctggatcctaccgaaaacccttttgatcttttggactttaatcagactcaaccagaacgcggcgataacaatctgaccagaatagtcggaggtcaagaatgcaaagacggggaatgtccttggcaggcactgttgataaacgaagaaaatgaaggcttctgtggcggaactatactgagcgaattctacattctgaccgcagcacattgcttgtaccaagcgaagagatttaaggtgcgtgtgggagatcggaatactgagcaggaagaagggggagaagcggtgcatgaagtggaagtggtgattaagcataaccggtttactaaggaaacctacgatttcgacattgcagtcctgagactcaaaacccctatcacgttccggatgaacgtggctccagcatgtctcccggagagagactgggcagaatcgacccttatgacccaaaaaactggtatcgtgtcgggttttggtcggactcatgaaaagggacgtcaatcaacccggctgaagatgctggaagtgccatacgtggatcgcaacagctgtaagctgtcgtccagcttcatcattacccagaacatgttttgcgcaggatacgacaccaagcaggaagatgcatgtcagggggacagcggaggaccccatgtcactcggtttaaggatacttacttcgtcaccggcattgtgagctggggcgaggggtgcgcaaggaagggtaagtacggtatttacactaaggtaaccgcattccttaaatggatagataggtcaatgaaaactcgcgggctgcctaaagcaaagagccatgctcctgaagtgattactagctcaccattgaag

SEQ ID NO: 10031 - DNA, 1464 bp, Artificial Sequence
  derived and/or modified sequence
atggggcggcctctgcatctcgtgctgttaagtgcaagtttggccggacttctcctcctgggggagtccttattcattaggcgtgagcaggcgaacaatatcttagcccgggtcaccagggccaactcattcctagaggagatgaagaagggacatctggagcgggaatgtatggaggagacatgctcctatgaagaggcccgcgaagtgtttgaggatagcgacaagaccaacgaattctggaacaaatataaggatggagatcagtgtgagactagtccatgtcagaatcagggtaagtgtaaagacggactcggcgagtatacctgtacctgcttggagggttttgagggaaaaaattgcgagctgttcactcgtaagttgtgctctctggataacggcgactgtgatcagttttgccatgaggagcagaacagcgtggtgtgctcctgtgctaggggttacactctggccgataatggaaaggcctgtattcctactgggccctacccttgcggcaagcagacgctggagagacggaagaggagcgtcgcccaagcaacctcttcttcaggggaggctcccgacagcatcacttggaagccttacgatgcagccgacttggaccctaccgaaaacccattcgatctcctagattttaaccagacccagccggaacggggcgataataatctgactcggatcgttggcgggcaggagtgtaaggacggggaatgtccctggcaggcgcttttaatcaacgaagaaaacgaaggattctgcggcggcactatcctctctgaattctacatcctcaccgctgctcattgcctctatcaggccaagcgcttcaaggtccgggttggcgaccgaaatactgagcaggaggaagggggcgaagccgtgcatgaggtggaagtcgtcattaagcacaaccgtttcacaaaagagacctacgactttgatatcgctgtgcttagacttaagacccctatcacgttccggatgaacgtcgcccccgcctgcttgccggagagggactgggccgagtccaccctcatgacacagaagacaggaattgtctctggcttcgggaggactcacgaaaaagggaggcagtccactagactcaaaatgttagaggtcccgtacgtcgatcgtaactcctgcaaactgtccagcagctttattattacccagaatatgttctgtgcaggctacgacaccaaacaggaggatgcttgtcagggagattctgggggcccacacgttaccaggttcaaagacacctatttcgtaaccggcatcgtgagttggggagaaggctgcgcccgtaagggcaagtacgggatatacactaaagtgaccgcattcctaaagtggattgataggagcatgaaaaccagaggcttgcccaaagcaaagtcccacgccccggaagtcataaccagcagccctctgaaa

SEQ ID NO: 10032 - DNA, 1464 bp, Artificial Sequence
  derived and/or modified sequence
atgggcagacccctgcatctcgtattgctgtccgcttcccttgcgggccttctcctcctgggggagtccctgtttataaggagagagcaggccaacaacatcctcgccagagtgactagagcaaactccttcctggaagaaatgaaaaaaggacacctcgagagagagtgcatggaagagacctgcagttatgaagaagcacgcgaggtcttcgaggactctgataagaccaacgagttttggaacaaatacaaagacggcgatcagtgtgagacgagtccctgtcagaaccaaggcaagtgcaaggacggcctcggagaatacacgtgcacctgccttgaggggttcgaggggaaaaattgcgaactgttcactcgcaagctgtgttcactggataacggagattgcgaccagttctgtcatgaagagcagaattccgtggtatgtagctgtgcacggggatataccctggccgataacggaaaagcatgcattccaaccggcccctatccctgcgggaagcagactctggagcgacggaaaagatcagtggcccaggctactagcagcagcggggaagctcccgatagtattacgtggaaaccatatgacgctgcggaccttgaccccactgaaaatccctttgatctcctggatttcaatcaaacccaaccagagaggggggacaacaacctcacgcgaattgtgggcgggcaggaatgtaaagacggtgagtgcccgtggcaggcactgcttataaatgaggaaaacgaaggcttctgtggtggaacgatactgtccgagttttatattctgactgctgcccattgtctgtatcaagccaagcgattcaaagttcgcgtcggcgacagaaatacagagcaagaagaagggggagaggctgtgcacgaagtagaagtcgttattaaacataaccggtttaccaaggaaacttacgatttcgacatcgctgtcctgagactgaaaacacctatcaccttccgcatgaacgtagccccagcatgtcttcccgaacgcgattgggccgagtccacattgatgactcagaaaaccggcatcgtaagcggcttcgggaggacccatgagaagggtcggcagtccactcgccttaagatgctggaagttccctatgtcgaccgaaattcatgtaaactgagcagcagctttattataacccagaatatgttctgcgcaggctatgatactaaacaggaggatgcttgccagggggactctggtggtcctcatgttacacgctttaaggacacctatttcgtaaccgggatcgtctcatggggagaaggctgcgcccgcaaaggaaagtacggaatttacaccaaggtgacggcttttttgaaatggatcgatcgctcaatgaaaacaaggggactcccaaaagccaagtcccatgcccctgaggtgattacctcaagtcccctgaaa

SEQ ID NO: 10033 - DNA, 1464 bp, Artificial Sequence
  derived and/or modified sequence
atgggcaggccattacacctggttctcttaagtgcttcattagctggactcctcttgctcggagagtcactatttattcgacgggagcaggcaaataacattctggcccgagtgacccgagccaactcattccttgaggagatgaagaagggccaccttgaaagggaatgcatggaagaaacttgttcatatgaggaggcacgcgaggtgttcgaggactctgacaaaaccaatgagttctggaacaaatataaggacggggaccagtgcgagacaagcccctgccaaaaccagggaaaatgcaaagatgggctcggcgagtacacctgtacgtgcctggaggggtttgagggaaagaactgcgagttgttcactcgtaaattgtgtagcctcgataatggtgactgtgatcagttttgccacgaggagcaaaactcggtggtttgctcgtgcgcgcgcggctatactctggccgacaatggcaaggcctgcattccaaccggtccgtatccctgcggaaagcagaccctggagcgtagaaagagaagtgtggctcaagctaccagttcgtcaggggaggcacctgactccatcacatggaagccttacgacgccgccgacctggatcctactgagaatccgttcgacttactggattttaaccagacccagcctgagagaggtgacaataacctgacgaggattgtgggcgggcaagaatgtaaggatggcgagtgtccttggcaagctctgctgatcaatgaggagaatgagggattctgtggaggaaccatcctttcggagttttatatattgaccgctgctcactgtctctatcaggccaaaaggtttaaagtgcgcgtgggagacagaaataccgagcaggaggagggcggggaggccgtacacgaggtggaggtagtgataaagcacaacagatttacaaaagagacctatgacttcgatatcgcagtgctgaggcttaagacacccatcacgtttcgcatgaatgtggcccctgcatgtctgcccgaaagggactgggccgagtccactttgatgacccagaaaactggcatcgtaagcgggttcgggcggacccacgagaagggtcgccagagcacaaggctaaaaatgctggaagtgccatatgtagacagaaactcttgtaagctgtcatcttcattcatcatcactcagaatatgttctgcgctggctacgacaccaagcaggaagacgcctgccagggcgatagcgggggccctcacgtgactcgattcaaggacacttactttgtgactggaatcgtgagttggggagaagggtgtgcgcgcaagggcaagtacggaatctatacgaaagtgacggcgtttttaaaatggattgaccgctcgatgaagacacggggactccctaaagccaaaagccatgcccccgaagttattaccagctcacctctgaaa

SEQ ID NO: 10034 - DNA, 1464 bp, Artificial Sequence
  derived and/or modified sequence
atggggaggccactccaccttgtactccttagtgcaagtctggccggactgcttctcctgggggaatccctcttcatacgccgcgaacaggcaaacaacattttggcccgggtgacccgcgccaactccttccttgaggaaatgaaaaaaggtcatttggaacgggaatgcatggaagagacttgttcttacgaggaggctagggaagtgtttgaggacagcgacaagaccaatgagttctggaataagtataaggatggggatcagtgcgaaacgagcccctgtcaaaatcagggtaaatgtaaggacggcctcggtgagtatacctgtacatgtctcgaaggatttgaaggaaagaattgcgaattgttcacccggaagttgtgctcccttgacaacggtgattgtgaccagttctgccacgaagaacaaaactctgtggtgtgttcatgcgctagagggtacacactcgccgataatgggaaggcatgcatcccaactggtccttacccctgtggaaagcaaacgctggagcggcggaagagaagtgttgcccaggccacgagtagtagcggggaggccccagatagcataacttggaaaccctacgatgcagccgacctggatccgaccgaaaacccatttgacctgttggacttcaaccagacccagcccgagcggggcgataataacctgacacggatcgtcggcggccaggagtgtaaggacggcgaatgcccgtggcaggcgctgttgattaacgaagagaacgagggcttttgtggcgggaccattctgtccgaattttacattcttacggcagcacactgtttgtatcaggctaagaggttcaaagtgcgcgtgggagacagaaacaccgagcaggaagaaggtggagaggcggttcacgaagtggaggttgtcattaagcacaatcggttcaccaaggaaacctatgacttcgacattgctgttctgagactcaaaaccccaatcaccttccgcatgaacgtggctcctgcctgtctgcccgaacgcgattgggctgaatctaccctgatgacccagaaaacaggaatagtgtccggcttcggtagaacccacgagaagggccgacaatctacccgcctgaagatgctggaagtaccgtacgtggacaggaatagctgcaaattgtcctctagcttcatcatcacccagaatatgttctgtgcggggtatgacacgaaacaagaagacgcctgtcagggcgatagtggtgggccccacgttacgaggttcaaggatacatatttcgtaacaggcatagtgtcttggggagagggctgtgcccgcaagggaaaatatggcatctacaccaaagtcactgcgttcctgaaatggatagataggtcaatgaagaccagaggactccctaaggccaagtctcacgcaccagaagttatcaccagcagtcccttgaaa

SEQ ID NO: 10035 - DNA, 1464 bp, Artificial Sequence
  derived and/or modified sequence
atgggaaggcccttgcaccttgtcttgctgagcgccagtctggcaggactcctgctgctcggcgaaagtctttttattaggcgggaacaggccaataatatactagctcgggtgacaagggccaattccttcctagaagagatgaaaaaggggcacctggaacgggagtgcatggaagagacatgctcttatgaagaagctcgcgaagtgtttgaggactccgataagacaaacgaattctggaacaagtacaaggatggcgaccagtgtgaaacttccccatgtcagaaccagggcaagtgcaaagacgggctcggggagtatacgtgtacatgcctcgaggggttcgaggggaaaaattgcgagctgtttacacgcaaactgtgctctttagataatggagattgtgaccagttttgtcatgaagagcagaacagcgtcgtatgctcttgcgcacgcggttacaccctggccgataatggcaaagcatgcattcccacagggccctatccatgtggaaaacaaaccctcgagcgccgtaagcgcagcgtggcgcaggcgacgagctcaagcggtgaggcaccggatagtatcacttggaaaccttacgacgcggctgacttggaccccacagagaatcccttcgatctcctggattttaaccagacgcagccagaaagaggggataataatctcacccgcatcgtgggtgggcaggaatgcaaagatggcgaatgcccctggcaggctctccttataaacgaggaaaatgaaggcttttgcggcggcactatactgagcgaattttatattttgactgccgctcactgcttataccaggccaagcgatttaaggtccgagtgggggatagaaatacggagcaggaagaggggggggaagctgtccatgaagtggaggttgtcatcaagcataaccgatttactaaggaaacctacgatttcgatatcgctgtattgagactgaagacaccgatcaccttcaggatgaacgtggccccagcatgtttgccagagagggactgggctgagtctacactgatgactcaaaaaacaggcatagtgtctggcttcggcagaacccacgagaagggccgccaatccacgcggctgaagatgctggaggtcccttatgtagaccgcaactcctgtaaactaagtagtagctttatcatcacccagaacatgttctgcgccggctatgataccaaacaagaggatgcctgtcagggcgatagtgggggcccacacgtcaccagattcaaggatacatacttcgtgacgggcatagtgtcctggggggagggatgcgctcgtaaaggaaaatatggcatctatacgaaggttacagctttcctgaagtggatcgatcggtcaatgaagacacgtggcctaccaaaagctaagagccatgcaccggaagtgattacttctagcccactcaag

SEQ ID NO: 10036 - DNA, 1464 bp, Artificial Sequence
  derived and/or modified sequence
atgggccggccactgcatctcgtgctcctgtctgcgtcccttgcaggactgttgctcctgggggaaagcctctttatcaggcgcgaacaggcaaataacatcctggcacgcgtgactagagctaacagctttctcgaagaaatgaagaagggccacctcgagcgcgagtgcatggaggaaacctgtagctatgaggaagctagagaggtgtttgaggactctgacaaaactaacgagttctggaataaatacaaagacggtgatcaatgtgaaacctccccctgtcaaaaccagggcaaatgcaaagatggactcggagaatacacttgcacctgcctggaggggttcgagggaaaaaactgcgaattgtttactagaaaactgtgctcactcgacaatggcgattgcgaccagttttgccatgaggaacagaacagcgttgtctgcagttgcgccagagggtataccttggcagacaacggaaaagcctgcatccctaccggaccctacccatgtggaaagcagaccctggagcggcggaagcgatcagtcgcccaggctacatctagcagcggtgaagcccccgattccatcacgtggaagccgtacgatgccgcagacctggaccctacagagaacccttttgacctgctcgacttcaatcaaacccagcctgagcgcggcgataacaaccttacccgtattgttggcgggcaggagtgtaaagatggtgaatgcccatggcaagcattgctcatcaatgaagagaacgaagggttctgcggcggcaccattcttagtgaattttatatcctgaccgccgcccattgtctgtatcaggctaagcgatttaaagttcgggtgggcgacaggaacacagagcaagaggaggggggcgaagccgttcatgaggtggaggtggtgatcaagcataacaggttcactaaggagacctatgattttgatattgctgttcttagactgaaaacaccaatcacctttaggatgaacgtggccccagcatgcctgcccgaacgggattgggctgagtctacactcatgacccagaaaacagggatcgtgtccggctttggccggactcatgaaaaaggaagacagagcacaagactcaaaatgcttgaggtcccctacgtggatcgcaactcatgcaagctgagcagttccttcatcatcacccagaacatgttttgcgccggctatgacacgaaacaggaggacgcgtgccagggggacagcggaggccctcacgttacaaggtttaaagatacttactttgtgacaggcatagtgtcttggggcgagggctgtgctagaaagggaaaatatggcatatataccaaagttacagcatttttaaaatggatcgacagatctatgaagacaaggggcctgccaaaggctaaatcacatgcacccgaggtgatcactagctcaccattgaag

SEQ ID NO: 10037 - DNA, 1464 bp, Artificial Sequence
  derived and/or modified sequence
atgggcaggccgctccacctcgtgttgctgtccgcaagtcttgcgggcctgctactcctgggcgagtcactcttcattcgtagggaacaggctaacaatattctggctcgagtgaccagggctaatagtttcttggaagagatgaagaagggacatcttgaaagagagtgtatggaggagacctgttcgtacgaagaagccagggaagtttttgaggacagcgataagacaaacgaattctggaacaagtacaaagacggggaccagtgcgagacaagtccttgtcagaatcaggggaagtgtaaagacgggttgggagaatatacatgcacatgtctggagggatttgaggggaaaaactgtgaactgttcaccaggaaactctgctctctggacaacggcgattgcgaccagttctgtcacgaggagcagaattcggtggtgtgctcatgcgccagaggctacaccctggcggacaacggtaaagcctgcattcccactgggccttatccctgtggtaaacagactcttgagagaagaaagcgctcagttgcacaggcaacttcatcatccggagaggctcccgacagtattacgtggaagccttatgatgctgctgatctggatcccacagagaatccctttgacttgctggatttcaaccagactcagcctgaacggggggataataatctcactagaatagtgggaggccaggagtgtaaggacggagagtgcccctggcaggcccttctcataaacgaggagaacgaaggattctgcggtggcacaatcctgagcgaattttacatcctgaccgcagcacactgcctgtatcaggcaaaacgatttaaggttagagttggtgaccggaatacggagcaggaggaagggggtgaggccgttcatgaggttgaggtggtcatcaaacacaatcggtttacaaaggagacctatgatttcgatatcgccgtcctgagactcaaaactcctataactttcaggatgaacgtggctccagcctgtttgcccgaacgggattgggccgagtccacactgatgacacagaaaaccggtatcgtgagcgggttcgggcggactcacgaaaagggacggcagtctacgcgactgaagatgttagaggttccatatgtagatcgtaattcttgcaagttaagttctagcttcatcatcacacagaacatgttctgcgcgggatatgatactaagcaggaagatgcttgtcaaggggatagcggaggtcctcatgtgacacggttcaaagatacgtatttcgtcaccggcattgtctcttggggagaaggttgcgcaagaaaaggcaaatatgggatctataccaaagttactgccttcctgaagtggattgaccgcagcatgaaaaccaggggtctgccaaaggcaaaatctcacgcccccgaggtgattacctcaagcccgctaaaa

SEQ ID NO: 10038 - DNA, 1464 bp, Artificial Sequence
  derived and/or modified sequence
atggggaggcccttgcatctggtactcttgtcagcgtcattggctggactcctgctgcttggagaaagcctcttcatacgtagagagcaggccaacaatatcctggctcgcgttacccgtgcaaacagcttccttgaggagatgaaaaaaggacacctagagcgggagtgtatggaagaaacttgcagttatgaagaagccagggaagtgttcgaggattcagataagactaatgagttttggaacaagtataaagatggtgaccaatgtgaaacaagcccttgccagaaccaggggaaatgcaaagacggtctgggcgagtacacatgtacatgcctcgagggtttcgagggaaaaaattgcgaattgttcaccagaaagctttgcagtctcgacaacggagactgtgaccagttctgtcatgaggaacaaaattcggtagtctgttcttgcgcacggggctacacactggccgataatgggaaagcgtgcatcccaaccggaccctacccctgtgggaagcagacattagagagacgcaaaagatcagtggctcaagccactagctcctcaggcgaggcaccagactccataacctggaagccttacgacgccgcagacctggatcccacggaaaatcccttcgatcttctggatttcaatcagacccaacccgagcgaggcgataacaatctgacaaggatcgtgggtggccaggaatgtaaggacggagagtgcccatggcaggccctgctgattaacgaggagaacgaaggattttgcggaggaacaatccttagcgagttctatattttaacggctgcccactgtctgtaccaggcaaagcgcttcaaggtcagagttggagaccggaatacagagcaggaggagggaggggaggctgtccatgaagtagaagtcgtgatcaagcataatagattcacaaaggaaacttatgacttcgacatagctgtcttgcgccttaaaacccctatcacattccgcatgaacgtcgctccagcgtgcctcccggaacgggactgggcggagtccacactaatgacacagaagactggcattgtctctggattcggaaggacacatgaaaaaggtcgccagtctacccgcctgaagatgctggaagtgccatatgtcgaccgcaacagctgtaaattgtccagctcttttataatcacacagaacatgttttgtgccggctatgacaccaagcaggaggatgcctgccagggcgacagtggggggcctcatgtgaccaggtttaaagacacatacttcgttactggaattgtatcttggggggaggggtgcgctcggaaaggcaaatacggcatttacaccaaagtcacggccttcctgaagtggattgacagaagcatgaaaacccgtgggctgcctaaagccaagtcacacgcacccgaggtgattactagctctccgttaaaa

SEQ ID NO: 10039 - DNA, 1464 bp, Artificial Sequence
  derived and/or modified sequence
atgggcagacctctacacttagtgctgctcagcgcgtctctggctggcttactattgctcggtgagagcttgtttatcaggcgggaacaggcaaacaatatcctggccagggtgactcgggccaacagtttcctggaggagatgaaaaaggggcatctggaaagagaatgcatggaagagacatgcagttatgaggaagctagggaagtgttcgaagatagcgacaaaaccaatgagttctggaataaatacaaagatggggaccagtgcgaaacctctccatgccagaaccaggggaaatgtaaggacggtctgggggagtatacatgtacgtgcctcgaggggtttgagggcaaaaattgtgaattgtttacccgcaagctctgtagccttgacaatggcgactgcgatcagttctgccacgaggagcagaatagcgtggtctgcagctgcgcccggggatacaccttggcagataatggcaaggcctgtatccccaccgggccttatccttgtgggaagcagaccctggaacgtaggaagcggtcagtggcccaggccacgagcagcagcggcgaagctcctgactccattacctggaaaccatacgacgccgctgatttagatccaaccgaaaatccattcgacctgctggatttcaatcagacccaaccagaacgtggcgacaacaacctcacacgaattgtagggggacaggagtgcaaggatggagagtgcccatggcaggcgctcttaattaacgaggagaacgagggattctgtgggggcacgatactgtcggagttctatattctgaccgctgcgcactgcctgtaccaggccaagcgcttcaaggttcgggtgggggataggaataccgagcaagaggagggtggtgaagcagtgcacgaggtggaggttgtaataaagcacaaccggtttactaaagagacctatgactttgatattgcagtcctgcggctaaagacaccaatcacctttcgaatgaatgtcgcccccgcttgcctccctgagagagattgggccgaaagtaccttaatgacacagaaaaccggaattgtgtcaggctttggtcgtacgcatgaaaagggtcgtcagtcaaccagattgaagatgctggaagtgccgtatgttgaccgcaatagctgtaaattgtccagctcattcataatcacgcagaacatgttctgcgccggctacgataccaaacaggaggacgcgtgccaaggagacagcgggggcccccatgtcaccagattcaaagacacctactttgtcactggaatcgtttcttggggggaagggtgcgcgcgtaaggggaaatatggaatctacaccaaggttacagcgtttctgaagtggatagacagatcaatgaagacccgtgggctgcctaaagccaagagccatgcccctgaagtcattacgagcagcccattgaaa

SEQ ID NO: 10040 - DNA, 1464 bp, Artificial Sequence
  derived and/or modified sequence
atgggccgcccactgcacctggtgctgctcagcgcaagccttgcaggactgttactgttaggtgagtctctttttatccggagggagcaggctaataacatcctggcacgagtaacccgggctaacagctttctggaggagatgaagaaaggacacttggaacgggagtgcatggaagagacttgctcttacgaagaggcacgggaagtttttgaagactctgacaagaccaacgagttctggaataaatacaaagacggagaccaatgcgaaacaagcccctgtcagaaccaggggaaatgcaaagatggacttggcgagtacacatgcacctgcctcgaaggttttgagggaaagaattgtgagctatttactaggaaactttgctctctcgacaatggcgattgcgatcagttttgccacgaggagcagaattcagtggtctgcagctgtgcccgcggctataccctggccgataacgggaaggcttgtatacccacgggcccctacccttgtggtaagcagacactggagcggcggaagagatctgttgcccaagcgacatcttcttccggagaagcacccgacagcatcacatggaagccatatgatgctgcagatctggaccccacggaaaatccgtttgacttgctggatttcaaccagacacagcctgaacggggcgacaataatctgacccgcatagtggggggccaggaatgcaaggatggggaatgcccatggcaggcactattaataaatgaggaaaacgaagggttttgcggagggaccatcttgtctgagttttatattctgaccgctgcacactgtttataccaggcaaaacgctttaaggtgcgggtgggcgacaggaacaccgaacaggaggagggcggagaggcagtgcatgaagtcgaggtcgtgatcaaacacaatcggtttacaaaggagacttatgacttcgacattgctgtcctgcggctcaagactcctatcacgttccgaatgaatgtcgccccagcctgtttaccggagcgggattgggcagagtccaccctcatgactcagaaaaccggcattgtgagcggtttcgggagaacccacgaaaagggaagacaatcaaccaggctgaagatgctcgaagtgccatacgtcgaccgaaactcatgcaagctctctagtagcttcataataacccagaacatgttttgtgctggctacgataccaaacaagaagatgcctgtcagggcgattcaggtggtccgcacgttactcgctttaaagacacttattttgtcacaggcatagtgagctggggggaaggctgcgcacggaagggcaaatacggtatctatacaaaggtgaccgcctttttgaaatggatcgaccgctctatgaagacgcggggcctacccaaggccaaatcccacgcccctgaagtgattacctccagtcctctcaag

SEQ ID NO: 10041 - DNA, 1464 bp, Artificial Sequence
  derived and/or modified sequence
atggggagacccctgcatcttgtccttctgagcgcctctttagctggcctgttattgttaggtgaatcactgtttatacggcgtgaacaggcaaacaatattttagctcgggtaacccgtgcaaacagctttcttgaagaaatgaaaaagggccatctggaacgcgaatgcatggaagagacatgctcgtatgaagaagcccgtgaagttttcgaggatagcgataaaactaatgaattctggaacaaatataaagatggtgatcagtgcgagacaagcccgtgccaaaatcaagggaaatgcaaggatgggctgggcgaatatacctgcacatgtctcgaaggcttcgaaggaaaaaattgtgagttattcacaagaaagctctgtagcttggataatggtgattgtgatcaattttgtcacgaagaacagaattcagtcgtatgttcctgtgcccgtggatatacgctggcggataacggtaaagcttgtattccgactggtccttatccttgcggaaaacagacactggaacggcgaaagcgctcggtggcccaggctacctcatcatcaggggaagctccggatagcatcacttggaaaccttatgacgcggccgacttagacccgacggagaatcctttcgacttgctggactttaaccagacacaacctgaaagaggggacaacaacttgacacggatcgtcggcggacaagaatgtaaggatggcgaatgcccttggcaagcgcttctgatcaatgaagaaaatgaagggttttgcgggggaacaatattgtcagaattctatatactgacagcggcgcattgcttgtatcaagcaaaacgcttcaaagtgcgtgtgggtgaccgcaacacggagcaggaggaaggcggtgaggcagttcatgaagtggaggtcgtcattaaacacaatcggtttacgaaagaaacgtatgatttcgatattgctgtgcttcgccttaaaactccaattacatttcggatgaacgtagcccctgcgtgtttaccagaacgagactgggctgagtcaactttgatgacacaaaaaaccggaatcgtatccggatttggacgtacccatgaaaaaggccgacaatctacccgcctcaagatgcttgaggtgccgtatgttgatcgcaactcatgtaagttatctagctcttttatcatcacacaaaatatgttttgtgctggctacgatactaaacaagaagatgcttgccaaggcgatagcgggggtcctcacgttactcgtttcaaagatacatattttgttacaggtatcgtgagttggggggaaggatgcgcgagaaaaggcaaatatggcatttatactaaagtcaccgcgtttttaaaatggattgatcgaagtatgaaaacgagaggtcttccgaaggctaaaagtcacgccccggaagtaatcacatccagtccactgaaa

SEQ ID NO: 10042 - DNA, 1464 bp, Artificial Sequence
  derived and/or modified sequence
atgggcaggcccctccatctggtgctcctgtcagccagcctggctggtttgcttctccttggcgaaagcctgttcattaggagggaacaggccaacaatatacttgcacgtgtgacccgcgccaactccttcctggaagagatgaagaaaggacacctggaacgcgagtgcatggaagaaacatgctcctacgaggaagcccgcgaagtctttgaagatagtgacaaaacaaacgagttttggaacaagtacaaggacggagaccagtgcgagaccagtccttgtcagaaccaaggaaagtgtaaggacggactcggagagtacacctgcacttgtctggagggtttcgagggtaagaactgtgagctgtttacacgtaagctctgcagcctggacaacggcgactgtgaccagttctgccacgaagagcaaaactccgtggtttgctcttgtgcaaggggttacacattggccgacaacggtaaagcatgcattcctactggaccttacccatgcggcaaacagaccctcgagcgcaggaaaagaagtgtggctcaagccactagcagcagtggcgaggcccctgacagtatcacttggaagccctacgatgctgctgatttggacccaaccgaaaaccctttcgatctgctcgatttcaaccagacacaacctgaaaggggtgataacaatcttacacgtatcgttggaggtcaggagtgcaaggatggtgaatgtccctggcaagctctgctgataaatgaagaaaacgagggtttttgcggaggtactatcctgtcagagttctacatccttactgctgctcattgcctctaccaagctaagcgtttcaaggtcagagtcggagaccgcaacactgagcaggaagagggaggagaggccgtgcacgaggtcgaggtcgtgatcaaacacaaccgctttacaaaggaaacatacgactttgatattgcagttctgaggctgaagacaccaatcacattcagaatgaatgttgctcccgcttgcttgcctgagcgcgactgggctgagtctactctgatgactcagaaaactggcatcgtctcaggtttcggtaggacccacgaaaagggtaggcaaagtacaagacttaagatgctggaggtaccctacgtggacagaaactcatgtaagctctcatcctcatttattatcactcagaacatgttctgcgccggttacgacaccaaacaggaggacgcttgtcagggcgactctggtggtccccatgtcacacgtttcaaggatacctattttgtgacaggcattgtgtcctggggtgagggctgcgctcgtaagggcaagtacggcatctataccaaggtcactgcttttctcaagtggatcgaccgttctatgaagacaaggggccttcctaaagccaaaagccacgctccagaggtcattacctcctctcctcttaag

SEQ ID NO: 10043 - DNA, 1464 bp, Artificial Sequence
  derived and/or modified sequence
atgggccggcctctgcacctggtcctcctgtccgcatcccttgctggcctactgctactgggggagagcttatttataagacgagagcaagctaataacattctcgcaagggtcacaagggccaactcttttctggaagaaatgaagaaaggacacctggaaagggaatgcatggaagagacttgtagctatgaggaggcacgcgaggtgtttgaagacagcgataagaccaacgaattttggaacaaatataaggacggcgaccagtgcgagacaagtccttgtcaaaaccaaggcaagtgcaaagatggacttggagagtacacatgtacttgtctggagggattcgaaggaaagaattgcgagttgttcacacgcaaactgtgctctcttgataatggggattgcgatcaattctgtcacgaggaacagaatagtgtcgtgtgctcttgcgctcgtgggtataccttggctgataatgggaaggcttgcatcccaaccggaccttacccctgcgggaaacagaccttggagcgccgcaagcggtccgtcgcacaggcgacttcttcctcgggcgaggctccggacagtattacttggaagccctacgacgctgcagacctcgacccaacggaaaacccattcgacctgctggactttaatcagacgcagccggaaaggggggataataacctgaccaggattgtaggcggccaggagtgtaaagatggggagtgcccatggcaagcgttactgattaacgaagaaaatgaaggattttgtggcggaacgatactgtcggaattctacatacttacggcagcccattgtctttaccaggctaagcggttcaaggtgagggtcggggaccgaaacacggagcaagaagaaggtggggaggctgtccatgaggttgaggttgttatcaagcacaatagatttacaaaagagacatatgattttgatatcgcggtgctgagacttaaaacgcccattacgttccgaatgaatgtggctccagcatgcctgccggaacgggattgggccgagtcgacgctgatgactcaaaagacagggattgtcagtggattcggccgcacccacgagaaaggccgccagtctaccagactgaaaatgttggaggtgccttacgtagatcgcaacagctgtaagctcagctccagttttattatcacgcagaacatgttctgcgccggctacgataccaagcaggaggacgcttgtcagggagactctggaggacctcacgtgacacgtttcaaggacacctattttgtgactggaatcgtgtcctggggagaggggtgcgccagaaaagggaagtacggaatctataccaaggttaccgcctttctcaagtggatcgatagaagcatgaaaacaaggggactacccaaggccaaatctcatgcacctgaggtgatcacgtcctcacctctcaag

SEQ ID NO: 10044 - DNA, 1464 bp, Artificial Sequence
  derived and/or modified sequence
atgggcaggcctctgcacctcgtattgctgagcgcgagtctagcgggtttgcttctcctgggcgagagcttgtttattcggagggagcaggcgaataatatcctcgccagggtaaccagagctaactcatttctcgaggaaatgaagaaggggcatcttgagcgcgaatgtatggaggaaacctgcagttatgaagaagctcgagaagtatttgaagattccgacaagacaaacgaattctggaacaagtataaagatggcgatcaatgtgagacttctccttgtcaaaaccaagggaaatgtaaggatggtctgggcgagtacacttgtacatgcctggagggtttcgaaggcaaaaactgcgagttattcacccggaaattatgctccttagacaatggggactgcgatcagttctgccacgaggagcagaattctgtggtgtgtagctgcgctcgtgggtacacactcgcagataacggcaaggcttgtatcccaacgggcccttatccatgcggcaagcagacgttggagcgccggaaacgtagcgtcgcccaagctacctcatcgagtggggaggccccggatagcatcacctggaagccctacgatgctgcggacttggaccctacagaaaaccccttcgatctgcttgactttaaccagacccagcccgagagaggtgacaacaacttgacgcgcatcgtggggggccaggagtgtaaggacggagaatgcccttggcaagccttactgattaacgaagaaaacgagggtttttgtggggggactatcttgagcgagttctatattctcacagccgcccactgtctgtaccaggcgaaacgcttcaaggtgcgggtgggggaccgcaatacggaacaggaggaagggggggaggctgtccacgaagtggaggtcgtgataaaacataacagattcactaaggagacatacgattttgatattgccgtactgcggctcaagactcctataaccttccgaatgaatgtggccccggcctgtcttcctgagagggactgggccgaaagtacactcatgacgcagaagactggcatcgtgtccggcttcggccggacccacgagaaggggcgccaaagcacccgcctcaagatgctcgaggtaccctacgtggacaggaactcttgtaaactgtcaagcagctttataatcacccagaatatgttttgtgccggatatgatacgaaacaggaagacgcatgtcagggggatagtggtggtcctcacgtgactcgctttaaggacacatatttcgtgacgggcatcgtgagctggggggaggggtgtgctaggaaagggaagtatggcatctacaccaaggtgacagcattcttgaaatggatagaccgctcaatgaagacccgggggttgcctaaagcaaaatctcacgccccagaagtgatcacgtcaagtccgcttaaa

SEQ ID NO: 10045 - DNA, 1464 bp, Artificial Sequence
  derived and/or modified sequence
atgggacgacctctccatctagtgctgctctcagccagtctcgccggtctcctccttctgggggagagtctattcattcgcagggaacaggccaacaacattctggctcgcgttacacgggcaaattcattcctcgaagagatgaaaaaagggcacctggaaagagagtgcatggaagagacctgtagttacgaggaggccagggaagtgttcgaggacagcgacaagactaatgagttctggaacaagtataaagatggcgatcagtgcgagacctctccctgccagaaccagggcaaatgcaaagacgggctgggggagtacacatgcacttgcctggagggctttgaggggaagaactgcgagttatttactaggaagctatgttccctggataacggcgactgtgaccagttttgtcatgaggaacagaattcagtggtctgctcatgtgccagaggctatacattagctgataacggcaaagcttgcataccaactggcccctatccatgcggcaaacagaccctcgaacgtcggaagagatctgtggcacaggccacaagctcttccggcgaagcccctgacagcataacctggaagccctacgacgccgctgacctggatcctaccgagaatccctttgacctcttggattttaatcaaactcagcccgagcgcggggacaacaaccttaccaggattgtcgggggacaggaatgtaaggacggcgaatgtccctggcaggccctactgataaatgaggagaatgaagggttctgcgggggcaccatcctgtccgagttttacattctcacagctgcccactgtctttatcaagccaagaggttcaaggtaagggtgggggacaggaataccgagcaggaggagggcggtgaagccgtccatgaggtcgaagttgtgattaaacacaaccggtttaccaaagaaacttacgattttgatatcgccgttctgcgtctgaagacccctatcaccttccggatgaacgtggctcccgcctgcctccccgaacgggactgggctgagagcactctgatgactcagaagaccggcatcgtgagcggcttcggccggactcacgagaagggcagacagagtaccaggctaaagatgttagaagtgccttacgttgaccgcaactcctgtaaactctcctctagttttataatcacacagaatatgttctgtgctggctatgacaccaagcaggaagacgcctgccagggcgactctggcggccctcacgtgacccggttcaaggacacctacttcgttactgggatcgtgtcctggggagaagggtgcgccagaaaaggcaagtatgggatttacacaaaggtgacagcctttctgaagtggattgaccgctccatgaaaacaagaggtttgcctaaagccaaatcacacgcacccgaggtgattacttcaagccctctaaag

SEQ ID NO: 10046 - DNA, 1464 bp, Artificial Sequence
  derived and/or modified sequence
atgggtaggccccttcacctggtgctgctgtccgcctctctggccggactgctgctgctaggagaaagcctgttcattcggcgcgagcaggctaacaacatcctggcccgggtcacaagagctaatagttttctggaggagatgaaaaaaggacacttggagcgagaatgcatggaggaaacctgtagttacgaggaggccagggaagtcttcgaggactctgataaaacgaacgagttctggaacaagtacaaggatggcgatcagtgcgaaacttctccatgtcagaaccaggggaaatgtaaggatgggttgggcgaatatacctgtacgtgcctcgaaggattcgagggaaaaaattgcgaactgttcacccggaagctttgtagtctggataacggcgactgcgaccagttttgccacgaagagcagaactcagtggtgtgctcatgcgctagaggctatacgctggcagacaatggaaaggcctgtatacccaccggtccctacccatgcggtaagcagacgctcgagaggagaaaaaggagcgtggcacaggccacttcttcatcgggtgaagcccccgacagtatcacctggaaaccatatgacgcggcagatctggaccctacagaaaacccattcgatctgttggacttcaaccaaacacagcccgagcgcggagacaataacctgacacggattgttgggggccaggagtgtaaggacggggagtgcccatggcaggctcttcttatcaatgaggaaaacgaagggttctgtggcggcaccattctgagcgagttctatatcttaacggcagctcattgcctctaccaagctaagcgcttcaaggtgcgggtaggcgataggaatacggagcaggaggaaggcggggaggccgtacatgaagtggaggtcgtcattaagcacaatagattcacaaaagagacctatgatttcgacattgcggttttgagactaaagacacccattacgttcagaatgaacgtcgcccctgcttgtttgccagaacgcgattgggcagaatctacactgatgacgcagaaaacaggcattgtcagtggctttgggagaacgcacgagaagggacgccagtccacacggctcaaaatgctcgaagtgccctacgtggaccggaattcctgcaaactgtccagtagctttatcatcactcaaaacatgttctgtgctggttacgacacgaagcaggaggacgcctgccagggagactccggagggcctcacgtgacaaggttcaaagatacatactttgtaactggtatcgtctcctggggggaagggtgcgcacgcaaaggcaagtacggcatttacacgaaagtgacagctttcctgaaatggatagacaggtccatgaagacccgcggtctccccaaggccaagtcacacgcacctgaggtgatcacgtctagccccctgaaa

SEQ ID NO: 10047 - DNA, 1464 bp, Artificial Sequence
  derived and/or modified sequence
atggggaggccattgcatctggtcctgctaagcgcaagcctcgccgggctgctcttgctgggtgagagcctatttatcaggagggaacaggcgaataatatcctggcccgtgtcacacgagccaacagtttcttagaggagatgaagaaagggcatctggaacgggaatgcatggaagagacatgtagttatgaggaggctcgggaggtgttcgaggactctgataagaccaacgaattttggaataagtacaaagacggtgatcagtgcgagactagcccgtgccagaatcaggggaaatgcaaagacggcctgggcgagtacacctgtacttgtttggaagggttcgaagggaaaaactgcgagctatttactcgcaagctgtgcagtttagataatggcgactgtgatcagttctgtcatgaggagcaaaactctgtggtgtgcagttgcgctcgcgggtacacattggcagataacgggaaagcctgtatccctaccggcccatatccttgcggaaaacagactctcgagcgacggaagaggtctgtggctcaggccacttcatcttcgggagaagcccccgactcaatcacctggaagccctacgacgcagccgacctggatcctacagagaatcctttcgatttactggatttcaatcaaacacagccagagagaggagacaacaatctaaccaggatcgtgggcgggcaggaatgtaaggatggggaatgcccttggcaagcgcttttaattaacgaggagaatgagggattctgcggtggtacaatactgtccgagttttatatcctcaccgcagcacattgtctgtaccaggccaaacgtttcaaagtaagagtcggagaccgcaacaccgaacaggaagagggaggtgaggccgtgcatgaagtggaagtggtgataaagcataatcggttcaccaaggaaacttacgactttgacatcgcagttttaagattgaagactcccatcacttttcgcatgaatgtcgcccctgcctgcctgccggagcgggactgggccgagtccacgctgatgacccaaaaaacggggatcgtctccggttttgggaggacccacgagaaaggtcggcagagtacacgtctgaaaatgctggaggtcccctacgtggacaggaattcctgtaagttgtccagttctttcattatcacacagaatatgttctgtgcagggtacgataccaagcaagaggacgcctgccagggcgactctggagggcctcatgtgacacgattcaaagacacttactttgttacgggcatcgtgagttggggagagggctgcgctcggaagggaaaatatgggatttatactaaagttactgctttcctgaagtggattgacaggtccatgaaaaccagaggacttccaaaggctaagagccatgctcctgaagtgatcacttcttctccactgaaa

SEQ ID NO: 10048 - DNA, 1464 bp, Artificial Sequence
  derived and/or modified sequence
atgggtagaccgctacaccttgttcttctgtccgcctccttggccggcctgcttctgctcggggagtctctgtttatccgtagggaacaggctaacaatatcctggctcgggtcacacgcgccaattcttttttagaggagatgaagaaaggtcacctggagagagagtgtatggaggagacctgcagctacgaggaagcaagagaggtgttcgaggattccgacaaaactaacgagttctggaataagtataaagatggcgatcagtgtgaaacatcaccatgccagaaccaagggaaatgtaaagacggactgggagagtacacttgcacctgccttgaaggcttcgagggcaaaaattgcgagctgtttacccgcaagctgtgctctctggacaacggggactgcgaccagttctgtcatgaagaacagaattctgtggtctgtagctgtgcacgaggttatacactggccgacaatggaaaggcgtgcatcccaactggaccttacccctgcggaaaacagacgttggaaagaaggaaaagaagcgtggcacaggctacgtcaagctctggcgaggctcctgacagcatcacctggaagccttacgacgcagccgacttagaccctaccgaaaacccattcgatctcctcgactttaaccagacccagcccgagcgcggcgacaacaacctgactcggatcgtcggtgggcaggagtgtaaggacggggagtgtccctggcaggcactgcttattaacgaggaaaatgaggggttctgtggaggcacaatacttagtgagttctatatcctgaccgctgcgcactgcctgtaccaggctaagcgatttaaggtgcgggttggtgaccggaacacggaacaagaggagggaggagaggcggttcacgaggtggaggtggtgatcaaacataatagatttactaaagaaacttatgacttcgatatagccgtgctgaggctgaagactccaattacattccgcatgaacgtcgcacccgcatgcttgccagagcgcgactgggcagagagtacgttaatgacccagaaaacaggaatcgtttctggatttgggcgaacccacgagaagggacggcagagcacccggctgaaaatgctagaggtgccatatgtcgatagaaactcctgcaaattgagtagttcatttattatcacacagaacatgttctgcgcggggtacgatactaaacaggaagacgcctgccagggagacagtggaggaccccacgtaaccaggttcaaggatacgtacttcgtgacaggcattgtgagttggggggaagggtgtgctagaaagggcaaatacggcatatacactaaggtgacagccttcttaaaatggattgatcgctctatgaaaacacgaggcctgcctaaagctaagagccatgcaccagaggtaatcacttcctccccgttgaag

SEQ ID NO: 10049 - DNA, 1464 bp, Artificial Sequence
  derived and/or modified sequence
atgggcaggccgctgcatctagtgctgctgagtgctagcctggctggtctgctcctgctgggggagtccctgtttattaggcgcgaacaggcgaataatatactggctcgcgtcacccgtgccaatagctttctcgaagaaatgaagaaaggccacttggaacgggaatgtatggaagagacgtgctcttatgaggaggcaagagaagttttcgaggattccgacaagacaaatgaattctggaacaaatacaaggacggtgatcagtgcgagactagcccttgccagaaccagggcaagtgtaaggatggtctcggcgaatatacctgtacctgcttagagggctttgagggtaagaattgtgagctgtttactcggaaactgtgttctctggacaacggtgactgtgatcaattttgccacgaggaacagaacagcgtggtttgttcatgcgcaagaggttacacccttgctgataacggcaaagcgtgtatcccgactggcccgtatccttgcggtaaacagaccctcgaacgccgcaagcggtccgtcgcgcaagcaacgtcttcctccggcgaggcgcccgattccattacgtggaagccgtatgatgccgcggacctggatccaaccgaaaatccgttcgacctgctggacttcaatcagacccagccagagcgcggcgataacaatctgacgcggatcgtgggcggacaagaatgcaaggatggtgagtgtccttggcaggctcttctgattaatgaagaaaacgagggcttttgcggtggcacgattctgtccgagttttacatcttgactgctgcacactgtttgtaccaagctaagcgttttaaggttcgggttggcgatcgcaatacggagcaagaagagggcggtgaggcggtccatgaggtagaagttgttatcaaacacaaccgctttaccaaggaaacctacgacttcgacatcgcagtcttacgcctgaagactcctattacatttcgcatgaacgtggcgccggcatgtctgccggaacgcgactgggcggagtcaaccctgatgacccagaaaaccggcatcgtctctggcttcgggcggacccacgaaaaaggtcgccaaagcactcgcctgaaaatgctggaggtgccatacgtcgatcgcaacagctgcaaactgagctcttctttcataatcactcagaacatgttttgcgcgggttacgatacgaaacaggaggacgcctgccaaggtgatagcggcgggccacatgtcacccggttcaaagacacttatttcgttaccggtattgttagctggggtgagggatgcgcgcgtaagggtaaatacggtatttatactaaggtaaccgccttcctgaagtggatagaccgaagtatgaaaacccggggtctgccgaaagcgaagagccatgcaccagaagttatcaccagctcgcctctgaag

SEQ ID NO: 10050 - DNA, 1464 bp, Artificial Sequence
  derived and/or modified sequence
atgggcaggcctttacatctggtgctcttgagtgcaagcctggctggactgctcctgttaggcgaatcccttttcatccgaagggagcaagctaacaacatcctggcacgggtgacaagagccaactcattcctcgaggaaatgaagaaagggcatctggaaagagagtgcatggaagagacatgctcatatgaggaggctcgcgaggtgttcgaagattccgacaaaaccaacgagttctggaacaaatacaaggacggcgatcagtgcgagaccagtccctgccaaaatcagggtaagtgcaaagacggcttgggcgagtatacttgcacctgcctggaaggcttcgaaggcaagaattgcgaactcttcacaagaaaactttgttccttggataacggcgattgtgaccagttttgccatgaggaacagaacagcgtagtgtgctcctgtgcccgcggatatacactcgcagataacgggaaggcatgcatccccactggtccctatccttgcggaaagcaaaccttggaaaggcggaaacgtagcgtggcccaggcaacgtcttcatcgggtgaagcccccgactcgatcacatggaagccttacgatgccgccgacctggatccaacagaaaacccttttgatctgctcgattttaaccagacccagccagaacggggagataacaatctgacacgcatcgttggggggcaagagtgtaaggatggggaatgcccttggcaggctctcctgatcaacgaagaaaacgaggggttttgcggggggacgatcttaagtgagttttatatcttgaccgcggctcattgtctttatcaagctaagaggttcaaggtgcgggttggggacagaaatactgagcaggaagagggaggagaagccgtgcacgaagtcgaggttgttatcaaacacaaccgcttcaccaaggagacctacgattttgacatagccgttcttcgtctcaaaacacctataacattccgtatgaacgtcgctcctgcttgcctaccagagagggactgggcggagtctactctaatgacccagaagaccggcatcgttagcggattcgggcggacccatgaaaaagggagacaaagcacgcgcctgaaaatgcttgaagttccctacgtggaccggaacagctgcaaactctccagcagtttcatcattactcagaacatgttttgcgcaggctacgacaccaaacaagaggacgcctgtcagggagatagcggaggaccccacgtcacacgcttcaaggatacctacttcgtcaccggcatagtgagctggggggagggttgtgcacgaaaagggaaatacgggatctatactaaagttacagccttcctgaagtggattgatagatctatgaaaaccagaggcctgcccaaggctaaaagccatgctcccgaagtcatcaccagcagccctttgaag

SEQ ID NO: 10051 - DNA, 1464 bp, Artificial Sequence
  derived and/or modified sequence
atgggacgacctctgcaccttgtgctgctgagcgcaagcctggccggcctgctcctgctgggtgaatctctgttcataagacgagaacaggctaacaacattcttgccagagttactagagccaactcatttctggaggaaatgaagaaaggacacctggaaagggagtgtatggaggaaacctgctcttatgaggaagcgagggaagtgtttgaggatagtgataagacgaatgagttctggaacaagtacaaggatggagatcaatgcgagacttccccctgtcagaatcaggggaagtgcaaggatgggctgggcgagtacacctgcacatgtcttgaaggctttgaggggaaaaattgcgaattgtttaccagaaagctgtgctctcttgataatggagattgtgatcagttctgccatgaagaacagaactccgtcgtgtgctcttgcgctcgcgggtatacacttgcagataatggaaaggcctgcatcccaactggaccatacccatgcggtaagcagactcttgagcggcgaaaaaggtctgtggcccaggcaactagtagtagtggcgaggcccctgattcaatcacttggaaaccttacgacgctgcagatctcgacccaactgaaaacccattcgaccttttggattttaatcaaacgcaaccggaaagaggcgacaacaacctaacccgcatagttgggggacaggaatgtaaagacggcgaatgcccctggcaggctcttttgattaacgaggaaaacgaggggttttgcggcggaaccatcttgagcgaattctacattctgacagccgcacattgtctgtatcaggccaaaaggttcaaggtaagggtgggcgacagaaacacagaacaggaggaaggtggagaagcggtgcacgaagtcgaagtcgttatcaagcataatcgatttaccaaggagacttacgacttcgacatcgcggtgctcagactgaaaacccccattacttttaggatgaatgtagcgcctgcatgtcttccagagcgagactgggcggagtccaccctgatgacgcagaagaccggcatcgtctcgggcttcgggagaacccacgagaaggggagacagtctacacgactgaagatgctcgaggtcccttatgtggacagaaacagttgcaaattgtcctcttcatttatcattacacagaatatgttttgcgctggttacgatacaaagcaggaagacgcctgtcagggcgacagcggcggaccccatgtgacgaggtttaaggatacctacttcgttacaggaatagtgagttggggagaaggctgcgccagaaaaggtaaatatggaatctacaccaaagtgactgcctttttgaagtggatagacaggagtatgaagactagaggcctacctaaagcaaagtcgcacgctccagaggtgatcaccagttcacctttgaag

SEQ ID NO: 10052 - DNA, 1464 bp, Artificial Sequence
  derived and/or modified sequence
atggggcgacccctccaccttgtgctgctcagtgcctcactcgccggcctgctcctcctgggagagagcctcttcatcagacgcgagcaggctaacaacattctcgcccgtgtcacgcgggccaatagttttctcgaggagatgaaaaaaggccatttggagcgtgagtgcatggaagagacctgctcttacgaggaagcccgtgaggtcttcgaagattcggataagactaacgaattctggaataagtataaggacggcgatcagtgtgaaacatcgccttgccaaaatcagggtaagtgcaaggatggcctcggcgagtatacctgcacctgcctggaaggattcgagggtaagaactgtgagctcttcacccgaaagttgtgcagcttggataacggtgattgcgaccagttttgtcacgaggagcagaacagtgtcgtgtgttcttgtgctcggggttacacgcttgccgacaacggtaaggcttgtatcccgaccggcccatacccttgcggtaagcagacgttggagcgtcgcaagcgttctgtcgcccaggccactagtagttcaggtgaagctcccgattcaatcacgtggaagccgtacgatgctgccgacctggaccccactgaaaaccccttcgatctgctggacttcaaccagactcagcccgagcgtggcgacaataacttgacccgtatcgtggggggccaggagtgcaaggatggggaatgcccgtggcaggctctgctgatcaacgaggagaatgagggcttctgcggtggaaccatcctgagcgaattctacatccttaccgcggctcactgtctttaccaagctaagcgttttaaggtcagagtcggcgaccgaaataccgagcaggaggaggggggtgaggccgtgcacgaggttgaggtggtcatcaaacataaccgttttactaaagaaacctatgactttgacattgccgtgctacgtctcaaaactccaattacctttcggatgaacgtggcccccgcctgtcttccggagcgcgattgggccgaatccacgctcatgactcagaaaaccggcatcgtctctggtttcggccgcacccacgagaagggtcgccaatccacccgcctcaagatgctggaggtgccgtacgttgaccggaactcctgtaagttgagctcttcgtttattatcacccagaacatgttctgcgcaggctacgatacgaagcaggaagatgcttgtcagggcgattctggcggtcctcatgtgaccaggttcaaggatacttacttcgtcaccggtatcgtcagctggggagaaggctgcgctcgtaaaggcaagtatgggatctatactaaggttacggcttttttgaagtggatcgaccggagcatgaagacacgtggtctaccgaaggctaaatcgcatgcccccgaggttatcacctcctcgccgctgaag

SEQ ID NO: 10053 - DNA, 1464 bp, Artificial Sequence
  derived and/or modified sequence
atgggcagaccactccatctcgttttgctctccgccagtctagccggtctgcttctgcttggcgagagtctcttcattcggcgggagcaggccaacaatattttggccagggtgacaagagccaatagctttcttgaagagatgaagaagggacacttggagcgggaatgtatggaagagacgtgttcttatgaggaggcaagggaagtgttcgaggactctgacaagactaacgagttctggaacaaatacaaggacggggatcagtgtgaaacctcaccttgtcagaaccaggggaagtgcaaggatggcctgggcgaatatacctgtacgtgcttggaggggttcgaaggtaaaaattgtgaactgttcacaaggaagctatgcagcctggataacggcgactgtgatcagttttgccatgaggagcagaacagtgtcgtgtgcagttgtgcacgaggttatacgttagccgacaacggtaaagcttgtatccccaccggtccatacccttgtggcaaacagaccctagagcggcggaaaaggtctgtggcccaggcaacatcgagcagtggggaggctcccgacagcattacgtggaagccttatgatgctgccgatctggatcccaccgaaaacccatttgacctgcttgactttaatcaaacacagccagaaaggggcgataacaacctaacccggattgtgggagggcaggaatgtaaggacggagagtgtccatggcaagcgctgctcattaatgaagaaaatgagggattttgcggagggactattctatctgaattttacatcctgactgctgcccactgcctctaccaggcgaaacggttcaaagtgcgagtgggcgaccggaataccgagcaggaagaagggggcgaggccgtccatgaagtggaggtggtcattaaacataaccgattcactaaagagacctacgacttcgatatcgctgttctgaggctgaagacaccaattacattccgcatgaatgtggcacctgcgtgccttcctgaacgggactgggcagaatccactctgatgacccagaagaccgggattgtaagcggctttggcagaactcatgaaaagggcaggcagagcactcgtctgaaaatgttggaagtgccatatgtggaccggaactcatgtaaactctcgtcttcattcattatcacacagaatatgttttgtgccggatatgataccaagcaggaggatgcatgtcagggcgattctggtggccctcatgtaacccggtttaaagacacgtacttcgttacgggcatcgtgtcttggggcgaggggtgtgccaggaaagggaagtacggtatatataccaaggtcaccgcatttcttaagtggattgatcgctctatgaagacccggggcctcccaaaggcaaaaagccacgcccccgaggtcattacatcaagccccctgaag

SEQ ID NO: 10054 - DNA, 1464 bp, Artificial Sequence
  derived and/or modified sequence
atgggtcgaccgctacatctagttctactatcggcgtcgttagcgggtttactactattaggtgaatcgctatttatacgtcgtgaacaagcgaataatatactagcgcgagttacgcgagcgaattcgtttttagaagaaatgaaaaaaggtcatttagaacgagaatgtatggaagaaacgtgttcgtatgaagaagcgcgtgaagtatttgaagattcggataaaacgaatgaattttggaataaatataaagatggtgatcaatgtgaaacgtcgccgtgtcaaaatcaaggtaaatgtaaagatggtttaggtgaatatacgtgtacgtgtttagaaggttttgaaggtaaaaattgtgaactatttacgcgaaaattatgttcgctagataatggtgattgtgatcaattttgtcatgaagaacaaaattcggtagtatgttcgtgtgcgcgtggttatacgttagcggataatggtaaagcgtgtataccgacgggtccgtatccgtgtggtaaacaaacgctagaacgacgaaaacgttcggttgcgcaagcgacgtcgtcgtcgggtgaagcgccggattcgataacgtggaaaccgtatgatgcggcggatttagatccgacggaaaatccgtttgatctattagattttaatcaaacgcaaccggaacgaggtgataataatttaacgcgtatagtaggtggtcaagaatgtaaagatggtgaatgtccgtggcaagcgttattaataaatgaagaaaatgaaggtttttgtggtggtacgatactatcggaattttatatactaacggcggcgcattgtctatatcaagcgaaacgttttaaagtacgtgtaggtgatcgtaatacggaacaagaagaaggtggtgaagcggttcatgaagtagaagtagtaataaaacataatcgttttacgaaagaaacgtatgattttgatatagcggtattacgactaaaaacgccgataacgtttcgaatgaatgttgcgccggcgtgtttaccggaacgtgattgggcggaatcgacgttaatgacgcaaaaaacgggtatagtatcgggttttggtcgtacgcatgaaaaaggtcgtcaatcgacgcgtttaaaaatgctagaagttccgtatgtagatcgtaattcgtgtaaactatcgtcgtcgtttataataacgcaaaatatgttttgtgcgggttatgatacgaaacaagaagatgcgtgtcaaggtgattcgggtggtccgcatgtaacgcgttttaaagatacgtattttgttacgggtatagtatcgtggggtgaaggttgtgcgcgaaaaggtaaatatggtatatatacgaaagttacggcgtttttaaaatggatagatcgatcgatgaaaacgcgtggtttaccgaaagcgaaatcgcatgcgccggaagttataacgtcgtcgccgctaaaa

SEQ ID NO: 10055 - DNA, 1464 bp, Artificial Sequence
  derived and/or modified sequence
atggggcgacctctacaccttgtgctccttagcgccagcctcgctggtctgctgttgttgggcgagagtctcttcattcgtagggagcaggccaacaatatactggctcgggtcactcgcgccaacagctttctggaggagatgaaaaagggtcacctcgaacgagaatgtatggaagagacgtgttcatacgaggaagcgcgtgaagtgtttgaggatagcgataagaccaacgagttctggaataagtacaaggatggcgaccagtgcgagacctccccttgtcagaaccaaggcaagtgtaaagatgggctgggtgagtacacgtgcacatgtctggaaggtttcgaaggcaaaaattgcgaactgtttactaggaaactgtgttccttagataacggcgactgtgaccagttctgccacgaggaacagaactccgtcgtgtgttcctgtgcgcgagggtacacgctcgccgataatggcaaggcttgcatccccactggcccttatccctgtgggaagcaaactctggaacgaagaaagagatcggtcgctcaggccaccagctcttctggcgaagcacccgacagtatcacctggaagccttatgatgccgccgatttggaccccactgagaatccctttgatttgttggatttcaatcagacacagcccgagagaggagataataacctgactcggattgtgggtgggcaggagtgtaaggacggcgaatgcccgtggcaggcccttctgattaacgaagagaatgaaggtttctgtggaggaactattctgtcagaattttacattctcactgccgctcactgcctttaccaggctaagagatttaaagtgcgggtgggcgaccgcaacactgaacaggaggagggaggggaggcagtacacgaagtcgaggtggttattaaacacaatcgattcactaaagagacatatgactttgatattgccgtcctgcggctcaagacgcccattacattcaggatgaacgttgccccagcatgcttgcccgaaagggactgggccgagagtacactgatgacccaaaagacaggtatagttagcgggttcggacgaacccacgagaaaggtcggcagtccacccggcttaagatgctggaagttccctacgtggaccgtaactcatgtaaattgtcaagttcttttatcatcacccaaaatatgttttgcgccggttatgataccaagcaggaagacgcctgccagggtgattccggaggcccccatgtgaccagattcaaagatacgtactttgtaactgggatagtgagctggggcgaagggtgcgcccgcaagggcaaatatggaatttacaccaaggttacggctttccttaagtggatcgataggtctatgaaaactagaggactgccaaaggctaaaagccatgcgccagaagtgattacatcgagtcccctgaag

SEQ ID NO: 10056 - DNA, 1464 bp, Artificial Sequence
  derived and/or modified sequence
atgggcaggcccctgcacctagtcctgctgagcgcttcactcgccgggctgcttctcctcggggagagtctgttcatcaggagggaacaggccaataatatactggcaagggtcaccagagctaacagttttcttgaagagatgaaaaagggccatctggagcgagaatgtatggaggagacgtgtagttacgaggaggctcgggaggtcttcgaggactccgataaaactaacgagttctggaacaagtataaagatggtgaccagtgtgagacatctccctgccagaatcagggcaaatgcaaagacggactaggtgaatatacatgtacctgtcttgaaggatttgagggaaagaattgtgaacttttcacgcgcaaactgtgctccctggacaacggcgattgcgaccaattctgtcacgaggaacagaatagcgtggtgtgctcatgcgcacgggggtacaccctggccgataacggaaaggcctgcatccccaccgggccttacccatgcgggaagcaaaccctggagaggcgaaaacgttccgtcgcccaggcgaccagctcttccggtgaagccccagactcaataacgtggaaaccatatgatgccgccgacctggaccctacagagaacccctttgacctgctcgattttaaccagacacagcctgagcggggggataacaatctgaccagaatagtggggggacaggagtgcaaagatggcgaatgcccctggcaggccctgttgataaacgaagagaatgagggcttttgtggcggaactatactctctgagttttacatactaaccgcggctcactgcctctatcaggctaagagattcaaagtcagagtaggggacagaaatactgagcaggaggagggcggggaggcagtgcacgaggtagaggtggtcatcaaacataatcggttcacaaaggagacctacgacttcgacatcgctgtgctgcggttaaaaacaccaatcacgttccggatgaatgtcgcccctgcttgcctcccggagcgggactgggccgaaagcacactcatgacgcaaaagacaggcattgtgtccggattcgggagaacccatgaaaaaggtcgtcagtcaacaaggctaaaaatgttggaagtgccttatgtcgataggaactcctgtaaactttcaagctctttcatcatcacgcagaacatgttctgtgccggctacgataccaagcaggaagacgcttgccaaggggactctggggggccacacgtgacccggttcaaggacacctacttcgtgacaggcatcgtgtcctggggggaaggctgtgcccggaaaggcaaatatggcatatacacaaaggtgaccgcttttctaaagtggatcgatcggtcaatgaagactcgcggactacccaaagccaagtctcatgctcctgaagtgatcacttcttcacctctgaaa

SEQ ID NO: 10057 - DNA, 1464 bp, Artificial Sequence
  derived and/or modified sequence
atgggtcggccactgcacctcgtgctgctctcggcgtctctggcggggctcttgctgctgggggagtcactgttcatccggcgcgaacaggcaaataatatcctcgcccgggtgacccgggccaactcgtttctcgaggagatgaaaaaaggtcacctggagagagaatgcatggaggagacttgcagctacgaagaagcccgcgaggtctttgaggactcagacaagaccaacgagttctggaacaaatacaaggacggcgatcaatgcgaaacctccccatgtcagaaccagggcaaatgtaaggacggactgggtgaatacacttgcacttgtctcgaggggttcgaaggaaagaattgcgaattgttcactcgaaaactgtgctcgcttgataatggggattgcgatcaattctgccatgaggagcagaactcagtggtgtgttcgtgcgccagaggatacactttggccgataacggaaaggcctgtatcccgactggaccatacccttgcggcaagcagactctggaacggcgcaagcgctcggtcgctcaggctacctcgtcctccggagaagccccggacagcatcacctggaagccatacgatgcggccgatctcgacccgactgagaaccctttcgacctgctggacttcaaccagacccaacctgaacgtggagacaacaatctcactaggattgtcggaggtcaagaatgtaaagacggagagtgcccctggcaggccctgctgatcaatgaggagaatgagggtttttgcggaggcactatcctctccgaattctatattctgaccgcagcacactgcctgtaccaagcgaagagattcaaggtgcgggtgggagatcgcaacactgagcaggaagaaggaggcgaagcagtgcacgaagtcgaagtggtcatcaagcataacagattcactaaggaaacctatgacttcgatatcgccgtgctgcgccttaagaccccgatcacttttaggatgaacgtcgcccccgcttgcctcccggaaagagattgggcggagtccacgctcatgacgcagaaaaccggaatcgtgtccggcttcggccgcacccacgaaaaagggcgccagtcgactaggctgaagatgctggaagttccatacgtggaccgcaatagctgcaaactgagctcatcgtttattattacccagaacatgttttgcgcgggatacgataccaagcaagaggacgcttgccaaggagactctggcggaccgcatgttacgaggttcaaggacacctacttcgtgactggtatcgtgtcctggggggaaggatgtgcacggaagggaaagtacggcatctacaccaaggtcaccgcgttccttaagtggatcgacagatccatgaaaacgcggggacttcccaaggcaaagagccatgctccggaagtgatcaccagctcaccgttgaag

SEQ ID NO: 10058 - DNA, 1464 bp, Artificial Sequence
  derived and/or modified sequence
atgggtcgaccccttcatttggtgcttctgagcgctagcttggccggcttgttgctcttgggcgaatccttatttatacggcgcgagcaggctaataacatactcgctcgggtgacccgcgccaattcgttcttggaggaaatgaaaaaggggcacctcgaacgggaatgcatggaagagacctgctcgtacgaagaggcaagggaagtgttcgaggacagtgataagaccaacgagttctggaacaaatataaagatggtgatcaatgcgagaccagtccttgtcaaaaccagggaaaatgtaaggatgggctgggcgaatatacctgtacttgtctcgagggctttgaaggtaaaaactgcgagctgtttactcgtaagctctgttccctagacaatggagattgcgaccaattttgtcacgaagagcagaatagcgttgtgtgttcatgcgcccgagggtacaccctggccgacaatgggaaggcttgtatccccacgggcccttatccctgcggaaaacagacacttgagagacggaaacggagtgtagcccaggcaacctccagctcaggggaagcacccgattccataacgtggaaaccttacgacgcagccgacttggacccaaccgaaaacccgtttgatctgctggattttaatcaaacccagcccgaacgcggtgataacaacttgacgcgaatagtgggcggccaggaatgtaaggacggggagtgtccatggcaggccctccttataaacgaagagaacgagggcttttgcgggggtacgatcctgtcggaattttatatcctgacagccgctcattgtttgtatcaagctaaacgctttaaggtgagagtcggggataggaacaccgaacaggaggagggcggcgaggccgtgcacgaggtagaagttgtgattaagcacaaccggtttacaaaggagacatacgactttgatatcgccgtccttaggctcaagacgcccattacatttcggatgaacgtcgcgcctgcgtgcctacctgaaagggactgggctgagagcactttgatgacgcagaaaactggaattgtgagcggctttgggaggactcacgagaaaggaagacagtcgactaggctaaaaatgctcgaggtaccatacgtggataggaactcatgtaagttatcctcttctttcataattacccagaatatgttttgcgctggctacgacaccaaacaggaagatgcttgtcaaggagactctggaggaccccacgttacacgttttaaggacacttatttcgtaaccggaattgtgtcctggggcgaaggctgtgctaggaaaggcaagtacggaatctatactaaggtcacggcattcctgaaatggattgaccgatccatgaaaactcgcggcctgcctaaggccaagtctcacgcacccgaggtcattactagttcccctctgaag

SEQ ID NO: 10059 - DNA, 1464 bp, Artificial Sequence
  derived and/or modified sequence
atgggtcgacctctacaccttgtacttctttctgcttcattggcaggtcttttgttgcttggtgaatctctttttattagaagagaacaggctaacaacatccttgcacgcgtcacacgagccaattcctttttggaagagatgaagaagggccacttagagagggaatgtatggaggaaacttgcagttacgaagaagcacgagaagtgtttgaagattcagataagactaatgaattctggaacaagtataaagatggagatcagtgtgagactagtccctgtcaaaaccaaggaaagtgcaaagacggtcttggcgaatatacgtgcacttgtcttgagggcttcgaggggaagaattgtgagttgtttaccaggaagctctgctctctcgataatggggactgtgatcagttctgccatgaagagcaaaattctgtggtgtgcagttgtgcaaggggttatacacttgctgacaatggaaaagcatgcatccccactgggccttacccctgtgggaagcagacgttggaaagacgaaagcgctcagtcgctcaagccacctcctcttccggtgaggctcctgatagtattacctggaaaccttatgatgccgccgatctagatccaactgaaaatccgttcgatttgcttgatttcaatcagactcagcctgagagaggggataacaatcttacacgtatcgtaggtggacaagaatgtaaggatggagagtgcccctggcaggccctgcttattaatgaagagaatgaagggttctgcggtggtacaatcttgtcagagttctacatcctcaccgcagcccattgtctctatcaggcaaagaggttcaaggtgcgggtgggggatagaaataccgagcaggaggagggaggcgaggctgtacatgaagttgaagtggtaatcaaacataacaggtttactaaagagacctacgattttgatatcgccgtgctcagattgaagacaccaatcacgttccgtatgaatgtggctccagcatgccttcctgagagagattgggccgaaagtacgctcatgacccaaaagacgggcatagttagcggttttgggcgaacacatgagaaaggacgacagagtacccggttgaaaatgcttgaagtaccctatgtggatcgaaattcctgcaagctgtcatcaagctttattataacacagaacatgttctgcgccggttatgatactaagcaagaggatgcttgtcaaggggatagcggtggaccacacgtcactcgcttcaaggatacatatttcgtaacaggcattgtgtcttggggggaaggttgcgcgagaaaaggaaaatatggtatttacacaaaggttaccgcttttctcaaatggatcgataggtcaatgaagacaagagggttaccaaaggcaaagtctcatgctccagaggtgataacttcctcccctctaaaa

SEQ ID NO: 10060 - DNA, 1464 bp, Artificial Sequence
  derived and/or modified sequence
atgggacgtccacttcatctcgttctcctgagtgcgagtctggctgggctgttgcttcttggcgaaagccttttcatacggcgagaacaggcaaacaacattctggcacgggtgacacgggccaatagttttttagaggaaatgaagaaaggccatctagagagggaatgtatggaggaaacctgctcttacgaagaagcgcgcgaggtatttgaggactccgacaagactaacgaattctggaataagtacaaagatggggatcagtgtgagacctccccctgtcagaatcaagggaaatgcaaagatggattaggagagtacacttgtacgtgtctggagggatttgagggcaaaaactgcgagctcttcaccaggaaattatgcagtctggataacggggattgtgaccagttttgtcatgaggagcagaatagcgtggtctgctcttgcgcgcgcggatacacactggccgacaatggaaaggcttgtattcctaccggtccctacccatgtggcaaacagaccctggagaggaggaaaagatcagtcgcccaggctacaagctcatctggtgaggcgccagattccataacttggaagccctatgacgcagccgacctggaccctacagaaaacccctttgacctgctggacttcaaccagacgcagcccgagcggggggacaacaacctgacgcgtattgtgggaggacaggaatgtaaggatggcgaatgcccatggcaagccttgctcattaatgaggagaatgaagggttctgtggcggaactattctgagcgagttctacatcctgaccgcggcacattgtctttatcaggctaagcgctttaaagtcagggtcggggacaggaataccgagcaggaggaagggggggaggctgtgcacgaggttgaagttgtcataaaacataacaggttcaccaaggagacctatgactttgacatcgccgtgctgcggctgaaaactcccataacctttagaatgaacgttgcgcccgcatgtctgcccgaaagggattgggccgagtccactctgatgacacagaagaccggcatcgtgtcaggcttcggacgtacccatgaaaaaggcaggcagagcactagactcaaaatgttggaggtgccatacgtcgatcggaattcctgcaaactgagttcatccttcatcataacacagaacatgttttgcgcaggttatgacaccaaacaagaggacgcatgccagggtgattctggggggcctcatgtaacccggtttaaggatacctactttgtcacaggtattgtgtcgtggggcgagggatgtgctcggaagggaaagtacggcatttacaccaaggtgactgccttcctgaagtggatcgacagatctatgaagacaaggggactccccaaggcaaaaagtcatgcccctgaggtgatcactagtagcccgctgaag

SEQ ID NO: 10061 - DNA, 1464 bp, Artificial Sequence
  derived and/or modified sequence
atgggccgccccctccacctggtccttttgagcgcctccttggctggtctgctcttgttgggtgaaagccttttcatcaggcgcgaacaggcgaacaacatcctggctagagtcacacgcgcgaactccttcctggaggaaatgaagaagggccatctggagagagagtgcatggaggagacctgttcatatgaggaggccagggaagtgttcgaagactccgacaaaacaaatgagttctggaataagtataaggatggagatcagtgtgaaacctctccgtgtcagaaccagggaaaatgtaaggatggactgggcgagtacacctgcacttgcttggagggctttgagggtaagaattgcgaactctttacgagaaagctctgctccctggataacggagactgtgatcagttttgccacgaagagcagaacagcgtggtatgttcctgtgctagaggatacactttggcagacaatggaaaagcttgtatacccaccggtccctatccctgcggcaagcagacgttggagaggcgcaaaaggtctgtggcgcaagctaccagctctagtggtgaggccccagactctatcacgtggaagccatacgacgctgccgatctggaccctacagagaacccttttgatctgttggacttcaaccaaactcagcctgagaggggagataacaacttgactaggatcgtcggcggccaagaatgcaaggatggcgagtgtccctggcaggccctcttgattaacgaagagaacgagggcttctgcggcggaacaatcttgtctgaattctacattctgacggctgcgcactgcctgtaccaggccaagcgctttaaggtaagggtgggcgatagaaataccgaacaggaggagggtggcgaagcggtgcacgaggttgaggtggtaattaaacacaaccgcttcactaaggagacttacgatttcgacatcgcagtccttcgcctcaagacaccaatcacctttagaatgaatgtggcccccgcttgcctgccggagagagattgggcagagtcaacccttatgactcaaaagacgggtatcgtatctggttttggccgcactcacgagaaaggaaggcagtccacaagacttaagatgcttgaggtgccctacgttgacaggaactcttgcaagctgtcttcttcatttatcatcactcagaacatgttttgcgccggttacgacactaagcaagaagatgcctgccagggcgacagcggaggaccccatgttactcgcttcaaagatacatattttgtgactggaattgtaagctggggcgaaggatgcgctaggaagggtaagtacggtatctatacaaaggtcacggctttcctgaagtggattgacaggagcatgaagaccaggggccttcctaaggcgaagtctcatgcgccagaggtgattacatctagcccactcaag

SEQ ID NO: 10062 - DNA, 1464 bp, Artificial Sequence
  derived and/or modified sequence
atgggtcgccctctgcacctagtgctgctcagcgccagcctggccggcctgcttctgcttggcgagagcttgttcatccggcgagagcaggctaataatattttagctcgagttaccagagctaattctttcttggaggaaatgaaaaaaggacatttggaaagggagtgcatggaggagacttgcagttatgaggaggcccgcgaagtgttcgaagactcagacaaaaccaacgagttttggaataaatacaaggatggggaccagtgcgaaacctcaccgtgtcagaaccagggcaagtgtaaggacggccttggtgaatatacatgcacatgtctggaagggttcgaaggcaagaattgcgaactgtttacacggaaactgtgtagcctagataatggagactgtgaccagttttgtcacgaggagcagaatagtgtggtctgttcctgcgcacggggctacacactggccgataatggcaaagcatgtatccctacgggtccatacccgtgcggcaaacagaccctagagagacgaaagaggagtgtggctcaggctacatcctccagcggggaagcccctgattctatcacttggaaaccctacgacgcggcagacttagaccccactgagaaccctttcgatctgctggatttcaaccagactcaacctgagcgaggtgacaacaatctgaccagaatcgtaggcggacaggagtgtaaagatggcgaatgtccatggcaggccctattgatcaacgaagaaaatgaggggttctgcgggggcaccatcttgtctgaattctacatcctgacagccgcacactgcctgtatcaagccaaaaggtttaaagttagagtgggagatcgcaacactgaacaggaagaaggcggagaagctgttcacgaagtggaggtcgtcataaagcacaatcggttcacgaaagagacttacgacttcgatattgccgttttacgtcttaaaacccctataacttttagaatgaatgtagctcccgcttgcctgccagaaagggattgggctgaaagcacgctcatgacccagaagacaggcatcgtctcgggttttggcagaacacacgaaaaaggaaggcagtctacacggctgaagatgctggaggtgccttacgtggatcgaaactcatgcaagctttccagctccttcatcatcacccagaatatgttttgcgccggatacgacaccaagcaggaggatgcctgccagggggattctggtgggccccatgtcacccggttcaaagatacctacttcgtgactggcattgtgtcctggggagaaggctgcgctagaaagggtaagtacggtatctatactaaggtcaccgctttcttaaagtggatagatcggtcgatgaaaaccagagggttacctaaggctaagtctcacgctccagaggtaataacttccagccctctgaaa

SEQ ID NO: 10063 - DNA, 1464 bp, Artificial Sequence
  derived and/or modified sequence
atgggcagacctcttcacctggtcctcctgtccgcctcccttgcagggctgctgctactaggggagtcacttttcatcagaagggaacaagcaaacaacattctggcaagagtgacaagggctaactcttttctggaggagatgaagaaggggcacctggagagagaatgcatggaggaaacttgtagttacgaggaagcaagagaggtctttgaggattcagataaaacaaacgaattctggaacaagtacaaagatggcgaccagtgtgagacctcgccctgccagaatcagggtaagtgtaaagacgggctcggcgagtatacttgcacatgcctagagggcttcgaaggtaagaactgcgaactctttaccaggaagctgtgtagcctggataatggcgactgtgaccagttctgccacgaggaacagaattcagtggtttgcagctgcgcaaggggctatactctcgctgacaatggcaaagcatgcatccccacgggaccatatccgtgtgggaaacagacgctcgaacgccgcaagagatccgtggcccaggctacctctagctctggtgaagcccccgactccattacctggaagccatatgacgccgccgacctggatcctaccgaaaacccttttgatttgcttgactttaatcagacacagccagagaggggcgacaataatttgacccgcattgtgggaggacaagagtgcaaggatggtgaatgcccttggcaagctttgctgatcaatgaagagaacgaaggattctgtggagggacaattctcagcgagttctatatcctcactgcggctcactgtctgtatcaggctaagcggttcaaggtcagggtaggagacagaaataccgagcaggaagaaggcggcgaggctgtccatgaagtggaggttgtgatcaagcacaacagattcaccaaagagacctacgattttgatatcgcagtcctgcgtctgaaaacgccaataacattccgcatgaatgtggccccagcctgcttgcctgagcgagattgggccgagagcaccctcatgacacagaaaacagggattgtttcaggcttcggtcgcactcacgagaagggcaggcagagcacccggctgaaaatgcttgaagtgccttatgtggatcggaactcttgtaagctgtctagctcatttatcatcacacaaaatatgttttgcgcgggatatgacacgaagcaagaggacgcctgtcagggagattcggggggacctcacgtgaccagatttaaagatacatactttgttaccggaatcgtttcttggggagagggctgcgccaggaaggggaagtacggaatctatacaaaagtgaccgcctttctgaaatggattgacagatccatgaagaccagagggttgccaaaagctaaatcacacgccccggaagtgatcacaagcagtccactgaaa

SEQ ID NO: 10064 - DNA, 1464 bp, Artificial Sequence
  derived and/or modified sequence
atgggcaggcccttgcacctcgtgcttctgagcgctagcttggctgggctgctccttctgggtgaaagcctgtttattcgaagagagcaagctaacaacattctcgcaagagtgacccgggccaactctttcctggaggagatgaaaaaaggccatcttgagcgggagtgtatggaggagacgtgcagctacgaagaagccagagaggtgttcgaggattctgataaaaccaatgaattctggaacaagtataaggacggggaccagtgtgagacttccccctgtcagaaccagggtaaatgcaaagacgggctcggggagtacacctgtacctgcctggagggctttgaaggtaagaattgtgagttgttcaccagaaagctatgttcccttgataacggcgactgcgaccagttttgccatgaggaacagaatagcgtggtctgttcctgcgccaggggctacaccctcgccgacaacggaaaggcatgcatcccaaccggtccatacccttgcggaaaacagacgctggagcgacggaaacggtctgtggcccaggccacaagcagctccggggaggctcccgattccattacttggaagccttatgatgctgcagaccttgatcccacagaaaatccattcgaccttctggattttaaccagactcaaccagagcgtggggacaacaacctgacaagaatcgtgggcggtcaggaatgtaaggacggcgagtgcccctggcaggcgttgcttataaatgaagagaacgagggcttctgcggggggacgattttaagcgaattttacatccttaccgcagctcattgcctttatcaagccaagcgcttcaaagtccgggtcggcgacaggaacacagagcaggaggagggcggggaagcggtgcacgaggtggaggtggttatcaagcataatcggttcactaaggagacatacgatttcgacatcgcggtcttgaggctcaaaacccctattacttttagaatgaacgtggccccagcctgtttgcccgagagggattgggcagaatccaccctcatgacccagaagacgggcatagtgagcggattcgggcgcacccatgagaaagggcgacagagtacacgcttgaagatgttggaagtcccttatgtggaccggaactcctgcaaactttcatcttcgtttatcatcactcagaatatgttctgcgcaggctatgacaccaagcaggaggacgcgtgccaaggagattcaggcgggccccacgtcacaaggtttaaagacacatactttgttaccggaattgtttcttggggggaggggtgcgctaggaaggggaagtatggcatatatacaaaagtgaccgcgttcctcaaatggatagaccgctcaatgaagacccgcgggcttccgaaggctaagagccacgcaccagaggtaatcactagctccccactgaaa

SEQ ID NO: 10065 - DNA, 1464 bp, Artificial Sequence
  derived and/or modified sequence
atgggacgaccattgcacctcgtgctattaagtgcgtcattggcgggattgcttttgcttggcgagagtcttttcattagacgcgaacaagcaaataatattcttgcccgtgttactagagccaattcattccttgaagagatgaaaaaaggtcatctcgagcgcgaatgtatggaagaaacatgttcgtatgaagaggcgagagaggtttttgaagattccgataagacaaacgaattttggaataaatacaaggatggagatcaatgcgaaacatcgccgtgtcagaatcagggtaagtgtaaagatggactgggcgaatatacttgtacatgcctcgaaggtttcgaaggtaaaaattgtgagttgttcacccgaaaactgtgttccctggataatggagattgcgaccagttttgtcacgaggaacaaaacagtgtagtctgctcttgcgccagaggatacacactcgcagataacggtaaagcatgtattccaactggaccatacccttgcggaaaacaaaccttggagcgaaggaagcgttcggtggctcaagctactagctcgagtggagaggcaccggattcaattacatggaaaccctatgatgcagccgatctggatccaaccgagaatccatttgatcttcttgacttcaatcaaacacaacccgagcggggagataacaatcttactcgtattgtgggcggacaggaatgtaaggatggtgagtgtccgtggcaagctcttttaattaacgaggagaatgaaggtttctgtggtggaactatcctatcagagttttacattctcaccgctgctcactgtctgtatcaagccaagagatttaaggtgcgggtcggagatagaaatactgaacaggaagaaggtggagaagccgttcacgaggtcgaagtggtaattaagcataacagattcacaaaagaaacgtatgattttgatattgcggtgcttcggttaaagactccaattactttccgaatgaatgtcgcaccagcatgcctgccggaaagggattgggccgagagcactctcatgacccaaaaaactggaatcgtgtcaggcttcggaagaacacacgaaaaaggacgacaatcgactcggttgaaaatgcttgaggtgccttatgttgatcgcaactcctgcaagctgagttcctcgttcattataactcagaacatgttctgtgccgggtatgatactaaacaagaagatgcctgtcaaggagattcagggggaccacatgtgacgcggtttaaagatacctatttcgttacgggaatagtttcatggggagaaggctgcgcaagaaagggaaaatacggaatttacactaaagtgacagctttcttgaaatggatcgataggtcaatgaagacgcgaggtttgccgaaagctaaaagtcatgcaccagaagtaattacctcttctccgttgaaa

SEQ ID NO: 10066 - DNA, 1464 bp, Artificial Sequence
  derived and/or modified sequence
atggggaggccactgcatctcgtgctgctgtccgcctctctagccggattactgctcctaggagaatctctctttatccggcgagaacaggcaaataacatactcgctcgggtcactcgcgctaattctttcctcgaggaaatgaaaaaagggcacctcgaaagggaatgtatggaggaaacttgctcttatgaagaagcaagagaagtgttcgaagattccgataaaacaaacgaattctggaataagtataaagatggggatcagtgtgagacatcaccctgtcagaaccaggggaaatgtaaagatgggttaggagaatacacttgtacatgcctcgagggatttgagggaaaaaattgtgaactctttacacgcaagctttgttcactagataatggagattgcgaccaattttgtcatgaagagcagaactctgtcgtttgtagttgtgctaggggatacacattagccgataacggaaaggcctgtattccgacaggaccttatccttgcggaaaacagacactcgagcggaggaaaagatctgtggcacaggccactagttcaagtggagaagcaccagattccattacttggaaaccttacgatgcggcagatctggatcccactgaaaatccatttgatttgctagacttcaaccagactcagcccgaaagaggggataataatctcacacgaattgtgggggggcaggaatgcaaagatggagaatgcccctggcaggcacttctcatcaacgaagaaaacgaaggattctgcgggggaacaatcctcagtgaattctatatcctcacagccgctcattgcctctatcaggccaaacgctttaaagtcagggtgggagatcggaacactgaacaggaagagggaggagaggccgtccacgaagtagaagttgtaataaaacacaatagatttacaaaagaaacatatgattttgatatcgctgtgcttcggcttaaaactcctataacatttaggatgaatgtcgctcctgcttgcttgccagagcgggattgggccgaatcaacacttatgactcagaaaacaggaattgtctccggatttggaagaacacatgagaaagggagacagtcgactcggcttaaaatgctggaagtgccctatgtcgatcggaattcatgtaaactgtcgtcgtcatttattataactcagaacatgttctgtgccgggtatgatacaaagcaggaagatgcttgccagggagattccggagggcctcacgtcactcgctttaaagatacatatttcgtgactgggattgtgagttggggggaagggtgtgcccgtaaaggaaaatatgggatatatacaaaagtcacagccttcctgaaatggattgatcgatccatgaaaactcgcgggctgccaaaagcaaaatcacacgctcccgaggtgataacatcgtcccccctgaaa

SEQ ID NO: 10067 - DNA, 1464 bp, Artificial Sequence
  derived and/or modified sequence
atgggccgcccactgcatctagtcctgctgtccgcatccttggccggtctgctgctactaggagagagcctgttcattagacgtgagcaggctaataatattttagctcgagtgacgagggctaactcctttctggaggagatgaagaagggccacctggaacgtgagtgcatggaggaaacctgttcgtatgaagaagctagagaggttttcgaggatagcgataagaccaatgagttttggaacaaatataaggatggggatcagtgcgagacctccccttgccagaatcagggcaagtgcaaagacgggcttggtgaatacacctgcacatgcttggaggggtttgagggcaaaaactgcgagttgttcacgaggaagctctgttccttagataatggggattgcgatcagttttgtcatgaagaacaaaatagcgtagtttgctcgtgcgcccgtggctacacgttagccgataacggcaaggcctgcattccaaccggcccatatccttgcggtaaacaaaccctagagcggaggaagcgttcagtggctcaggccacttcgagcagcggcgaggcacccgatagtatcacctggaagccgtacgacgctgcagacctggatccgaccgagaatccattcgatctgctggatttcaatcaaacgcagcctgagcgcggagataataatctgacccgcattgtcggaggacaagagtgtaaggacggcgagtgtccgtggcaggctcttctcatcaatgaggagaacgaaggattctgcggcggtacgattctaagtgagttttacatcctcacggccgcgcattgcctgtaccaggccaagcgctttaaggtgcgcgttggagaccggaacacggaacaggaggaagggggcgaggctgtgcacgaagtcgaggttgtcattaaacacaatcggtttacgaaggagacatacgattttgatattgctgtgctgcgcctcaagacacccatcaccttccgtatgaatgttgccccagcgtgcttacctgagcgggactgggccgaatctaccctcatgacccagaagaccggaattgtgtctggtttcggcagaactcacgagaaaggccgccagtcgacccgtctgaagatgttggaggtcccatatgtggaccgcaactcctgcaaactgtcaagttccttcatcattacccagaatatgttttgcgcgggatacgacacgaagcaagaagacgcatgccaaggcgactccggagggccgcacgtcacaagatttaaggatacgtatttcgtgaccgggatcgtcagctggggcgaaggatgcgcacggaaggggaagtacggcatttatacaaaagtgacggccttcctgaagtggattgatcgttccatgaaaactcgaggactgcccaaggcgaagagtcatgccccggaggtaattacatcctccccccttaag

SEQ ID NO: 10068 - DNA, 1464 bp, Artificial Sequence
  derived and/or modified sequence
atggggcgtcccctccacctcgtgctgttgtctgcaagtctagccggactcctcttgctgggcgagtctctgtttattcgcagagaacaggcgaacaacatattggcaagagtgactcgcgccaattcatttttagaagaaatgaagaaaggccatttggagcgagagtgtatggaagagacttgcagttatgaggaggcccgggaagtcttcgaagattccgacaaaacaaatgagttctggaataagtataaggatggggaccaatgtgagacctccccctgccaaaatcagggcaagtgtaaagatggcctgggagaatatacctgtacgtgtctcgaaggttttgaagggaagaactgtgagctgttcacccgaaagctgtgctcgctcgacaatggcgattgcgatcaattctgccacgaagaacagaactccgtggtctgcagctgtgccaggggctacacccttgccgataacgggaaggcgtgcattcccacaggaccctacccttgtggcaaacagaccctcgagcgccgaaagcgcagcgtggctcaggcgacttcctccagtggggaagcccccgatagtattacttggaagccttatgatgctgcagaccttgatcccaccgagaatccgttcgatctgctggactttaatcaaacccagccagagaggggcgataacaacctgactcggatcgtaggaggccaagaatgtaaggatggcgaatgtccatggcaggccttgctgattaatgaagagaatgaaggcttctgcggaggcacaatcctgtctgaattttatatcctcacagccgcgcattgcctctaccaggccaagcggttcaaagtgcgagtgggggatcggaacacagagcaggaagagggaggggaagcagtgcacgaagtggaagtggtgattaagcacaatcgatttactaaggaaacgtatgactttgatattgccgtccttcgactgaagacaccaatcacttttaggatgaacgtcgcacctgcatgcctcccggagagagattgggccgagtcaactttgatgacccagaagactgggatcgtgagtggcttcggtcggacacacgagaaaggccgccagagcactagattgaagatgctggaggtcccttatgtggaccgaaattcctgtaagctgtcgtcctcattcatcattacccagaatatgttttgtgccggatatgataccaaacaggaagacgcttgtcaaggcgactccggggggccccacgtgacgcgatttaaagacacctactttgtaaccggcattgtgtcttggggtgaagggtgtgcgcgtaaggggaaatatggcatctacaccaaggtgaccgcctttctcaagtggatcgacagatcaatgaaaacccgggggcttccaaaagccaagtcccacgctcctgaagtcataacttcttccccgctcaag

SEQ ID NO: 10069 - DNA, 1464 bp, Artificial Sequence
  derived and/or modified sequence
atgggaaggcctctccacctggtgctgctgtctgcctccctcgcaggactactcttgctgggcgagtcactgttcattcgccgcgaacaagctaacaacatcctggctcgtgttacgcgggctaacagcttcctggaggagatgaagaaaggtcatctggagcgcgaatgcatggaggagacctgctcttatgaggaggctagggaggtgttcgaagatagcgacaagactaacgagttttggaacaagtacaaggatggggatcaatgcgaaacttcgccgtgtcaaaatcagggcaagtgcaaggatgggttgggtgagtacacatgcacctgtttagagggtttcgagggaaaaaattgtgagttgttcactaggaaactctgcagtttggataatggtgattgcgaccaattctgtcacgaggagcagaatagtgtcgtgtgcagctgcgctaggggttacaccctggcagacaacgggaaagcttgtattccaacaggcccctatccgtgcggaaagcagactcttgagaggagaaaacgcagtgttgcgcaggctacctcttccagcggcgaggcccccgacagtattacttggaaaccctatgatgccgctgatcttgatccgacagaaaacccgttcgatctgctggatttcaaccagactcagccggagcgtggcgataataacctcactagaatcgtgggtggccaggagtgtaaagacggcgagtgcccctggcaggcactgttaattaacgaggagaacgagggattctgcggcggcacaattctctccgagttctatattttaaccgccgcccattgcctgtaccaggccaagcgatttaaagtgcgggtgggcgaccggaatactgaacaggaggaaggcggcgaagccgtacatgaagtggaggtggtgataaagcacaataggtttaccaaagaaacctacgatttcgacatcgcagtgttgaggctgaaaacccctatcaccttccgcatgaacgttgcccctgcatgtttgcccgaacgtgactgggctgagtcaacactgatgacacaaaagacgggcatcgtctcaggcttcgggagaacgcacgagaagggcagacaaagtaccagacttaagatgctggaggtgccctacgttgacaggaactcctgcaaactgtccagcagcttcatcatcacacagaatatgttttgtgccggttacgacacaaagcaggaggacgcttgccaaggcgattccggcggaccccacgttacccggtttaaggacacttacttcgtgacgggcattgtgtcgtggggggaaggatgtgcccgcaagggcaagtatggtatatacacgaaggtgaccgcctttctcaaatggatcgatagatccatgaagactagagggctgcccaaagccaagagtcacgcacccgaggtaatcacttctagtccactgaaa

SEQ ID NO: 10070 - DNA, 1464 bp, Artificial Sequence
  derived and/or modified sequence
atgggccgcccattgcatctggtacttctgagtgccagcttagcaggactgcttttgttgggcgaaagcctattcatccggcgggaacaggcaaacaatatcctggcgagggtaacgcgcgccaattcctttttggaggagatgaaaaaaggccacttggaaagggagtgtatggaagaaacatgtagctacgaggaagctcgcgaggtctttgaggacagtgacaagaccaacgaattctggaataagtataaggatggggaccagtgcgagactagtccttgtcagaatcagggcaagtgtaaggacgggctcggggagtatacatgtacatgcctcgaagggtttgaaggaaaaaactgcgagctgttcacaagaaaactgtgctccctggacaatggagattgcgatcagttctgccacgaagaacagaactccgtcgtgtgttcctgcgcccgggggtatacccttgcagacaacggaaaggcttgcatccctaccggtccttatccctgtggtaagcagactctggagagaagaaaaaggtccgtcgcacaggctacctcttcatcaggcgaagcccccgattcgatcacatggaaaccatatgacgccgcagatcttgaccctaccgagaatcccttcgatttgttagatttcaatcagactcagccggagagaggtgacaacaatctgaccagaattgtgggaggccaggaatgtaaggatggcgaatgcccatggcaggccctgctcatcaatgaggagaatgaagggttctgcggcggcactatactgtccgagttctacattctgaccgccgcccactgtctgtaccaagctaaacggtttaaggtcagggttggtgaccgtaatacggaacaggaggagggcggggaggccgtacatgaggtggaagtcgtaattaagcataatcggttcaccaaagagacttacgatttcgatatagccgtgctgcgtttgaagacccccattacctttaggatgaacgttgcccccgcctgcctgcccgaaagagattgggcagaaagtacactgatgacccagaagaccggcatcgtctcaggattcggccgcacacatgagaaagggcgccagagtactcgcctgaaaatgctcgaggtaccgtacgtggaccgaaactcttgtaagctaagctcctctttcatcataacacagaatatgttctgcgccgggtacgatactaagcaggaggacgcctgccagggtgactctggggggcctcacgtaaccaggttcaaagatacatatttcgtaaccggaattgttagctggggggaagggtgtgcgagaaagggaaagtacggaatctacaccaaggtgacagctttcctgaaatggattgatcgaagtatgaagactcggggtctgcccaaggctaaatcacacgcacctgaggtgattacgtcttcaccactgaag

SEQ ID NO: 10071 - DNA, 1464 bp, Artificial Sequence
  derived and/or modified sequence
atgggcagacctttgcatctcgtgttgctttccgccagtttagccggtcttctgttgttaggcgagagcctcttcattcgcagggagcaggcgaataacatcctggcaagagtaactagggccaattcttttctggaggagatgaaaaaggggcacctggagagagagtgcatggaggagacttgcagttacgaggaggcccgcgaggttttcgaggatagtgataagactaacgaattttggaacaaatataaggacggtgaccaatgcgagacgtctccgtgccagaaccagggaaagtgtaaagacggtctgggtgaatatacatgtacctgcctggagggctttgaggggaaaaactgcgagctgttcacacgcaaactttgtagcctggacaatggagattgcgatcagttctgccacgaagaacagaatagtgttgtgtgctcatgtgccagagggtacacccttgcggataatggaaaggcttgtatcccaactggcccctacccgtgcgggaaacagacgctggagaggagaaaaaggagtgttgcccaggctacaagcagcagcggggaggcccctgatagtatcacctggaagccgtatgatgccgctgatctcgacccaacagagaaccccttcgacttacttgacttcaatcagacacagcctgagcgcggggacaataaccttaccaggatcgtcggggggcaagagtgcaaagatggagagtgcccatggcaggctctgttaatcaacgaggagaacgaaggtttctgtggagggaccatcctgagtgagttctatatcctaacagccgcgcactgtctctaccaggctaaacgctttaaggtcagggtgggggatagaaatactgagcaggaagagggtggagaagctgtccacgaggtggaggtggtcatcaaacataatagatttacaaaggagacttacgactttgacatcgcagttctgcgcttgaagacccccatcacatttcgtatgaatgtggccccggcatgtctgcccgaaagagactgggccgaaagtacccttatgacgcagaagacagggattgtgtcaggctttggacgaacgcacgagaagggccgccaaagcactagactaaagatgctggaagttccatacgtagaccgaaatagttgtaaattgtctagttctttcatcatcacacagaacatgttctgtgctgggtacgacacaaagcaggaggacgcctgccaaggggattcaggtggacctcacgtcactcgcttcaaagacacgtacttcgttaccggcattgtcagctggggggaggggtgtgcccgcaaggggaaatacggaatctacacaaaggttaccgcctttctcaagtggatcgatagatctatgaaaactcggggactacccaaggccaaatctcacgctcctgaggtgatcacgagtagcccccttaaa

SEQ ID NO: 10072 - DNA, 1464 bp, Artificial Sequence
  derived and/or modified sequence
atgggaagacctttacatttagttttattatctgcttcactagcaggattacttttacttggagaatctttatttattagaagagaacaagctaataatatacttgctagagtaactagagctaatagttttcttgaagaaatgaaaaaaggacatcttgaacgagaatgtatggaggaaacttgtagttatgaagaagcaagagaagttttcgaagattctgataaaactaatgaattctggaataaatataaagatggagatcaatgtgagacttctccatgtcaaaatcaaggaaaatgcaaagatggtcttggagaatatacatgtacttgtttagaaggttttgaaggaaaaaattgtgaattattcacacgaaaattatgttctttagataatggagattgtgaccaattttgtcatgaagaacaaaattcagtggtttgtagttgtgctagaggttatactttagcagataatggtaaggcatgtattcctacagggccatatccatgtggaaaacaaaccttagaaagaagaaaaagatctgttgcacaagctacaagttcgagtggagaagcaccagattctattacatggaaaccttatgacgctgctgatcttgatccaacagaaaatccatttgatcttcttgattttaatcaaactcaaccagaaaggggagataataatttaactaggatagttggaggacaagaatgtaaagatggtgagtgtccatggcaagcattattgattaatgaagaaaatgagggtttctgtggaggaacaattttaagtgaattttatattcttacggctgcacattgtctttatcaagctaagagatttaaagttagagtaggtgatagaaatacagaacaagaggaaggtggagaggctgttcatgaagtcgaagttgttattaaacacaatagatttacaaaagaaacatatgattttgacattgcagtcttaagattaaaaactccaattactttcagaatgaatgttgctccagcttgtcttccagaaagagactgggctgaaagcactttaatgacacaaaagactggaattgtatctggatttggaagaactcatgaaaaaggaagacaaagcacacgtttaaaaatgttggaagttccttatgttgatagaaattcatgtaaactttctagtagttttattattactcaaaacatgttttgtgcaggatatgatacaaaacaagaagatgcatgtcaaggagattcaggaggaccacatgtcactagatttaaagatacatattttgttacaggaattgtttcatggggagaaggatgtgcaagaaagggtaagtatggtatttatacaaaagttacagcatttcttaaatggatagatagatctatgaaaactcgtggtttaccaaaagctaaatcacatgctccagaagttattacttcaagtccacttaaa

SEQ ID NO: 10073 - DNA, 1464 bp, Artificial Sequence
  derived and/or modified sequence
atgggtcggccactgcatctggttctgttgtccgcttccctcgcagggctgctgctccttggtgagtcactgttcattaggcgcgaacaggctaacaacatcctcgcccgggtaactagagcaaactcctttctggaagagatgaagaagggccacctggagagggaatgtatggaagagacttgtagctacgaggaagccagagaggtttttgaagactccgataaaaccaacgagttttggaacaaatataaggacggtgaccagtgcgaaacctccccttgccagaatcaaggaaagtgtaaggacggtctgggcgaatacacctgcacatgtttggaaggattcgagggtaagaattgcgagctctttacaaggaaactgtgctcattggacaatggggactgtgatcagttttgtcatgaggagcagaacagcgtggtgtgctcctgcgccagaggctacaccctggccgataatgggaaggcctgtatcccgaccggcccttatccctgcggtaaacagacacttgagcgacggaaacggtctgtggctcaggctacctcctccagtggagaggcccctgattctataacctggaagccttatgatgctgctgatctcgaccctacagaaaatccttttgatttgctggacttcaatcagacacaacccgagcgaggagacaataacctcactcggatcgtgggcggccaagaatgtaaagatggggagtgtccctggcaagcgctcctgataaacgaagagaacgaaggattctgtggaggaactatactgtccgaattctacattctcacggcagcgcactgcttgtatcaggccaaacggttcaaggtgagggtgggggatagaaatactgaacaggaggaaggcggcgaggccgtacacgaggtcgaagtcgtaatcaaacacaacagatttacgaaagagacctatgacttcgatatcgccgtgctgcggctcaaaaccccaataactttcaggatgaacgttgcccccgcctgcctgccagaaagagattgggccgagagtactttgatgacccaaaagacgggcattgtatccgggttcggcagaacacatgagaagggcaggcagagtacacgcctgaagatgctcgaagtgccatacgtagaccggaacagctgtaagctgagttcctcttttatcattacacagaacatgttctgcgctgggtacgatacaaagcaggaggacgcctgccagggcgactctggagggccccatgtaacccggttcaaagatacatactttgtgacggggatcgttagctggggtgagggctgcgcccgcaaaggcaaatacgggatttatacaaaagtgacagcattcctcaagtggatcgacaggtcaatgaaaactcgcggcctgcccaaggcaaagtcacatgctccggaagtcattacgagctctcctctgaaa

SEQ ID NO: 10074 - DNA, 1464 bp, Artificial Sequence
  derived and/or modified sequence
atgggaagacctctgcaccttgtactgctttccgccagcctggccggcctcctgctcttgggagagtcattgttcatcagacgggaacaggcaaacaacatcttagcccgcgtcacaagagctaattctttccttgaggagatgaaaaaggggcatctggaacgggaatgcatggaggagacttgctcatacgaagaagcacgcgaagtctttgaggacagcgataagaccaacgagttttggaataaatataaagatggagatcaatgcgagacatcaccatgccagaaccaggggaagtgtaaggatggcttaggggagtatacctgcacctgccttgagggctttgaagggaaaaactgcgagttgtttacgcgcaagctatgcagcctggacaacggagactgcgaccagttctgccacgaggagcaaaattctgtggtgtgctcctgtgcccgggggtacaccctggcagataatggcaaagcctgtatcccaaccgggccatatccttgtgggaaacagacactggaaaggcggaagcgtagtgtggcccaggccacgagctccagcggcgaggcacccgattcgattacctggaagccttatgacgccgcagacctggaccccaccgagaaccccttcgatctgctggatttcaatcagactcaacccgagaggggcgacaacaacctgacccggatagtgggtgggcaggagtgcaaagacggcgagtgcccctggcaggcacttttgatcaatgaggagaacgagggtttttgtgggggaactatcttgtccgagttctacatacttacagctgcccattgcttgtatcaggcaaagcggtttaaggttcgggtaggagataggaatactgagcaggaggagggtggcgaggcagtgcacgaggtagaagtggtgattaaacacaaccgcttcaccaaagagacgtacgacttcgacatcgcggtcttgcgtctgaaaaccccaattacttttagaatgaacgtggcacctgcttgcctcccagagagagactgggcagagagcacattaatgacccagaagactggcatcgtgagcgggttcggccggactcatgagaaagggaggcagtcgacccgattgaagatgctggaggtgccttatgtggatagaaacagttgtaagctgagcagttcttttattattacccagaacatgttctgtgctgggtacgatactaaacaagaggacgcatgccagggcgacagcggtggcccacacgtgacccgattcaaggacacctacttcgttaccgggattgtgagctggggtgaagggtgtgcgagaaaggggaaatacgggatttatactaaggtcaccgcattcctaaagtggattgaccgcagtatgaaaactagggggcttccaaaagccaaatcacatgcaccagaggtgataacttcctccccactgaag

SEQ ID NO: 10075 - DNA, 1464 bp, Artificial Sequence
  derived and/or modified sequence
atgggtaggcctctacatctggtgctccttagcgcaagcttagctgggctgttgctgctgggtgaatcattgtttattcgtcgagagcaggccaacaatatccttgcgcgggtgactagggccaattcatttctggaggagatgaagaaagggcatttggaaagagaatgtatggaggagacctgtagctacgaggaggctagagaagtgtttgaagattcagataagacaaacgagttttggaataagtacaaagatggagaccagtgtgagacgtcaccctgccagaaccagggcaaatgtaaagatgggctgggagaatacacctgcacctgcttggagggatttgagggcaaaaactgtgagctgttcaccagaaagctgtgttccctggacaacggggactgcgatcagttctgtcacgaagagcagaattcggttgtgtgctcatgcgcaagggggtatacgttagcggacaatggaaaggcctgcattcccacgggtccctatccctgcggcaagcagacccttgaacgaagaaaacgatccgttgcccaggccaccagtagttctggagaagcccctgactccattacctggaaaccctacgacgccgcggacttggacccaaccgagaacccttttgacttgttggatttcaaccagactcaacccgagcgaggagataacaacctgacccgcatcgtcgggggtcaggagtgtaaggacggggagtgcccttggcaggccctgttaataaacgaagagaatgaaggtttctgcggagggactattttgagtgagttctacattctcacagccgcccactgcctttatcaggccaagcgattcaaggtccgagtgggggaccgaaatactgagcaagaggaggggggagaagccgttcacgaggttgaagtggtgatcaaacacaacagatttaccaaagaaacttatgatttcgatattgccgtgttgaggctgaagacccctattactttccgaatgaacgtggcaccagcttgcctaccggagcgtgactgggccgagtccacattgatgactcagaagacgggaattgtgtctggattcggaaggactcacgagaaaggccgccagagcacgcggttgaaaatgttggaggtgccttacgtggatagaaattcctgtaaactatcttcctcattcatcatcacacagaacatgttctgcgccggctatgacactaaacaggaggatgcatgtcaaggagatagcggcgggccccacgttactaggttcaaagatacttacttcgtaaccggcattgtttcatggggagaaggatgcgctaggaaggggaagtacgggatttacactaaagtgaccgcatttctgaaatggattgatcgatccatgaagactagggggctgcctaaagcgaaatctcatgctccagaggtgatcactagttcccccctgaaa

SEQ ID NO: 10076 - DNA, 1464 bp, Artificial Sequence
  derived and/or modified sequence
atgggtcggcccctccatctggttctgctgtctgcatcactcgccggcctgctgctgctgggcgaatccctctttattaggagggaacaagctaacaatatactggctcgggtgacgagggccaattcattcctggaggagatgaagaaaggtcacctcgagagggaatgcatggaagagacatgtagttatgaggaagcaagagaggtcttcgaggactctgataagaccaatgagttttggaataaatataaggacggcgaccagtgtgagacgagcccctgccagaaccagggaaaatgcaaggacggactgggtgagtacacttgcacctgcctggagggatttgaaggcaagaactgcgagctgttcactaggaaactgtgttccctggataacggtgattgtgatcagttctgccacgaagagcagaacagcgtggtgtgttcctgtgcccggggttacaccctggcggacaatggcaaagcttgcataccaaccggaccgtacccctgcggtaaacagactcttgaacggcgaaagaggtcagtcgcgcaggcaacctcctcaagcggagaggctcctgacagtatcacatggaaaccctacgacgcagcagaccttgatccaactgagaacccatttgacctgcttgatttcaaccagacacagcctgagaggggagataacaatctgacaaggatcgtaggcgggcaggaatgcaaagacggcgaatgtccttggcaagcactgttgatcaatgaggaaaacgaggggttttgtgggggtactatactcagcgagttttacattctgaccgccgcacattgcctgtatcaggcaaagcgctttaaggtcagagtgggcgaccgcaacactgagcaggaagagggtggagaggccgtccacgaagtcgaagtagtgatcaagcataaccgcttcactaaagaaacctacgactttgatatcgctgtcctgagactgaaaacccctattactttccgcatgaatgttgctcccgcatgtctcccagagcgcgattgggcagaatctacgttgatgacccagaagaccggaatcgtctcaggcttcggccggacacacgagaaaggaaggcagtcaacccggctgaagatgctcgaggtaccctacgtggatcgcaactcatgcaagttgtccagttcctttattatcactcagaatatgttctgtgccggatacgacaccaagcaggaggacgcttgtcagggagattcaggcggtccacacgtgacccggtttaaggacacctacttcgtgacaggaattgtgagctggggcgaaggttgtgcccggaaggggaaatacggcatatacaccaaagtgaccgctttcctgaaatggatagacaggtccatgaagacccgaggcctgcccaaagcaaaaagtcacgccccagaagtgatcacatcttcccccctcaaa

SEQ ID NO: 10077 - DNA, 1464 bp, Artificial Sequence
  derived and/or modified sequence
atgggccggccgctacatttggtcctgctatcggctagtctcgctggactacttctccttggcgagtccctattcatccggcgcgagcaagctaacaatattctcgctagagtgacgcgagccaacagctttttggaggagatgaagaagggccaccttgagagggagtgtatggaagagacgtgctcctacgaggaggcgagagaagtcttcgaggattcggataagaccaacgagttctggaataagtataaggacggtgatcagtgtgaaacgtcaccgtgtcaaaaccagggcaaatgcaaggacggtttgggggagtacacttgtacgtgtctcgagggtttcgaagggaaaaactgcgagctattcacgcgtaagctctgctcgcttgataacggcgattgtgaccagttctgccacgaagaacaaaattctgtggtgtgctcgtgtgcccgcggttacacacttgctgacaatggcaaggcgtgtattcctacggggccctatccttgcggaaagcagacactggagcggaggaagagatcagtcgcacaagctacgtctagttccggggaagcgccagactctatcacttggaagccatatgacgcagccgatttggatccaacggagaacccattcgaccttttagatttcaaccagacccagccagaaagaggcgacaataaccttacgagaatcgtcgggggacaggagtgtaaggatggtgaatgtccatggcaagcattgcttatcaacgaggagaatgaaggattctgtggcgggaccatcttatccgagttttacatactaaccgccgctcactgcttataccaggctaagcgctttaaggtcagggtgggtgacaggaatacagaacaggaagaaggtggcgaggctgtgcacgaagtcgaagtcgttatcaagcacaaccgtttcacaaaggagacatacgatttcgatatcgccgtgctccgacttaaaacccctatcacattcagaatgaatgtcgccccagcctgcctccctgaacgcgactgggctgagtcaactctgatgactcaaaagacaggtatcgtaagcgggtttggtcgaacacacgagaagggacgtcaatcaactagactgaaaatgttggaggtgccatatgtggaccgcaactcctgcaagctgagttcctcgtttatcattactcaaaatatgttctgcgcgggatacgacacgaagcaagaggatgcttgccagggtgactccggaggaccgcacgtcacgcggttcaaggacacttacttcgtaactggtatcgtatcttggggcgaaggctgcgcacgtaaggggaagtatggtatctatactaaggtcacggctttccttaaatggatcgaccggtcaatgaagaccagaggtctaccgaaagccaaatcacacgcgccagaagtcatcacttcgtccccattgaag

SEQ ID NO: 10078 - DNA, 1464 bp, Artificial Sequence
  derived and/or modified sequence
atgggtaggccacttcatctggtgttgctgtccgcgtctttagccgggctgctcctgttaggggaatctctcttcatcagacgcgagcaggccaacaatatccttgcccgagtaacacgggccaactcatttcttgaggagatgaaaaagggtcacctggaaagagagtgcatggaagagacctgctcctacgaggaagctcgagaggtgttcgaagatagtgataagaccaatgagttttggaacaagtataaggacggagatcaatgcgaaaccagcccttgtcagaatcaggggaagtgtaaggatggcctgggtgagtatacgtgcacatgtctggaaggctttgagggcaaaaattgtgagctgttcacccgaaaactgtgctctctggacaatggggactgcgatcagttctgtcacgaagaacagaatagtgtggtttgcagctgtgctcgaggatacacacttgccgacaatggcaaggcctgtatccctactggtccttacccttgtggcaaacaaacgctggagcggcgcaagagatccgtggcccaggcaacttcctcgagcggcgaggcccccgatagtatcacctggaaaccttatgatgctgcagacctggaccccactgaaaacccatttgatcttttggatttcaaccagacacagcccgaaagaggtgataataatctcaccagaatcgtgggaggtcaggagtgcaaagatggggaatgcccttggcaggccttactcattaacgaagagaacgagggattttgcggaggaaccatcctgtcagaattctatattctgacagccgctcactgcctgtatcaggcaaaacgtttcaaggtcagggtaggagaccggaacacagagcaggaggagggaggcgaggccgtacatgaagtggaagtcgtcatcaagcataaccgcttcacaaaagaaacatatgattttgacatcgccgttcttcggctcaagacaccgatcacgtttcggatgaacgtggcccctgcttgtctccccgaaagagactgggccgagtcgaccctcatgacacagaagacaggcatagtgtctggttttggtcggactcacgagaaaggacgccaatctacacgacttaagatgctcgaggttccttacgtggaccggaatagttgtaagttgtcctcctcttttattattactcagaacatgttttgtgccgggtacgatacaaaacaggaggacgcgtgccagggcgattccggagggcctcacgtcacaagattcaaagacacctatttcgtgaccggtatcgtcagctggggcgagggttgtgcccgaaagggaaaatatggaatatatacgaaggtgacggctttcctgaagtggatcgatcgttcaatgaagacaaggggcctccctaaagcgaagagccacgcacctgaggtaattacctcaagcccccttaag

SEQ ID NO: 10079 - DNA, 1464 bp, Artificial Sequence
  derived and/or modified sequence
atgggtaggcccctgcacctagtcctcctctcagcaagcctggctggccttctcttgcttggcgagagcctctttatcagacgggagcaggcaaataacatcttggcgagagtgacccgggccaacagctttctcgaggagatgaagaaggggcacctcgaacgggagtgcatggaagagacatgcagctacgaagaagcccgagaagtgtttgaagacagtgataaaaccaatgagttttggaataaatacaaggatggtgaccagtgtgagaccagtccctgccagaaccagggaaaatgcaaagacggcctgggagagtatacctgcacatgtttggaaggcttcgagggaaagaattgtgagctgtttaccaggaaactgtgctccctcgataacggagattgcgatcagttctgccacgaggaacaaaatagcgtggtgtgcagctgcgcccggggatacaccctggccgataacgggaaggcctgcatccctaccgggccttacccttgtggcaaacagacgctggaaaggcggaagcgctcagtggcgcaggccacatcttcaagcggggaggcgcccgatagcattacttggaaaccctacgatgcggcggatcttgaccccacagagaatccatttgatcttctcgacttcaatcaaacgcagcccgaacggggcgataacaatctgaccagaatagtgggaggccaggagtgtaaggacggcgaatgcccctggcaggctctcctgattaacgaagagaatgaggggttctgtggcgggacgatactgagcgaattttacattctaacagctgctcattgtctgtatcaggctaaacgcttcaaggtgcgggttggggatcgaaacaccgagcaggaggaggggggcgaggccgttcacgaagtggaggtcgtcatcaaacataaccggttcaccaaggaaacgtatgactttgacatcgccgtcctaagattaaagacgcccataacattccgcatgaacgtcgcacctgcatgcttgcccgagagggattgggctgaatccacactgatgacacagaaaaccgggatcgtctctggcttcgggcggactcatgaaaaagggagacagtctactcgcctgaaaatgctggaagtgccttatgtcgatcgcaatagctgcaagctgagttcttcttttattattactcagaacatgttctgcgccggatacgacactaaacaggaggatgcatgccagggggactcaggcggcccccatgtgacccgattcaaagatacctattttgtcacagggatcgtcagctggggagaaggatgtgcacggaaagggaaatacgggatttatacaaaggtgactgcattcctcaaatggatagatagatccatgaagactcgcggcctccctaaagccaaaagccatgcccctgaggtaattacgtctagcccattaaag

SEQ ID NO: 10080 - DNA, 1464 bp, Artificial Sequence
  derived and/or modified sequence
atgggtcgaccattgcaccttgttcttctatcggcatcgctagccggattattactgctgggagaaagtctgttcataaggagagagcaggccaacaatatcctggccagggttactagggcaaactctttcctggaagaaatgaagaagggccatctggaacgcgaatgcatggaggaaacctgctcctatgaggaagcccgtgaagtctttgaagactcagataaaactaacgagttttggaacaagtacaaggatggcgaccagtgcgagacatcgccttgtcagaaccaaggcaagtgcaaggacgggttgggtgagtatacttgcacttgcctggagggcttcgaaggaaaaaactgcgaattgtttacccgcaaactatgcagtctcgacaacggagactgcgatcagttctgtcatgaagagcaaaatagcgtggtatgctcctgcgcccgaggatacacattggctgacaacggaaaagcatgcatccctaccggaccatatccatgtgggaaacagaccctggagcggcggaagaggagcgtggctcaggccacaagttctagtggcgaggctcctgactcaattacctggaagccctacgacgcagcggacctcgatcccacagaaaacccatttgatttactggatttcaatcagactcagcccgagaggggtgataataatctgacacggatcgtcggcggacaggagtgtaaggacggtgaatgtccatggcaggccctgctgatcaacgaagagaatgagggcttctgtgggggtaccattctgtcggagttttacattctgaccgccgctcattgtctgtaccaagccaagcggtttaaggtccgcgtgggcgatagaaacactgagcaggaggaaggcggcgaagcggtacacgaggtcgaagttgtgattaaacataatcggttcacaaaggaaacttatgattttgacatagccgtgctccgcctcaagacaccaatcaccttcagaatgaacgtcgctcccgcttgtctgcctgaaagagattgggcggagagcacactaatgacacagaaaacaggcatagtgtccggcttcggccgcacacacgaaaaaggccgtcaaagtacacgactgaagatgcttgaggtcccatacgtcgacagaaattcctgcaaactgtcttcatccttcattataacacaaaacatgttttgtgcgggatacgatacgaagcaggaagacgcctgccagggggacagcggcggacctcatgttacccggtttaaggatacttactttgtaaccgggattgtctcctggggggaaggttgcgcaaggaagggcaaatacgggatatacactaaggtcacggccttccttaaatggatcgaccgatctatgaagacccgcggtctgccgaaggccaaatcccacgctccagaggtcattacgagttcgcctctcaag

SEQ ID NO: 10081 - DNA, 1464 bp, Artificial Sequence
  derived and/or modified sequence
atggggagacctctacatttggtgctgctgtcagcctccctggctgggttgctcctgctaggggagagcttgttcattaggcgcgaacaggcaaataacattctggccagagtcacccgcgctaactcctttctcgaggaaatgaagaaaggccatctggaacgggagtgtatggaagaaacctgcagctacgaggaagcacgggaagtatttgaggatagtgacaagaccaacgagttttggaacaaatacaaggatggtgaccagtgcgaaacatcaccctgccagaaccagggcaaatgtaaagatggcctgggagaatatacttgtacctgcttagagggctttgaggggaagaactgcgagttattcactcgtaagctctgcagcctcgataatggcgattgcgatcagttttgccatgaggagcagaactctgtggtgtgcagctgtgccaggggctatacccttgccgacaatggaaaagcctgtattccaacagggccttacccttgcggtaagcagacactggaaaggcgaaaaagaagcgtcgcgcaggctactagttcgagtggtgaggcccctgacagcataacatggaagccttacgatgccgctgacctagatcctacagagaatcctttcgatttgctggatttcaatcaaactcaacccgagaggggcgacaataatctgaccagaattgtgggtggacaggaatgtaaggacggggagtgtccctggcaggcccttttgattaacgaggagaatgaaggattctgcggaggcactattttgtccgagttttacattttgacagctgcccactgtctctatcaagccaagcggttcaaagtccgtgtgggtgaccgaaatacagaacaggaagagggcggggaagccgtacatgaagttgaagtggttatcaaacacaacagattcaccaaggagacgtatgactttgacattgcagttctcagactgaaaacccctattacatttaggatgaacgtggctcccgcatgcctacccgaaagagattgggctgaaagtactttaatgactcaaaagactggcattgtttcaggcttcgggaggacacatgagaaaggccggcagtcaacccggctcaagatgttggaagtcccttatgtcgatcgtaattcgtgcaagttgtcctccagctttataataactcaaaacatgttttgcgccggctacgataccaagcaggaggatgcctgccaaggagactcagggggcccccacgttactcggtttaaggatacttactttgttaccggcatcgtgagctggggcgagggctgcgctcgaaagggcaaatacggcatctatacgaaagtgaccgcatttctgaagtggattgatcggtcaatgaaaactcgcgggctaccaaaagccaagtcgcatgcacccgaggtgatcacatcttccccattgaag

SEQ ID NO: 10082 - DNA, 1464 bp, Artificial Sequence
  derived and/or modified sequence
atggggcggcctctccatctggtgttactctctgcgtctctcgctggactgcttctcttaggcgaaagcctgttcatccgaagggaacaggccaataacatccttgctcgagtgaccagggccaattctttcctcgaggagatgaagaaggggcacctcgaaagggaatgcatggaagagacttgttcttacgaagaggccagagaggtttttgaggacagcgataaaactaacgagttctggaataaatataaagacggggatcaatgtgagacttcaccctgccaaaaccagggaaagtgtaaagatggtctgggcgagtatacgtgtacctgtttggaagggttcgaaggaaaaaattgcgagttgtttacaagaaagctgtgctcactggataacggcgactgcgatcagttctgccacgaggagcagaactcagtggtgtgcagctgcgcacggggctatacccttgccgataatggaaaagcctgcattccaacaggcccatacccctgtggaaagcaaaccctggaacggcgtaaacggtccgtggcccaggcaacaagctctagcggcgaagccccagacagcataacttggaagccctacgatgcggccgatctcgacccaacggagaaccccttcgacctgcttgacttcaatcagactcagcctgaacggggagataataacctgacccgcattgtgggggggcaagagtgcaaggatggggagtgcccctggcaggccctccttattaatgaggagaacgagggcttctgcgggggcacgattctctcagaattctacattctgaccgctgctcattgtctgtaccaggctaaacgtttcaaggttcgggtgggtgaccgaaacaccgaacaggaggagggaggcgaagcagtccatgaagtggaagtggtcattaagcataacagatttaccaaggagacctacgacttcgacatcgctgtgcttcggctcaagaccccaatcacctttaggatgaatgtcgccccggcctgtctgcctgagcgagattgggccgaatctacgctcatgacacagaaaacgggaatcgtctctggctttggccgcacacatgaaaagggaagacagtccaccaggctgaagatgctggaagtgccttacgtagacaggaatagctgcaaactaagcagctcgttcataataacccagaacatgttttgcgcggggtacgacacgaagcaggaagatgcatgccagggtgacagcggaggaccacacgtgactcgattcaaagacacctacttcgtcacaggaattgtgagctggggcgagggctgcgcaaggaaagggaagtacggcatttacaccaaggtaacggcgttcctgaagtggatcgatcgcagcatgaaaacgcgcggcctgccgaaggctaagagccacgcgccggaggttattacttccagcccactgaaa

SEQ ID NO: 10083 - DNA, 1464 bp, Artificial Sequence
  derived and/or modified sequence
atgggacggccacttcatctcgttcttctcagtgcctcactagccgggttattgctcctcggagaatcactctttatcaggagggaacaggcaaacaacatcctggctcgggtgactagagccaactctttcctcgaagagatgaaaaagggacatctagaacgcgaatgtatggaagagacttgttcatatgaagaggcaagggaagtattcgaagatagtgataaaactaatgaattttggaataaatataaagatggagatcagtgtgaaacatcaccctgtcagaatcagggaaaatgcaaggatgggctcggagaatatacatgtacatgccttgaagggttcgaggggaaaaactgtgaactgtttacacggaagctctgttcactcgataacggagactgtgatcagttctgccatgaagagcagaattctgtcgtatgctcatgtgcccgggggtacacactcgccgataacgggaaagcttgcatccccactggaccttacccttgtgggaaacagactcttgaaaggcgcaaaaggagtgtggcacaggccacatctagttcaggggaggccccagattccattacatggaagccctacgatgcagcagatctcgatcccacagagaacccctttgaccttttggatttcaaccagacacaaccggaacgcggggataacaatctgacaagaatagtggggggacaggagtgtaaagatggggagtgtccttggcaggccctgttgattaatgaagaaaatgaaggattctgcggaggaactatcttatccgagttttacatcctcactgcagcgcattgtttgtatcaagctaaacgcttcaaagtccgcgtcggggatagaaatacagaacaggaagagggaggagaagccgtgcatgaagtggaggtggttataaaacataacaggttcactaaagagacttatgattttgacatagccgtgctaagacttaaaactcccatcacattcaggatgaacgtcgcacctgcttgtctgcccgaaagagactgggctgaaagtactctcatgacacaaaaaacaggaatcgttagtgggttcgggagaacacacgagaaagggaggcagagtacaagactcaaaatgctcgaagtgccatatgtggatcggaattcctgtaaactctcatctagttttataatcacgcaaaacatgttctgtgccggatatgatacaaagcaggaagatgcctgccagggggattcagggggaccccacgtaacaagatttaaagacacatattttgtaactgggatagtctcatggggggaaggatgtgctcggaaagggaagtatgggatatatactaaagttacagcttttttgaagtggatcgatcgctctatgaaaactagaggactgcctaaagccaagtctcacgctcccgaagtgataacatcgtcaccacttaaa

SEQ ID NO: 10084 - RNA, 1467 nt, Artificial Sequence
  derived and/or modified sequence
augggaagaccccugcaucucgucuuacuuagugcaagucuugccggucuucuccugcugggcgaaagucuguucauucgaagggaacaggccaacaauauucuggcacgcgugacucgugccaauucuuuucuggaggaaaugaaaaagggccaccuagaacgugaaugcauggaagaaacaugcucuuaugaggaggcgcgggaaguguuugaggauagugacaagaccaacgaguucuggaauaaauacaaggauggcgaucagugugaaacgucccccugucagaaccagggcaaauguaaggauggacuuggggaguauacuuguacaugucucgagggcuuugaaggcaagaacugcgagcuguucacucggaagcuuuguagcuuggacaauggcgacugugaccaguucugucacgaggagcagaacucggugguguguucuugugcgagaggauacacccuggcugacaaugguaaggcuuguauaccuaccggcccauaccccugcgggaaacagaccuuagagaggcgcaagagaucuguggcacaggccaccaguagcucuggcgaggcgccugauucuaucacuuggaaacccuacgacgcugcugaucuugacccaacugagaaucccuucgacuuacucgauuuuaaucagacacagccggaacgaggagauaauaaucuaacccgcaucgugggaggucaggaaugcaaagacggcgaaugccccuggcaagccuuguugaucaaugaggaaaaugaagguuucugugggggaacgaucuugagugaguucuacauucuuacugccgcucauugucuguaccaggccaaacguuuuaaagugcgugucggggaccgcaacaccgaacaagaagagggcggagaagccguccacgagguagaaguggugauuaagcauaauagguuuaccaaggaaaccuacgauuucgauauugcuguccugaggcucaagacaccuauaaccuuucgcaugaacguugcuccugcaugucugccugagagagauugggcagaaucgacacuuaugacacagaaaacaggaauuguuaguggguucggacgcacgcacgaaaaagggagacagucuacaagacugaagaugcuagaagugccguauguugacaggaauaguuguaagcugagcucgucuuuuaucauaacacagaacauguucugcgcuggcuacgauacgaaacaagaggaugcuugucagggugacucagggggcccgcacgugacuagauuuaaagauacauacuuugugacugggauagugucuuggggagaggggugugcccguaaaggcaaguaugggaucuauacaaaagucacugcguuuuugaaauggauagaccggucuaugaagacuaggggacuucccaaggccaagucucacgcuccugaagugaucacuuccucuccucuuaaguag

SEQ ID NO: 10085 - RNA, 1467 nt, Artificial Sequence
  derived and/or modified sequence
augggccgcccuuuacauuugguuuuacugagugcaucauuggccggauugcuuuugcugggggaaucucuauuuauucggagagaacaagccaacaacauacuggcccgugugacuagagcaaauaguuuucucgaagaaaugaagaaagggcaccuggagagagaaugcauggaagaaaccuguucauaugaagaagcccgggagguguucgaagacucugauaaaaccaacgaauucuggaacaaguacaaagacggggaccagugcgaaaccucccccugccagaaccaggguaaguguaaagacggacugggcgaauacacuugcacguguuuagagggauuugaagguaagaauugugaauuauuuacaaggaaacucugcucccuggacaacggagauugcgaucaauucugucaugaagaacaaaacucagucguguguuccugugcccgcggcuacacccucgcagauaauggaaaagccugcaucccuacuggcccuuaccccugugggaagcaaacucuugagcgaaggaagcgcucaguggcucaggccaccuccucuagcggagaggcuccugacagcaucaccuggaaacccuacgacgcugcugaucuugacccaacugagaaucccuucgacuuacucgauuuuaaucagacacagccggaacgaggagauaauaaucuaacccgcaucgugggaggucaggaaugcaaagacggcgaaugccccuggcaagccuuguugaucaaugaggaaaaugaagguuucugugggggaacgaucuugagugaguucuacauucuuacugccgcucauugucuguaccaggccaaacguuuuaaagugcgugucggggaccgcaacaccgaacaagaagagggcggagaagccguccacgagguagaaguggugauuaagcauaauagguuuaccaaggaaaccuacgauuucgauauugcuguccugaggcucaagacaccuauaaccuuucgcaugaacguugcuccugcaugucugccugagagagauugggcagaaucgacacuuaugacacagaaaacaggaauuguuaguggguucggacgcacgcacgaaaaagggagacagucuacaagacugaagaugcuagaagugccguauguugacaggaauaguuguaagcugagcucgucuuuuaucauaacacagaacauguucugcgcaggcuacgauacgaagcaggaagacgcuugccaaggggauucuggagguccgcaugugacucgcuucaaagauacguauuucgucaccgguaucgucagcuggggcgaaggcugugcacggaaggggaaguacggaaucuauaccaaaguuacugcauuucuuaaauggauugauagaucaaugaaaaccagaggacuuccuaaagccaaaagccacgcccccgaagucauuacaaguucaccuuuaaaguag

SEQ ID NO: 10086 - protein, 615 aa, Artificial Sequence
  derived and/or modified sequence
MRALLLLGFLLVSLESTLSIPPWEAPKEHKYKAEEHTVVLTVTGEPCHFPFQYHRQLYHKCTHKGRPGPQPWCATTPNFDQDQRWGYCLEPKKVKDHCSKHSPCQKGGTCVNMPSGPHCLCPQHLTGNHCQKEKCFEPQLLRFFHKNEIWYRTEQAAVARCQCKGPDAHCQRLASQACRTNPCLHGGRCLEVEGHRLCHCPVGYTGAFCDVDTKASCYDGRGLSYRGLARTTLSGAPCQPWASEATYRNVTAEQARNWGLGGHAFCRNPDNDIRPWCFVLNRDRLSWEYCDLAQCQTPTQAAPPTPVSPRLHVPLMPAQPAPPKPQPTTRTPPQSQTPGALPAKREQPPSLTRNGPLSCGQRLRKSLSSMTRVVGGLVALRGAHPYIAALYWGHSFCAGSLIAPCWVLTAAHCLQDRPAPEDLTVVLGQERRNHSCEPCQTLAVRSYRLHEAFSPVSYQHDLALLRLQEDADGSCALLSPYVQPVCLPSGAARPSETTLCQVAGWGHQFEGAEEYASFLQEAQVPFLSLERCSAPDVHGSSILPGMLCAGFLEGGTDACQGDSGGPLVCEDQAAERRLTLQGIISWGSGCGDRNKPGVYTDVAYYLAWIREHTVS

SEQ ID NO: 10087 - DNA, 1991 bp, Artificial Sequence
  derived and/or modified sequence
gggaaataagagagaaaagaagagtaagaagaaatataagagccaccatgagagccttgcttttgctgggattcctgctcgtgtcccttgaaagcacactgagcatcccgccatgggaggcgcctaaggagcacaagtacaaggcggaagagcatacagtggtacttacagtcacgggagaaccgtgtcacttccccttccagtaccataggcagctctatcataagtgcacccacaaaggtcggccaggtcctcagccgtggtgcgcgacaactccgaacttcgaccaggatcagcgctggggatactgcctggaacccaaaaaggtcaaagaccactgctccaaacacagcccctgccaaaagggcggaacgtgtgtcaacatgccatccggtccgcactgtttgtgtccacagcatctgacggggaatcattgccagaaagaaaagtgttttgagcctcagttgttgagattcttccacaaaaacgaaatttggtaccgcacagaacaggctgccgtagccagatgtcagtgcaagggaccggacgcacattgccagcgcctcgcgagccaggcgtgtcggacgaatccttgtctgcatggcggaaggtgtctggaggtggaggggcaccgcctctgccattgccctgtcggctacacaggggccttttgcgacgtcgataccaaggcgtcgtgctatgacggcaggggactgtcctaccgcgggttggcccgcactacgttgtcgggtgcgccctgtcaaccgtgggcctcggaagcgacgtatcgaaacgtgacggccgagcaagccagaaattggggactcggagggcatgctttttgtagaaaccccgacaatgatatcaggccatggtgctttgtcctcaacagggatagactgtcgtgggaatactgcgacctggctcagtgtcaaactcccacgcaagccgcaccacccacacccgtgtcacccagactgcacgtaccgcttatgcctgcccagccggcacctcccaaacctcaaccaactacgcggacaccgccgcagtcgcagacccctggagcgcttccggcgaaacgggaacagccgccttccctcaccaggaatgggcccttgagctgtggtcagaggctgcgcaaatcactttcgtcgatgaccagagtcgtaggagggctcgtagcattgcgaggtgctcacccctacattgcagcgctctattggggacattccttttgtgctggttcgcttattgcgccctgctgggtgctgacggccgcacactgtctgcaagataggccggcacccgaggatttgacggtggtgctggggcaggagcggcggaaccactcgtgcgaaccctgccagacactggcggtccggtcatataggcttcacgaggctttctcaccggtatcataccagcatgaccttgcgttgcttcgccttcaagaagatgcggacggatcgtgcgcactccttagcccatatgtacagccggtgtgtctcccgtccggagcggccagaccctcagagacaacgctttgccaggtggcagggtggggacatcagtttgaaggtgcggaagagtacgcatcgtttttgcaagaagcgcaagtgccgttcctctcacttgagagatgctcagcgcctgacgtgcacggcagctcgatccttcccggaatgttgtgtgccgggttcttggagggtggaactgacgcctgccagggagatagcggaggtccgttggtgtgcgaggaccaagcagcggagaggaggctcacactccagggaatcatcagctggggatcgggatgtggagatagaaataagcccggtgtatatacggatgtcgcctattacctcgcgtggatcagagagcacacagtgtcctgataagctgccttctgcggggcttgccttctggccatgcccttcttctctcccttgcacctgtacctcttggtctttgaataaagcctgagtaggaag

SEQ ID NO: 10088 - DNA, 1848 bp, Artificial Sequence
  derived and/or modified sequence
atgcgggccttattactgttgggcttccttctcgtgagcctcgagtccactctctcaatacccccttgggaagcccctaaggaacacaaatacaaggcagaagagcacaccgtcgtgctgacagtcacaggcgagccatgtcattttcccttccagtaccacagacagttataccataaatgtacacataaggggcgcccagggccacagccctggtgtgcgacaaccccaaatttcgatcaggaccaacggtggggctactgtctggaaccaaagaaagttaaggaccattgcagtaagcatagtccttgtcaaaagggtgggacttgcgtaaacatgccatccggaccacactgtttgtgccctcaacatctgactggcaaccactgccagaaggagaagtgcttcgaaccacagctcttgaggttctttcataaaaatgagatctggtacaggaccgaacaggccgccgtggcaaggtgtcagtgtaagggaccagatgcccactgtcaacgactggcaagccaagcatgccgtactaacccgtgcctgcatggggggcgttgcttggaagtggaaggccataggttatgtcattgtccagtgggctacactggggccttctgtgacgtggacactaaagcgtcttgctatgatggtaggggtctgtcttacaggggactggcaagaacgaccctctcgggcgctccatgtcagccctgggcctctgaggccacctatagaaatgtaacagccgagcaggccagaaattgggggttgggtggacatgctttctgccggaacccagacaacgatatccggccctggtgcttcgtgctaaatcgggaccgactgtcatgggagtactgtgatctggcacaatgccagacaccaacacaagcggcgccccctacccctgtaagtccacggttacatgttccattaatgccggcacaacctgctccccccaagccccaaccaaccacacgcacccctcctcagagtcaaaccccgggtgctttgcccgcaaagcgggagcagccaccctccttgactcgcaatggtccgctgtcttgtggacaaaggctcaggaagtcacttagtagcatgacaagagttgtaggagggctcgttgccctgagaggcgcgcacccatatatcgcagctctctactggggtcactccttctgcgccgggagtctcatcgccccatgctgggttctgactgcggcacactgtctccaggatcgaccagcaccggaggacctgaccgtggttctgggacaggagcgaaggaatcactcatgcgaaccatgccagaccttggccgttcgctcttaccgcctccacgaggcgttttcgccagtgagctaccagcatgacctggccttactgcggctgcaggaagacgccgacggcagttgcgctctgctgagcccatacgtccaacctgtatgcttgccctcaggggctgcccgtccgagtgagacaacattgtgtcaggttgccggctgggggcatcagttcgagggtgcggaagaatacgcctcattccttcaggaggcgcaggttccattcctctcactggagcgatgcagtgcccctgatgtgcacggatctagcattctgcccggcatgctgtgcgctggctttctggaaggaggaacggatgcctgccagggcgactcaggtggacccctagtgtgcgaagaccaagcagcagagcgtcggctgacactccagggaatcatttcttggggaagcggttgcggcgaccgcaacaagccaggagtgtacaccgacgtggcttactatctggcatggatccgcgagcacacggtgtcttag

SEQ ID NO: 10089 - DNA, 1848 bp, Artificial Sequence
  derived and/or modified sequence
atgagggccctgctgctgctgggcttcctgctggtgtccctggagagcaccctgagcatccccccctgggaggcccccaaggagcacaagtacaaggccgaggagcacacagtggtgctgactgtgactggagagccctgccacttccccttccagtaccaccggcagctgtaccacaagtgcacccacaagggccggcccggcccccagccctggtgtgccaccacccccaactttgaccaggaccagcgctggggctactgcctggagcccaagaaggtgaaggaccactgcagcaagcacagcccctgccagaagggcggcacctgtgtgaacatgcccagcggcccccactgcctgtgcccccagcacctgaccggcaaccactgccagaaggagaagtgctttgagccccagctgctgcgcttcttccacaagaatgagatctggtacagaacagagcaggccgctgtggcccgctgccagtgcaagggcccagatgcccactgccagaggctggccagccaggcctgcaggaccaacccctgcctgcatggaggccgctgcctggaggtggagggccaccggctgtgccactgccctgtgggctacacaggagccttctgtgatgtggacaccaaggccagctgctatgatggccggggcctgagctaccggggcctggcccggaccaccctgagcggggccccctgccagccctgggccagcgaggccacctacagaaatgtgacagctgagcaggccaggaactggggcctgggcggccacgccttctgcagaaatccagacaatgacatccggccctggtgctttgtgctgaacagagaccggctgtcctgggagtactgtgacctggcccagtgccagacccccacccaggccgccccacccacccctgtgagcccccggctgcacgtgcccctgatgcctgcccagcctgccccacccaagccccagcccaccaccaggaccccaccccagagccagacccctggggccctgcctgccaagcgggagcagccccccagcctgaccagaaatggccccctgagctgtggccagaggctgaggaagagcctgagctccatgaccagggtggtgggcggcctggtggccctgcggggggcccacccctacatcgccgccctgtactggggccacagcttctgtgccggcagcctcatcgccccctgctgggtgctgacagctgcccactgcctgcaggacaggcctgcccctgaggacctgactgtggtgctgggccaggagaggaggaaccacagctgtgagccctgccagaccctggccgtgcgcagctaccgcctgcacgaggccttcagccctgtgtcctaccagcacgacctggccctgctgcggctgcaggaggatgctgatggcagctgtgccctgctgagcccctacgtgcagcctgtgtgcctgcccagcggggccgcccggcccagcgagaccaccctgtgccaggtggccggctggggccaccagtttgaaggagctgaggagtatgccagcttcctgcaggaggcccaggtgcccttcctgagcctggagcgctgcagcgccccagatgtgcacggcagcagcatcctgcccggcatgctgtgtgccggcttcctggagggcggcacagatgcctgccagggcgacagcggcggccccctggtgtgtgaggaccaggccgctgagcggcggctgaccctgcagggcatcatctcctggggcagcggctgtggggacaggaacaagccaggagtgtacacagatgtggcctactacctggcctggatccgggagcacacagtgtcctag

SEQ ID NO: 10090 - DNA, 1848 bp, Artificial Sequence
  derived and/or modified sequence
atgcgggccctgctgctgctgggcttcctgctggtgagcctggagagtaccttgagcatacccccctgggaagcaccgaaagagcacaaatacaaggccgaggagcatacagtagtactaaccgtgacgggcgagccttgccactttccatttcaataccatcggcaactttatcacaagtgtacacataagggcaggccagggcctcagccctggtgcgccactacccccaactttgatcaggaccaaagatgggggtactgtttggagccgaaaaaagtgaaggaccactgtagcaaacacagtccctgccagaagggcggaacgtgtgtgaacatgccaagcggaccacattgcctgtgtcctcaacacctgacaggcaaccactgccagaaggagaagtgcttcgagccgcagctactgagattttttcataaaaacgagatctggtacagaaccgaacaagcggccgtggcacggtgccaatgtaagggaccagacgctcattgtcagaggcttgcctcacaggcatgcaggaccaacccctgcttgcatggagggagatgcctggaggtggaaggtcaccggttatgtcactgcccagtgggttataccggagccttttgcgacgtggacactaaggcaagttgctacgatggcagagggctcagctatcgcggtttggcaagaacaaccttgtctggcgcgccttgccagccttgggcttccgaggccacttataggaatgtaactgcggagcaggctcggaattggggtctcggtggtcacgccttttgccgcaatccagataacgatatcagaccctggtgttttgtgttaaatcgagatcgcctctcttgggagtactgcgacctcgcacagtgtcaaacaccaacacaagctgctccaccgacccccgttagcccccgactgcacgtgccgttgatgcccgctcagcctgctccacctaaaccccagcctaccacacgcacgccaccccagagccagacccccggcgctctgcccgctaaacgcgaacagcccccatctttgacgagaaacgggcctctgtcttgcggacagaggctccggaaatccttgagtagcatgacccgggttgtgggcggcctggtggctctccgcggtgcccacccgtacatagcagccctatattgggggcatagtttctgcgcagggagcctgattgctccctgttgggtgttaaccgcagcgcactgtctccaggatcgccccgcaccggaggatctcacggtggtgctgggccaggagaggaggaaccatagctgcgagccatgtcagaccctggccgttagatcctatagattgcacgaagccttctctcctgtttcttaccagcacgacctcgccctgctccgactgcaggaggacgccgacggaagttgtgctcttctctcgccctacgtccagcctgtttgtttacctagcggtgccgccaggcccagcgaaacaactctgtgccaagtcgctggctggggacaccaattcgagggagctgaggaatatgcatccttcctgcaagaagcccaggtcccattcctgtcacttgagcgttgctccgcaccggatgtacatggaagcagcatactgcccggcatgttgtgtgctggctttctcgaaggggggacggatgcctgtcagggcgattccggcggcccgctggtgtgtgaagaccaagcggctgagcggcgcctgacactgcaggggatcatcagctggggttctggctgcggggaccggaataagccaggtgtctatactgacgtggcttattacctcgcttggattagggagcatacagtttcctag

SEQ ID NO: 10091 - DNA, 1848 bp, Artificial Sequence
  derived and/or modified sequence
atgagggcactgctgctgctcggcttcttgctcgtctcgttggaatctacattgtctattccaccatgggaagcccctaaggagcacaagtataaggccgaggagcacactgtcgtcctgaccgtgactggcgagccctgccactttccatttcagtaccatcgccagctgtaccataagtgtacgcacaaaggcaggcccggtcctcaaccttggtgtgcgactactcccaattttgatcaggatcagcgctggggctattgtttagagcccaagaaggttaaagatcactgcagtaagcattcaccttgccagaagggcggaacctgcgttaatatgccaagcggccctcattgcctttgcccccagcacctgactggcaatcactgtcagaaggagaagtgttttgaaccacagctacttagattctttcacaagaacgaaatatggtataggactgaacaggccgctgtagccaggtgccagtgcaagggacccgatgcccattgtcagagactggcttctcaggcatgtcgaaccaacccgtgcctacacggtggacgttgtcttgaagttgaaggccataggttgtgccattgccccgtggggtacactggcgcattctgcgatgttgacaccaaagcaagctgctacgatggacgcggtctatcctaccgcggtctagctaggacgacgctctccggagcgccatgccaaccttgggcgtccgaggccacatatcgcaacgttacagctgaacaggctaggaactggggcctgggaggccacgccttttgccgcaacccagacaacgatatccgcccatggtgctttgtactgaatagggatcgtctctcatgggaatattgtgacctagcacagtgccagactccgacccaagctgcccctccgaccccagtctcccctaggctgcatgttccactcatgcctgcccaaccagcaccccctaagcctcaaccgaccactagaactccacctcaatctcaaacccctggggctcttcccgctaaacgcgagcaaccaccttccttgacccggaacggaccactgagctgtggacagcgcctgaggaagtctcttagcagcatgacccgggtggtgggcggactggttgccttgcgaggcgctcacccatacatcgcagcgctttactggggtcactctttctgtgcgggtagtctgatcgccccttgttgggtcttgaccgctgcccactgtttgcaggacaggcctgcacctgaagaccttactgtggtactggggcaggaaagaaggaatcacagctgtgagccttgccagaccctggccgtgaggagttatagactgcatgaggccttctccccggttagttatcagcatgacctggccctgctgagactgcaggaagatgctgacggctcttgcgcattgctgtccccctacgtacaacccgtttgtctcccatcgggcgcagctcgccctagcgagaccacattatgccaagtggctggttggggtcatcagtttgaaggggctgaggagtacgcttcatttcttcaggaggctcaggtgccgttcctgtctctcgaaagatgctccgctccagacgtgcatgggagttcaatcctccccggaatgctgtgcgccggatttcttgaaggagggaccgatgcctgccagggagatagtggaggccctcttgtttgtgaggatcaggccgcagagcgacggctgacgctccaaggcattatatcctggggtagcggatgtggggaccgcaacaaacccggagtgtatactgacgtagcctactacctagcctggatacgggagcacaccgttagttag

SEQ ID NO: 10092 - DNA, 1845 bp, Artificial Sequence
  derived and/or modified sequence
atgagagcccttctactccttggattcctccttgtgagtctggaatccactctctcgataccaccatgggaagccccaaaagaacacaaatataaagccgaggaacatactgtggtcctcacagttacaggggaaccatgtcactttccttttcagtatcaccggcagctctaccacaagtgtacacataaagggaggcccgggccccagccctggtgcgccactactcctaacttcgaccaggatcagaggtgggggtattgtctagaacctaaaaaagtgaaagatcactgttcaaaacactcgccttgtcagaaaggggggacatgcgtgaacatgccttctggacctcattgtttgtgtccccagcatctgactggaaaccactgtcagaaagaaaaatgctttgagccacagctcttgcgatttttccataaaaacgaaatttggtataggacagaacaggctgcggtggccaggtgtcaatgtaagggacctgatgctcactgccagcgccttgcttctcaagcctgtcggacaaacccctgcctacatggagggcggtgccttgaagtagaagggcaccggctctgtcattgcccagttggatatactggggctttctgtgatgtggatacaaaagcctcatgctatgatggacgcggactgtcataccggggactggcccggacaactctcagtggagcaccatgccagccctgggctagtgaagccacatacagaaatgttactgccgaacaggcgaggaattgggggttgggaggacatgcattttgccggaatccagataacgatatacgcccctggtgttttgtactgaatcgagatcggttgagttgggaatactgtgatttagctcaatgccagacacccactcaagccgcccccccaacaccagtctcccccagactccatgtgcccctgatgccagcacagcctgccccccccaaaccacagcctacaactcgcactccaccacagtctcagactccaggagctttacctgcaaagagagaacagccaccatctctaacacgcaatgggcccctttcttgcggacagcggctgcggaaaagtctatcctccatgactcgggttgtgggaggacttgttgcactacggggggcacatccctatatagcagctctgtattggggacactctttctgcgcgggatctctcattgctccctgctgggtcttaacagctgcacattgtctacaggaccgccccgcacctgaagatctcacagttgttctgggacaggagagaagaaaccactcctgcgaaccctgtcagacacttgctgtccgctcttatcggctacacgaagccttttccccagtttcctaccagcatgatctcgctcttctccgactccaggaagatgccgacgggtcctgtgctctcctttcaccctatgtccagcccgtgtgtcttccctccggagctgccaggccctcggaaactactctctgtcaggtcgcggggtggggacatcagtttgaaggagctgaagaatatgcttccttcctgcaggaagcccaggtgccttttctgtcactcgaaagatgttcagcccctgatgtgcatggatccagtatcttacccggaatgctctgtgccgggttcctcgaaggaggaacagatgcttgtcagggggattctgggggacctctggtatgtgaagatcaggctgcagaacgccggctcactctacaggggatcatttcttggggatccggatgtggagataggaataaacctggagtttacacggatgtcgcttattatcttgcctggatcagagaacacactgtttct

SEQ ID NO: 10093 - DNA, 1845 bp, Artificial Sequence
  derived and/or modified sequence
atgagggccctcttgctgcttgggttcctgctggtgagcctcgagagcaccctgtcgataccaccctgggaggcaccaaaagagcataaatacaaagcggaggagcatacagtcgtcctgacggttacaggggaaccatgccacttcccttttcaatatcataggcagttataccacaaatgtacacacaagggaaggcctggcccacagccatggtgtgcaacaacacccaattttgatcaggaccagaggtggggatactgccttgagcccaagaaagtgaaggatcactgttcaaagcactcaccttgccaaaaaggaggaacctgcgtcaatatgccttcaggcccacactgtctgtgcccgcaacacctgactggcaatcactgccaaaaggagaagtgtttcgagccccagctcttgagattctttcacaaaaatgagatttggtaccgcaccgagcaagccgctgtcgcccgctgtcaatgcaaaggaccagatgcacactgccagaggctcgcatcacaagcttgccgaacaaacccttgcttacatgggggcagatgcctcgaggtagagggccacagactgtgtcactgtccggtcggctacactggagcattttgcgatgttgatactaaggctagttgttatgatggacgggggctgtcgtaccgcggtctcgcaaggaccaccctgtcgggagctccatgtcagccttgggcaagcgaggcaacgtatagaaacgttaccgccgagcaggctcgcaactggggactgggcggccatgcattctgcaggaaccctgataacgatatcagaccttggtgtttcgttttgaatcgggatcggctgagctgggaatactgcgatttagctcaatgccagacgcccacacaggcagccccacctaccccagtttctccgagattgcatgtcccactgatgccagcacagcctgcccctccaaagccacagcccaccacccgcactcccccgcagagtcagaccccaggcgctctgcccgcaaagcgggaacagccaccaagcctaacgcggaacggccctctgtcttgcggtcagagactgaggaaaagtttaagttccatgacaagggtggtgggaggacttgtggcgttgcggggcgcccacccctacattgctgcactgtactggggacactccttctgtgcaggatcactcatcgcaccctgctgggttcttactgccgcccactgtctgcaggatcgccccgcaccagaagatctgaccgtggtactcggccaagagcggaggaaccattcttgtgaaccatgccagaccctcgccgtgcgctcctacaggctccacgaggccttttctccagtaagttaccaacacgatctcgcacttctgagactgcaagaggatgctgacggctcctgtgccctcttgtctccctatgtgcagccagtctgccttccaagtggggcagcccgcccaagcgaaacaaccctttgtcaggtggctggatgggggcaccagttcgaaggtgcggaagaatacgcatcctttctacaggaagctcaggtgccatttctgtccctggaaagatgcagcgcccccgatgtgcacggaagcagcattcttcccggtatgctttgcgcaggctttcttgaaggcggaaccgacgcttgccagggggacagtgggggcccactggtttgcgaggaccaggcagccgagaggaggctcactttgcagggtattatctcttggggctctggatgcggcgataggaataaacctggcgtgtatacagatgtggcatactatctagcatggataagagagcacacagtgtcc

SEQ ID NO: 10094 - DNA, 1845 bp, Artificial Sequence
  derived and/or modified sequence
atgagggcactgctcctgctcgggtttcttcttgtgtccctcgaatcgaccctgtcaattcctccttgggaggccccgaaagagcataagtacaaggcggaagaacacacggtggttctcactgtgaccggggaaccttgtcatttcccattccagtaccaccgacagctttatcataagtgcacccataaggggcgtcctggcccacagccgtggtgtgcaaccacgccaaacttcgaccaagatcagcgctggggatactgtcttgaaccaaaaaaggtgaaagatcattgctcgaagcattcaccttgccaaaagggtggaacttgcgtgaatatgccctccggtccacactgtctttgccctcagcatctcaccggcaatcattgccaaaaggagaagtgtttcgaacctcagctgctcaggtttttccacaaaaacgaaatttggtacaggaccgaacaggccgcagtcgcgcgctgtcaatgtaagggtccggatgcacattgccaacgcctggcgtcccaggcatgtcggaccaatccatgtctgcacggaggccgctgtcttgaggtggaagggcacagactctgtcactgtccagtggggtacactggtgccttttgtgatgtcgacactaaggccagctgctacgacggaagggggcttagctacagaggcctcgcaaggacgactctttccggtgcgccttgtcaaccttgggcatcggaggcaacctacagaaacgtgaccgcagagcaagcacgcaattgggggctcggagggcacgctttttgccgcaacccagacaacgatataagaccttggtgttttgtcctcaacagggataggctctcttgggagtactgtgatctggcacaatgtcaaacccctacccaagccgccccaccgactccagtgtccccacggctgcatgtgccacttatgcccgcacagccggcaccccccaaaccacagccgaccacccgtaccccaccacaatcacaaactcccggagcccttccagccaagagagaacaacccccttcccttacccgcaatggccccctcagctgcgggcaaagacttcgcaagtcacttagctcgatgacccgcgttgtcggagggttggttgctctgcggggtgcacatccatacatagcagcactgtattgggggcactctttttgtgccggtagccttatcgcaccctgttgggttctcaccgcggcacactgtttgcaagacagacctgccccggaggacctgaccgtcgtgctgggccaggaacggcgtaaccattcgtgtgaaccttgccagactttggctgtgcggtcgtaccgacttcacgaagcattttcgcctgtgtcatatcagcatgacctggcgttgctcaggcttcaggaagatgctgatggttcctgcgcacttctgtccccttatgtgcagcctgtgtgcttgccttccggcgcagcaagaccgtcggagactaccttgtgtcaggtggcaggttggggacatcagtttgagggtgcagaggaatacgcatcctttctgcaagaagcacaagtcccgttcctgtcccttgaaagatgttccgctccagacgtgcatggatcatcgattctgccaggtatgctttgtgcaggctttcttgagggaggtactgacgcctgtcaaggagattcgggcgggccccttgtgtgtgaagatcaagccgcggaacgaagattgacgctgcaggggattatctcgtggggatcaggctgtggggatcgaaacaagccaggagtctacactgatgtggcttactaccttgcttggatccgagaacatactgtcagc

SEQ ID NO: 10095 - DNA, 1845 bp, Artificial Sequence
  derived and/or modified sequence
atgagagcattactgctcttggggttcttgctggtgtctttggagtcgaccttgagcatcccgccgtgggaggcgcccaaggagcacaaatacaaagccgaggagcatacggtggtccttaccgttactggagagccttgtcactttcctttccagtaccacaggcaactctaccacaagtgcactcataagggccggcccggtccccagccgtggtgtgctacaactcccaactttgaccaggaccagcgttggggctattgcctggagccaaagaaagttaaggatcactgcagcaagcacagtccatgccagaaaggcggcacatgtgtgaatatgccttccgggccacactgcctttgtccccaacatctgacgggtaaccattgccagaaagagaaatgctttgagccacagctgctgagattctttcataagaatgagatctggtatcgcacggagcaggcggccgttgccaggtgccagtgcaagggtccggacgcacattgccagaggctagcatcgcaggcttgtaggaccaacccctgtctgcatggtgggaggtgtcttgaagtggaaggccatagactgtgccactgtcctgtcggatataccggtgccttttgtgacgtggatactaaggcatcttgttatgatggtcggggactcagctatcgtgggctagcccgcaccaccctgtctggtgctccgtgccagccatgggcttcagaggccacataccgcaacgtcacagccgaacaggcgcgcaattggggcctgggcggccatgcattttgcagaaatcctgataatgacattcggccatggtgtttcgtgttaaacagggaccggctctcgtgggagtattgtgatcttgcccagtgccagaccccaacgcaggccgcccctccgacccctgtgtctccaaggcttcatgtaccacttatgcccgcccagcccgcccctcccaaaccccagccgaccaccaggactcccccccagagccagactccgggagcgttaccagcgaagcgcgaacagcccccaagcctcacaaggaatgggcccctcagctgcgggcagaggctgagaaagagtctgagctctatgacacgggtcgttggtgggctggtggccctgcgtggggcacacccctatatcgccgctctgtactggggccactcattctgtgcgggatctctcattgcgccctgttgggttctcaccgcagcccattgcttgcaggataggcccgcacctgaggacctcacggtggtattggggcaggaacgtcgcaaccactcatgtgaaccctgccagactctcgccgtgaggtcttatcgactccacgaggctttctctcctgtcagctatcagcacgatctcgctcttctgcgtctgcaggaagacgcagatgggagctgtgcactgctatccccttatgtgcagcccgtatgcctgcccagcggcgctgctagaccttccgaaaccaccctgtgtcaggtggcaggctggggccatcagttcgagggagcagaggaatacgcctctttcttgcaggaggcacaggtgcctttcctgagcttggagaggtgttctgcaccagatgtccatgggtcctcaatcctcccaggaatgctctgtgcgggctttctggagggcggcaccgacgcctgccagggcgattctggcgggccactggtctgcgaggatcaggccgccgagcgccggctaaccctgcaggggatcatttcttggggaagtggctgcggggataggaacaagcccggtgtatatactgatgtcgcctactacctagcatggattcgcgaacatacagtctct

SEQ ID NO: 10096 - DNA, 1845 bp, Artificial Sequence
  derived and/or modified sequence
atgagagcgctgctgctgctggggtttctcttggtttcccttgaatccaccctttccattcctccatgggaagcacctaaagagcacaaatacaaggcagaagaacatactgttgtccttaccgtgactggagagccctgtcactttccattccaataccatcgtcagctttaccataagtgtactcacaaaggtagaccaggtccccagccttggtgtgcaactacccccaatttcgaccaagaccagaggtggggttactgtcttgaacctaagaaggtgaaagatcattgttcgaaacattcgccctgccaaaagggaggaacctgcgtgaacatgccttccgggccgcactgcctgtgtcctcaacacctgactggaaaccattgtcagaaggagaagtgttttgaacctcagcttcttcgattctttcacaagaacgaaatttggtacaggaccgaacaagcagcagtcgcgaggtgtcaatgtaagggacctgatgcacactgccaaaggttggcgtcgcaggcctgcagaaccaacccctgtctgcatggtggtagatgcctggaagtcgaaggacatcggttgtgccattgtcccgtgggatacactggcgcgttctgcgatgtggacactaaggcgtcttgttacgacgggcgcggactttcgtacaggggcctcgcacgaactacgcttagcggagcgccctgtcaaccctgggcatcggaagcaacgtacagaaacgtgactgcagaacaagcaagaaattggggtcttggaggccacgccttttgtagaaaccctgacaacgacattagaccttggtgttttgtgcttaatcgagatcggctgagctgggaatactgcgatcttgcgcagtgtcagaccccaacccaagccgcaccacccactccagtgtcacctaggctgcatgtcccactgatgccggcacagcctgccccaccaaagccacaacctaccacccgcaccccgcctcagtcccaaaccccaggagctctgccagcaaagcgcgagcagccaccttccctcaccagaaacggaccactcagctgtggacaaagactgagaaagtcgctttccagcatgacccgtgtggtgggagggctcgtggctctgagaggtgcacacccatacattgctgcactctactgggggcactccttctgtgccggatcccttattgctccttgttgggtgcttaccgcagcacattgtctgcaggataggcctgcacctgaggatcttacggtggtgctggggcaagagcggaggaatcattcatgtgaaccttgtcaaacccttgcagtcagatcataccgtctgcatgaggccttcagtcctgtgtcgtaccagcacgatctggcactgctgagactgcaagaggatgcagatggcagctgcgcgttgcttagcccttacgtgcaacccgtgtgtctgccatcgggggcagcccgaccatcagagactactctttgccaagtggcgggttggggtcatcaatttgaaggtgcggaggaatacgcatccttccttcaagaagcgcaggtccctttccttagccttgaaaggtgttcggccccagatgttcatggttcatccattctgcccgggatgctgtgcgctggttttctcgaaggcggaactgacgcgtgtcagggagactccggcgggcctctcgtgtgtgaagatcaggcagcagaaaggcgactgaccctccaaggaatcatttcgtggggatccggttgcggagatcgaaacaagcctggagtgtataccgacgtggcatactatctggcatggattcgtgagcatactgtgtcc

SEQ ID NO: 10097 - DNA, 1845 bp, Artificial Sequence
  derived and/or modified sequence
atgagagcgctccttctgcttggcttcctcctggtgtcactggaatcgactcttagcattccaccttgggaggcacctaaggagcacaagtacaaggctgaagagcataccgtagtactgactgtcaccggtgaaccttgtcattttccctttcagtaccacaggcaactgtaccacaagtgtacccataaagggcgtcctgggccacagccatggtgtgccacgacgcccaatttcgatcaggaccaacggtggggttactgtctcgaacccaaaaaggtcaaggaccattgctccaagcattctccatgtcaaaaaggaggcacttgtgtgaacatgccgtccggaccacattgcctctgtccacaacatctcactggaaaccattgtcaaaaggagaagtgctttgagcctcaactccttcggttttttcataagaacgaaatttggtacagaaccgagcaggcagcagtggcacggtgtcaatgtaaaggacctgacgcacactgtcagagattggcgagccaggcctgtcgaaccaacccatgcttgcatggtggtaggtgtctggaagtcgaagggcaccgtctgtgtcactgcccagtgggatacacgggggcattttgtgatgtcgacacgaaggcctcatgttacgatggtcggggccttagctacaggggactggcgagaacgaccctctccggtgcgccctgccagccctgggcatctgaggcaacgtatagaaatgtgactgcagaacaagcacgcaattggggcctgggcggccacgccttttgtagaaaccctgacaacgatattcgcccatggtgtttcgtcttgaaccgtgacaggctgtcatgggaatactgtgacctggcacagtgccaaaccccaacccaagccgcccctcctactccagtgtccccgcgtctgcacgtgccattgatgccagcccagcccgcacctccgaaaccgcagcctactaccaggactccacctcaatcccagaccccaggtgcactccctgcaaagagagaacaacccccatcgctgacccggaatggacctctgtcctgcggccaaagactgcgcaaatcgctttcaagcatgactagagtcgtgggaggactcgttgccctgcggggcgcgcatccgtacatcgcggcactttactggggacactcgttctgtgccggctcgctgatagcaccatgctgggtcctgaccgcagcacattgccttcaagatcgcccggcccctgaggaccttaccgttgtgctcggccaggaaagaaggaatcactcgtgcgagccttgtcaaactcttgcagtgagatcctaccgtttgcatgaggctttttcccctgtgtcctaccagcatgatctcgcactgcttaggctccaagaagatgcagatgggagctgtgcgcttctttcgccttacgtacaacccgtgtgccttccctcgggagcggctcgtccttcggaaactaccctttgccaagtggcagggtgggggcatcaattcgagggtgctgaagaatacgcctcgttcctccaagaggcacaggtgccttttctgtcgctcgaaagatgtagcgcaccagatgtgcatggatcctcgattcttccaggaatgctttgcgccggttttcttgaaggggggactgatgcttgccagggtgactcaggaggtccgctggtgtgcgaagatcaagcggctgaacgccggcttactcttcagggcattatctcctggggttcgggatgtggagatagaaacaagccaggtgtctacaccgatgtcgcgtactatcttgcctggataagagaacatactgtgtca

SEQ ID NO: 10098 - DNA, 1845 bp, Artificial Sequence
  derived and/or modified sequence
atgagagctttgctgttacttggattcctactcgtctcactggaatccacacttagtatacctccatgggaagcgccaaaagagcacaaatataaagccgaagaacacaccgtcgtcctgacagtcacaggagagccatgtcactttcccttccagtatcatcgacaactgtatcacaagtgcacccacaaaggtcggccaggccctcagccatggtgtgcaaccacgcccaactttgaccaagaccaacggtgggggtattgtttggaaccaaaaaaggtgaaggaccactgttctaagcacagcccttgccagaaaggggggacctgcgtgaacatgccctctggaccgcactgcttgtgtcctcagcacttgaccggcaatcattgtcagaaagaaaagtgctttgaaccacagcttcttcggttctttcacaagaatgagatttggtatcgcacagaacaggctgccgttgcccgctgccagtgcaaggggccagatgcacattgccaaagacttgcttctcaggcctgtcggactaacccgtgtctgcatggtggtcgctgccttgaggtcgaaggacacagactctgccactgccccgtgggatacacaggcgctttctgcgacgtggacactaaggcctcctgttacgacggcagagggctatcgtaccgcggcctggccagaacgacgttatctggagccccctgccagccctgggcgtcagaggctacatacagaaacgtaactgcagaacaggcaaggaattggggactcggagggcacgccttttgccgcaacccagacaacgatattcggccatggtgctttgtgctgaaccgcgaccggttgtcgtgggaatactgcgacttggctcaatgtcagacaccgacacaggccgcaccccccacaccagtctcccctagacttcacgtgcccctcatgcccgcacaacctgctccgcctaagcctcagccaaccacgagaacaccaccccagtcccagacccctggcgccctgccagcgaagcgcgaacagcccccatcacttacccgcaatgggcctttatcctgcggtcaacggttgcgtaagagtctgagctccatgacccgcgttgtggggggactcgtggcccttaggggcgctcatccttacatcgcggctctttattggggccattcattctgcgcagggagccttatcgccccttgctgggtactcacggcggcgcactgcctccaggaccgccccgctccggaagatttgaccgtagttttagggcaagagcggcgcaatcacagttgtgaaccatgccagacacttgctgtccgcagctatcggctgcatgaagccttctctccggttagttatcagcacgatcttgccctattgagactgcaggaggatgcagacggctcgtgtgcgttgttatcaccctacgtgcaaccagtctgcctcccaagtggtgccgcccggccaagcgagaccactctttgtcaggtggctggatggggtcatcaatttgaaggagctgaagagtatgccagcttcctacaagaggcgcaggtgccctttctttcgctggaacgctgttccgctcccgacgtgcacggttcatcaatattgccagggatgctgtgtgctggcttcctggaagggggaactgatgcatgccagggtgacagtggcggcccgctggtgtgcgaggatcaggcggcggaaaggcggctgaccctgcagggcataattagctgggggtccggctgcggcgatcgaaacaagccaggtgtgtataccgacgttgcttattacctggcctggattcgcgagcacactgtgtcc

SEQ ID NO: 10099 - DNA, 1845 bp, Artificial Sequence
  derived and/or modified sequence
atgcgcgccctcctcctgctgggttttctgctggtgtcactcgaatcaacgctctcgatccccccgtgggaagctccgaaggaacacaagtacaaggcggaagagcatactgtcgtgttgactgtgaccggcgaaccatgccacttcccctttcagtaccatcgccagctgtaccataaatgtacccacaagggccggccgggaccccagccttggtgtgcaactaccccgaacttcgaccaggaccaacggtggggctactgtctggaaccaaagaaggtgaaggaccattgcagcaagcattcgccctgccagaagggaggcacttgcgtcaatatgccaagcggaccacactgcctctgcccccagcacctcaccgggaatcattgccagaaagaaaaatgcttcgaaccacagctgctgcgcttcttccacaagaacgaaatctggtacaggacggaacaggcggctgtggcaaggtgccagtgcaagggcccagatgcgcactgccaacggctggcgtctcaggcgtgtagaaccaatccttgcctgcatggagggcgctgcttggaagtggaaggtcacaggctctgccactgcccggtgggatatactggggcgttctgcgacgtggatactaaggcgagctgctacgatggaagaggactctcctaccggggtctggctcgcaccaccctcagcggcgcgccttgccagccgtgggccagcgaggctacttatagaaatgtgaccgcggagcaggccaggaactggggactggggggacacgccttctgtagaaatccagataacgacatccgcccgtggtgcttcgtgctgaatcgggacagactctcctgggaatactgcgatcttgcccagtgtcagactccgactcaagcagcgccgccaactccagtgtcaccacggctgcatgtcccactgatgccggcgcaaccagctcccccgaagccccagccaacgaccaggaccccgccgcagtcacagacccccggagcgctccctgcaaagagagaacagccgccgtcgttgactcgcaacgggccgctgtcatgcgggcagagactgaggaagtcactgagctcgatgactagagtggtcggaggactggtggctcttcgaggcgcacatccgtacatcgcagcgctttactgggggcattccttctgtgccgggagcctgatcgctccgtgttgggtgctgactgccgcccattgcctgcaagaccgcccagccccggaagatctgactgtggtgcttggacaggaacgacgcaatcattcgtgtgaaccatgtcagactctcgccgtgcgctcgtaccgcctgcacgaagccttttccccagtatcataccagcatgacctggcgctgctcaggttgcaggaggacgcggacggatcttgcgccctcctgtcaccttacgtccaaccggtgtgcctgccgtccggagcagcacgcccgtccgagactactctctgccaggtggcgggctggggccaccagttcgagggtgccgaagagtacgcgtccttcttgcaggaggcccaggtgccgtttctttcacttgaaagatgcagcgcccctgacgtgcacggatcatccatcctgcccggcatgctctgcgccggattcttggagggtggcactgatgcctgccaaggagactcgggaggacctctcgtctgtgaggatcaggcagctgaacggcgcctcacgcttcaaggaatcatttcctggggatcgggatgcggcgatcgcaacaagcccggagtctacaccgacgtggcctactacttggcctggatccgcgaacataccgtctcc

SEQ ID NO: 10100 - DNA, 1845 bp, Artificial Sequence
  derived and/or modified sequence
atgagagctcttctgctgctgggattcctcctggtgtcactcgaatcgactctgtccatcccaccgtgggaagcaccaaaggagcataagtacaaggcagaagagcatactgtcgtgcttactgtgactggggaaccttgccacttcccgttccagtatcacaggcagctgtatcacaaatgcacccataagggtagacctggacctcagccctggtgtgcaaccacgccaaatttcgatcaggatcaaaggtgggggtattgcctcgagccgaagaaagtgaaagatcactgtagcaagcattcgccctgtcaaaaggggggaacctgtgtgaacatgccttcaggtccccattgcctgtgtccacagcatcttactggcaaccattgccaaaaggaaaagtgttttgaacctcaactgctgcgttttttccataagaatgaaatatggtatcgcaccgaacaagccgcggtggcccggtgtcaatgcaaaggaccggacgcccattgtcaacgactggcgtctcaagcatgtagaaccaatccttgtctgcacggtggaagatgtctcgaggtggaaggacatcgcctctgtcactgtcctgtgggatacactggtgccttttgcgacgtggatactaaggcttcatgctacgatgggcgaggcctgtcatacaggggtctggcacgcaccacgctctccggagcgccatgccagccttgggcgtcggaagcaacgtaccggaacgtgactgccgaacaggcgcgcaactggggccttggaggacatgcattttgcaggaacccagataacgacataagaccctggtgttttgtccttaatcgcgacagactcagctgggaatactgtgaccttgcacaatgtcaaacgcccacccaggcagcaccacctacgccagtctcccctcgcctgcatgtgccgcttatgcccgcacagcctgcacctccgaagcctcaaccaaccacccgtactcctcctcaatcgcagactccgggcgcacttcctgcaaaaagagagcagccaccaagcctcacccggaatggacctctttcgtgcgggcaacgattgagaaagtcgctgtcctccatgacccgagttgtcggggggttggtcgctctgcggggcgcgcacccatacatcgcagctctttactggggtcactcgttttgtgccggtagcctgattgcaccgtgctgggtgctgactgcagcacattgtctgcaagatagaccggcaccggaagatcttaccgtcgtgctgggacaggagaggaggaaccattcctgtgaaccgtgtcaaactcttgcagtacgctcgtaccgtctccacgaggcgttcagccctgtgtcctaccagcatgatcttgcactgctgcgcctgcaggaggacgcagatggctcgtgtgctctccttagcccatacgtccagccagtctgcctgccgtccggagcagcaagaccttctgaaactactctttgtcaagtcgccggctggggacatcaatttgaaggcgcagaggaatacgcctcgtttcttcaagaagctcaagttccttttctgtcgctcgaacgctgttcggctcccgacgtacacggttccagtattctccccggcatgctttgcgcgggttttcttgaagggggaaccgacgcctgccaaggagatagtgggggtccacttgtgtgcgaggatcaagcggcagaacggcgtctgactctccagggcattatctcttggggctccgggtgtggcgatcgtaacaaacccggagtgtacactgacgtggcctactacctcgcgtggattcgcgagcacaccgtctcc

SEQ ID NO: 10101 - DNA, 1845 bp, Artificial Sequence
  derived and/or modified sequence
atgagagcccttctcttgctgggttttctgctggtgagcctggagtccaccctgtccatacctccgtgggaagcgcctaaggagcataagtacaaggccgaagagcacactgttgtgctcactgtgaccggggaaccatgccatttcccttttcaataccaccggcagttgtaccacaagtgtactcacaagggtcggccaggtcctcagccatggtgtgcgaccacccctaacttcgatcaggatcaaaggtggggatactgccttgaacccaagaaggtgaaagatcattgttccaagcactctccttgccagaaaggaggtacttgcgtcaatatgccttccggccctcattgtctgtgccctcagcatctgaccggtaaccattgtcaaaaggagaagtgttttgagccacaacttctgcgcttttttcacaaaaacgaaatctggtatcggaccgaacaagcagcagtggcacgatgtcagtgcaagggaccagatgcacactgtcaaagacttgccagccaggcatgtaggactaacccttgccttcatggtggtagatgccttgaagtggaaggacatcggctgtgtcattgtccagtcggatacacgggtgccttctgcgatgtggataccaaagcctcctgttacgatggtaggggcctctcctaccgtgggcttgcgcgaaccaccctctccggagccccatgtcagccgtgggcgtcagaagccacgtaccgcaacgtcactgcggagcaagctcgcaactgggggcttggaggccacgcattttgtagaaacccagataatgatattagaccctggtgcttcgtcctgaatcgggacaggctgtcctgggagtactgcgatctggcacagtgccaaacccctactcaggccgctcctccaactccggtgtctccgagattgcacgtgcctctcatgccggcacagccagcaccacccaagcctcagccgaccactcggaccccgcctcaatcccagaccccaggagctctgccagcgaagagggagcaacctccttcgcttacgcgcaacggacctctgtcgtgtggtcaacggctccggaagtctctgagctcaatgactcgagtggtgggaggtcttgtggcactgaggggagcacatccttacatcgccgcattgtactggggccatagcttctgcgccggatcgctcattgccccttgttgggttctcactgcagcacattgtctccaagacagacccgcccccgaagatctgactgtggtccttgggcaggagagaaggaatcattcctgcgagccttgtcaaactctggctgtgcgctcatacagactgcatgaagcattttcccctgtctcctaccagcatgatctcgcactgcttcgcctccaggaggatgccgacggttcctgcgcactgctgtcaccctacgttcaacccgtgtgtctgccaagcggtgcagcgcgaccctccgaaaccaccctgtgtcaggtggccggctggggccatcagtttgaaggagctgaggagtacgcgagctttcttcaagaagcccaggtgcccttcctcagcctggaacgttgttcggcacctgatgtgcatggatcctcgattctgccgggaatgctgtgtgccgggtttctcgaaggaggcaccgacgcctgccagggagactcaggagggccgcttgtgtgtgaggatcaagctgctgagaggagacttaccctgcagggaatcatttcgtggggaagcggatgtggagacagaaacaagcccggagtgtacaccgatgtggcatactacctggcatggatccgagaacataccgtctcc

SEQ ID NO: 10102 - DNA, 1845 bp, Artificial Sequence
  derived and/or modified sequence
atgagggccctgctgctgctaggtttcctcctcgtctcactggagtctacactgagcatacccccttgggaagcccccaaggaacataaatataaggctgaagaacacacagttgtgcttactgtgacgggggaaccttgccattttccgttccagtatcaccgccagttgtatcacaagtgtacacacaaaggtagacctggcccccagccctggtgtgcaacaactcctaattttgaccaggatcagcggtggggctattgtttagagccaaagaaagtcaaggaccactgttctaagcattccccatgccagaagggaggtacttgcgttaatatgccaagtggtcctcattgcctctgccctcaacatcttaccgggaaccactgtcagaaagagaagtgtttcgagccgcagctgctgcggttcttccataagaacgaaatctggtaccggacagagcaagccgctgtggccagatgtcagtgtaagggtcccgatgcccactgccagcgcctggcaagccaggcatgtaggaccaatccttgtctgcacggggggagatgcttagaagtggaaggacaccgattgtgccactgcccagttggatacacaggtgcattttgcgatgtcgacactaaggcttcgtgttatgatggccggggtttgtcctacaggggtcttgcacgaactactctttcgggagctccttgccagccgtgggcatcggaagccacatatagaaacgtgacagccgaacaagctaggaattggggactgggaggccatgctttttgccgcaacccagacaacgatattagaccatggtgtttcgtgctgaaccgggaccgactcagctgggaatactgtgatcttgcgcagtgccaaacccccacgcaggcggcaccccctacccccgtgtctcctagactgcacgtgccattaatgccagcacaacctgccccccctaaaccccagcccactactaggactcctccgcagtcccagactcctggcgcccttcccgcaaagcgcgagcagccgccaagcctcaccaggaatggacctctgagttgtggacagcgactgcggaagagcctgtccagcatgacccgcgtggtcggaggcctcgtggccctgcggggggcacatccatatatcgccgccctgtattggggtcatagtttttgcgcaggttcgctaatcgccccctgttgggtgctcactgctgctcactgcctgcaggatagacctgcacctgaggacctgacagtagtgttgggccaggagcgccggaatcattcttgcgaaccctgtcaaactctagccgtgcgatcttaccggctgcatgaggccttcagccccgtgtcttatcaacacgatctggccttgttgcgcctacaggaggacgccgacggaagctgtgcccttctgtcaccttacgtccagccggtgtgcctgccatctggtgcggcacgaccgagcgaaacaactctttgtcaggtggccgggtggggacatcaattcgagggtgctgaagagtacgcatcctttctgcaggaggcacaagtgccattcctgtctcttgagcgatgctccgcacccgacgtgcatggatcttccattctaccaggcatgctctgtgcgggctttctggagggaggtaccgatgcctgccaaggagatagtggtggaccccttgtatgtgaagatcaggcagcggagcgccggctaacgcttcagggtatcatatcctgggggagcggctgcggggatcgaaataagccaggggtctacaccgatgtggcctactacctcgcgtggatccgtgaacatactgtttct

SEQ ID NO: 10103 - DNA, 1845 bp, Artificial Sequence
  derived and/or modified sequence
atgagggcgttattgctgctgggctttcttttggtgagcctcgagagtacactgagtatacctccgtgggaggcaccaaaggaacataaatacaaggcagaggaacacacggtcgtgctcactgtcacgggcgaaccatgtcacttcccatttcagtaccatcgccagctgtatcacaagtgtacgcataaaggtcggcccggccctcagccctggtgtgcaacaacccctaacttcgatcaagaccaaaggtggggttactgcctggaacctaagaaggtcaaagaccactgcagcaagcatagtccatgtcagaagggaggtacgtgcgttaacatgcccagcggaccgcattgtctctgtccccaacaccttaccggtaatcactgccagaaggagaagtgttttgaacctcaacttttgagattttttcacaaaaatgaaatttggtacagaacagaacaggcagccgtcgcacggtgtcaatgcaaagggcccgatgcccactgccaaagacttgcaagccaggcttgccgcaccaacccatgtctgcacggggggcgctgcctggaggttgagggccacaggttgtgtcactgccccgttggttatacaggggccttctgtgatgtggacacaaaagcatcttgttacgacggacgaggcctcagttaccgcggtctggcccgtaccacactgtctggagcaccctgtcagccctgggctagcgaagccacatatcggaatgtgaccgcagagcaagctaggaactggggacttggcgggcatgccttctgccgcaacccagacaatgatattcgtccttggtgctttgtgctgaatcgcgataggttgtcatgggaatactgcgatctcgctcagtgccagacacctactcaggcagccccccccactcctgtaagtccccggctacatgtaccactcatgcccgcacagcccgccccacccaagccccagccgactacgcggacccctccgcagtcccaaacccccggagcgttgcccgccaaaagagagcagcccccaagcttaacaaggaacggtccgttgagttgcggacagcggctaagaaaaagcttaagctccatgacacgcgtcgtgggcggattggtggcgcttaggggtgcccatccatacatcgcggctctctactggggtcatagcttctgtgctgggtccctgatcgctccttgttgggtcctgacagccgcacattgcctgcaggatcgccctgccccagaggacctgacagtggtactggggcaggaacggaggaaccatagctgtgagccgtgccaaaccctcgccgtgcggtcctatcgtctccatgaggcctttagccctgtgagttatcagcatgatctggcacttttgcgtctgcaggaggacgcagatggctcctgcgcattgctttccccatatgttcagcccgtgtgcctcccctccggggcagcacgcccatcggagaccaccctgtgtcaggtcgccggctggggccatcagtttgaaggagccgaggagtacgcaagcttcttgcaagaggcacaggtcccttttttatcactggaaagatgcagtgcacccgacgtccacggtagtagcattctgcccggcatgctgtgtgcaggcttcttagagggcggtaccgatgcatgtcagggcgattctggcgggccgctcgtgtgcgaggatcaggctgccgaaaggaggctaaccctgcagggcatcatctcctgggggtctgggtgtggggaccggaacaagccaggagtatacactgatgtggcgtactatttggcctggatacgggaacataccgtgtcc

SEQ ID NO: 10104 - DNA, 1845 bp, Artificial Sequence
  derived and/or modified sequence
atgagggcacttctgcttttaggatttctccttgtctcactggagtctaccctgtcaattccgccatgggaagccccgaaggaacacaagtataaagcggaggaacataccgtcgtgctgactgtaacaggggaaccttgccacttcccattccagtaccataggcaactctaccacaagtgtacgcacaagggccggcccggcccccagccatggtgtgcaactacccccaattttgaccaagaccagcgctggggatattgtctggaacccaaaaaagtgaaagaccattgttctaaacacagtccttgccagaaaggaggaacctgtgtgaatatgccaagcggaccgcactgcttatgtccgcagcatctgactggaaaccattgccagaaggagaagtgcttcgagccgcagcttctgcggttctttcataaaaacgaaatctggtataggacagagcaggctgccgtcgcccggtgtcagtgtaagggcccggacgcccattgccagcgattagcaagccaggcgtgtaggaccaacccgtgtttgcatggagggcggtgtctagaggtggagggccataggctctgccactgcccagtcggatacactggcgccttctgcgacgtagacaccaaagcatcttgctatgacggcagggggttgagttataggggactagcaagaactacactctctggagccccctgtcaaccctgggcatcagaagccacctacagaaacgtgacggctgagcaagcccgtaactgggggctgggagggcatgctttctgtaggaatccagataatgatatacggccctggtgcttcgtgctgaatagagatagattgtcatgggagtactgcgacctggcccagtgccagacccccacgcaggccgcaccacctacccccgtgtccccgagattgcacgtccctctcatgcccgcacaacctgctcctccaaaaccccagccgaccacacgcacgcccccgcaatctcagactcccggggccctgccagctaaacgagagcagcccccttcactcaccagaaatggcccattgagttgtggacagaggcttcggaagtccctctcttctatgactcgagtcgtcgggggccttgttgccctccggggggcacacccctatatcgccgcgttgtattggggtcactcattctgcgccgggagcctcattgctccctgttgggtcctgaccgcagcacactgtctacaggaccgaccggcaccagaagatctgacagttgtactaggccaagaacggcggaaccattcttgtgagccctgccaaacactggcagtgagatcttatcgcctccatgaggcattttcgcccgtgtcatatcagcatgacctggccttgttgcgtctccaagaggatgccgatgggagttgcgctctcctcagcccttacgttcagcccgtatgtcttccgagcggggccgcaagaccatccgaaaccaccctgtgccaagtggctggctgggggcatcagtttgagggagcagaggaatatgcttcattcctgcaggaggcacaggtacccttcctctctctggaacggtgctccgcccccgacgtgcatggctcctcaatcctcccaggcatgttatgcgctggatttttagagggtggaactgatgcatgccaaggagattcgggaggaccgttggtgtgcgaggatcaggccgcagagaggcgactcaccttgcagggcatcatctcatggggaagcgggtgcggagaccggaataaacctggggtgtatacagacgtagcgtactacctcgcctggattagagaacacacagtgagc

SEQ ID NO: 10105 - DNA, 1845 bp, Artificial Sequence
  derived and/or modified sequence
atgcgggctctcttgctgcttggcttcttactcgtgagtctggagtctaccctcagtatccctccttgggaagcccctaaggaacataaatacaaagccgaagaacacacagtagtacttacagttacaggcgagccctgccatttcccgttccagtatcaccggcagctgtatcacaagtgcacgcataaaggccgccccggcccacagccctggtgcgctaccacacctaatttcgatcaagaccaacgctggggctattgtcttgaaccgaagaaagtaaaggatcattgtagcaaacactcaccctgtcagaagggtggaacgtgtgtgaacatgccgagcgggcctcattgtctgtgtccgcagcatttgacaggaaatcactgccagaaagaaaagtgcttcgaacctcagcttctgcgctttttccacaaaaatgagatctggtatagaaccgagcaagcagccgttgcccgatgccagtgcaagggtcctgatgcacactgtcagagacttgcttcgcaggcctgtcggaccaacccctgcttacacgggggccgatgtcttgaagtggaggggcaccgcctctgccattgccctgtggggtacaccggcgccttctgcgatgttgatactaaagctagctgttacgacggtcggggtctgtcttacaggggcctggcgaggaccacactaagcggcgccccttgtcaaccctgggcctccgaggcaacctatcgaaatgtgaccgcggaacaggcccgaaactggggtctcggcggacacgcgttttgcagaaaccccgacaacgatatccgtccatggtgcttcgtgctaaatagagataggttgtcttgggagtattgcgatctggcgcagtgccagactcccactcaggccgccccaccaactccagtgagcccacgacttcacgtgccgctcatgccagctcagcctgccccccctaagccccaacccaccacccggacccccccacagagtcaaacaccaggggccctgccagccaagcgagaacagcccccctcgctgacacgaaacggtccactaagttgcggacagcgactccgcaagtccctgtcttccatgaccagggtggtcgggggtctggtggccctgaggggcgctcatccgtatatcgcagcactatattggggacactctttctgcgcagggtcccttatcgccccctgttgggtcttgacagccgcccattgcctgcaggaccggcccgcccccgaagatctgacagtggtactcggtcaagaacgccggaaccattcctgtgagccctgccaaactctcgctgtgcggtcttaccgcctccatgaggctttctcacccgtctcgtatcagcatgacctggctctcctgaggcttcaggaggatgccgacggcagttgtgccctcctctccccctacgtgcaacccgtgtgcctgccctctggggccgctagacccagcgaaactactctctgccaggtagcaggttggggccaccagtttgaaggcgctgaggagtatgcatcttttctccaggaggcgcaggtgccatttctgagccttgagcgctgttccgcaccggacgtgcatgggagcagcatcctaccaggcatgttgtgcgctggcttcctcgagggtggcacagatgcatgtcaaggggacagcgggggcccactggtgtgtgaagaccaagccgctgagcgacgactgacactgcaaggcattattagctgggggtcaggctgtggcgaccggaacaagccgggggtgtatacggacgtcgcttactatctggcttggattcgtgagcatacggtgtct

SEQ ID NO: 10106 - DNA, 1845 bp, Artificial Sequence
  derived and/or modified sequence
atgcgtgcgctactattattaggttttttactagtatcgctagaatcgacgctatcgataccgccgtgggaagcgccgaaagaacataaatataaagcggaagaacatacggtagtattaacggtaacgggtgaaccgtgtcattttccgtttcaatatcatcgtcaattatatcataaatgtacgcataaaggtcgtccgggtccgcaaccgtggtgtgcgacgacgccgaattttgatcaagatcaacgttggggttattgtttagaaccgaaaaaagtaaaagatcattgttcgaaacattcgccgtgtcaaaaaggtggtacgtgtgtaaatatgccgtcgggtccgcattgtttatgtccgcaacatttaacgggtaatcattgtcaaaaagaaaaatgttttgaaccgcaactattacgtttttttcataaaaatgaaatatggtatcgaacggaacaagcggcggttgcgcgatgtcaatgtaaaggtccggatgcgcattgtcaacgattagcgtcgcaagcgtgtcgaacgaatccgtgtctacatggtggtcgttgtctagaagtagaaggtcatcgtctatgtcattgtccggttggttatacgggtgcgttttgtgatgtagatacgaaagcgtcgtgttatgatggtcgtggtttatcgtatcgaggtttagcgcgaacgacgctatcgggtgcgccgtgtcaaccgtgggcgtcggaagcgacgtatcgtaatgttacggcggaacaagcgcgaaattggggtctaggtggtcatgcgttttgtcgtaatccggataatgatatacgaccgtggtgttttgttttaaatcgagatcgtttatcgtgggaatattgtgatctagcgcaatgtcaaacgccgacgcaagcggcgccgccgacgccggtatcgccgcgattacatgttccgttaatgccggcgcaaccggcgccgccgaaaccgcaaccgacgacgcgtacgccgccgcaatcgcaaacgccgggtgcgttaccggcgaaacgagaacaaccgccgtcgctaacgcgaaatggtccgttatcgtgtggtcaacgtttacgtaaatcgttatcgtcgatgacgcgtgtagtaggtggtttagttgcgctacgtggtgcgcatccgtatatagcggcgttatattggggtcattcgttttgtgcgggttcgttaatagcgccgtgttgggtattaacggcggcgcattgtttacaagatcgaccggcgccggaagatctaacggttgttctaggtcaagaacgtcgtaatcattcgtgtgaaccgtgtcaaacgttagcggttcgttcgtatcgtctacatgaagcgttttcgccggtttcgtatcaacatgatttagcgctattacgtttacaagaagatgcggatggttcgtgtgcgctactatcgccgtatgttcaaccggtatgtttaccgtcgggtgcggcgcgtccgtcggaaacgacgttatgtcaagtagcgggttggggtcatcaatttgaaggtgcggaagaatatgcgtcgtttctacaagaagcgcaagtaccgtttttatcgctagaacgttgttcggcgccggatgttcatggttcgtcgatactaccgggtatgttatgtgcgggttttttagaaggtggtacggatgcgtgtcaaggtgattcgggtggtccgctagtatgtgaagatcaagcggcggaacgacgtttaacgttacaaggtataatatcgtggggttcgggttgtggtgatcgaaataaaccgggtgtttatacggatgtagcgtattatttagcgtggatacgtgaacatacggtttcg

SEQ ID NO: 10107 - DNA, 1845 bp, Artificial Sequence
  derived and/or modified sequence
atgcgcgctctgcttctgctgggctttctgttggtatcgctcgagagcactctgtcgatcccgccgtgggaggctccaaaagaacacaaatacaaggcagaggagcatactgtggtactgactgtgaccggggagccgtgccacttcccgtttcaataccaccgccagctgtaccataagtgcacgcacaagggacggcctggtccccagccttggtgcgccacgaccccgaacttcgatcaggaccaaaggtggggttactgcctggagcctaagaaggtgaaagaccattgcagcaaacactcgccatgccagaagggaggaacctgtgtcaacatgccgtcaggcccgcactgcctttgcccacagcaccttactggaaatcactgccaaaaggagaaatgctttgaaccgcagctcctccggttcttccacaagaacgagatctggtataggactgaacaggccgctgtcgccagatgccagtgcaagggaccagacgcgcattgccagcgcctcgcgagccaggcatgccgcaccaatccttgcctgcatggagggcggtgcctggaggtggaaggccataggctctgccactgtcccgtgggttacactggagcgttttgcgacgtggacaccaaggcgtcgtgttacgatggaagaggcctgtcataccgcggcctcgcacggaccactctctcgggagcgccgtgtcaaccatgggcgtccgaagcaacctaccgcaacgtcactgccgaacaagcacgcaactggggactgggagggcacgctttttgtcgcaaccccgacaacgacatccgcccctggtgcttcgtgctcaacagggacagactgtcgtgggagtactgcgacctggcccagtgccaaaccccaacccaagcagcgccccctactcctgtctcgccgaggcttcacgtcccgttgatgccggcgcaaccggccccgccgaagccgcagccgaccactaggacgccgcctcagagccagaccccgggcgccctcccggctaagagggagcagccaccttcactcactcggaacggaccactgagctgtggacaacggcttcggaagtccctgagctccatgacgcgggtggtgggcggacttgtggccctccgcggggcgcacccttacattgccgccctctactggggccactcgttttgcgcggggagccttatcgctccttgttgggtgttgactgcagcccattgcctccaagaccggccggcgccggaagatctgactgtggtgcttggccaagaaagacgaaatcattcgtgtgaaccatgtcagaccctcgccgtgcgctcctatcgcctgcacgaagccttctccccagtttcctaccaacatgacttggctctgcttagactgcaggaggacgccgacgggtcctgcgcactgctgtccccgtacgtccaaccagtttgcctcccgtccggagcggccaggccgtccgagactactctgtgtcaggtcgccgggtgggggcatcagttcgaaggcgccgaggagtacgcgtcatttctccaggaagcacaggtccctttcctgagcctggaacgctgctcagcaccggacgtgcatggatcgagcatcctccctggaatgctttgcgccggcttcctcgaaggaggaactgacgcatgccagggcgattccgggggaccgctggtctgtgaggaccaagccgcggaacggcgcctgactctgcagggtattatcagctggggctccggatgtggggacagaaacaaaccaggggtgtacaccgacgtggcctactacctggcgtggatccgcgagcacaccgtgtcg

SEQ ID NO: 10108 - DNA, 1845 bp, Artificial Sequence
  derived and/or modified sequence
atgcgtgcactgctcttgctcggctttcttcttgtatctcttgagtctactttgagcattcccccctgggaggcgcccaaggagcacaagtacaaggccgaggagcatacggttgtgctgacagttacgggcgagccctgtcacttcccattccagtaccacaggcaactttatcacaagtgtacacacaaaggccgaccgggaccccagccctggtgtgccacaacccctaatttcgaccaggatcaaagatggggctactgcctggagccaaagaaggtcaaggaccattgctctaagcactctccctgtcagaagggcgggacttgcgtgaacatgccttctggcccccactgtctgtgcccccagcatttgactggaaaccactgccagaaagaaaagtgttttgaaccccagcttctgcgctttttccacaagaacgaaatttggtatcggaccgagcaggccgccgtggcccgctgccagtgtaagggcccggatgcccattgccaacggctagcctcccaggcttgtagaactaatccatgtcttcatggagggcgctgcctcgaggtggaggggcaccgtctatgccattgtcctgtgggatacaccggggccttttgtgatgtggacaccaaggcctcttgttatgatggccgaggactctcttaccgtgggctggctcgtacaactctaagtggcgcaccgtgccagccatgggcatctgaggccacatacagaaatgtcacagcagagcaggcacgtaattggggcctggggggacacgctttctgcagaaaccccgacaacgacattcgtccttggtgcttcgtccttaatagggaccggctttcatgggaatactgtgacctcgcccaatgtcaaacacctacacaggccgctcctcctaccccggtctccccccggctgcatgttccactgatgcccgcacagcctgcccctccaaagccacagcccacaacccgcacacccccccagtcacagactccgggcgctcttcccgctaagagagagcagccgcccagcctgacccgcaacggacctctaagctgcggacagcggctgcgcaagtcattatcatctatgacccgtgttgttggagggcttgtagccctgcgcggggcacacccctacattgcggcgctatattggggtcacagcttttgtgcaggtagcctgatcgcaccctgctgggttctaaccgcagcacactgcctgcaggatcgcccggccccagaggacctgactgtcgtcctgggacaagaaagacgcaaccactcctgtgagccctgccaaacgctggcggtccgaagctaccggctgcacgaggcattcagtcctgtcagttaccagcacgatctggccctcctcaggctacaggaagacgccgatggttcatgcgctcttctgagcccttatgtccagcccgtgtgcctgcctagtggggcagcaagacctagtgaaactacactatgccaggttgccgggtggggacaccagtttgagggagcggaagagtacgcatccttcttgcaggaggcacaggtgccgttcctgagcctggaaaggtgcagtgcgcccgatgtccatggtagttcaatccttccaggcatgctgtgcgctggtttcctggaaggcgggacggacgcgtgccagggagacagcggcgggccactggtgtgcgaagatcaggcggccgaacgaagattgacactgcagggtatcatatcatggggcagtggatgtggggacagaaacaagcccggggtctataccgatgttgcatactacttggcctggattcgcgaacacaccgtctct

SEQ ID NO: 10109 - DNA, 1845 bp, Artificial Sequence
  derived and/or modified sequence
atgcgggccttgctgctccttggatttctcctggtgtcactcgagtccacgctgtcaatccctccatgggaggctcctaaagaacataagtacaaggcggaggagcataccgtcgtgttgactgtgactggagaaccgtgccactttccttttcagtaccacaggcagctgtaccacaaatgtactcacaagggccgcccaggaccacagccatggtgcgcaaccacccccaactttgatcaagaccagcgctggggatactgtctcgaaccgaagaaagtcaaggaccactgctcaaagcactcgccgtgccagaaaggcgggacttgcgtgaacatgccgagcggaccgcactgtctctgcccccaacatctgaccgggaatcattgtcagaaggaaaagtgtttcgaaccgcagttgctcagatttttccataagaacgagatctggtatcggacggagcaggcagctgtcgctcggtgccaatgcaagggaccggacgctcactgccagcgcctggcatcccaggcatgccggaccaacccatgtctgcacggaggacggtgcctggaggtggaaggacacagactttgtcactgcccagtgggctataccggcgccttttgtgatgtggacacgaaggcctcgtgctacgatggacgcggactgtcttaccgaggcctggcacggactacgctctcgggcgctccatgccagccgtgggccagcgaagccacctacagaaacgtgactgccgaacaggctcggaattggggcctcggaggacacgccttttgtcggaacccggacaacgacatccggccgtggtgttttgttctgaaccgcgatagactgtcctgggagtactgcgacctggcccagtgccagaccccgactcaagccgcgcctcctaccccagtgtctccccgcctgcatgtgccactcatgccagctcaaccggcgccgcctaaacctcagcccaccactaggactccgccacagtcacaaacccccggagcgctgcccgcgaagcgggaacaaccaccttctctgacccggaacggccctctctcctgtggacagcggctgagaaaatccctgtcaagcatgactcgggtggtgggagggctggtcgcactgcggggcgcccacccgtacatcgcggccctgtactggggacattccttctgcgcgggatccctgatagccccatgctgggtgctcaccgccgcccattgcctgcaggacaggccggcccctgaggacttgacggttgtgctgggacaagaacgcagaaaccacagctgcgaaccctgccaaaccctggcggtgcgctcatatagactgcatgaggcgttctcgccagtgtcgtaccaacatgatttggcactcctgagacttcaggaagatgcggacggtagttgtgcactgctctcgccgtacgtgcagccggtgtgcctgccttccggggcggccagaccgtcagaaaccaccttgtgccaggtggccgggtggggtcaccagttcgaaggtgcggaggagtacgcgtcgttcctgcaagaggcgcaggttccattcctgagtttggaacgctgcagcgccccagatgtgcacggatcgagcatcttgccgggtatgctgtgcgctggatttctggaaggcggtactgacgcttgccagggggactcggggggcccgctggtctgcgaagatcaagcagcggagcgtaggctgacgctccagggaatcatttcgtggggaagcggctgtggcgatcggaacaagcctggcgtctacactgatgtggcctactacctggcttggatccgcgaacacaccgtgtct

SEQ ID NO: 10110 - DNA, 1845 bp, Artificial Sequence
  derived and/or modified sequence
atgagagcccttctcctgctgggattcttgctggtgtcactggagtccactctcagcatcccaccgtgggaagcgccgaaagaacacaaatacaaagctgaagaacatactgtggtcctgaccgtcaccggagagccgtgccacttcccgttccagtaccatcgccagctgtaccataagtgcactcataagggacgccctggtcctcaaccttggtgcgccacgactccgaacttcgatcaggaccagagatggggatactgcctggaaccgaagaaagtcaaggaccactgctcgaagcactcgccgtgccagaagggcggcacttgcgtgaacatgccttcggggccacattgcctgtgcccccagcaccttacgggaaaccactgccaaaaggagaagtgctttgagcctcaactgctcaggttcttccacaagaacgaaatctggtaccgcaccgaacaggccgcggtggcgaggtgccagtgcaagggccctgatgcccattgccagcggcttgcgtcacaggcatgtcggaccaatccttgcctgcacgggggacgctgccttgaagtggaaggacatcggttgtgtcactgtcctgtgggatacactggggcgttctgtgacgtggacactaaggctagctgctacgatggacgcggcctgtcctacagaggactggctcgcaccaccctgtccggagcaccgtgccagccttgggcttcggaagcaacttaccgcaatgtgaccgccgaacaagcgagaaattggggcctcggaggacacgcgttctgccgtaatccagataatgacatcagaccttggtgcttcgtgctgaatcgagacagactctcctgggaatactgcgacctcgcccagtgccagactcccactcaagccgcgccccctacgcctgtctcaccacgcttgcatgtcccgcttatgcctgcgcaacctgccccgccgaagccccagccgactacgcgcactccaccgcaatcgcaaaccccaggagcactgccagccaagagggaacaaccgccaagcctcacccgaaacggtccgctgtcctgcggccagcgcctccggaagagcctgtcctctatgactagggtggtcggaggactcgtagcgctccggggagcacatccatacatcgctgccctgtactggggccattctttctgcgctggatcactgatcgcaccgtgctgggtgttgaccgctgcccactgcctccaagatcggcctgcgcccgaggacttgaccgtggtgttgggacaggagagacgcaaccattcgtgcgagccatgccagacgctggccgtgcggtcctaccggctgcatgaagcattctctcctgtgtcgtaccagcatgacctcgccctgctgagactgcaagaggatgctgacggatcctgcgcgttgctgagcccatacgtccaacctgtctgcctgccgtccggggcggctcggccctccgaaactaccttgtgtcaagtcgcgggatggggacatcagttcgagggtgccgaggagtacgcctcgtttctgcaggaggcccaagtcccgtttttgagcctggagaggtgctccgcgcccgatgtccatggctcgtccatcctgccgggaatgctgtgtgcagggtttctggagggaggaaccgatgcctgccagggggactccgggggacccctggtctgcgaggaccaggcagctgaaaggcggctcaccttgcagggcatcatttcctggggatcgggctgcggtgaccggaacaagccaggggtgtacaccgacgtggcatattacctggcttggatccgggagcacactgtgtcg

SEQ ID NO: 10111 - DNA, 1845 bp, Artificial Sequence
  derived and/or modified sequence
atgcgggccctacttctgctgggctttcttctcgtgtcactggaatcaaccttgagcatcccaccctgggaagcccctaaagagcataaatacaaggcagaggagcacactgttgtcctgaccgtgaccggggaaccctgtcatttcccatttcagtaccaccgccagctctatcataagtgtacacacaaaggcaggcctggaccacagccttggtgtgccacaaccccaaatttcgatcaggaccaacgctgggggtattgcttggaacccaaaaaagtaaaggatcattgttccaaacacagtccctgccagaagggaggtacctgtgtgaacatgccttccgggccccactgcctgtgtcctcagcacttgaccgggaaccattgtcagaaggagaaatgcttcgaaccgcaactcctacggtttttccataaaaatgagatatggtataggacagagcaggccgcagtggcccggtgccagtgcaaaggaccggatgcgcactgtcagcggcttgcctctcaggcttgcagaaccaatccttgtctgcacggcgggcggtgcttggaagtggagggacaccggctctgccattgtcctgtcggctatacgggtgcattctgtgacgtggataccaaagcttcttgctatgatggtagaggcctgtcatacagagggttggccaggaccactttgagtggtgccccatgtcagccttgggcttctgaggccacttacaggaacgtgaccgcagagcaggcgcgaaactggggactgggcgggcacgcgttctgcagaaacccggataacgatatccgaccttggtgcttcgttctgaatagggacagattgtcttgggagtactgcgatctggcccagtgtcagactcccacacaggccgccccaccgacccccgtgagccctcgcctgcacgttccattgatgccagcacagccggctcccccgaagccccaacctacaacccgtacaccaccacagagtcaaacaccaggagctctcccagctaaaagggagcagccaccttcactcactaggaacggccccctgagctgtggacagcggctccggaagtcactcagtagcatgacaagagtggtcggaggactggttgccttgcgcggtgcacacccttacatagccgcactctattggggtcattctttctgtgcaggctctctaatcgctccctgctgggtgctcaccgctgcccactgcttgcaagaccggcctgctccggaagacctgacggtagtcttgggacaggagaggagaaaccactcttgtgagccttgtcagaccctcgcagtgcgatcttatcgcctccatgaggcgttctcgcccgtctcgtaccagcacgatcttgccctgctgcggctccaagaggatgcagatggatcatgcgctttgctgagtccgtatgtgcagccagtttgcctgcctagcggtgccgcacgaccatccgagacaactctatgtcaggtcgccggctgggggcatcagtttgagggtgccgaagagtacgctagcttcctgcaagaagctcaggtccccttcctgtcactggaacgatgctccgcccccgatgtgcatggttcatccatcctgcctggaatgttatgtgccggatttctggaaggcggcaccgatgcgtgccagggtgatagtggaggcccgctggtgtgcgaggatcaggccgccgagaggagactgacgcttcagggaattatctcttggggctcgggctgcggcgataggaacaagcccggtgtttacacagacgtcgcctactacctcgcttggatccgtgagcacacggtgtct

SEQ ID NO: 10112 - DNA, 1845 bp, Artificial Sequence
  derived and/or modified sequence
atgcgtgccctgttgctgttgggctttctgctggtgtcgcttgaatcaaccctgagtattccgccatgggaagctcctaaagaacataagtacaaagctgaggaacacactgtagtactgaccgtgactggcgagccctgccatttccccttccagtaccatcgacagctttaccataaatgcacacacaagggtcgtcccgggccccaaccttggtgcgccactacccccaacttcgaccaggatcagcggtgggggtactgtctcgaaccgaagaaagttaaagatcactgttctaaacatagcccttgtcagaagggcgggacatgtgtgaatatgccctccgggccgcactgcttgtgcccacagcatctgacagggaaccattgtcagaaagagaaatgctttgaaccacagttgctgcgtttttttcacaagaatgaaatctggtatcggacagaacaggcggcagttgccaggtgtcaatgcaagggtcctgacgctcactgtcagagactagcctctcaggcctgccgtaccaatccttgcctccatggagggcgatgcctggaggtggaaggacatcggctctgtcattgccctgtcggctacacaggcgccttctgcgatgtggatacaaaagctagttgctacgatggaagaggcctgtcttacagaggattggcaagaacaacactttccggcgccccatgccagccatgggcatcggaagccacttaccgaaacgtgaccgcagaacaggcccgaaattggggcctcgggggacacgctttctgcaggaatcccgacaacgatattcgtccttggtgttttgttctaaacagggaccgcctgtcttgggagtattgcgatctggctcagtgtcagactcctacacaggccgctccccccacccccgtgtccccacgactccacgtccctctgatgcccgcgcagcctgctcctccaaagccacagccaacaacccggacccctccacagagtcagactcccggagccctccctgcaaagagggaacagcccccttcactgacaaggaacggaccactgtcatgcggccagagacttcgcaaatcgctgtcaagcatgacgcgtgtggtgggcggtctcgtggcactgcgaggggcacatccttacatcgcggctctgtattggggacatagcttctgcgccgggtccctaatcgcaccttgttgggtgttaactgcagctcactgtttgcaagatcggccagccccagaagacctgacggtggtccttggccaagaacgacggaaccacagctgcgagccatgtcaaaccctggcggtgaggtcatacaggctgcacgaagcattcagtcccgtctcgtaccagcatgatctggccctcctgcgactgcaggaagacgccgatgggtcttgtgcgctgctcagcccctatgtgcagcccgtctgcctgccatctggtgccgcaaggccttccgagactacactctgtcaggtggctggatgggggcaccaattcgaaggcgccgaagaatatgcgagcttcctgcaggaagcgcaagtgccatttttgagccttgaaagatgcagcgctcctgatgtccacggcagctcaatcctcccaggtatgctttgcgcgggttttctggaaggcggaaccgacgcctgtcagggagactcaggtggcccactggtgtgcgaagaccaggcagctgagaggcgactgacccttcagggaatcatcagctggggtagcggctgtggtgacagaaataagcccggagtgtatactgacgtcgcttactatctggcttggatcagagaacacactgtatcc

SEQ ID NO: 10113 - DNA, 1845 bp, Artificial Sequence
  derived and/or modified sequence
atgcgcgcactgctgctcctgggtttcttgctggtgtccctggagtcgactttgagtatcccgccgtgggaggcaccgaaggagcacaaatacaaggcagaggaacacactgtggtcctgacggtgactggcgagccatgccacttcccatttcagtaccatcgccaactctaccataagtgcacccacaaagggcggcccggcccacaaccgtggtgcgccaccacgccgaactttgaccaggatcaacggtggggatactgcctcgaacctaaaaaggtcaaggatcactgtagcaaacattcaccgtgtcagaagggaggaacctgtgttaacatgccaagcggcccacattgcttgtgccctcaacatcttacgggcaaccattgccagaaagagaagtgctttgaaccacaactccttcggttcttccacaagaatgagatttggtaccgcactgaacaggctgctgtggccagatgccagtgtaaaggaccggacgcccactgtcagcggcttgcatcgcaggcgtgccggaccaacccatgccttcacggaggccgctgtttggaggtcgaagggcaccgcctgtgtcactgcccggtcgggtataccggagcgttctgtgatgtggacactaaggcctcgtgttacgacggccgaggactgtcctaccgcggactggcgcgaactaccctttcgggcgctccttgtcagccctgggcctcagaggccacttaccgaaacgtgaccgctgaacaggccagaaattggggtcttggaggacacgcgttttgccgcaatcctgataacgacatccgtccatggtgcttcgtgctcaacagggataggttgtcgtgggagtactgcgacctggcacagtgccagactcctactcaagctgccccgcctactccggtatctccaaggcttcatgtaccactgatgccggcacagccggcgccgccgaaaccgcaacccacgaccagaaccccgccgcaatcccaaactcctggcgccctgccggccaagcgggaacaacccccgtcactgactagaaatggccctctttcctgcgggcagaggctcaggaagagcctgtcctccatgacccgcgtggtgggcggcctcgttgccctgaggggggcgcacccctacattgctgctctgtactggggccacagcttttgcgccggatccctgatcgcaccatgctgggtgctcactgctgcccattgcctgcaggacagaccggcgcccgaagatcttaccgtggtcctcggacaagagcggagaaaccacagctgtgaaccgtgccagaccctggccgtccgatcgtatcgtctccacgaagcattctcacctgtttcgtaccaacatgacctggccctgctgagactgcaggaggacgctgacggaagctgcgctctgctctcaccatacgtgcaaccagtgtgtctgccaagcggagctgcgcgccccagtgaaaccactctgtgccaggtggccggctggggacaccagttcgagggcgccgaagaatacgcatcattcctccaggaggcccaggtcccgttcctgtcgcttgaaagatgctcagcaccggacgtccatgggagctcgatcttgccaggcatgctgtgcgcgggattcttggaagggggtaccgatgcgtgccagggcgactcgggaggaccgctggtgtgcgaagatcaagcggcagaacggcgactcactttgcagggcatcatcagctggggttccggatgcggggatcgcaataagccgggagtgtacacggacgtggcctactacctggcctggatccgggagcacactgtcagc

SEQ ID NO: 10114 - DNA, 1845 bp, Artificial Sequence
  derived and/or modified sequence
atgcgtgcactcctcctgctcgggtttctgcttgtgagcctggaatctaccctgtcaatccccccgtgggaggcgccgaaggaacataagtacaaggctgaagagcatacggttgtcctcactgtgaccggtgagccttgccacttccctttccagtaccacagacagctttaccacaagtgcacccacaagggcagaccgggaccacagccttggtgcgccaccacccccaacttcgatcaggaccagagatggggatactgtctcgaaccgaaaaaggtgaaagaccactgttcgaagcattcaccgtgccagaaaggcggtacctgtgttaacatgcctagcggaccgcattgcctctgcccacagcacctcacggggaatcattgtcagaaagagaaatgctttgaaccgcagcttctgcgctttttccataagaacgaaatttggtacagaactgaacaagccgcggtggcgcgatgccagtgcaaaggacctgacgcccactgccaaagactggcgtcccaggcttgccgcaccaatccatgcctgcacggaggacgctgcctggaggtcgaaggtcatagactctgccattgcccggtcgggtacacgggtgcattctgcgacgtggataccaaggcgagctgctatgacgggcggggactgagctaccgggggttggcccgcaccactctgtcaggagcaccttgccagccatgggctagcgaggctacttacagaaacgtgactgcagaacaagctcggaactggggattgggtggacatgctttctgccggaacccagataatgatatcagaccgtggtgctttgtcttgaaccgcgaccgcctgtcatgggagtactgcgacctggcccaatgccaaacgccgacccaagccgcaccgccgacgcctgtgtctccccgtctgcatgtgcccctgatgccggctcagccagcacccccaaagccccagccgaccactaggactcctccgcaaagccaaactcccggagcactgccggcaaagcgggagcagccgccgtccctgacccggaatggaccgctctcctgcggacaaagactgcggaagtccctgtcctcaatgactcgggtggttggaggtctggtggctctccgcggcgctcacccatacatcgccgctctgtactggggacactcattctgcgcgggttcacttatagcgccctgttgggtcctgaccgcggcccattgcctgcaggatcgccctgccccagaggatctcactgtggtgctcggccaggagcgccgcaatcactcctgtgaaccatgccagaccctggccgttcgcagttaccggctccatgaggctttctcccctgtctcttatcagcacgatctcgccctcctgagactgcaagaggacgccgacgggtcgtgtgctcttctgtcgccttacgtgcaacctgtgtgcctgccatcaggagctgcaagaccgagcgagactaccctgtgccaggtggccgggtggggacaccagtttgagggtgctgaagaatacgccagctttctccaggaagcccaagtgccgttcctttcactcgaacggtgttcggcgcccgatgtgcacggatcatccatcttgccaggcatgctctgcgcaggcttcctcgaaggaggaaccgacgcttgtcagggagactcaggcggaccgctggtctgtgaggatcaggccgctgaacggaggctcacgcttcagggcatcatcagctgggggtccggatgcggggataggaacaagccgggcgtgtatactgatgtggcatactaccttgcgtggattcgagagcataccgtgtca

SEQ ID NO: 10115 - DNA, 1845 bp, Artificial Sequence
  derived and/or modified sequence
atgcgcgctctgcttctgttgggattcctcttggtaagcttggaaagcacactgagtattcctccttgggaagcgcctaaagaacataagtataaggcagaagaacacacagtagttttgactgtgactggtgagccctgtcactttcccttccaataccatcgccagctgtatcataaatgtactcacaagggcagaccgggaccacaaccctggtgcgcaacgacacccaacttcgaccaggaccagaggtggggatattgtctcgagccgaaaaaggtgaaggatcactgctccaagcatagcccatgccaaaaaggaggcacatgcgtgaatatgcccagcggaccccattgtttgtgcccacagcacttgaccggcaaccattgtcaaaaggagaagtgcttcgagcctcagttgctgagatttttccacaagaatgagatttggtatagaaccgagcaggccgccgtagctaggtgtcaatgcaagggtcctgacgctcactgccagagattggcaagtcaggcatgtcgcaccaacccatgccttcacggcggccgctgtctggaggtggaaggccatcgcttgtgccactgccctgtgggttatactggtgccttctgtgacgttgataccaaagcttcctgctacgatggtaggggtctgtcttacagaggtttggcccgcacaaccctttccggtgccccttgccagccttgggcgtcagaagccacttaccgcaacgtcacggcagagcaggcgagaaactggggcctgggcggtcacgccttctgcaggaaccccgacaatgatatacgcccatggtgctttgtgctgaaccgcgacaggctgtcatgggagtattgcgacttggctcagtgccagactcctacccaagctgccccacctacacccgtgtcccctaggctgcacgtacctctgatgcctgcgcagccagctccacctaagcctcaaccgaccacaagaactcccccccagtctcagactcccggtgcattgcccgccaaaagggagcagcccccgtccctcactcgcaacggtccactttcatgcggtcagaggttgcgcaagagcctctctagtatgactagggtcgtgggtggtctggtggctctcaggggtgcccacccgtacatcgctgccctgtattggggacactccttctgtgccggctcactgatcgctccctgctgggtcctcacggctgctcactgtttgcaagataggccagcaccggaagatctgactgttgtgctgggtcaagagcgcaggaaccactcttgcgagccatgtcagactcttgccgttaggagctacaggctgcatgaagcattctcaccagtctcctatcagcacgacctcgcactcctgcgcctccaggaagacgccgatggatcttgcgccctgctgtccccgtatgtgcagcccgtgtgtttgccttccggcgcagccagaccaagcgaaaccaccctttgtcaggtcgcaggatggggtcaccagtttgagggagctgaggaatatgcatctttcctccaggaggcgcaggtgccattcctctccttggaaaggtgttctgccccggacgtccacggtagctctattttgccgggaatgctgtgtgctggcttcctggagggaggcactgacgcctgccaaggtgactctggaggtccactcgtgtgcgaggaccaggcagcggaacgcagactcaccctgcagggcatcatcagttggggtagtggctgcggagacaggaacaagcctggagtgtacacagacgtcgcctattacctggcatggatcagggagcacacagtttca

SEQ ID NO: 10116 - DNA, 1845 bp, Artificial Sequence
  derived and/or modified sequence
atgagagctctgctgctgctgggattccttctggtcagtctggaatcgactttgtccatcccaccgtgggaagcacccaaggaacacaagtacaaggccgaagagcataccgtggtgctgaccgtcactggagagccgtgtcacttcccattccagtaccatagacaactgtatcataagtgtactcataagggccgcccgggtcctcagccgtggtgcgccaccactccgaactttgaccaggatcagcggtggggatactgcctggaaccgaagaaggtgaaggaccattgttccaaacattccccttgtcaaaagggaggaacctgcgtgaatatgccttcgggaccgcattgcctgtgcccccagcatcttactggcaatcattgccagaaagaaaagtgcttcgaaccacagttgctccgcttctttcacaagaacgagatttggtaccggactgagcaggccgccgttgccaggtgtcagtgcaaaggaccggatgctcactgccagcgtcttgcgtctcaggcatgcagaaccaacccatgtttgcacggaggtcgctgcctggaggtggaggggcaccgcctgtgccactgcccggtgggatacaccggcgcgttctgtgatgtggacaccaaggcctcctgctacgatggacggggactgtcataccgaggactcgccagaactactctctccggagcaccctgtcaaccgtgggccagcgaagctacttaccgcaatgtcaccgccgaacaggcacgcaactgggggctgggcgggcatgccttttgccgcaacccggacaatgatatcagaccctggtgcttcgtgctgaacagggaccggcttagctgggagtactgcgacctcgcccagtgccagactccgactcaagccgcgcccccaaccccggtgtcgccgcggctgcatgtgccgcttatgcctgcccagccggctccaccgaagccgcagccaaccacccggaccccgcctcagagccagacgccaggtgcgctgccagccaagagagagcagcccccatcactgacccgcaacgggcccctctcctgcggacaacggctgcgcaaatcactctcatcaatgaccagagtggtgggtggactggtggcgctgcgtggagcccatccatacatcgccgcactgtactggggacattctttctgcgccggatccctgattgccccctgttgggtgctgactgctgcccattgcctgcaggacagacctgccccggaggacctgactgtcgttcttggccaggaaagacgcaatcattcatgtgagccgtgccagaccctggcagtgcggagctaccggctgcacgaagcattctcccccgtctcataccagcacgacctggcacttctgcgcctccaagaagatgccgacggatcgtgcgccctgctgtcaccgtatgtgcaacccgtgtgtctgccatccggcgccgcccgcccgtcggaaaccactctgtgccaagtcgcagggtggggacaccagttcgaaggcgcagaggagtacgccagctttctgcaagaagcccaggtaccattcctgtccctggagcgctgttcggcccctgatgtgcacggaagctcgatcctcccgggaatgctgtgtgctgggttcctggagggcggaacggacgcttgccagggagactctggagggccgctggtctgcgaggaccaggcggctgagcgccgcctgactctccagggtatcatctcgtgggggtcaggctgcggcgatcgcaacaagccgggagtgtacactgacgtggcgtactacttggcctggatccgagagcacaccgtctca

SEQ ID NO: 10117 - DNA, 1845 bp, Artificial Sequence
  derived and/or modified sequence
atgagggcccttctgctgcttggattcctcctggtgtcactggaatcaaccctgtcgatcccgccttgggaggcgccgaaggaacataagtataaggcggaggaacacactgtggtgctcaccgtgactggtgagccatgtcactttccattccaataccaccgccagctgtaccacaagtgcacccataagggccggccaggaccgcagccgtggtgtgcaaccactcctaacttcgaccaggatcaacgctggggctattgcctcgaaccgaagaaggtgaaggaccattgcagcaaacattcgccctgccaaaagggcggtacctgcgttaacatgccttccggtccacattgcctctgcccccagcaccttaccggcaatcattgccaaaaagaaaagtgcttcgagccgcagctcctgcgattcttccacaaaaatgagatttggtaccgcactgaacaagccgccgtcgcacgctgtcagtgcaagggacctgacgctcactgccagcgcctcgcgagccaagcgtgccggaccaatccttgcctgcatggaggacgctgcctcgaagtggaaggccatcgcctgtgccattgcccggtcggatacactggtgccttttgtgacgtcgataccaaagcaagctgctacgatggacgcggcctttcataccgcgggctggcccgcactacgctttcgggggctccctgccagccgtgggccagtgaggccacctaccggaacgtgacggccgaacaagcccggaactggggactgggaggacacgctttctgtagaaacccggacaacgatattagaccttggtgtttcgtgctgaatcgcgatagattgtcatgggagtactgcgacttggcacaatgccagactccaactcaggccgccccgccgactcctgtctcccctagactccatgtcccgttgatgccagcacagccggctccaccaaagccccagccgactacccggaccccgcctcagtcccaaactccgggagccctgccggcaaagagagaacagcctccatccctgaccagaaacggcccgctgtcctgtgggcaacgactgcgcaaatccctctcctcgatgacgagggtcgtcggcgggctggtggcgctgagaggagcgcacccatacatcgcggccctgtactggggacactcgttctgtgcgggatcacttatcgcgccttgctgggtgctgaccgccgcacactgcctccaagaccgtccggcaccggaggacctgaccgtggtgctgggccaggaaaggcggaaccactcttgcgaaccgtgccaaactctggcggtgcggagctacaggctgcacgaagcattctcgcccgtgtcctaccagcacgacctggctctgctcagattgcaggaagatgcagacggctcgtgcgccctcctgtccccctacgtccagcccgtctgtctgccgtcaggcgctgcacggccatcggaaaccacgttgtgtcaggtggcgggttggggacaccaattcgagggggctgaggaatacgccagctttctccaagaggcccaggtaccgtttcttagcctcgaacggtgttctgccccagacgtgcacggcagctcgatcctgccaggtatgctgtgcgctgggtttctcgagggaggaactgacgcctgccagggagatagcggaggaccgctggtgtgcgaggaccaggctgcggagcgcaggttgaccttgcaggggatcatctcatggggatccggatgcggagatcggaataaaccaggtgtttacaccgatgtggcctactacctcgcctggatccgggaacatactgtgtcg

SEQ ID NO: 10118 - DNA, 1845 bp, Artificial Sequence
  derived and/or modified sequence
atgagggccctactcctcttgggctttttgctggtgtccctggagagcaccctttctattccaccctgggaagccccaaaggaacataagtataaggcggaggaacatacagtggtccttacagtgaccggggagccatgtcatttccccttccagtatcacaggcaattgtaccacaagtgcacccataagggacgtccgggccctcagccatggtgcgcaactacgccaaactttgaccaggaccagagatgggggtactgcctggagccaaaaaaggttaaggaccactgtagcaagcactccccctgtcagaaaggtgggacctgtgttaatatgccttctgggccccattgtctttgcccacagcacctcaccggcaatcattgtcagaaagaaaaatgcttcgagccacaattgctgcgcttctttcataagaatgaaatatggtaccgcacggagcaggcagcagtggctagatgtcagtgcaaggggcctgacgcgcattgccagcgtctggcctcccaggcctgtcgcactaatccttgcctccatggggggcgatgcctggaagtggagggtcaccggctgtgccattgcccggtcgggtacactggggctttttgtgacgtggatacgaaggcaagttgttatgatggcagaggcctgtcttaccggggattagccaggactacactgtccggcgcgccatgtcagccttgggcctccgaggcgacctaccgcaatgtgactgccgaacaggcacgtaattgggggttgggcgggcacgccttttgtcgcaatcccgataatgatattcgcccctggtgctttgtgctcaaccgcgatagattgtcatgggaatattgtgatttagcacagtgtcaaaccccaacccaagctgcgcctcccacccctgtgagcccccgtctgcatgtgccactgatgcccgcccaacctgcacctcctaaaccgcagccaacaacacggacacctccacagtctcagacccctggggccctaccagcaaaaagagaacagcctccttccctcactagaaacggccctctgtcctgcgggcagcggcttaggaagagtctaagcagcatgacacgggttgttggcgggctcgtggctttgagaggcgcccacccatacatcgccgccctgtattggggtcacagtttttgcgctggttccctcattgccccatgttgggtcctgacggccgctcactgtctgcaggatagaccggcaccagaggatctcacggtggtccttggacaggagaggcgaaatcattcttgcgagccttgccaaacactcgccgtacggtcttataggctacacgaagccttttctccggtaagttatcaacatgatctagctctactacgtttgcaagaagatgctgacggaagctgtgctttgctttctccatatgtgcagccagtttgtctgccgtctggcgccgcacgcccctctgagacgacgttatgccaggtcgccgggtggggtcaccagtttgagggagccgaagagtacgccagctttctacaggaggcccaggtgcctttcttgtccctggagcggtgttcggcaccagacgtacatgggtcatcgatacttccaggcatgctgtgcgcaggattcctggaagggggcaccgacgcttgccaaggggactccggaggacccctcgtctgcgaggatcaagctgcagaaagacgcctcacactgcaaggaattatctcatgggggagtggttgtggggatcgaaataaacccggggtgtacactgacgtggcatactatctcgcctggatccgggagcacacagtttcc

SEQ ID NO: 10119 - DNA, 1845 bp, Artificial Sequence
  derived and/or modified sequence
atgcgagcgttgctgcttctcggtttccttttggtttcacttgaatcgacattgtcaattccaccatgggaagcacccaaagaacacaagtacaaagccgaagaacatacagtagtcttgacggtcaccggagaaccatgtcactttccattccagtaccatcgtcaattgtatcacaaatgtacacataaaggacgaccagggcctcagccatggtgtgcaacaacacctaactttgatcaggaccagagatggggatattgtctggaaccgaagaaggtaaaggatcattgctcgaaacattcaccgtgtcaaaaaggtggaacttgtgtgaatatgccgtccggaccgcattgtttgtgtccacagcatctgactggaaaccattgccaaaaagaaaaatgtttcgaaccacaactcttgcggttttttcataagaatgagatctggtaccgaactgaacaggcagcggttgcgcggtgccagtgtaagggaccagatgcccattgtcagagattggcttcgcaagcttgccgaaccaatccatgcctccatggcggccgttgtttggaggtggaaggacaccgactctgccactgcccagttgggtataccggtgcattttgcgatgtagatacaaaagcaagctgttatgatggcagaggattgagttataggggcttagcacggacgaccttgtcaggagccccatgccaaccatgggcaagtgaggctacttatcgaaacgtgacagcagagcaagcaagaaattggggattgggcggacacgcgttctgtagaaatccggataatgatatccgaccatggtgctttgtgctcaaccgtgatcgattatcttgggaatactgcgatcttgcacagtgtcagacacctacacaggcagcacccccaaccccagtaagcccgagattgcatgtccctcttatgccggctcagccagctccaccaaagcctcagcctactactaggactcctccacagtcacagacgccaggagctctgccagctaaaagggaacagcctcctagcttaacccggaacggaccactctcctgtggccaaagattgcgaaagagcctatcatcaatgactagagtggtggggggattggttgctctcagaggagctcatccgtacattgcagctctgtactggggacattctttttgtgcaggttcccttatcgctccgtgctgggttcttacagcagcacattgcctgcaagatcgaccagctccagaagatcttactgttgtcttggggcaagagaggcgtaatcattcatgtgaaccttgccaaacactggctgtaagatcttaccgtttgcatgaagcatttagtccggtctcttatcagcatgaccttgctttattgcggctccaagaagatgccgatggatcttgtgcactgttgtccccgtacgtacaaccggtgtgtctaccttcgggggcagctagaccatccgaaactactctatgccaagttgcaggatggggtcatcagttcgagggagcggaagaatacgcctcattcttgcaggaagctcaagttccatttctgagtctcgagagatgtagtgctccggatgtccacggctcatctatcttgcctggaatgctgtgcgctggatttttggaaggtggtaccgatgcttgtcaaggtgattccggaggcccacttgtatgtgaagatcaagctgctgaaagaagacttaccttacaagggattatcagttggggttcagggtgtggcgatcgtaacaaacccggggtgtacacagatgttgcatactaccttgcatggataagagaacacaccgtctct

SEQ ID NO: 10120 - DNA, 1845 bp, Artificial Sequence
  derived and/or modified sequence
atgcgagcacttttgttgctggggttccttctggttagcctggagagtaccctgtcaattcccccctgggaagcacctaaggaacacaagtataaagccgaggagcacacagtggttctcaccgtgacaggcgagccttgtcacttccccttccagtatcacaggcagctctatcacaagtgcactcataaggggcgccccgggccgcaaccctggtgcgccaccacgcctaactttgaccaggaccaacggtggggatattgcctggaacctaagaaggtcaaggaccattgtagtaagcattcaccctgccagaagggggggacttgcgtgaatatgccatctggcccgcactgtctttgcccccagcacttgacaggaaaccactgccaaaaggaaaagtgtttcgagccccaactcttgcgctttttccacaaaaatgagatatggtatcgcaccgagcaagccgctgtggccagatgccaatgcaaaggacctgacgcccactgccaacgtctcgcaagtcaagcttgtcggacgaacccttgtctgcatggaggccgttgtctggaggtggaaggacatcggctatgtcactgccctgtgggatacactggggccttctgcgatgtggatacaaaggccagttgctatgacggccgcggactgtcttaccgaggtctagcgagaaccaccctctcgggggcgccatgccagccgtgggcttctgaagctacatatcggaacgtaaccgccgaacaggctcgtaattggggtctgggcggacacgccttctgcagaaacccagataacgatatacgaccttggtgcttcgtgctgaaccgcgaccggcttagttgggagtactgcgacttggcccagtgtcagactccaacacaggcagctcctcctaccccggttagtccccgccttcatgtgcctctcatgcctgcccagcccgcccctcccaaaccacagccaaccacccggacccccccacagagccagacacccggtgccctgccagcgaaaagagaacaacctccctccctgaccagaaacgggccactctcttgtggacaacggctgaggaagtcactgtcttccatgactagggtggtgggagggctggttgcactaaggggagcgcacccttatatcgctgcactgtattggggccattccttctgtgcgggtagtctgatcgccccatgctgggtgctcacagctgctcattgcctgcaggacagacccgcccctgaggacctcacagttgtcttaggtcaggaacgtaggaatcactcatgcgagccctgccagactttggccgtgcggagctatagattgcacgaggcatttagccctgtcagctaccaacacgacctcgcactgcttcgattgcaagaggacgctgatggctcctgtgctctcctctctccttacgtgcagcccgtttgtcttccatcaggcgccgcccggccgtccgagaccaccctctgccaggtggcggggtggggacatcagttcgaaggcgcagaggagtacgcttcctttctgcaggaagcccaggtgccctttctgtcccttgagagatgctccgctcccgacgttcacggtagtagtatcttgcctggaatgctttgcgcggggttccttgagggtgggactgacgcctgccagggtgattccggaggccccttagtgtgcgaggaccaggccgcagagcgccgcctgactctgcagggaatcatcagttggggatcaggttgcggagatagaaataaacctggtgtatacaccgatgtggcttactatcttgcctggatccgcgagcataccgtgtct

SEQ ID NO: 10121 - DNA, 1845 bp, Artificial Sequence
  derived and/or modified sequence
atgcgtgccctgctcctgctcgggtttcttctggtatccctggagtcaaccctctctattccaccatgggaagcgccaaaagaacacaagtacaaggcagaggaacacaccgtggtgctcaccgtgaccggagagccgtgccattttccattccaataccataggcaactttaccataagtgcacccataaaggacgacccggacctcaaccttggtgtgcaactacccctaacttcgatcaagatcagcgttggggttactgccttgagcctaagaaggtgaaggatcactgtagcaaacattcgccttgccaaaagggcggtacgtgtgtgaatatgccctcaggaccacattgtctgtgtccgcaacaccttactggcaaccattgtcagaaggaaaagtgttttgaaccacaactgctgcggttttttcataagaatgaaatttggtacagaacggaacaggcagcagtggcacggtgtcagtgtaaaggtcctgacgcgcattgtcagagacttgcctcgcaggcctgtcggactaacccatgtctgcacggaggaagatgtcttgaagtggaagggcaccgactctgtcattgccctgtcgggtacacgggagctttctgtgacgtcgacactaaagcgagctgctatgatggtcggggtctgtcgtacagaggtcttgccagaactaccctgagcggtgctccttgtcaaccttgggcctcggaggccacctaccggaacgttactgcagagcaagcacgcaactggggcctggggggtcatgccttttgtaggaacccagataatgatattagaccttggtgttttgtccttaatcgcgatcgactttcctgggagtactgcgacctggcacaatgtcagactccgacccaggcagcaccacccactcctgtgtcccctaggcttcatgtgccactgatgccggcacagccagccccacccaaacctcagccaaccacccgaactccgccacagtcccagacgcccggtgccttgccggcaaagcgggaacaacctccatccctgacccgcaacggaccgctttcttgcggtcagcgcctgagaaagagccttagctcgatgacccgtgtcgtgggtgggcttgtcgcactgcgcggtgcccatccgtacattgctgctctttactggggtcactcattttgcgcaggatcactgattgcaccttgttgggtcctgactgccgcgcactgccttcaagatagacctgcccctgaagatctgaccgttgtgcttggacaggagagacgaaaccattcctgtgaaccttgtcaaaccctcgcagtgcgctcttaccgcctgcacgaagcatttagccccgtctcataccagcacgacctggcattgctgcgacttcaagaagatgcagatgggtcgtgcgcgctcctttccccttacgtgcagcctgtttgcctgcctagcggtgcagcacgaccttccgaaactactctctgtcaagttgcgggttggggtcaccaatttgagggcgccgaagagtacgcatccttcctccaggaagcacaggtccctttcttgtcccttgagcggtgttcggctcctgacgtgcatgggtcctcgattcttcctggaatgctttgtgcaggttttttggaagggggaaccgacgcatgtcagggagactcaggaggaccactggtgtgcgaggatcaagccgcggaaaggcgcctcacgcttcagggaattatctcttggggttcaggttgcggtgataggaataagcctggggtgtacactgatgttgcctactaccttgcatggatcagggaacatactgtgtcg

SEQ ID NO: 10122 - DNA, 1845 bp, Artificial Sequence
  derived and/or modified sequence
atgcgcgcccttctgttgttgggcttcttgctggtctcccttgagagcactctgtccattccgccgtgggaggcgcccaaagaacataagtataaagcagaggagcacaccgtggtactgacagttacaggcgaaccgtgccatttccccttccagtatcaccgacaactttaccacaagtgtacccacaagggtcggccgggtccgcagccgtggtgtgccactaccccgaactttgatcaggatcagcgctggggttattgtctggagcccaagaaagtcaaagatcactgctccaagcactccccctgtcagaagggcggtacttgtgtgaacatgccctctggcccccactgcctgtgcccccaacatctgactggaaaccattgccagaaggagaagtgcttcgagccccagctgctgcgcttctttcataagaacgagatttggtacagaacagagcaggccgccgtggctaggtgccagtgcaaaggcccagatgctcactgccagcgattagccagtcaggcctgccggactaacccgtgcttgcatggcggccgatgccttgaagttgagggccatcgactgtgtcattgcccagttggttacaccggagccttctgcgatgtcgatacgaaggcgagctgctacgatggacgtggcttgtcctaccgcggtctggctcgcacaacgttatccggcgccccctgccagccttgggcctccgaggccacgtataggaatgtgaccgcggagcaggcccgcaactggggcttaggcggacatgcattctgccgaaaccccgataatgatatccgtccttggtgtttcgtgcttaacagggatcgcttgagctgggagtattgtgatctggcgcagtgccagacgcccacccaagcggccccacccacccccgtctccccacgcctacatgttccacttatgcctgcgcagccagccccgccgaagccacagccgacaacacgaacaccaccacagtcgcaaacgcctggtgcgttgccagccaagcgggaacagccgccatcgctaactcgaaacggtccattgagctgcggacagcgcttgaggaaatccctgagcagcatgacgcgggtagtgggcggtctggttgccttgcgcggagcccacccgtacatcgctgctctttattggggacatagcttctgcgcaggctccttgattgcaccttgctgggttttgaccgccgcgcactgcctgcaggatcgacccgcaccggaggatctgactgtggtcctcggacaggagcggcgaaatcactcgtgtgagccatgtcagacgttagctgtccgctcgtatcgccttcacgaggccttctccccagtgtcgtaccaacacgaccttgccttgctgcgcctgcaggaggacgcagacggttcctgcgcccttctgtcaccttatgttcagcctgtgtgcctgccttccggcgccgctcgccccagcgagacaactctgtgccaggtcgcaggatggggccatcagttcgaaggcgctgaggagtacgcttcgtttcttcaggaagcccaagtcccgttcttgtccctggaacgttgctccgctccggatgttcacggatcctccatcctgccgggtatgctgtgcgcgggcttcctggaaggcggaacagacgcatgccagggtgattcgggcggaccgttggtttgcgaggatcaggccgccgaacgccggctgacgttgcaaggcatcatatcttggggctctggctgcggcgaccgtaacaagcccggcgtctacacagacgtagcttattatctggcatggatacgggagcacaccgtgtcc

SEQ ID NO: 10123 - DNA, 1845 bp, Artificial Sequence
  derived and/or modified sequence
atgcgcgcgctgctgttgctgggtttcctgctcgtgtccctggagtccaccctgtcaatcccaccctgggaggctcctaaggagcacaaatacaaggcggaagagcatacagtggtcctgactgtgaccggagagccctgccacttcccgttccagtaccatcgacagctctatcacaaatgcacccacaaaggccgcccgggcccccagccttggtgtgccaccacacctaatttcgatcaggatcagagatgggggtattgtttggagccgaagaaggtcaaggaccattgttcaaaacattccccatgtcagaaaggggggacatgtgtgaacatgcctagcgggcctcattgcctctgtccacagcatctgacaggaaatcactgccaaaaggaaaagtgcttcgaacctcaactgttgcggtttttccataaaaatgaaatatggtaccggaccgaacaggctgccgtggcacggtgtcaatgcaagggtcctgacgcccactgccaaagattggcaagccaggcgtgtcgcactaatccatgtctgcacggtgggcgatgcctcgaggtggaagggcatcgcctgtgtcactgtccggttgggtacaccggggccttttgcgatgtggacaccaaggcttcctgctatgacggtcgggggctttcttataggggattggcacggaccaccctgtccggagcaccttgccagccgtgggcctccgaagcaacctatagaaacgtgacagccgaacaggcccggaactgggggctcggtggacacgcgttttgccggaatccagacaacgatatcaggccatggtgttttgtcttgaatcgcgatagactgtcctgggagtactgtgacctggcgcagtgtcaaacacctacccaggcagccccacctactccagtgtccccccggttgcacgtccctcttatgcctgctcaacccgccccacccaagccgcagccgaccaccaggacacctccccagtctcagactcctggtgcactgcccgccaagcgggaacagccaccctccctcacgcgcaatggcccactctcctgtggccagaggttgcgcaaaagtctctcaagcatgacccgcgtggtcggaggactggtagccctgcgaggggctcacccttatatcgcggccctctattggggacacagtttctgcgctggttccctcatcgctccctgctgggtcctgacagcagcacactgtctgcaagaccgacccgcaccggaggacctgacggtagtcctgggccaagagaggagaaatcacagctgtgagccctgccagactctggcagtgcggtcctacagactgcacgaagcctttagccccgtgagctatcagcacgacctggcattgcttcggctgcaggaggatgctgacggtagctgcgccttgcttagtccttacgtgcagcccgtctgcctgccatccggggctgcaagaccgtccgagaccacattgtgtcaggtggccgggtggggccaccagttcgagggagccgaagaatacgccagctttctccaggaggctcaggtcccattcctgagcctggagcggtgttccgcgcccgatgtgcacggctcttctatccttcctgggatgctgtgcgctgggttccttgagggtggcacagacgcttgtcagggcgatagtggtggcccactggtgtgcgaggatcaggctgccgagcgcaggcttacactgcagggaatcatcagttggggctccggctgtggcgacagaaataaaccaggggtctacacagatgtcgcgtactatctggcttggatccgggagcacacagtttcc

SEQ ID NO: 10124 - DNA, 1845 bp, Artificial Sequence
  derived and/or modified sequence
atgcgcgccctcctgttgttagggtttttgctagtgtcattggaaagcaccctgagtatcccaccatgggaagcccccaaagagcacaaatacaaagcggaagagcatacggtggtgctgacagtcactggggagccttgccatttcccatttcaatatcataggcagctgtaccataagtgtacacataaaggccggccaggtccacaaccttggtgcgctactacacctaactttgaccaggaccaaaggtggggatactgcctggaaccaaagaaggtcaaggaccattgcagcaagcattctccctgtcagaaaggcggaacctgcgttaatatgccaagcggcccacattgtctgtgtccacagcacctcacaggcaatcattgtcagaaagagaagtgctttgagccacagttgctccgattctttcataagaacgaaatatggtacaggactgagcaagccgcggtggcacgatgtcagtgcaagggccctgatgctcattgtcagaggctggcatcacaggcatgccgtaccaacccgtgcctgcatggcgggagatgcctcgaggtagaggggcaccgcttatgccactgtcctgttgggtataccggcgcgttctgcgatgtcgacaccaaggcatcctgctatgatggtagagggctcagctacaggggcttggcaaggacaacgctcagtggtgcgccctgtcaaccttgggcttccgaagcaacttatcgtaatgtaacagcagaacaggccagaaactggggactgggaggccacgccttctgtcggaaccctgataatgacatcagaccatggtgtttcgtcctgaaccgcgatcgtctgtcctgggaatactgcgacttggcacagtgtcagaccccaacccaggcagcaccgccaacacccgtttcccctcgcctgcacgtgcctctgatgcctgcgcagcccgccccacctaaaccgcagcccactactcgtacacccccacagagtcaaacccctggcgcactgcccgccaaaagggaacagccacctagccttacgagaaatggacccctgagctgtggccagaggctccggaagtctttgtcttccatgactagggtggtggggggattagtggcactgcggggggctcatccttacattgccgccctgtactgggggcactccttttgtgccggatcccttattgccccatgctgggtcttaaccgctgcccattgcttgcaggatcgtcctgcaccagaggatctgacagtcgtgttgggccaagaaaggcgcaaccatagttgcgagccctgtcagaccctcgcggtcagatcataccggctccacgaggccttcagccctgtgtcgtatcagcatgacttggcgttgcttcgattacaagaggacgctgatggaagctgtgctctgctctctccctatgtacaacccgtgtgtcttccatctggcgccgctaggcccagtgaaaccaccctgtgccaggttgcagggtgggggcaccagttcgaaggcgccgaggagtacgcctcctttctgcaggaggcccaggtccccttcctaagcttagagaggtgttccgcgcccgatgtccacggttctagtatcttaccggggatgctgtgtgctggcttcctggagggaggaacagatgcatgccaaggtgactctggcggcccactagtatgcgaggatcaagccgctgaacggcgtctcaccctgcagggcatcatatcatggggtagcgggtgcggcgatcgtaacaaaccgggcgtgtacaccgatgttgcttattaccttgcatggatccgtgagcatactgttagc

SEQ ID NO: 10125 - DNA, 1845 bp, Artificial Sequence
  derived and/or modified sequence
atgagggccctcttgctgctcggctttcttctggtcagcctcgagagcaccctgagcatccccccctgggaagcgcctaaggagcataagtataaggccgaggaacacaccgtagtacttactgtgaccggcgaaccctgccacttcccatttcagtatcaccggcagctttaccacaaatgtacccacaaaggcagaccaggcccacaaccatggtgcgccacgactcctaactttgatcaggaccaaaggtgggggtactgcctcgaacccaaaaaagtgaaggatcattgctcaaaacacagtccatgccagaaaggagggacctgtgtgaacatgccatctggccctcactgtctgtgtccacagcacctgacaggtaatcactgtcagaaagaaaagtgttttgagccacagctgctgaggtttttccacaaaaatgagatttggtaccggaccgaacaggccgctgtggcccggtgccagtgcaaggggccagacgctcactgtcagcgcctggcgagccaggcatgccgcactaatccctgtctccacggcggaaggtgcttggaggtcgaaggacaccggctgtgtcactgcccggttggatacacaggagccttctgtgatgtagatacaaaagctagttgttatgacggtcggggcttgtcctatcgaggcctggcccggactaccctgtccggagcgccctgccagccatgggcaagcgaggccacgtaccggaacgtcacagctgagcaggctaggaactggggtctgggaggacatgccttctgccgaaaccccgacaacgatatcagaccatggtgcttcgttctgaacagagaccgcctttcttgggagtactgtgatctcgcacagtgccaaacccccacacaggctgcgcctccaactccggtcagtccccggcttcatgtgcccctgatgcctgcgcagccagccccaccgaaaccgcagccaacaacacggactcccccgcagagtcagacgccgggggctctccccgctaaaagggaacaaccaccaagcctgactcgcaacggccctctcagttgcggccagcgactgaggaaaagccttagcagtatgacccgagttgtggggggtctcgttgctcttaggggcgcccacccttatatcgcagctctgtactggggccactctttttgcgctggaagtctcattgccccttgctgggttctgacagctgcacactgtctgcaggatcggcctgcgccagaagacctcacagttgtgctggggcaggaacgaaggaaccatagctgtgaaccgtgtcagaccctggccgtgagatcttaccgactgcacgaggcgttctctcccgtaagctaccagcacgacctggctctgttgaggctccaggaggatgctgacggcagctgcgccctgctctctccttatgttcagcccgtgtgcttgccgtctggcgctgcacgccctagcgagacaacattgtgtcaggtggccggttggggtcatcagttcgagggcgctgaggagtatgcaagttttctgcaagaagcccaggtacctttcctgagcctggaaaggtgttcagcccctgatgttcacggttccagtatattgcccggaatgctgtgtgctggattccttgagggagggacagacgcctgtcagggcgactctggtggcccactggtatgtgaggatcaggcagctgaacggaggttgactctgcaggggataatcagctgggggtcaggctgcggggaccggaacaagccgggggtttacacagatgtggcatattacttggcatggataagggaacacactgtttcc

SEQ ID NO: 10126 - DNA, 1845 bp, Artificial Sequence
  derived and/or modified sequence
atgcgtgcacttttgcttcttggctttctcctggtgagcctggaatccacgctgtcaatccctccgtgggaagccccgaaagaacacaagtacaaggcagaggaacacaccgtggtgctcacggtaaccggcgagccctgtcactttccttttcaataccatcgtcagctgtaccacaaatgtactcataagggtagacctgggccccaaccttggtgtgctaccacccctaactttgatcaggaccagcgttggggctactgtctggagccgaaaaaggtgaaagaccactgcagcaagcattcaccatgtcaaaagggaggaacttgtgtgaatatgccttcggggcctcattgcctttgtccacagcatctcactggtaatcactgccaaaaggaaaaatgtttcgaaccacaacttcttcgcttttttcacaaaaacgagatctggtacagaactgaacaagcagccgttgcgcgctgccaatgcaaggggccagatgcacattgccagcgcctcgcttcgcaagcatgcaggacgaacccgtgccttcatggaggaagatgtcttgaggtggaaggacatcgactttgccattgcccagtgggttataccggtgccttttgtgatgtcgacaccaaggcatcctgttacgacgggcggggactcagctatcgggggcttgctcggaccaccctgagcggcgcaccttgccaaccttgggcgtccgaggctacctatcgcaatgtcactgcagagcaagcgcgaaattggggcctgggagggcacgcattttgcagaaacccagataatgatatccgtccatggtgttttgtcctgaacagggatcgtcttagctgggaatactgtgacctggcccaatgccagactcctactcaagctgcacctccaactcctgtctcgcctcgccttcatgtccctttgatgccagcacagccagcaccgccgaagccccagccgactacccgcactccacctcagagccaaacccctggggcactgcctgccaagcgagagcaacctccctcacttaccagaaacggcccgttgtcttgtggccaacggcttcgcaagtcgctcagcagcatgacccgcgttgtgggcggtcttgtcgcattgaggggggcacatccctacattgccgcactgtactggggccattccttctgtgccggttcgcttattgccccatgctgggtgctcaccgcagcacattgcctccaggatagaccagcacctgaagatctcactgtggtcctgggtcaggaaagacggaaccattcatgtgaaccatgtcagactcttgccgtgcggtcgtaccgccttcacgaggcattttcgcccgtttcctatcaacatgatctggcgcttctgcggcttcaagaagatgccgacgggtcgtgtgcactgctgtcaccttacgttcagcccgtgtgccttccttccggagcagcgcgtccatcggaaaccactctgtgtcaagtagctgggtggggtcatcagtttgaaggagcagaggaatacgcatccttccttcaagaagcacaagtgccattcctttcgctggaaagatgtagcgcacctgacgtgcacggaagctcgattcttccaggtatgctctgcgcgggatttctggaagggggcaccgatgcatgtcaaggcgacagcggaggtcccttggtgtgtgaagatcaagcagcggaacgcagattgactttgcagggaataatctcatggggatcgggatgtggggatcgaaacaagcccggagtgtacaccgatgtcgcatactaccttgcctggatccgcgagcatactgtgagc

SEQ ID NO: 10127 - DNA, 1845 bp, Artificial Sequence
  derived and/or modified sequence
atgcgggcgctacttttgctggggtttcttctggtttcactggaaagcaccctgtcaatacccccctgggaggctcccaaagaacacaagtacaaggcagaggagcacactgtcgtactcactgttacaggagaaccttgccatttcccgttccagtatcatcggcaactctaccataagtgtactcataaaggtaggcctgggccccagccgtggtgcgcaacgacccctaacttcgaccaggatcagcggtggggatactgcctcgagccaaagaaagtgaaagatcactgcagcaaacattcaccatgccagaagggtggcacatgcgtgaatatgcctagcgggccccactgcctatgcccccagcatttaacgggaaaccattgtcagaaagagaagtgcttcgaaccccaactgctcagatttttccataagaatgaaatctggtatcgaacagagcaagccgccgtggcgaggtgccaatgcaaaggccccgacgcgcactgccagcggctggccagtcaggcttgccgaaccaacccctgtctccacgggggtagatgtctagaagtagaaggacatcgcttatgccactgtcctgtgggctacacaggcgcattctgtgacgttgacaccaaggccagctgttacgacgggagaggactttcatacaggggcctcgcccgaacaacactcagcggggcgccatgtcagccttgggcatcggaggctacatacagaaatgtgacggcagaacaagcaagaaattggggcctgggaggccatgcattctgccggaatccggacaatgacatccggccgtggtgcttcgtgctaaatcgcgatagactctcatgggagtattgcgacctggcccagtgccagactccaacccaggcggcccccccaactccggtgagtccacggttgcatgtcccccttatgcctgcccagccagccccccccaagccgcagcctacgacgaggaccccgccccaaagccagaccccaggtgctctgccagcgaaacgagagcagcctcccagcctcactcgcaatgggcctcttagttgcggtcaaaggctgcgaaaatcactgagctcaatgacaagagtggtgggcggcctggtggccttgaggggcgcacacccttacatcgctgcattgtattggggacatagtttctgtgccggctctttaatcgcaccatgttgggtcttgactgcagcacactgtttgcaagaccggcctgctccagaggatttgaccgttgttctaggccaggagcgtcgtaaccactcttgtgagccctgccagacccttgcagtgcggagttaccggcttcacgaggcctttagtcctgtgagctaccagcacgacctagcgttgctacggctgcaagaggacgctgacggaagttgcgcactgctgtctccatacgtgcagccggtgtgcctgccttccggggcagctaggccttctgaaacgacattatgtcaggtggccgggtggggacatcagttcgagggtgctgaagagtacgcctcattcctgcaggaagcccaggtgccctttttgtcactcgaaagatgctcagcccccgatgtgcatggaagcagcatcctgccaggaatgttgtgtgcaggcttcttggaaggggggacagatgcctgtcagggcgattctggaggtccgctcgtgtgcgaggaccaggcagctgaaaggagactcaccctacaggggatcatttcttggggatccggctgtggcgatcgcaataaacctggtgtttataccgatgtcgcatattatctggcgtggatcagggagcataccgtgtcc

SEQ ID NO: 10128 - DNA, 1845 bp, Artificial Sequence
  derived and/or modified sequence
atgcgtgctcttcttctccttggattccttcttgtgagcctcgaatccactctgagcatacccccatgggaagcaccaaaagagcataagtacaaggccgaggagcacactgtagtgctcactgtcactggggaaccttgtcactttccgttccaataccaccgtcagctttaccataagtgtacgcataagggtcggcctggaccgcaaccctggtgtgcaaccactccaaatttcgaccaagatcagaggtggggctattgtctggagcctaagaaggtgaaggatcattgctccaaacactcaccctgtcaaaagggcggcacgtgtgtgaatatgccatcaggaccccattgtctttgtccacagcatctcactggcaatcactgccaaaaggagaaatgttttgaaccccagcttcttcgatttttccacaagaatgagatatggtaccgtaccgagcaggcagcagtcgcacgctgccagtgtaagggccctgacgcgcattgtcagagattggcaagccaagcatgtcgaaccaatccttgcctgcatggagggaggtgtcttgaagttgaaggtcacaggctgtgccattgtccagtgggctacaccggcgctttttgcgacgtggataccaaagcgtcatgttacgatggtcgtggcctctcatacagagggctcgcaagaaccactctttcgggcgcaccgtgtcaaccttgggcctcggaggcaacttaccgcaatgtgaccgcagaacaggcacggaattggggtttgggaggacacgccttttgccgtaatccagataacgatattcgtccttggtgttttgtgctgaatcgggaccgcctttcgtgggaatactgtgatttggcgcagtgtcaaacccccacccaagcggcaccaccaaccccagtgtcgccacggctccatgtgcctctcatgccagcgcaacctgcgccaccgaaacctcaacctacgacgcgcacgccaccccaatctcaaaccccgggggcactgccagctaagcgagaacaacctccttcgctgactcgcaacggcccactttcatgcggacagaggctccgtaaatcgttgtcgtcgatgacccgggtggtgggaggattggtggcccttcggggcgcacatccttacattgccgcactgtattgggggcactccttttgtgctggatcactgattgcaccatgctgggtgcttactgccgcacattgcctgcaagatagaccggcccccgaagatttgaccgtggtgctgggacaagaaagaagaaaccattcctgtgaaccgtgccaaaccctggcagtgagaagctacagactgcatgaggcattctccccagtgtcataccaacatgatcttgcactgcttaggctgcaggaggatgcagacggttcgtgtgcactgctttccccatacgtgcagcctgtgtgtctgccttcgggcgcagcacgtccatcggagacgactctctgtcaggtggcaggctggggtcatcaatttgaaggagcggaagagtacgcctcgtttctgcaagaagcgcaggtcccttttctttcccttgagcggtgctcggccccggacgtccacgggtcatccatcctgccaggaatgctgtgtgcagggttcctggagggtggtaccgacgcatgccagggtgattcgggtggaccactcgtgtgtgaggaccaggccgcagagcgccgcctgacgcttcaaggaatcattagctggggctccggatgcggggacagaaacaagccaggtgtgtacaccgatgtggcctactacctcgcatggatccgggaacacactgtcagc

SEQ ID NO: 10129 - DNA, 1845 bp, Artificial Sequence
  derived and/or modified sequence
atgcgggcattgctgctcttgggcttccttctggtgtcgctcgagagtacactgtccatacctccatgggaggcgcccaaagaacataagtacaaagccgaagagcatacagtcgtactgactgtcaccggagagccttgtcattttccattccagtaccacaggcagctgtaccacaagtgtacccacaagggacgccccggcccccagccgtggtgtgctaccacccccaactttgaccaggatcaacgctggggatactgtctggaacccaagaaagtcaaagaccactgctcaaaacattcaccgtgccagaagggcggaacttgtgtgaacatgcctagtggaccgcactgcctgtgtccccaacatttgaccggaaaccactgtcagaaggagaaatgttttgagccgcagctgttgagatttttccacaagaacgagatctggtaccggaccgaacaggccgccgtcgctcgctgccagtgtaaggggccagatgcacattgccagaggctcgcttcacaggcttgcaggaccaatccttgcctgcatggcggtcgttgtctcgaggtggaaggccatcggctctgccattgccccgtgggatataccggggctttttgcgatgttgataccaaggcatcttgttatgatggccgcggtttaagctatcggggcttagcaagaacaactttgtctggcgccccttgtcagccgtgggccagcgaagcgacctataggaatgtgacggcggagcaggcaaggaactggggactggggggccacgccttttgccgaaacccagataacgacattagaccctggtgtttcgtgctcaacagggataggctgtcatgggagtattgtgatctggcccaatgtcaaaccccaacgcaggccgcacctcccacgccggtgtccccaaggctccacgtcccactgatgcctgcacagcccgccccgcccaaaccacagcctacaacgagaacccccccacagtcccagacacccggagccttgccagccaaacgcgagcaacccccctcattgactagaaacggaccccttagctgcggtcagaggctgaggaagagcctgtcctcgatgacacgggtggtcggtggcttagtggcactccgtggtgcccacccttatattgccgcgctgtattggggccactcattttgtgccggctcactaatcgccccttgctgggtactgaccgccgctcactgtctccaagacaggcctgcccctgaggaccttacggtcgtgctcgggcaggagcgcaggaatcacagttgtgaaccttgccaaacactagccgtgcggtcatatcggttacatgaggcgtttagccctgtgtcctatcaacatgacctggcgctgctgagactgcaagaagacgctgacggttcttgcgcgttactgtccccctacgtacagcccgtttgcctaccctccggggctgctcggcctagtgagacaacactttgccaagtagcaggctggggccatcagtttgagggtgcggaggagtatgcctctttcctgcaagaagcacaggtgccattcctatctcttgagcgctgctccgcacctgacgtccacgggagttccatcctccccgggatgctctgtgcaggctttctggaggggggtacagatgcctgccagggggattctggcggacccttggtgtgtgaggaccaagccgctgagcgacgcctcacattgcaaggaataatctcgtggggtagcggctgtggagataggaacaagccaggtgtctacactgatgttgcctattacctggcttggatccgcgaacacaccgtgtcg

SEQ ID NO: 10130 - DNA, 1845 bp, Artificial Sequence
  derived and/or modified sequence
atgcgtgctcttctattgctgggctttctcctggtctccctggaatcgacactttcaatacccccatgggaagccccgaaggagcacaagtacaaggcggaggaacataccgtggtgctgactgttacgggtgagccctgccatttcccctttcagtatcatcgtcagctctaccacaagtgtacccacaagggtcggcctggaccgcaaccgtggtgcgccacgacgccaaacttcgaccaggaccagcgctggggttactgtttggagccgaaaaaggtgaaggaccattgtagcaagcacagtccctgccaaaagggaggcacttgcgtgaacatgccgtctggccctcattgcctttgccctcagcacctcaccggcaatcattgccagaaggagaaatgcttcgagcctcaactgctccgcttcttccacaagaacgagatttggtataggaccgagcaagctgccgttgctaggtgccagtgtaaaggtcccgatgcgcactgccaacgtctggcatcccaggcctgccggactaacccgtgtctgcacggtggacgttgcctcgaggttgagggccatagactgtgccattgccccgtcggttacactggcgctttctgtgacgttgataccaaggcttcgtgttacgatggccggggtctgtcctaccgcggattggctcgtacaaccttgtctggtgctccctgtcagccctgggcttccgaggcaacctatcgcaacgtcactgctgagcaggccagaaactggggtctgggtggccacgccttctgccgcaacccggacaacgatatccgtccttggtgtttcgtgctcaacagggatcgattgtcatgggagtactgtgacctggcacagtgccaaacgccgacccaagcagcgccaccgactcctgtctcgcctcgcttgcacgtgcctttgatgccagcacagcctgcccccccgaaaccccaacccactacccgtactccgcctcagtctcagactccaggcgctctccccgctaagcgcgaacagccccctagtctaacccgcaacggtccgctcagctgcggtcagcgtctccggaagtccctgtcgtctatgaccagggttgttggtggccttgtggctctcagaggagcccacccatatattgccgctctctactgggggcattctttttgtgcgggaagtttgatcgcaccttgctgggtcctcaccgcggcacattgcctgcaggaccgcccagctccggaggacttgaccgtcgtactgggccaagagcgccgtaaccatagctgtgagccctgccagaccctcgcggtccgatcttacagattacacgaggcctttagccctgtctcttaccagcacgacctcgccctgctccggcttcaggaggatgccgacggctcctgtgcgttgctttcgccttacgttcagcctgtctgcctccccagcggtgccgctaggccctccgagacaaccctgtgtcaggtggctggctggggtcaccagttcgaaggcgctgaggaatatgcttctttcctgcaggaggctcaggtcccattcctttccctggaaagatgctctgctcctgatgtgcacggctcgtcaattctgcccggcatgctctgcgctggattcctggagggcggtactgatgcgtgccaaggcgattccggcggtcctctggtctgtgaggatcaggccgcagagcgtcgtctgactctgcaaggaattatcagttggggttctggttgtggcgaccgaaacaaacccggtgtttatacggatgtggcctattatctggcttggatccgggagcatactgtctct

SEQ ID NO: 10131 - DNA, 1845 bp, Artificial Sequence
  derived and/or modified sequence
atgcgggcactactgctcttaggtttcctcctggtctctcttgagtctacgctgtcgatacctccttgggaagcacccaaggagcataaatacaaggctgaggagcacactgtggtgctgacagtgaccggtgaaccctgccacttcccctttcagtatcaccgccagctttatcacaagtgcacacacaaaggtcggccggggccgcagccctggtgtgccaccacccccaatttcgaccaggaccagaggtggggctattgcttggagccaaaaaaggtgaaagaccattgtagcaagcattccccgtgccagaagggcggcacctgcgttaatatgccgtccgggcctcattgcctgtgccctcagcacctgacggggaaccactgccagaaggagaaatgctttgaaccccagctattacgtttcttccataagaacgaaatttggtataggacagagcaggccgcagtcgcacggtgccagtgtaaagggcccgatgcccactgtcagcgtctggcgtcacaggcttgtagaaccaacccttgcttgcacggcggacggtgtctggaggttgagggacaccggttgtgtcactgtcctgtgggctacactggcgcattctgtgacgtggacactaaagcctcctgctatgatgggcggggtctcagttacagaggcctcgctaggacaaccctgtccggagccccctgtcagccctgggccagcgaagcaacctaccgcaatgtgaccgcagagcaggccagaaactggggcctaggcgggcacgctttttgtcgcaacccagataacgacataaggccatggtgtttcgttcttaaccgcgaccggctgtcttgggaatattgtgacctggcccaatgtcaaactcctacgcaggcagcccctcccactccagtgtctcctcgcctccacgtacctctgatgcccgctcagccggccccgcccaaaccacagcctactacaaggacacccccccagtcccagacgcccggggccctgccagctaagcgagagcagcctccctcattgacccgcaacggaccccttagttgcgggcagaggctacggaagtctttgagctccatgactagggttgtcggtgggctagtcgcactccggggagcgcacccatacatcgctgccctgtattggggacattctttctgtgcaggctccctgatagctccctgttgggtgcttacggcggcccattgcctgcaggatcgaccagctccggaggacctgaccgtagtgctgggtcaagagcggcggaatcattcttgcgagccatgccagacacttgccgtgaggtcctaccgactgcacgaagccttctcaccagtgtcatatcagcacgacctagctctgttgaggctgcaggaagacgccgacgggagctgtgccttgcttagtccctacgtgcagccggtctgtctcccgtctggcgctgcaaggccgagcgagacaacactgtgtcaggtggccggctggggtcatcagttcgaaggcgctgaagaatatgcttccttcctgcaggaagcgcaggttccttttctgtcattggagcggtgcagtgctcccgacgtgcacggtagttcaattttgccaggaatgctgtgtgctggcttcttggagggtggcaccgatgcttgtcagggggacagcggcggaccactcgtgtgcgaggaccaggccgccgaacggcgactgacgctccaggggattatctcttggggtagcggctgtggcgacagaaataaaccgggagtgtatacagacgtggcttactatctggcctggatccgtgagcatactgtaagc

SEQ ID NO: 10132 - DNA, 1845 bp, Artificial Sequence
  derived and/or modified sequence
atgcgggccttgctgctgctcgggttcctgctggtgtcgttggagtccactctgtcgatccccccttgggaggcacccaaggagcacaaatacaaggctgaagaacacactgtcgtgctcaccgtgactggtgagccttgccatttcccgttccaataccatcgacaactgtatcataagtgcacgcacaagggacggccgggaccccagccttggtgcgcgaccactcctaacttcgaccaggatcagcggtggggttactgcctcgagcccaagaaagtgaaagatcactgcagcaagcattcgccttgccagaagggaggaacctgcgtgaatatgccatcgggaccacactgtctctgcccacaacacctcactggcaaccattgtcagaaggaaaagtgcttcgaaccgcagctgctccggtttttccacaaaaatgaaatatggtaccgcactgaacaagcagctgtggctcggtgccagtgtaagggaccggacgctcactgccagagactggcgagccaagcatgccgcaccaacccgtgcttgcatgggggcagatgcctggaggtggaaggtcacagactgtgccactgcccggtcggctacactggggcattttgtgatgtggacacgaaagcatcatgctacgatggcagaggcctgtcctaccgcgggttggcccgcaccacgctgtcgggagccccatgccagccatgggcatcagaagctacctacaggaacgtgacggcagagcaggcgcgcaactggggcctcggtggacacgccttctgtcggaatcctgacaacgacatccgtccatggtgttttgtgttgaacagggatcgtctgtcgtgggaatattgcgacctggcacagtgtcagacgcctacccaggcggctccgcctactccggtgtctccgagactgcacgtgccgctcatgccggcccaaccggcgccgcctaagccccaaccgaccactagaacgccgccacaatcgcagactccaggagcactgcctgcgaagcgggaacaacccccgtcgctgacccggaatggcccgctgtcgtgtgggcagcggctgcgcaagtccctctcaagtatgactagggtcgtgggaggactggtggctctcagaggcgcacatccatacatcgccgccctttactggggacattcgttctgcgcgggatctctgatcgccccttgctgggtccttaccgcggcccattgcctgcaggaccgacctgcgcccgaggacctgaccgtggtgctgggacaagagcggaggaatcactcctgcgagccgtgtcaaaccctcgcagtccgctcctacagactgcatgaggcgttctccccggtgtcataccagcacgacctcgctctgctccggctgcaggaggacgcagacggatcatgcgctttgctgtcgccatacgtccaaccggtgtgcttgccttccggcgcagccagaccgtccgaaacgaccctctgccaagtggctggctgggggcatcagttcgagggagcggaagaatatgcttcgttcctccaggaggcacaagtccccttcctgtccctggagagatgctcggcccctgacgtccatggctcctcgatcctgccgggaatgctttgcgccggatttctggaaggaggaactgatgcatgtcagggagactcgggaggccccctggtctgtgaggatcaagcagcagaacggcggctcacgctgcagggcatcatctcctggggttcgggatgcggtgacaggaacaaaccgggagtgtacactgatgttgcatactacctcgcctggattcgcgaacacaccgtctca

SEQ ID NO: 10133 - DNA, 1845 bp, Artificial Sequence
  derived and/or modified sequence
atgagagcactgctccttctcggctttttgctcgtgtcccttgagtcaaccctctcgatacctccgtgggaagcaccgaaagagcacaaatacaaggcggaggagcataccgtcgtgcttactgtgactggagaaccttgtcattttccttttcaatatcatcgacagctgtaccataagtgtacccacaagggtcggccaggacctcaaccgtggtgtgcaaccacgccaaatttcgaccaagatcaaaggtggggctactgtctcgaacccaagaaggtgaaagatcattgcagcaagcacagcccctgtcagaaggggggaacgtgtgtgaacatgccatcaggtcctcattgcctttgtcctcagcatctcactggtaatcattgtcaaaaggaaaaatgtttcgagccccaacttctcagatttttccacaagaacgaaatttggtaccggactgaacaggcagcagtcgcacgctgtcagtgtaagggaccggacgcacactgtcaacgtcttgccagccaggcatgtagaaccaacccctgtctgcatggggggaggtgccttgaggtggaagggcatcgcttgtgtcactgtccggtgggttacaccggcgctttttgcgatgtggatactaaagcctcctgctacgatggccgcggactttcgtacaggggactcgcaagaactacccttagcggtgcgccatgtcaaccttgggcgtcggaggccacctatcgcaacgtcacggcagagcaggcacggaactggggtctgggaggacatgccttctgtagaaacccggataatgatattcggccttggtgctttgtgctgaaccgcgatagactttcatgggagtactgcgatcttgcgcagtgtcaaactcctacccaagcggcaccgcccaccccggtttccccacggctgcacgtgcccctgatgcctgcccagcctgctcctccgaaaccacaacctactacgcgtactcccccacagtcacagaccccaggtgcattgccagcaaagcgcgaacagcctccctcgctgactcggaatggcccgttgagctgcgggcagcggcttagaaagtcactctcgtcgatgactcgagtcgtgggcggacttgtggcactgcgtggcgcccatccttacatcgcagcactgtactggggtcacagcttttgtgcaggttcccttattgccccttgctgggtcctcaccgcggcacattgccttcaagataggcccgccccggaggacctcacggtggtgcttggacaggaacgcaggaaccattcttgtgaaccatgccagactcttgccgtgcggtcatataggctgcatgaagcattctcgccagtctcgtaccagcatgatctggcgctccttcgccttcaagaggatgcggatggttcatgtgcacttctgtcgccttacgtgcaacctgtctgtctgcctagcggagcagcaagaccatctgagactactctgtgccaagtcgcaggatggggacaccaatttgaaggagctgaagaatacgcgagctttcttcaagaagcgcaggtgcccttcctcagccttgaaagatgcagcgcacctgacgtccacggttcgtccattctgccgggcatgctttgtgcaggatttctggagggaggaaccgacgcatgccaaggcgattcaggagggcctctggtgtgcgaagatcaggcagccgagcggcgcctgacccttcaaggaatcatatcgtggggatctggatgcggtgatcgaaacaagcccggagtttacactgacgtggcctactaccttgcttggattcgggaacataccgtctcg

SEQ ID NO: 10134 - DNA, 1845 bp, Artificial Sequence
  derived and/or modified sequence
atgcgcgctctgctgcttttgggatttctgctggtcagtctcgaatctaccctcagcatcccaccatgggaagcccccaaagaacataaatacaaagccgaagaacatacagtggtcttgactgtgaccggagaaccttgtcacttcccgtttcagtatcacaggcaactctaccacaagtgcacccacaagggaagacctgggccccagccttggtgtgccacaactccaaactttgatcaggaccagcggtggggatactgcctcgagcctaaaaaggtcaaagatcattgcagcaagcactcaccgtgtcagaaaggaggaacttgtgtgaacatgccctcgggcccgcattgcctgtgcccccagcacttgacaggcaatcattgccaaaaagagaagtgcttcgagccccaactgctccgtttttttcacaagaacgaaatctggtatcgcactgaacaggccgctgtcgccaggtgtcagtgcaaagggcctgatgcgcactgccagcggttggcttctcaggcctgtaggacaaacccatgccttcacggaggacggtgcctggaggttgaggggcacagactgtgccactgcccagtggggtacactggcgcattctgcgacgttgataccaaagcaagttgttatgatggaagaggtttgtcttacaggggcttggctaggacaaccctgagcggcgcgccctgccagccatgggcgtccgaggctacttaccggaacgtgacagccgagcaagctaggaactggggactgggtggacacgctttttgtaggaatcccgacaacgatatcagaccttggtgtttcgtgctaaacagagatagactgtcatgggaatactgcgacttggcacaatgccaaacccccacacaggcggccccaccaaccccagtaagccctcggctccacgtcccattgatgccggcccaacccgcaccacccaagccacaacccaccacgaggaccccaccgcaaagccaaacacccggcgcccttccagcaaagcgtgagcagcctcccagccttacccgcaacggtcccctgtcgtgcgggcaacggctgcgcaagagcttgtcaagtatgacccgagtcgtggggggcctggtggcgctcaggggcgcccacccctatatagctgccctgtattggggccactccttctgcgcaggaagcctgatcgccccctgttgggtgctgactgcagcccattgcctccaagaccgcccggccccagaggacttaacggttgttctgggtcaagagagaaggaaccacagttgcgagccatgccagaccctcgctgtgagaagctaccgcctgcacgaggcgttctcacctgtgagctatcagcacgatctggctctcctgagacttcaggaagatgctgacggaagctgtgcactgctgtccccttatgtgcaacctgtgtgcctgccgagcggagccgctcgaccatctgagaccactctctgtcaggtggctggctggggccaccagttcgaaggggctgaagagtatgcgagctttttgcaggaggcccaagtgccgttcctcagcctagagcgctgctcagccccagacgtacacggcagcagcatcctacctggcatgctgtgcgcagggtttctggaggggggcactgatgcttgccagggcgatagtggaggaccgctggtctgcgaagaccaagcagccgaaaggcgactgacactccagggcataatatcttggggcagcggctgcggcgacagaaacaagccgggagtgtatacagatgtcgcctattacctggcttggatccgcgagcacactgtgtcc

SEQ ID NO: 10135 - DNA, 1845 bp, Artificial Sequence
  derived and/or modified sequence
atgcgcgcgctcttgctgctggggttcctccttgtgtcactggaatccaccctgtccattcctccttgggaggctccgaaggagcataagtataaggcggaagaacacactgtcgtcctgaccgtgactggcgaaccatgccactttccgttccagtaccatcggcaattgtaccataagtgcacccacaagggcagaccgggaccgcaaccctggtgtgccactacgccgaacttcgatcaagaccaacggtggggttactgccttgagccgaagaaggtgaaggaccactgcagcaaacactcgccgtgtcagaaaggaggaacttgcgtgaatatgccgtcgggccctcattgtctgtgtccacagcacctgactgggaaccattgtcagaaggaaaagtgttttgaacctcaactgcttcggttcttccataagaacgagatctggtatcggaccgaacaggctgccgtcgccagatgtcagtgcaagggcccggatgctcactgccaaagactcgcgtcgcaggcctgtagaactaacccatgccttcacggaggacgatgcctcgaagtggagggacacagactgtgccactgcccggtcggatacaccggagccttttgtgatgttgacaccaaggcctcctgctacgacggacgcggactgtcgtacaggggcctggcccgcactaccctcagcggggcgccgtgccagccctgggcaagcgaagcgacctaccgcaacgtgactgcggagcaagcccggaattggggtctgggaggtcacgcgttctgccgcaacccggacaatgatatacgcccttggtgcttcgtcctgaacagagatcgcctctcctgggaatactgcgaccttgcccagtgtcagaccccgacccaggcagcgccacccaccccggtcagtccacgcctgcatgtgcctctcatgccggcccaaccggcacctcctaagccgcagcccaccactcgaaccccgccgcaatcacagacccccggcgcccttccggccaaacgcgaacaaccaccttcgctcactcggaatggcccgctcagctgcggacaacgcctccgtaaaagcctgagctccatgactcgcgtggtcggagggctggtggccttgcgcggggcgcatccttacatcgctgccctgtactgggggcacagcttctgtgcaggaagcctgatcgcgccgtgctgggtgctcaccgctgcacactgtctgcaggaccgccccgcacctgaagatttgaccgtcgtgctcggccaggaaagaagaaaccactcgtgtgagccgtgccagaccctcgccgttagatcgtatagactgcacgaagccttttcccccgtcagctaccaacatgatctcgcgctccttaggctgcaggaagatgcggacggcagctgtgccctgctgagcccatacgtacaaccagtgtgcctgccgtccggagccgccaggccatctgaaactactctgtgccaggtggcgggatggggccatcagtttgagggtgccgaggaatacgcgtcatttctccaagaggcccaggtcccgttcctgtccctcgaacgctgttccgcaccggatgtgcacggctcctcaatcctgcctggaatgctctgcgccgggttcctcgaaggcggaaccgacgcctgtcaaggtgactcaggaggcccattggtgtgtgaagatcaggcggcagagagacgcctcaccctgcagggaatcatctcctggggatccggatgcggagatcgcaacaaaccgggagtgtacaccgatgtggcttactacctggcctggatcagagaacatactgtctcc

SEQ ID NO: 10136 - DNA, 1845 bp, Artificial Sequence
  derived and/or modified sequence
atgcgggcactgctgctcctcggattcttgctggtttcacttgagtcgaccctctcgattcctccatgggaggccccgaaagagcacaagtacaaggccgaggagcacaccgtcgtcctcactgtgactggcgagccctgccattttccgttccagtaccacagacaactgtaccataagtgcactcacaagggaagacctggcccgcagccttggtgcgcgactactccgaattttgaccaggatcagagatggggttactgcctggaaccgaagaaagttaaagaccactgctcaaagcattcaccttgccagaagggtggcacctgcgtcaatatgccctcagggcctcactgtctgtgtccacagcatttgactggaaatcactgtcagaaagaaaaatgcttcgagccgcagctgttgagatttttccataagaacgagatctggtacagaaccgaacaagcagccgtcgcacgctgtcaatgcaagggccccgacgcccactgccagagacttgcgagccaggcgtgcagaacgaacccttgcctgcacgggggacgatgtctcgaagtcgagggacatcggctctgccattgcccggtgggctacacgggagcgttctgcgatgttgataccaaggcttcgtgctacgatggtcggggactgagctacaggggactggcgagaacgaccctgtccggggccccgtgccaaccttgggcttccgaagcgacctatagaaacgtcaccgcagagcaagcgagaaattggggattgggtggtcatgccttttgcagaaacccggacaacgacatcagaccatggtgcttcgtgctgaacagggacaggcttagctgggagtactgcgacctggcgcaatgccaaactcctacccaggcggcaccgcctaccccagtgtcgcctcggctgcacgtgcccctgatgccggctcagccagcaccaccgaagcctcaaccgacgacccgcaccccgcctcagtcccaaaccccaggagcattgccggccaagcgcgagcaaccgccttcccttactcgcaacggccctctgtcatgtggccagagactccgtaagtcgctgtcttccatgactagggtggtaggcggactggtggcccttcgcggagctcacccgtacatcgccgcactgtactggggtcatagcttctgcgcggggagtctcatcgctccctgctgggtgctgactgctgcccattgtctccaggaccgacctgctcctgaagacttgaccgtggtcctgggacaagagcgccggaatcactcttgcgaaccgtgtcagacccttgccgtgcgctcctaccgccttcacgaggcctttagccccgtttcctaccaacatgacctggcgctcctcagactgcaggaagacgcggatggatcgtgcgcgctcctctcaccctacgtccagccggtgtgcctgccctccggcgccgcccggccatcggagactacgctgtgccaagtggcgggatggggccaccaattcgagggagcggaagagtacgcctcattcctccaggaggcccaggtcccattcctgtccctcgaacgctgctcagctccagatgtgcatggttcatccatcctcccgggcatgctctgcgcgggctttctggagggaggcaccgacgcctgccaaggggactcgggaggtcctctggtgtgcgaagatcaggccgctgaacggagactcacccttcagggaatcatcagctggggttcgggatgcggtgaccgcaataaaccaggcgtgtacaccgatgtggcgtactacctggcctggattagggagcataccgtctcg

SEQ ID NO: 10137 - DNA, 1845 bp, Artificial Sequence
  derived and/or modified sequence
atgagagcactattgctattgggcttccttctcgtgagtttggaaagtactttgagtataccaccttgggaagcccctaaggaacacaaatacaaggccgaggaacataccgtcgtccttaccgtgaccggagagccctgccacttcccttttcagtatcacaggcagttgtaccacaagtgtacacacaagggtagacctggcccccaaccatggtgcgcaacgacaccgaatttcgatcaagaccagcgctggggatactgtcttgagcctaagaaagtgaaagatcactgtagcaaacacagcccttgtcagaaagggggaacatgcgtgaatatgccttccggcccccattgtctgtgtcctcagcacctcacaggtaatcattgtcagaaggaaaagtgtttcgaaccacagctgctgcggttttttcacaagaacgagatttggtatcgcactgagcaagctgccgtcgcccgctgccagtgcaaaggccccgatgctcactgccagcgcctggccagccaggcctgtcgcaccaatccatgtctccacggggggcgctgcctggaggtggagggacaccggctatgccattgccccgtaggatatacaggcgccttttgcgacgtagatacaaaagcatcatgctacgacggacgggggctttcctaccgtggcttggccagaacgacactctcgggggccccttgccagccttgggcaagtgaagctacctataggaacgttactgcagagcaggctcgcaattgggggctaggcggccacgccttctgcaggaatccagataacgacattcgcccgtggtgttttgtccttaaccgagaccgtctctcctgggagtactgcgatttagctcaatgccagacccctacccaagccgcccctccaactcccgtgtcaccacgcctgcacgtccccctgatgcctgcccagcctgcccccccaaaaccccagcctactacccgtactccaccacaaagccagactcccggtgcactcccagcgaaacgggagcagcccccaagcctcacaagaaatggacccttgtcttgcggacaacggttacggaagtcgctttctagtatgacaagagtggtgggcggactcgtcgccttacggggtgcccatccatatattgccgccctttactggggccacagcttctgcgctggctcccttatagccccctgctgggtccttaccgctgctcactgcttgcaggacagacccgcccccgaggacctgaccgttgtgctgggtcaggaacggaggaaccacagctgcgagccttgtcagactctagctgtgcgatcctaccgactgcacgaagccttctcgcctgtgagttaccagcatgatctggccttactacgtctccaagaagacgcggatggctcctgcgccttactcagcccctatgtgcagcctgtctgccttcccagtggcgctgcacgtcctagcgaaactactctgtgccaggtcgctggttggggacatcagtttgaaggggccgaggaatacgcctccttcctgcaagaagcccaggtccctttcctcagtcttgaaaggtgctccgcacccgacgtgcacgggagttccattttgcctggaatgctctgcgccggatttctggaggggggtaccgatgcctgtcaaggcgacagcggcggtccgctcgtgtgtgaggaccaggccgcggagaggcggctgaccctgcagggtatcatctcttggggctcagggtgtggagatcggaataaacccggggtctatactgacgtggcatattacctcgcctggatacgggaacacacggtgagc

SEQ ID NO: 10138 - DNA, 1845 bp, Artificial Sequence
  derived and/or modified sequence
atgcgagctctcctgttactcggcttcctcttggtgagtttagaatccaccttatctattccaccctgggaagctcccaaagaacataagtataaggctgaagagcacacggtggtgttgaccgtgactggagagccttgtcacttccccttccagtaccatcgacagctctatcacaagtgtacccacaaaggacgacccggccctcagccatggtgtgccactacaccaaacttcgatcaggaccagcgatggggctattgtctagagcccaaaaaggtgaaagatcattgtagcaagcattccccctgtcagaaaggtggcacttgtgtcaacatgccttctggccctcattgcctgtgcccacaacatctgaccggaaatcactgtcagaaagaaaagtgcttcgaaccacagctcctcagattcttccataagaacgagatttggtacagaactgaacaggccgctgtggccagatgtcaatgcaaggggcccgacgcacattgccagcgactagcaagtcaggcttgccgaactaatccttgcctgcacggaggaagatgtttggaggtggagggccaccgcctatgtcactgtcccgtgggctacaccggcgctttttgtgatgttgacaccaaggcatcatgctatgacggccgagggctcagctacagaggcttggctaggacaacgctgtctggcgcaccatgtcagccgtgggcgagtgaggcaacatatagaaatgtgacagcggaacaggcccgaaattggggccttggaggacacgcattctgtaggaacccagataatgatatcaggccatggtgcttcgtgctcaaccgcgaccgtctatcttgggaatattgcgacctggctcagtgtcagacacccacacaggccgcaccacccacccctgtgagcccaagattgcacgttccgttgatgccggctcagcctgctccccctaaacctcagcccaccaccaggacaccacctcagtcacagacacctggcgcgctgcctgctaagagagaacagcctcccagcctgacgaggaatgggccactgagttgcggccagagactcaggaaatctctgtcatctatgacaagagtcgtcggaggactcgtcgcccttcgaggagcccacccctacattgccgctctgtactgggggcacagcttttgcgctggctcgctgatagcaccctgctgggtgctgaccgccgcacactgtctccaagaccgacccgccccggaagatctgaccgtcgtcctgggccaagagcgccgcaaccattcttgcgagccgtgccagaccttagctgtaagaagctacagattacacgaggcgttttccccagtctcctaccagcatgacttggctcttctcagactccaggaggacgcagacggctcatgcgcactgctttccccatatgtccaaccagtctgcctcccgtctggcgcagctcgtccttcagaaactactctctgtcaggtggctggctgggggcatcaatttgagggggccgaagaatatgcatctttcctgcaggaagcccaggtaccttttctaagcctcgaacggtgcagtgcaccagatgtgcacggaagctcaatccttcccgggatgctctgtgctggtttcctggagggaggcactgatgcttgccagggagactcaggtgggccacttgtttgcgaagatcaagctgccgagcgacggttgaccttacagggcataatctcctggggctcagggtgcggggatagaaataagcccggagtgtacacagacgtagcctattacctggcctggatcagggaacacaccgtaagc

SEQ ID NO: 10139 - DNA, 1845 bp, Artificial Sequence
  derived and/or modified sequence
atgcgagcgctcctcttgttgggcttcttgctcgtaagtctcgagtccacgctctcaattccaccctgggaggcaccaaaagagcataaatacaaagccgaggagcacacggtcgtcctcactgtcaccggggaaccgtgccatttcccatttcagtaccatcgtcagctctaccacaagtgcacccataagggtcgtccaggcccccagccctggtgtgcgacgacccctaattttgatcaagaccagcgatggggttactgtctggaacccaagaaggttaaggaccattgcagtaagcactcgccatgccagaagggcggcacttgtgtgaatatgccttcagggccacattgtctgtgtcctcagcacctcacaggtaatcactgtcagaaggaaaaatgctttgagccccaacttctacgatttttccacaagaacgaaatctggtacaggacggagcaagctgcagtggctcgatgtcaatgcaaagggcctgacgctcactgtcagaggcttgcaagccaggcttgcagaactaatccttgtcttcatggcggtcggtgcctggaggttgaagggcaccggctgtgccattgtcccgtgggctatacgggcgccttttgcgacgtcgatactaaagctagctgctatgatggacgcggcctcagttatcgtggcctagctaggactaccctgtctggagcaccctgtcaaccttgggcaagcgaagcaacatacagaaatgttactgccgaacaggctagaaattggggcttaggaggccacgccttttgcaggaaccctgacaatgatattagaccatggtgcttcgtcctaaacagggatagactcagctgggagtattgcgacctggcccagtgtcagactcctacccaggctgcccccccgacacctgtttcccccaggctacatgtcccgttgatgcccgcccagcccgctccgccaaagccccagcccacgacccgcaccccaccccagagccaaactccgggtgcactgcctgcaaagagagagcagccaccatcccttactaggaatgggcccctgtcctgcggacagagactgaggaagtctctgtcctccatgacccgtgtggttggagggctggttgctctgagaggcgcacatccatatattgcagcattgtattggggtcattcattttgtgctggtagcctgatcgctccctgttgggtcttgacggctgcccactgcctccaggatcggccggcccccgaggatctgaccgtggtcctagggcaggagcgcaggaaccacagctgtgaaccgtgccagacccttgcggtgaggagctatagactgcatgaagcattctctccagtatcgtatcaacacgatctggccctgcttcggcttcaggaagatgccgacgggagctgcgcactgctaagtccctacgttcagcccgtgtgcctgccctcgggcgcagcacggccatccgagactactctctgccaggtggccgggtgggggcaccagtttgaaggcgctgaggagtatgcatcatttttgcaggaggcccaggtaccctttctcagcctcgagcgctgtagcgcacccgacgtgcatgggtcaagtatcctaccaggaatgctctgtgcggggtttttagaaggcgggacggatgcttgccagggagacagcggagggcccttggtgtgcgaggatcaggccgcagaaaggcgtctgacactgcagggtataatctcctgggggagcgggtgcggtgatcggaataagccaggggtgtacacagatgtcgcgtactatcttgcttggattcgcgagcatacagtctct

SEQ ID NO: 10140 - DNA, 1845 bp, Artificial Sequence
  derived and/or modified sequence
atgcgcgctctgttactcctaggatttcttctcgtgtcactagagagcactctgtctatccccccttgggaagctccgaaggagcataagtacaaggcagaagagcataccgtggtgctgacagtgacaggagagccttgtcattttccatttcagtaccataggcagctgtaccataaatgcacacataagggacgccccggaccccagccctggtgcgcgactactccaaacttcgaccaggatcagaggtggggttattgtttggagccaaaaaaggtgaaagaccattgctcgaagcactcaccttgccagaagggtggcacctgtgtcaacatgccatctgggccacactgtctttgtccccagcacctgaccggcaatcactgccagaaggagaaatgtttcgaacctcagctacttcgattttttcacaaaaatgaaatttggtatagaacggagcaggctgcggtggcccgttgccaatgcaaaggtcctgacgcgcattgccagaggttggcctcccaggcctgcagaacaaacccctgtttacacggggggcgatgtctagaggtggaaggtcacagattgtgtcactgtccagtgggatacaccggtgccttttgtgacgtcgacactaaagccagctgttacgacggtcgcggcttgtcatacagaggcttggctagaaccacactatcgggggccccctgtcagccctgggcttctgaagctacctatcgcaatgtgacagccgaacaggcaaggaactggggccttgggggacacgccttctgcagaaaccccgataacgacatacgaccttggtgttttgtgctcaacagggaccggctgtcatgggaatactgcgatcttgcacagtgtcagacccccactcaggccgctccccccacaccggtgtcacccagactgcacgtccctctgatgcccgctcaaccggctcccccaaagccccagcccacgacacggacgcccccacaatcccagaccccaggagccttacccgcgaagagagaacagcccccgagcctgacgcggaacggaccactctcatgtgggcagcgattgaggaagtccctgagctcaatgacccgcgtggtgggaggactggtggccctgcggggagcgcacccctatatagccgctctgtactggggtcatagcttctgcgcaggctcactgattgctccttgctgggtactgacagcagcgcattgtcttcaagacaggcctgccccagaggacctgactgtggtgctgggccaggaacgacggaaccactcgtgcgaaccctgtcagaccctggccgttcgatcatacagactgcacgaggcattctcccctgttagctaccagcatgatctggccctcctgagattgcaggaggatgctgacggcagctgtgcattgctcagcccctatgtccaacccgtgtgcctaccttcaggagctgcccggccctcagagaccacactgtgtcaagtggccggctgggggcaccaatttgaaggtgctgaggaatatgcctcattcctgcaggaagcgcaggtaccattcctgtctctcgaaagatgctcagcaccggacgtgcatggcagcagcatcttgcccggcatgctgtgtgctggattcttggaaggcgggacggacgcatgtcagggagatagcggagggcctttagtgtgtgaggaccaggcggcagagcggcgtctgaccctccagggtatcatcagttgggggtcaggttgcggagacaggaacaaaccaggggtctacactgatgtggcttactatttggcttggattcgcgaacacacggtatca

SEQ ID NO: 10141 - DNA, 1845 bp, Artificial Sequence
  derived and/or modified sequence
atgcgggctttattactcctgggcttcctcctggttagcctagagagcaccttatctataccaccctgggaggccccaaaggagcacaagtataaggccgaggagcataccgtcgtcctgactgttacaggagagccctgtcattttccattccagtaccataggcaattgtaccacaagtgcacacacaagggcaggcctggacctcagccttggtgtgcaactacccccaatttcgatcaggaccagcgctggggttactgcctggagccaaaaaaggtgaaagaccactgctctaagcattccccctgccagaagggcgggacctgcgtcaacatgccatctggcccccactgtttatgtccacagcacctaactggtaatcactgtcagaaggagaagtgctttgagcctcagctgctgagatttttccataaaaacgagatatggtacagaaccgagcaggcagccgttgctcgctgtcagtgcaagggccccgacgcccactgtcagcgcctcgccagccaggcttgcaggactaacccttgcttgcacggcggcaggtgtctggaagtggagggtcacagactttgccactgccccgtcgggtacaccggcgctttctgcgatgtggatactaaggccagctgttacgatggccgcggcctctcttatcgcggtctagctagaactactctgagtggggctccttgccaaccctgggcttctgaggccacttatagaaacgttacagccgagcaggctaggaactgggggctaggaggtcatgctttttgccggaaccctgataatgatatacggccctggtgttttgtcctaaatcgggaccggctgtcatgggagtattgcgatctggcccaatgccagacccctacccaggctgcacccccaacaccagtgagcccaaggctgcacgtgccattaatgcccgcacagcccgctcctccaaagccccagcccactacacggacaccaccccagagtcagacacctggcgccctaccagctaaaagagagcagcctcctagcctgacacggaatggcccacttagttgtggccagaggctgcgtaaaagcctctccagcatgactcgggtggttggcgggctagtggccctcaggggggcccacccttatatagccgctctgtattggggccacagcttttgcgccggtagcttaatagccccttgttgggtacttaccgctgcccactgcctgcaggatcggcctgcccccgaagatttgacagttgttctgggacaggaaagacgcaaccattcatgtgaaccttgtcagacactggccgtgcggagttatagactgcatgaggcctttagtccagtgagctatcagcatgacctggccctgctgcgcctgcaggaggacgcagatgggtcatgtgctctcttatctccatatgtgcagccagtgtgtctgccttccggtgctgcccggcctagcgagaccacattatgccaggttgccgggtggggccaccagttcgagggcgcagaagaatacgcatcctttctgcaggaggcccaggtcccctttttatctctagaaaggtgctcagccccagacgtgcacggcagctccatcctccctgggatgctgtgtgctggttttctggagggagggacagatgcatgtcagggcgatagtggggggccattagtgtgcgaagatcaggctgccgagaggcggctgaccttgcaaggcataatctcatgggggagtggatgtggggacagaaataaaccgggggtgtacaccgacgtggcttactacctggcttggattcgagaacatacagtgtcc

SEQ ID NO: 10142 - DNA, 1845 bp, Artificial Sequence
  derived and/or modified sequence
atgcgagctctgcttctgctaggcttcctcctggtctcattagagagcaccctgagtatacccccctgggaagcccctaaggagcacaagtataaagcggaagagcacaccgtcgtgctgaccgtaacgggcgaaccctgtcacttccccttccaatatcaccggcagttgtaccataagtgtacgcacaaggggaggcccggcccacagccgtggtgtgctaccacaccaaacttcgatcaggaccaaaggtggggatactgcctggagcccaagaaggtgaaggaccattgtagtaagcattctccttgtcagaagggaggaacttgcgttaatatgccgtctggacctcattgtctctgtccacagcatctaacgggaaatcactgccaaaaggagaaatgcttcgagcctcagctcctgcggtttttccacaagaacgaaatctggtacagaaccgaacaagctgctgtagcccgatgtcagtgtaaagggcctgacgcccactgtcagagactcgcgagtcaggcgtgtaggacaaacccttgcctgcatggaggtcgttgcctggaggtcgagggccacaggctttgtcactgccctgtgggatatacaggggccttttgtgatgtggacacaaaggcttcctgttatgatggccggggtttgtcatatagaggcttagcgcggaccaccctcagcggtgccccctgccagccatgggcgagtgaagccacctacaggaacgtaacggcagaacaggcaagaaactggggtttggggggacacgcattttgtagaaatccagataacgacatcagaccatggtgctttgtgcttaatcgcgatagattatcgtgggagtactgcgatcttgcacagtgtcagactcctacacaggccgccccccccacaccggtgtctcctcgtttgcacgtgccgcttatgccggcacagcccgccccaccgaaaccccaaccaacaactaggacccccccccagagccagacccccggagctctaccagcgaaacgcgaacagcccccaagcctgactagaaatggaccgctgtcatgtggacaaagactgagaaaaagcttatcgtctatgacacgggtggtggggggactagttgctcttcggggggctcatccttacatagccgcgctgtattggggtcactccttctgtgccggaagtttaatcgctccatgctgggtcttgacggccgcccactgtcttcaggatcggcccgcaccagaggatttaaccgtggtacttgggcaggaaaggcggaatcactcttgcgagccatgccagactctcgcggtgaggagctatagattgcacgaagctttctcgcccgtgagttaccagcatgatttggctctcctgcgccttcaggaagatgccgacggctcttgcgcccttctgagcccctacgtccagcccgtctgtctgccaagtggagccgcgagaccatcggagacaactctctgtcaggtggcagggtggggacatcagtttgagggcgcagaagaatacgccagctttctccaagaggctcaagtgcccttcctttcacttgagcggtgtagtgcacctgacgtccacggatcttctatcctgcccgggatgctctgcgctggcttcctggagggagggacagacgcctgccagggggacagcggcggtcccctggtctgcgaagatcaggccgccgagcgtcgattgacccttcagggcattatctcttgggggtctggctgcggcgacaggaacaaacccggcgtgtacacagatgtggcttactatttagcatggatccgggaacatacggtctcc

SEQ ID NO: 10143 - DNA, 1845 bp, Artificial Sequence
  derived and/or modified sequence
atgagggctctgctgctgctggggtttcttctggtatcactggagtcgacactttccatccctccttgggaagcgcccaaggaacacaagtataaggcagaagaacacaccgtggtgctcacggtcactggcgaaccctgccacttccctttccaatatcacaggcagttgtatcacaagtgtacccacaaagggcggccagggcctcaaccctggtgtgccacaacccctaacttcgaccaggaccagagatggggctactgtttggagccgaagaaggtcaaagaccactgcagtaagcacagtccctgccagaaaggcggcacctgcgtcaacatgcccagcggtccgcactgcctgtgccctcagcatcttacgggcaaccattgccaaaaagagaaatgctttgagccgcaacttctccggttctttcacaaaaatgaaatttggtaccgtacagagcaggctgccgttgcacgctgccaatgtaaaggaccagatgcccactgccagaggcttgccagtcaggcatgcagaacgaacccttgcctgcacggcgggcgatgcctggaggtagagggacatcgcctgtgtcattgccctgttggctatacaggcgcgttctgcgacgtggacacaaaagcctcatgctacgatggtagaggcctctcatacagaggcctagcaaggactacccttagcggcgctccatgccagccttgggcctcagaggctacgtacagaaatgtcaccgccgagcaggccaggaactggggtctgggcgggcacgccttctgtcgcaatccagacaatgacatccgtccatggtgcttcgtgttgaatcgggacaggctatcctgggaatattgcgacttggcccagtgccaaactcctacacaggcagcccctcctacaccagtatccccccgcctgcatgtccctttgatgccagcccagcctgcgccccccaaacctcagccgaccactcgaaccccgccccaatcgcagacacccggtgccctgcccgccaaacgcgaacagcccccgagcctaacccgtaatggacccctgtcctgcggccagaggttgaggaaaagcctgtccagcatgacccgggttgtgggggggttagtggcacttaggggcgcccacccctacattgccgctctgtactggggtcatagcttctgcgcaggctctcttattgccccatgttgggtgctcacggcagcccattgtcttcaggaccggcccgcccccgaagacttgacagtcgttttgggtcaggaacgcagaaatcattcatgtgagccttgccagacactggcagttcggtcatacagactacatgaggctttctcacccgtctcatatcagcatgacttggcccttctgcgattacaagaggacgctgacggtagctgtgctctgctgtcgccctacgttcagccggtctgcctgcccagcggagcagcgcgaccttcggagacaacactatgccaggttgccggctggggccaccaattcgagggggctgaggagtacgctagctttttgcaagaggcgcaggtgccctttctgagtctcgagagatgcagtgctcccgacgtgcatggatccagtatcctgcctggaatgttatgtgctggtttcctggaggggggcactgacgcatgtcagggcgacagcggaggaccattggtgtgtgaagaccaggcggccgagcggaggcttaccctgcagggcattataagctggggttcaggatgtggcgaccggaacaagcccggcgtgtatacagacgtcgcatactatttagcatggatacgtgagcataccgtaagc

SEQ ID NO: 10144 - DNA, 1845 bp, Artificial Sequence
  derived and/or modified sequence
atgcgggcgctgctcctgctgggtttcctcctcgtgtctctggagagcacgctttcaatccctccctgggaagcccctaaggagcataagtacaaggcagaagaacataccgtcgtcctcaccgtgaccggggagccgtgccacttcccattccagtaccaccggcagctctaccataaatgcacccataagggccggccaggtccccagccgtggtgcgccactactccgaatttcgatcaggaccagcgctggggatactgcttggaaccgaagaaagtgaaagaccattgctcgaagcactccccttgccagaagggaggcacctgcgtgaacatgcccagcggaccgcattgcctttgcccacagcacctcaccggaaatcactgccaaaaggagaagtgtttcgaaccgcaactgcttcgcttctttcataagaacgagatctggtatagaacggagcaagccgctgtcgccagatgccagtgtaagggcccggacgcgcactgtcagaggttggcttcgcaggcctgtagaaccaatccgtgcctccacgggggacgttgcctcgaggtggaaggccatcggctgtgccactgcccagtgggatatactggagcgttctgcgatgtcgataccaaggcaagctgttacgacggccgcggactgagctaccgcggactggcccgcactaccctgagcggcgctccgtgccaaccctgggcatcagaagccacttaccggaacgtgactgccgaacaggcgagaaattggggactcggaggacatgcattctgtcggaaccccgataacgacatcaggccgtggtgctttgtcctcaatagagatcgcctgtcgtgggagtattgcgatctcgctcaatgccaaaccccgactcaggcggccccaccgactccggtgagcccacggttgcatgtgcctctgatgccggcccagcccgcccctccgaagccccaaccaaccacccggacgccgccgcaatcgcagactccaggggcactgccagccaagcgcgagcaacccccatccctgacccgcaacggccctttgtcctgcggacagagactgcgaaagtcgctgtcaagcatgaccagagtggttggaggcctggtggcgctgaggggagcccacccgtacatcgccgctctctactggggtcactcgttttgcgctggatcgctcatcgcgccttgctgggtcctgactgcagctcattgcctgcaggatcgtcccgcgccggaggatctgacggtggtgctggggcaggaacgccggaaccactcttgcgagccatgccaaaccctcgccgtgagatcctaccggctgcacgaggcgttcagccctgtgagctaccaacatgacctcgcgctgcttcgcctccaggaggatgccgacggatcttgcgccctgctgtcgccctacgtccagccagtgtgtctgccaagcggagcagcaagaccgtcggaaaccactctgtgccaagtcgccggatggggccatcaattcgaaggggctgaggagtacgcgtcgtttctccaggaggcccaggtcccgtttctcagcctcgaacggtgctcagcgccagatgtgcacggatcttcaatcttgcctggtatgctgtgcgcaggtttcctggagggaggcactgacgcttgccaaggcgactcgggcggacctcttgtgtgcgaagatcaggccgccgaaaggcgcctgactctgcagggaatcatctcatggggatccggttgcggagacagaaacaagcctggagtctacactgatgtggcctattacctcgcgtggattcgcgagcacaccgtctct

SEQ ID NO: 10145 - DNA, 1845 bp, Artificial Sequence
  derived and/or modified sequence
atgcgggcgctcttgctgctcggtttcctgcttgtgtccctggagtctaccctctcgatcccaccttgggaagctcccaaagaacataagtacaaggccgaagagcatactgtggtgctgactgtcaccggagaaccctgccattttccgttccagtaccaccggcagttgtaccacaaatgcacccataagggacgccccggaccgcagccgtggtgtgccactactcccaacttcgaccaggatcagagatggggttactgtcttgaaccaaaaaaggttaaggaccactgctccaaacattcaccctgccaaaagggcggtacttgcgtgaacatgccttcgggtccacactgcctttgccctcaacatctcaccggcaaccactgccagaaagagaagtgttttgagccgcaactcctgaggttcttccataagaacgagatttggtacagaaccgaacaagctgcagtggcgcggtgccagtgcaagggccctgacgcgcactgtcagcgcctcgcaagccaagcctgccgcactaatccgtgcctgcacggtggacgatgtctggaagtagaagggcaccgcctctgtcactgcccggtgggatacactggagcgttctgcgatgtcgacactaaggcgtcatgctacgacggccgcggactgtcatacagaggccttgcacggaccaccctctcaggcgctccgtgtcaaccgtgggccagtgaagcaacctaccggaacgtgactgccgaacaagcccgcaattggggactgggcggtcacgccttctgtagaaatcccgacaacgacatccgcccatggtgctttgtgctgaaccgcgacaggctgtcatgggagtactgcgatcttgcccagtgtcagacccccactcaagccgctccccccacgcctgtctcgccgcgcctccacgtgcctctcatgccagcccagccagccccgccaaaaccacagcccaccacccgcaccccgccgcaatcacagaccccgggtgccctccctgcaaagagagagcaaccgccctcgcttacccggaacggtcccctttcctgcggacagcgtcttagaaagagcctctcgtcgatgactcgcgtcgtcggcggcctggtggcgctgcgcggcgcccatccgtacattgccgcactgtattggggccattctttctgcgctggatccctgatcgctccgtgctgggttcttactgcagcacattgcctccaggaccgccccgccccagaagatctgaccgtcgtcttgggccaggaacggcggaaccattcctgcgagccgtgccagactctcgcagtgcgatcgtacaggctgcatgaagcatttagcccagtctcctaccagcacgatttggccctgttgcgcttgcaggaggatgccgacggaagctgtgcgctgctgtcaccgtacgtgcaacctgtgtgcctgccgtctggcgcggctcgcccttcagagacgaccctgtgccaagtcgcgggctggggtcaccaattcgagggagcggaagagtacgcatcgttccttcaggaggcacaagttccgtttctgtcactggagagatgctccgctccggacgtccacgggtcctctatcctgccaggaatgctttgcgccgggtttctggagggcggcaccgatgcttgccagggggacagcggcggccctctggtgtgcgaagatcaggcggccgaacgccggctcacgctccagggaatcataagctggggaagcggatgcggagacagaaacaagccgggtgtgtacaccgacgtggcctactatctggcctggatccgcgagcacacggtgtca

SEQ ID NO: 10146 - DNA, 1845 bp, Artificial Sequence
  derived and/or modified sequence
atgcgggccctgctgcttctgggattcctcctggtgtcccttgaatccacactgtccattcctccttgggaagcccctaaggaacacaagtacaaagccgaggaacacactgtggtgctcacggtgaccggtgagccttgtcactttccctttcagtatcacagacagctgtatcacaagtgtacacataaaggacgcccaggtccgcagccatggtgcgcgacaacacccaattttgaccaggatcagagatggggatactgtctggaaccaaagaaggtcaaggaccattgctcaaagcattcaccatgccagaagggcggcacctgtgtcaatatgcctagcgggccgcactgcctgtgtccccagcacctaactggtaaccactgtcagaaggaaaaatgcttcgagcctcagctgttgcgattttttcataaaaatgaaatctggtaccggacagagcaggcagctgtggctcgatgccaatgcaaaggcccagacgctcactgccagcggctggcgagccaggcctgtcgcacaaacccctgtcttcacggtggcaggtgtttggaagtggaagggcataggctgtgccactgcccagtcgggtataccggtgccttttgtgacgtggataccaaggccagctgttacgatgggagaggtctgagctatcgcggcctggctcgaacaaccctgtcaggtgcaccgtgtcaaccttgggcaagcgaagcaacctatcgaaacgtgacagcggagcaggcccggaactggggactggggggacacgctttttgcaggaatcctgacaatgatatccgaccctggtgcttcgttttgaatcgcgacagactgtcatgggaatactgcgacctggcacagtgccagacacctactcaagccgcccctcccactcccgtatctccgagacttcatgtcccacttatgcctgcgcagccagcgccccctaaaccccagccaactacccggacgccccctcagagtcagactcctggagcgcttcctgcaaagagggagcagcctccgtccctgactcgaaacggacccctgtcatgcggccagcggctcaggaaatcactgtctagtatgacacgtgtcgtgggcggcctcgtagcactacgcggggcccatccttatattgctgcactgtactggggccatagcttctgcgccggttcccttatagctccgtgctgggtacttaccgcagcccattgtctccaggatcgccccgcccctgaggatctgaccgtcgtattggggcaggaacgaaggaatcactcatgcgaaccctgtcagacgctggcagtacggtcgtatcgcctgcacgaggccttctccccagtgagctaccagcacgatctggcgctgctcaggctgcaggaagacgccgatgggagctgtgcgctcctgagcccgtacgtgcaacctgtatgcttgccatcaggtgcagccagaccttccgaaactacgctatgtcaggtggccggatggggccaccagtttgagggcgccgaggagtatgcaagctttctccaggaagcccaggtgccatttttgagtttagaaagatgctcagcacctgatgtacacggctctagcattctgcccgggatgctgtgtgcaggcttcctggagggggggaccgacgcatgccagggggatagcggcgggcccctggtgtgcgaagaccaggctgctgaaagaagactcaccttgcagggtatcattagttggggctcggggtgcggagaccgcaacaagccgggcgtctatacagatgtcgcttattatctcgcttggattagggagcatacggtgtct

SEQ ID NO: 10147 - DNA, 1845 bp, Artificial Sequence
  derived and/or modified sequence
atgagagccctccttctgctcggcttcctactcgtgtctctggaaagcactctatccattcccccctgggaagcaccaaaggaacacaaatacaaggccgaggagcacaccgttgtgctgacagtgaccggagagccctgtcactttcccttccagtaccatcgacaattgtatcacaagtgcactcacaaagggcgaccaggcccccagccttggtgtgcgaccacacctaatttcgaccaagatcaaaggtggggctactgcctggagcccaagaaggtgaaagaccattgtagcaaacactccccttgtcaaaagggagggacctgtgtgaatatgccgtccggtccacattgcctgtgcccacagcacctgaccgggaaccactgccagaaagagaagtgttttgagcctcaacttttacggttttttcacaaaaacgaaatctggtacagaactgaacaggccgctgtggcgcgctgtcagtgcaaaggaccagacgctcattgtcaaaggctcgcctcacaggcttgcagaacaaacccttgcctccacggcgggagatgcctcgaggtggagggccaccggttgtgccactgcccagtgggatacacaggcgcattttgcgacgtcgacactaaagcttcttgttacgatgggaggggactttcttataggggcctggcccggacaacattgtccggggcaccctgccagccttgggccagtgaggcaacttacaggaacgtcacagctgagcaagctaggaattggggattggggggacatgccttctgccggaacccagacaacgatatccgtccttggtgcttcgtccttaaccgggatcggttatcctgggaatattgcgaccttgctcagtgtcagacccctacccaggccgctccacccacacctgtgtcacccagactccacgtcccactgatgcctgctcagccagcccctcctaaaccccaacccactaccagaacccctccccagtcgcaaacaccaggtgcattaccggctaagcgcgagcagccacctagcttgacacgtaatggccctctgtcgtgcggacagcggttacgaaagtctctgtcttctatgactcgcgtggtgggggggctggtcgccctgcgaggagcacatccttatatagctgccctgtactgggggcattctttctgcgccggatctctcattgctccctgttgggtcctgacagcggcccactgtcttcaggaccgaccggcgcccgaagatctgacagtcgtactgggacaggaacgccgaaatcacagctgtgagccgtgccaaacactcgcagtgaggagttatcgactgcacgaagctttcagccctgtgtcgtatcagcatgatctggcccttctcaggctccaggaggatgccgacggatcgtgtgcccttttgtccccttatgtccagcctgtttgtctcccaagtggggccgctcggccttccgagacaaccctctgccaggtggctgggtgggggcatcagttcgagggagccgaagagtacgcaagtttcctgcaggaggctcaggtgccattcctgagcttagaacgatgcagcgcgcctgacgtgcatggcagttccatcttacccgggatgctctgtgccgggttcctggagggtggtactgatgcctgtcaaggagactcgggaggcccactcgtgtgcgaagaccaggccgctgagagacgtttaaccctgcagggtataatctcttgggggtccggttgcggggacagaaacaagccaggagtgtatactgacgtcgcgtactacctggcttggattagagaacatacggtgagc

SEQ ID NO: 10148 - DNA, 1845 bp, Artificial Sequence
  derived and/or modified sequence
atgcgcgctctgctgctgctcggattcttgctcgtgtcgctggaatccactctctcgatcccaccttgggaagccccgaaggagcacaagtacaaggccgaagaacatactgtggtgctgactgtgaccggcgaaccgtgccacttcccatttcaataccaccggcaactctaccacaagtgcacccacaagggacgcccaggaccccagccttggtgcgccactaccccgaatttcgaccaggatcaacggtgggggtactgtcttgaacctaaaaaggtgaaagaccactgctcgaagcactccccatgccagaagggaggaacctgcgtgaacatgccgtcgggaccacactgcctctgcccacaacatctgactggcaaccactgtcaaaaggagaaatgcttcgagccacaattgctccggttcttccacaagaacgaaatctggtaccgcactgaacaggccgcggttgcccgctgtcaatgcaaaggaccagatgcacattgtcagcgcctcgcgtcgcaggcctgccggactaatccgtgccttcatggtggtaggtgccttgaagtggaaggacatagactgtgccattgccccgtggggtacaccggagccttctgcgacgtcgacaccaaggcgtcctgctacgatggccggggcctctcgtaccgcggactcgcccggacgactctgtccggcgccccgtgccagccttgggcatcagaagcaacttatagaaacgtgactgcggagcaggcgcgcaactggggactcggaggccacgcattctgccggaacccggacaacgacattagaccttggtgttttgtgctgaatcgcgatagactttcgtgggaatattgtgatctggcgcagtgccagaccccgacccaggccgcgcccccgaccccggtcagcccaaggctgcacgtgcccctgatgcccgcgcagcccgctcctccgaaaccgcaaccaaccactcggacgccgcctcagtcccagacccctggggccctgcccgcaaagcgagaacaaccgccctcgctgacgcggaatggcccactgtcatgtggacagagactccggaagtcgctgtcctcgatgacccgcgtggtggggggactcgtggctctgagaggagcccatccgtacatcgctgcgctgtactggggacacagcttctgcgccggcagcctgatcgcgccttgctgggtgctgactgccgctcattgccttcaagatcggcctgctccagaagatctgaccgtggtgctgggtcaggagcggcgcaaccactcatgcgagccgtgccagaccctcgctgtgcgctcatacagactgcatgaagcgtttagccctgtgtcgtaccagcacgatctggctctgctgagactgcaggaagatgccgacggatcctgcgctctcctgagcccatacgtgcagccggtttgcctgccgtcgggggcagcccgcccaagcgaaacgactctgtgtcaggtggcgggatggggtcaccagttcgaaggcgccgaggagtacgcgtcctttctgcaagaagcccaggtcccgttcctctcactggaacgctgttcggccccggatgtccacggatcaagcatcctgccaggcatgctgtgtgctggattcttggaagggggcacggatgcctgccagggagatagcgggggtccactcgtgtgcgaagatcaggccgcggagagaaggttgaccttgcaagggatcatcagctgggggtcaggttgtggggacaggaataagccaggcgtgtacactgacgtggcatactacctggcctggatcagggagcatactgtgtcg

SEQ ID NO: 10149 - DNA, 1845 bp, Artificial Sequence
  derived and/or modified sequence
atgcgggcactgctgctcctcgggttccttctcgtgtcactggaatccaccctgagcattcccccatgggaagcgcctaaggaacataagtataaagcggaagaacacaccgtggtgctgaccgtgactggagagccgtgccatttcccgttccagtaccacagacagctgtaccacaagtgcactcacaagggcagacctggaccacaaccttggtgcgctaccactccaaatttcgatcaggaccaaaggtggggatactgcctggagccaaagaaggtgaaagatcactgctccaagcattccccttgccaaaagggagggacttgcgtgaacatgccctccggaccacactgtctgtgcccacagcacctgacgggcaatcactgccagaaggaaaagtgctttgagccacaattgctgcgctttttccataagaatgaaatctggtacaggaccgagcaagctgccgtggccaggtgccagtgtaagggtcccgacgctcattgccagcgcctggccagccaggcctgccgcactaatccctgcctgcacggaggccgctgcctcgaggttgagggacataggctgtgccactgcccggttggatacactggcgcgttctgtgatgtggatacgaaggcctcctgttacgacgggagaggcctgtcctaccgcggactggcgcgcaccactctgtccggggcaccatgccaaccgtgggcctcagaagcaacttacagaaacgtcactgcagaacaggcgcggaactggggactgggaggacacgccttctgtcgaaacccggacaatgatatcagaccgtggtgcttcgttctgaacagagacaggctgagctgggagtactgtgacttggctcaatgccagactcccacccaggctgccccaccaacccctgtctcgccgagactgcacgtcccgctgatgcccgctcaaccggcaccgccaaagccgcagccgactacccggacccctccacagagccagaccccaggtgcgctgccggcaaaacgcgaacaacctccatcgctcactcgcaatggaccactctcgtgcggacagcggctcagaaagtccctgtcaagcatgacccgcgtggtcggtggactggtcgctctgcgcggagcccatccgtacatcgccgcactgtattggggacactcgttctgcgccggatctctcatcgctccatgttgggtcctgaccgctgctcattgcctgcaggaccggccggcgccagaggaccttactgttgtcctgggacaggagcgccgcaatcattcgtgcgaaccatgccagactcttgcagtgcggtcctacaggctgcacgaggccttctcgccggtcagttaccaacatgatctggcgttgctccgcctccaggaggatgcggatggcagctgcgccctgctgtccccgtacgtgcaaccggtctgcctgccatccggggccgcccggccttcagaaaccaccctgtgccaggtcgctggatggggtcatcaattcgagggagcagaagagtacgcatcatttctgcaagaagcccaagtcccgttcctgagcctggagcggtgttcggcgcctgacgtgcacggatcatccattctccctggaatgctgtgcgccggcttcctcgagggcgggacggacgcctgtcaaggagactccgggggaccactcgtttgtgaggaccaagcggccgagcgcagactcactctgcaaggaatcattagctggggttcgggttgcggcgaccgaaacaagcctggagtgtatactgatgtggcctactatctcgcctggatcagagaacacactgtgtcc

SEQ ID NO: 10150 - DNA, 1845 bp, Artificial Sequence
  derived and/or modified sequence
atgcgagcactgctgcttcttggtttcctgctcgtatccctggagtctaccttgagtattcctccctgggaggctcccaaggagcataaatacaaggccgaagaacacaccgtcgtgcttaccgtgaccggcgagccctgtcactttccatttcagtaccacagacagctgtaccacaagtgtacacacaagggccggcctgggccccagccctggtgtgctacaacaccaaactttgatcaggaccagcgctggggctactgcctggaacctaagaaggtgaaagaccattgttctaaacactcgccctgccagaaaggtggtacgtgtgtcaatatgccatccggcccccactgtctctgtcctcagcacctcactggaaatcattgccaaaaggagaaatgcttcgaaccgcagctgctgagattcttccacaaaaacgagatttggtaccgtacagagcaagctgctgttgcacggtgccaatgtaaaggtcccgatgcccattgccagcgcctcgcatcgcaggcgtgtcgcacaaacccatgtctccacggcgggcgctgtttagaggtggagggacacaggctgtgccactgcccggttggatatactggcgccttctgcgacgtggacacgaaagctagctgttatgacgggcgtggactctcataccgtggactggcgcggaccaccctgtctggagctccttgccagccatgggccagcgaagcgacctaccgcaacgtcaccgctgagcaggcacgaaattggggattgggtggccacgccttctgccgtaatcctgacaatgatattcggccttggtgtttcgttttaaaccgagaccggcttagttgggagtactgtgacctggcccagtgccagacccccacgcaggcagcaccccccactcccgtgtcaccacgactgcatgtcccgctgatgccagcacagccggccccacctaaacctcaaccaactacgaggacccctccccagtcccagacccctggtgcgctgccagccaagagagagcaacccccctcattgacccgcaacggtcctctttcctgtggtcagagactgcgcaagtcactgagtagcatgactcgagtggtaggaggtctcgtagctctcaggggcgcccacccgtatatcgcagcgttatattgggggcatagcttttgtgccggcagtttgatcgccccctgttgggtcctgacagcagcacattgtctgcaagatcggcctgcgcctgaagatcttacagtcgtcctcggccaggagcgacggaatcactcctgcgagccctgtcaaaccttggccgtgcgaagttatcggctgcatgaggcctttagcccggtatcctatcagcatgacctggccctacttcgactgcaggaggacgcagatggttcctgtgcccttttgagcccgtacgtgcagccagtatgtctaccatccggtgccgcacgtccatctgagaccacattgtgtcaggttgctggctggggccaccagttcgaaggggctgaggaatacgcaagcttcctacaggaagcccaggtccccttcctcagtctggaaaggtgcagtgcccctgatgtgcatggtagttccatccttccaggtatgctgtgtgcaggctttctggaaggtggaactgatgcatgccagggagattctggagggcccctggtgtgtgaagatcaggccgccgaaaggaggctaactctccagggaataatcagctggggtagtggctgcggtgataggaacaaacctggggtgtataccgacgtagcttactacttggcatggatccgggagcatactgtctcc

SEQ ID NO: 10151 - DNA, 1845 bp, Artificial Sequence
  derived and/or modified sequence
atgagagccctgctattactaggatttctgctggtgtccttagaatccacattgtcaattcccccctgggaagccccaaaagagcataaatataaagcagaggaacatacggtcgtcctgacagtgactggggaaccatgtcattttccctttcagtatcaccgacagttgtatcacaaatgcacacacaaggggagacccggaccccagccttggtgtgctactacacctaatttcgatcaggatcagcgttggggatattgcttagaacctaagaaagtcaaggatcattgctccaaacactctccctgtcagaagggggggacttgtgtgaatatgccatctgggccccattgtctctgtccccagcacctaacagggaaccattgtcagaaggaaaaatgttttgaaccacagctgctccgctttttccataaaaacgagatatggtacagaactgagcaggccgctgtcgctcgatgtcagtgcaaagggcctgatgcccattgtcagagactagcatcgcaggcatgccggactaatccttgtctacacggagggcgctgtcttgaagttgaggggcaccggctttgccattgtcctgtagggtacactggggcattctgtgacgttgatacaaaagcttcctgctatgacgggagaggactgagttatcgggggctggcacggactactctctctggggcaccctgtcagccgtgggccagtgaagccacttatcgaaatgtgacagccgaacaggctcgcaactgggggctggggggacacgctttctgccgcaatcccgataacgatatccggccctggtgctttgtgctaaacagagatagactatcatgggagtactgcgatctcgcccaatgccaaacacccacacaggctgccccccccactccagtttctccccggctccacgtacccctcatgccagcccagcctgccccacctaaaccacagcccacaactcggacacccccccaatcacagacacccggagccttacctgcaaagagggaacagccaccgtcactcacaaggaacgggccattaagttgcggacagcgcttgaggaagtcattgtcctccatgactcgggtcgtgggaggactcgtagctctcaggggagcccacccctacatcgctgccctatactgggggcactctttttgtgcaggaagtctcatcgccccatgttgggtcctgacagccgcccattgtcttcaggataggccagcccctgaggatctcacagtggtgctcggacaggagaggagaaatcacagttgcgaaccatgtcagacattggcagttagatcatacaggctgcatgaagctttttcgccagtgtcctaccagcatgatctggcgcttctcagactacaagaagatgctgatggatcctgtgccttgctcagtccctatgtccagcccgtttgtctaccctcaggagccgcccgtccctcagaaacaactctctgtcaggtcgccggatggggacaccagtttgaaggagccgaggaatatgcgtccttcctccaggaagcacaggtgccattcctgtccctggaacggtgtagtgctccggatgttcatggatcatctatacttcctggaatgctgtgtgccgggtttctggaaggaggaacagatgcttgtcagggggattcaggagggccccttgtatgtgaagatcaggccgccgaacgacggttgacactgcagggaataatttcctggggaagtggatgcggagataggaataaaccaggggtgtatacagatgtggcatattatctggcttggatccgggaacatacagtctcg

SEQ ID NO: 10152 - DNA, 1845 bp, Artificial Sequence
  derived and/or modified sequence
atgagggctctcctcctcctaggatttttactggtctcactggagtcgactctgtccatacccccgtgggaagccccaaaggaacataagtacaaggccgaggaacacacagtcgttctcactgtcactggggagccttgccatttccctttccaatatcacagacaactctaccacaagtgtacacacaaaggtcgccctgggccccagccatggtgcgcaacgacacccaatttcgaccaggaccagcgctggggctactgcctcgaacctaaaaaggttaaagaccactgttctaagcatagcccttgtcaaaagggcggaacatgtgttaacatgcctagtggccctcactgtctgtgcccccagcacctcacgggaaaccactgtcagaaggaaaagtgtttcgagccacagcttttgaggttttttcacaaaaacgaaatctggtaccgcacagagcaagcggccgtggcccggtgtcagtgtaagggacctgacgctcactgccagcggctagctagtcaggcctgtaggacgaatccttgtttacacgggggtcggtgcttagaggtggagggccaccgtttgtgtcactgccccgtcgggtacaccggggcattctgtgatgttgataccaaggcttcttgctacgacggtcggggcctgtcctacagagggctggcgcggaccaccctctctggggcgccatgccagccttgggcttccgaggcaacctataggaacgtgacagccgagcaggctcgcaattggggcctgggcggacacgcgttctgcagaaatccagacaatgatatccgcccatggtgttttgtgctgaatcgggaccgcttatcttgggagtattgtgacctggcccagtgtcagacaccgacgcaggccgctcctccaacaccagtcagcccgcgtctgcacgtgcccctcatgccggctcagccagcacccccaaaaccccaacctactacccgtacacccccacagtctcagactccaggcgccctgcctgctaagcgggagcaacctccaagtctgactcgaaatggccccctttcctgtggacagaggctcaggaaatcactctctagcatgacacgtgtggtgggaggcctggttgcccttcgcggggctcatccctacatcgcagccttatactggggacactcattttgcgccggttccttaatcgcgccatgttgggtgctcactgctgcacactgccttcaggatcgccccgctccagaggacttgactgtcgttcttgggcaggaaaggcggaaccacagctgtgagccatgtcaaaccctggccgtaagatcttataggctgcacgaggccttctcccccgtttcttatcagcatgatctagccctgcttagactgcaggaagacgccgacggttcgtgcgctcttctctccccctatgtgcaacctgtctgtcttccatccggggctgccaggccgtcagaaacaactttgtgccaggtggccggctggggtcatcaatttgagggcgctgaggagtatgcctcttttctgcaggaggcccaagtgcccttcctttccttggagagatgttcggctcctgacgtgcacggctcttctatccttccagggatgctgtgcgctggatttctcgagggtggaacagatgcgtgccagggcgactcagggggtccacttgtgtgcgaggatcaagccgccgagcgacgcctaaccttacagggaatcatcagctggggatcaggctgcggagacaggaacaagcctggagtgtatacggatgtggcatattaccttgcctggatccgcgagcacactgtgagt

SEQ ID NO: 10153 - DNA, 1845 bp, Artificial Sequence
  derived and/or modified sequence
atgcgtgcattgctcctgcttggattcttgcttgtgtcactggagtcaactctgtcgatccctccttgggaagccccaaaagagcataagtacaaggctgaagaacatacggtggtgttgactgtaaccggagaaccgtgccatttccctttccaataccacagacaactgtaccataaatgtactcataaaggccgcccgggtccccaaccttggtgcgccactaccccaaactttgatcaggaccagaggtggggttactgtctggagcctaagaaagtcaaggaccactgttcgaaacacagcccgtgtcagaagggcggaacctgtgtgaacatgccctccgggccacattgtctctgtccccaacatcttactggaaaccactgccaaaaggaaaagtgctttgaaccacagttgttgcggttttttcataagaacgagatctggtacaggaccgaacaggcggcagtggcacgatgccaatgtaagggtcctgatgcacactgtcaacggcttgcgagccaagcatgcaggaccaatccttgtttgcatggcggaagatgccttgaagtggaggggcatcggctgtgtcactgcccggtcggctacaccggcgcattctgcgatgtcgatactaaggcatcatgttacgatggacgaggcctctcctatagaggtctggcacgcaccactctgtccggggcgccttgtcaaccttgggcctcagaggcaacctacagaaatgtgactgccgaacaagcacgcaattggggtcttggaggacatgccttttgtcgcaatccagacaacgatatccggccatggtgttttgtgttgaatcgcgacagacttagctgggagtactgcgacttggcacagtgccagacccctactcaagcagcgccccctacccctgttagtcctcgtctgcatgtgccacttatgcctgcgcaacctgcaccccccaagccgcagcctacgacgagaacccctccacaatcgcagacccctggggcactgcctgctaaacgagaacagccaccatcgcttacccggaacggacccctgagttgcggtcagcgtctcagaaagtcgcttagcagcatgactcgtgtggtgggcggtcttgttgcacttagaggagcacacccctacatcgccgcactctactgggggcactccttttgcgcggggagccttattgctccatgttgggtcctgactgcagctcactgtttgcaagacaggccagcgccggaggacctgactgtggtcttgggtcaggaacgaaggaaccattcctgtgaaccatgtcagaccctggccgtcaggtcatacagactgcacgaggctttttctccggtgtcttaccagcacgatctggccctgctgagactgcaggaagatgcagacggatcctgtgccctcctgagcccgtacgtccaacctgtgtgtctcccatccggtgcggccaggccgtcagaaactaccctctgtcaggtggcaggatggggacatcaatttgaaggagcagaagaatacgctagcttcttgcaagaggcacaagtgcctttcctgtccctcgagcggtgctcggcacctgatgtccatggctcctcgatactcccgggcatgttgtgtgcaggtttcctcgaaggaggaactgatgcatgccagggagattccggcgggccgctcgtttgtgaagatcaggcagcagagaggcggctgacgctgcaaggtattatctcctggggaagcggttgtggggatcgaaacaagcccggagtctacaccgatgtggcttactatcttgcctggatacgagagcatactgtgagc

SEQ ID NO: 10154 - DNA, 1845 bp, Artificial Sequence
  derived and/or modified sequence
atgagagctttattacttttaggatttttattagtttctttagaatctacattatctattccaccatgggaagcaccaaaggaacataagtataaagcagaagaacatacagttgttttaacagttacaggagaaccttgtcattttccatttcaatatcatagacaattatatcataaatgtacacataagggaagaccaggacctcaaccttggtgtgctacaactcctaattttgatcaagaccaaaggtggggatattgtcttgaaccaaaaaaagttaaagatcattgttcaaagcattcaccatgtcaaaaaggaggaacatgtgttaatatgcctagtggaccacattgtctttgcccacaacatttgactggaaatcattgtcaaaaagaaaagtgttttgagccacaacttttaagattttttcataaaaatgaaatatggtatagaactgaacaagcagcagtagcaagatgtcaatgtaaaggaccagatgcacattgtcaaagacttgcatctcaagcatgtagaactaatccttgccttcatggtgggcgttgtcttgaagtcgaaggtcataggttatgtcattgcccagttggatataccggtgctttttgtgatgttgatacaaaagcatcttgttatgatggaagaggtttatcatatagagggcttgctcgtactactttaagtggtgcaccttgtcaaccttgggcaagtgaagcaacttatagaaatgttactgcagaacaagcaagaaattggggacttggaggacacgcattttgtagaaatcctgataatgatatacgtccatggtgttttgttcttaatagagatagattatcatgggaatattgtgatcttgcacaatgtcaaacaccaactcaagccgctccacctacaccagtttctcctcgattacatgttcctttaatgccagcacaacctgctccaccaaagccacaaccaactactagaacacctccacaaagtcaaactccaggagcattaccagcaaagagagagcaaccaccatctttaacaagaaatggtccattatcttgtggacaaagacttagaaaatcattatccagtatgactagagtcgtaggtggtcttgttgctttaagaggagcacacccatatattgcagctttatattggggacattctttctgtgctggttcattaattgcaccttgttgggttttgacagctgcacactgtttacaagacagaccagctccagaagatttaactgtagttcttggacaagaaagaagaaatcattcatgtgaaccatgtcaaactttagcagttagatcatatagacttcatgaagctttttcaccagtttcataccaacatgatttagcacttttaagattacaagaagatgcagacggaagttgtgcacttttatctccatatgttcaaccagtttgccttccatctggtgcagcaagaccaagtgaaactacactttgtcaagtagcaggatggggacaccaatttgaaggtgctgaagaatatgcatcttttttacaagaagctcaagtaccatttttaagtcttgaacgttgttctgctccagatgttcatggatcatcaattttacctgggatgctttgcgctggatttttagaaggaggaaccgatgcttgtcaaggtgattcaggaggacctttagtttgtgaagatcaagctgctgaaagaaggttaacacttcaaggaatcatatcttggggatctggatgtggagataggaataaaccaggtgtttatactgatgttgcatactatttagcatggattcgtgaacatacagtttct

SEQ ID NO: 10155 - DNA, 1845 bp, Artificial Sequence
  derived and/or modified sequence
atgagagcacttctgctccttggtttcctgcttgtgtccctggagagcaccctgtcgattcccccctgggaagcgccaaaagaacataagtacaaagcagaggagcatactgtggtgttgaccgtgaccggcgaaccttgtcattttcccttccaataccacagacaattgtaccacaaatgtacccataaaggtagacctgggcctcagccatggtgtgcaactactcctaatttcgatcaagatcagcgctggggatattgtttggaacccaagaaggtgaaggatcattgctccaagcacagcccttgtcaaaagggaggtacttgtgtgaacatgccttcgggaccacattgtctgtgtccacagcatctcaccggaaaccattgtcaaaaggagaaatgttttgagccacagcttctccgtttctttcataagaacgaaatctggtacaggaccgaacaggcggcagtggcccgctgccaatgtaaaggcccggacgcacactgccagcgcctcgcaagccaggcatgtcgaaccaacccttgccttcacggaggacggtgtcttgaagtggagggccatcgcctgtgccactgccccgtaggctacactggagccttttgtgacgtggacactaaggcgagctgttacgatgggagagggctgagctaccgcgggctcgcgcggactactctgtccggtgcaccttgtcaaccctgggcttctgaagcgacttataggaacgtgactgcagaacaagcgagaaactggggtcttggagggcatgcattttgcagaaaccccgataacgatatccggccatggtgttttgtgctgaaccgcgaccgacttagctgggaatattgtgatctggcacaatgtcagactcccacgcaggcagctcctccgacgcctgtgtcgccgagactccatgtgccactgatgccagcacaacctgcaccccccaaaccacagccgaccactcggacccctcctcagtcccagaccccaggtgcgctccctgcaaagcgtgaacagcctcctagccttaccaggaacgggcctctgtcctgtggccaaagactcagaaagtcgttgagctccatgacccgcgtcgtgggcggtcttgtcgcccttcgcggcgcacatccgtacattgctgcactttactgggggcacagcttttgtgcaggaagccttattgcgccttgttgggtcctgaccgcagcacactgtctccaagatcgtccagcacccgaagatctcaccgtcgtgcttggacaggaaagaaggaatcactcgtgcgaaccatgtcagactcttgcagtgaggtcgtaccgactgcatgaagcatttagccctgtctcataccaacatgacctggccctgcttcgcctgcaggaggatgccgatggatcgtgtgccctgctgtcaccatacgtgcagcctgtgtgtctgccctccggtgcggctagacccagcgaaaccactctttgtcaagtcgcaggctgggggcatcaattcgaaggtgcagaagaatacgcttcgttccttcaagaggcccaggtgccttttttgtcccttgagagatgttcggcaccggatgtgcacggatcctccatcctccccggtatgctctgcgcaggttttcttgaagggggaaccgacgcttgtcagggtgacagcggaggaccgcttgtgtgcgaggaccaggcagcagaaagacgccttactttgcaggggataatctcttggggctcgggttgcggcgatcggaacaagcctggtgtctacaccgacgtggcgtactacttggcatggatacgcgaacatactgtgtct

SEQ ID NO: 10156 - DNA, 1845 bp, Artificial Sequence
  derived and/or modified sequence
atgcgcgctctcctcctcctgggttttctcctcgtcagcctggaaagcaccctttcaattcctccctgggaagcccccaaggagcacaaatataaggctgaggagcacaccgttgtcctgactgtgaccggtgaaccatgccacttcccatttcaataccaccgtcagctttaccacaagtgtacccataaaggaaggcccggtccacagccctggtgcgctactaccccaaactttgatcaggaccagcgttggggctattgcctggaacctaagaaagttaaggatcactgcagcaagcacagcccatgccagaagggcggtacctgtgtaaatatgcccagcggcccccattgcctgtgccctcagcacttgaccggtaaccactgccagaaggaaaagtgcttcgaaccacagcttctgcgtttcttccataagaatgagatttggtaccgtaccgaacaggccgcagttgctcgttgccagtgcaagggaccagacgctcactgtcagaggctggctagtcaggcttgtagaaccaatccctgtttgcacggtggtaggtgtctggaagtcgagggccatcgtctctgccactgtcccgttggttacactggcgctttctgcgatgtagacacaaaagctagctgctacgatggtcgtggtctgtcttatcgcggtttggctagaaccaccttgtccggagccccatgccagccctgggcctcagaggcaacctaccgtaacgtgacagccgagcaagcacgcaactggggtttgggcggccatgccttttgtcgcaatccagataatgacatccgcccttggtgttttgtgctgaaccgtgatcgcctctcttgggagtactgtgatctggctcagtgccagacccccactcaagccgccccacccaccccagtctccccaaggctgcatgttcctctgatgcctgcccagccagcaccccctaaacctcagcctacaacccgcactcctccccaatctcaaaccccaggagcactgcccgctaaaagagaacagccaccttcactcacaagaaacggtcctttgagctgtggccaacgcctgcgtaagagcctgtcaagtatgactcgcgtggtgggtggtctggtggcactgcgtggtgcccatccttacatagccgctctctactggggacactctttctgtgctggctcactcatcgccccatgctgggtccttaccgctgcacactgtctgcaggacaggcccgccccagaggacctgaccgttgttctgggtcaggagcgcaggaaccactcctgcgaaccttgccagactctggctgtaagatcatacagactgcacgaggcattctctcccgtctcttatcagcatgacctggctttgctgaggttgcaagaggatgcagacggctcctgtgctctgctcagtccctatgtgcagcccgtatgcctgcccagtggagccgctcgtccctctgagacaactttgtgccaggttgccggctggggacaccaattcgagggtgctgaagagtacgcttcttttctgcaggaagcacaagttccctttctgagtctggagagatgtagcgcccccgacgtgcatggatcatccatcctgcctggcatgctttgtgctggctttctggaaggcggaaccgacgcctgccaaggagatagcggtggacccctggtctgtgaggaccaggccgccgagcgtaggctgaccctccagggcataatctcttggggatccggatgtggcgaccgtaataagcccggtgtttacaccgacgttgcctactacctggcttggatcagggagcacaccgtctcc

SEQ ID NO: 10157 - DNA, 1845 bp, Artificial Sequence
  derived and/or modified sequence
atgagagctcttctgttgctgggctttttactggtgagcctcgaaagtactttgtcaattcctccatgggaggcccctaaagagcacaaatacaaggccgaggagcacaccgtggtcctcacagtcaccggagagccttgccattttcccttccaatatcaccggcagctgtaccacaagtgtactcataaaggccgacctggcccacaaccctggtgtgccacaactccaaattttgaccaagatcagcgctggggttattgccttgaaccaaagaaggttaaagaccattgtagtaagcatagcccatgtcagaagggtggaacgtgtgtcaacatgccctcaggtccacattgcctgtgcccgcagcatcttaccggtaatcattgccaaaaggaaaagtgtttcgaaccacaattactgcggttcttccacaagaatgaaatctggtatcgtacggaacaagctgcggtggcacggtgccagtgtaaggggccggatgctcattgccagagactggcttctcaagcctgccgtaccaatccctgtctgcacggaggccgttgtctggaagtggagggacaccggctttgccactgtccagttggatacactggcgcattctgtgacgttgacacgaaggccagctgctacgacggccgagggttgagctacagggggctcgctcggaccaccttgagcggcgccccctgtcagccgtgggcaagcgaggctacgtacagaaacgtcacagctgaacaagccaggaattggggcctgggaggccacgccttttgcagaaatcctgataatgacatcaggccttggtgtttcgtgctcaatagggaccggctgagttgggagtactgtgacctggcccagtgccagacgccaactcaggcagccccacccacacctgtcagcccgcgcttacatgttcctctgatgccggcccagcccgctccgccgaaaccgcagcccactacccgcacacctccccaatcacaaacccccggagccctgcctgcgaagcgcgaacagccgccgtctctcacaagaaacgggcccctgtcctgcggccaacgcttaagaaaaagtctttcatccatgacccgagtggtgggcggcttggtcgcgcttaggggggcccacccttacatcgccgccctctactgggggcatagcttctgtgccggctcgctgatcgccccttgttgggtgcttacagctgcccattgtctccaggacaggcctgcacccgaagacctgactgtggtgctggggcaagagcgcagaaatcattcttgtgaaccctgccagacgctggccgtcagatcttatcgcctgcacgaggcattctctccagtgtcataccaacacgacctagccctgttacggctgcaagaagacgcggatggctcctgtgcacttctctccccatacgtgcaaccagtgtgcctgccatctggcgctgcccgcccatccgagacaactctctgtcaggttgcagggtgggggcaccagtttgagggcgccgaagagtacgcttctttcctgcaagaggcccaagtaccattcctgtccctggaacgttgctcagcccccgatgtgcatggatcttccatcctacctggcatgctatgtgccgggtttttagaaggaggcaccgacgcctgtcagggggacagtggcggacccctcgtgtgcgaagaccaggcagcagagcgtaggttgacgcttcagggtatcatcagctgggggtccgggtgtggtgatcggaataagccgggggtgtacaccgatgtcgcgtattaccttgcatggattcgggaacatacagtgtct

SEQ ID NO: 10158 - DNA, 1845 bp, Artificial Sequence
  derived and/or modified sequence
atgagagcgcttctgttgctggggttcctcttggtttcactcgaatctaccctcagcatacctccatgggaggcaccaaaggagcacaagtacaaggccgaggagcacactgttgttctgacagtgaccggagagccttgtcatttcccctttcagtaccatcgacagctttaccacaagtgcacacacaaaggcaggcccggcccccagccgtggtgcgccacaacccctaatttcgaccaggatcaacgctggggatattgcctggaaccgaagaaggttaaggatcattgtagcaagcactcaccttgccagaagggaggtacatgcgtgaatatgccctccggaccccattgtctctgtcctcagcaccttaccgggaatcattgccaaaaggaaaagtgttttgaacctcagctgttgagattctttcataagaacgaaatctggtaccgaaccgagcaggcagcggtggcccgatgtcagtgtaaggggcctgacgcccactgtcaaaggttggccagtcaggcttgtagaaccaatccctgcctgcatgggggaaggtgcctggaggtagagggccaccgcctgtgtcattgcccagtggggtataccggtgcattctgcgacgttgacactaaagccagttgctatgacggcagagggctctcttatcggggcctcgctaggaccactctgtcaggtgctccctgtcaaccgtgggcttccgaagctacttacaggaatgtgaccgccgagcaggctcgcaactggggtctggggggacatgcattctgccgcaaccctgataacgacatccggccatggtgtttcgtgctcaatcgggatcggctgtcatgggagtattgcgaccttgcccaatgtcaaactccaacccaagccgctcctcccacacccgtgtcaccccggttgcacgtaccactgatgccggcccagccagcgccgccaaagccacaaccaacaacccgaacaccccctcagtctcaaaccccgggggccctgcccgccaaaagagaacaaccaccatccctgacgaggaacggtcccctgtcttgtggccagcggctgcgcaaatctctgtcctccatgacgcgggttgtgggtgggctggtggctctcaggggagctcacccttatatcgccgccctgtattgggggcactccttctgcgctggtagcttgatagccccctgttgggtcctcaccgccgcccattgcctgcaagacaggcctgctcccgaggatcttactgttgttttgggacaggaaagaagaaatcactcctgcgaaccatgtcaaacgctcgccgtaaggtcttatcgactgcacgaagccttttctccagttagctaccaacacgacctggccctcctgaggcttcaggaggacgccgacggaagctgtgccctcctttccccgtacgtgcaacctgtctgcctgccttcaggggcggcaaggccctctgagaccacactgtgtcaagtggccgggtggggccaccagttcgaaggggccgaagagtacgcttctttcctgcaggaagcccaagtcccgtttctgtccctggaaagatgtagcgcccccgatgtgcacggttcatctatactgccgggtatgctgtgtgccggcttcctcgaggggggaacagatgcctgccaaggtgacagtgggggcccccttgtttgcgaggatcaggctgcagagcgacggctgaccttgcagggcatcatctcctgggggagtggctgcggagaccggaacaagcccggtgtgtatactgacgtggcctattacctggcttggatccgcgaacatactgtcagt

SEQ ID NO: 10159 - DNA, 1845 bp, Artificial Sequence
  derived and/or modified sequence
atgagagctctgctgcttctgggttttctgttggtgagcctggagtcaacacttagcatcccaccgtgggaagcgccgaaagagcacaagtacaaggcggaagagcacaccgtcgtgttgacagtgaccggtgagccgtgccactttccattccaataccaccgccagctgtaccataaatgcacccacaaaggtcgtcccggtccgcagccatggtgtgcgaccactccgaattttgatcaggaccagcgttggggttactgtctggagccgaagaaggtcaaagaccactgcagtaaacacagcccttgtcagaaaggtggtacatgcgttaacatgccaagcgggccgcactgtctgtgtcctcaacacttgacaggcaatcactgccaaaaggaaaaatgctttgaaccgcagctgctgcgattttttcacaaaaacgaaatatggtaccgtaccgaacaagccgccgtggcccgctgtcaatgcaagggcccagatgcccactgtcaacgactggcctctcaagcatgccgcaccaacccgtgcctgcacggtgggcgctgtctcgaggtggagggccaccgcttgtgtcattgccctgtgggttatacaggcgcgttttgtgatgtcgataccaaggcgagctgctacgacgggcgcggtctcagctatcggggcctggcgcgcacaacgctgtctggcgcaccgtgccagccttgggcctccgaggcgacctaccgcaacgtaacagctgaacaagcaaggaactggggtctgggtgggcacgcgttctgccggaacccagacaatgatatcaggccatggtgcttcgtcctgaaccgcgacagactgagctgggaatactgtgacctggctcagtgtcagactccaacccaggctgcccccccaaccccagtgagcccgcgccttcacgttccgcttatgcccgcccagccagcaccgccaaagccacagccgactactcggactcccccacagagccagactcctggggctttgcctgccaagagggagcagcctccatccctgacacgcaacggtcctctgtcgtgcggccagcggctgaggaagtccttgtcctctatgacccgcgtggttggtggcctggtggcgcttcgcggtgcccatccttacatcgccgccctgtattggggtcatagcttctgtgcgggttctttgatcgccccgtgctgggtgctgaccgccgcgcattgcctccaggatcgaccagctccagaggatctgaccgtcgtgctgggccaggagcgtagaaatcacagctgtgaaccatgccagaccctggcggttcgctcatacaggttgcatgaggcattcagccctgtgagctaccagcatgacctggcgctgctgaggctgcaggaggatgccgacggatcttgtgctctgctgtcgccttacgttcagcctgtctgcctgccgtccggagctgcacgtccaagcgaaacgaccttatgccaagtggcaggttggggtcaccagttcgaaggagcggaagaatacgcgtcctttctccaggaggctcaagtgccgtttttgtctctggagcgttgtagcgctccagacgtgcatggcagcagcattctgcctgggatgctgtgcgcaggtttcctggagggcggtacggacgcttgtcagggtgattccggtgggcctctggtgtgcgaagaccaagctgcggaacgccgcctcactttgcaggggattatatcttggggtagcgggtgcggggatcgaaacaaaccaggcgtgtacactgacgtggcgtactacctggcgtggattcgggagcacaccgttagc

SEQ ID NO: 10160 - DNA, 1845 bp, Artificial Sequence
  derived and/or modified sequence
atgcgagcacttcttctcctgggctttctccttgtctccctggagagtacactgtcgatccccccttgggaggccccaaaggagcataaatataaagctgaagagcacactgtggttttgacagttactggagagccttgtcattttccttttcagtatcaccgccagctgtatcacaagtgcacacacaagggcaggcctggaccacaaccctggtgtgcgacaacccccaatttcgatcaggaccagaggtggggctactgtctcgaacccaaaaaggtgaaggaccactgctccaaacacagcccttgtcagaagggcggtacctgtgtcaatatgccttcagggccccactgcttgtgcccgcaacaccttacagggaatcactgtcagaaggagaagtgctttgagcctcaactcctgcgattctttcacaaaaatgaaatatggtaccgcactgaacaggctgctgtggcgcggtgtcagtgtaaggggcccgacgctcactgccagcggctcgcctctcaggcctgccgcacgaacccttgtctgcacgggggacgttgtctagaagtcgagggccacagactgtgtcattgtcctgtcggctataccggtgctttttgcgacgtcgacacgaaagcttcatgctacgacggccgcgggctgtcttacagaggtttggcccgaaccacacttagtggggccccttgtcagccttgggccagtgaagcaacatatagaaacgtgacggcagagcaggctcggaactggggcttgggagggcatgctttctgccgtaatcctgacaacgacataagaccttggtgcttcgtcctcaacagagacagactgtcttgggagtattgcgacttggcacaatgccagacccccactcaggccgcgccacctacacctgtctctcctagactccacgttcctctgatgccagctcaaccggcaccccccaagcctcaacctaccacaagaacaccaccccagtcccagacaccgggagccctgcccgcaaaacgagagcagcctcccagtctgacccgtaatggaccactctcttgtggccagcgcttgaggaaatccctgagttcaatgacacgcgtggtagggggactcgtcgcgctacgcggggctcacccatacattgccgccctgtattggggacactcgttttgcgctggatccctgatcgccccgtgctgggtcctcaccgctgcccattgtctgcaagatcgccccgccccagaggacctcactgtagttctgggccaggagcgcaggaaccactcttgtgagccatgccagacgctggctgtgcggagttaccgcttacacgaggccttctctcctgtgtcataccagcacgatttggcattactgagactacaggaggatgcagacggctcttgtgctctcctgtccccttacgtgcaacccgtctgcttgccgtccggagcagcccggccttccgagacgacactgtgccaggtcgcaggatggggccatcagtttgaaggtgctgaggaatacgccagctttttgcaggaggcgcaggtgccctttctatctttggaaagatgctctgcccccgacgttcatggaagttcaatcctccctgggatgctgtgtgccggttttctggagggggggaccgacgcctgtcagggggatagcggaggccccctggtgtgcgaggaccaggccgcagagcgacgactgaccctgcagggaataatctcatgggggagtggttgtggggaccgcaataaaccgggggtttatacagacgtggcatactatctggcctggatccgggagcatactgtttcc

SEQ ID NO: 10161 - DNA, 1845 bp, Artificial Sequence
  derived and/or modified sequence
atgcgagcattgctgcttttgggttttttgttggtttcattggagtccacattgtctatccctccttgggaggcccctaaagagcacaaatacaaggccgaggagcacaccgtagtattgactgtcacaggtgaaccatgccatttcccttttcagtatcacaggcaactttatcataagtgcactcataaaggtagacctggccctcaaccatggtgtgctaccactcccaacttcgaccaggaccagcgttggggttactgcctagaacctaagaaagttaaagaccactgtagcaaacatagtccttgccaaaagggtggaacttgtgtcaatatgccttccggacctcactgtttatgcccacaacatctcactgggaatcattgtcaaaaagagaaatgtttcgagccccagttacttaggtttttccacaaaaacgaaatttggtaccgcacagagcaggcagctgtggcaagatgccaatgcaagggaccagatgctcactgccagaggcttgcatcccaggcctgtagaacaaacccgtgtctccatgggggacgttgtctggaggtcgagggtcaccgactttgccattgtccagtcgggtacacgggtgcattctgtgatgttgataccaaagcttcatgctatgacgggagaggtttgtcatatcgtggactcgcacggactactctgtccggggctccctgccagccttgggcatcagaggctacatacagaaatgttaccgcagagcaggcgcgaaactggggcctgggtggccatgctttctgtaggaaccctgataacgacataaggccttggtgcttcgttttaaatcgggataggctgagttgggagtattgcgatctggcgcagtgtcaaactcctacccaagctgcaccacctacgccagttagcccacggctgcatgttccgcttatgccagctcaacctgctccacctaagccacagcctaccacccgaactccccctcaatcacaaaccccgggtgccttgccagccaaaagggagcaaccaccatccttgacgaggaacggccccctctcctgcggtcaacggttgagaaagtctctttccagtatgaccagggtcgtaggcggtctggtggctctaaggggggcccatccttacatcgcggcgctttattggggtcattcattttgtgctggaagccttattgctccgtgctgggtcctgaccgcggcacattgtcttcaagacaggcctgcaccagaagatctgacagttgttctaggtcaagaacgtcgtaatcactcgtgtgagccttgtcagacactggccgtcaggtcctatcgcctgcacgaagctttcagtccagtgagctatcagcatgacttggccttgcttcgtttacaagaggatgcagatggatcatgtgccctattgtccccttatgtccaacctgtttgtcttccaagtggagcagcaaggccttctgaaacaactttgtgtcaggtggccggatggggacatcaatttgagggggccgaagagtatgcttccttcttacaggaagcccaggtaccttttttgtccctggaaagatgcagcgcccccgatgtgcacggttcctcgattcttccagggatgctgtgcgctggatttttagaaggtggaactgacgcttgccaaggcgactctggaggacctttagtgtgcgaagatcaggcagctgagcgaaggcttacactccaaggtatcatttcgtggggtagtggttgcggagaccgaaataagcctggtgtgtacacagatgtcgcctattatctggcttggattagggaacacacggtctct

SEQ ID NO: 10162 - DNA, 1845 bp, Artificial Sequence
  derived and/or modified sequence
atgcgggctctgctactcctggggttcctactggtctcactggaatcgaccttgagcatccccccttgggaggcccctaaggaacataagtacaaagctgaggaacatacagtggtgctcaccgtgacaggagagccttgccatttccctttccagtaccaccggcagttgtatcacaagtgtacccacaagggccgacccggccctcagccatggtgcgcaactaccccaaatttcgaccaggaccaaagatggggctattgtctcgagccaaaaaaagtaaaggatcactgtagcaagcactccccctgtcagaagggcgggacttgcgttaacatgcctagcggcccgcactgtctatgccctcagcatctgactggtaaccattgtcagaaggagaagtgcttcgagccacagcttttacggtttttccacaaaaacgaaatttggtaccgcaccgaacaggccgcagttgcccgctgtcagtgtaaaggcccagatgctcattgccagagacttgcctcacaggcctgtcgcacaaatccctgtctgcacggcggtcggtgcttggaagtagaggggcatcggctttgccactgtcccgtaggatacaccggggctttctgcgacgtcgataccaaagccagctgttacgatggacgcgggctgtcctacagaggtctcgctcgtactaccctgtcaggcgcgccttgccagccctgggcctcggaggcaacctacaggaatgtgacagccgaacaggcccggaattgggggctgggcggacacgcgttctgtcgaaatcccgataacgacatcaggccttggtgctttgttctaaacagagatagattgtcgtgggagtattgcgatttggctcagtgtcagacacccacgcaggccgccccgcctaccccagtgtcacccaggctgcacgtccctctcatgccagctcagcctgctcccccaaagccacagccaacaacccgcacaccgcctcagtcccagacacccggcgctttacctgccaaacgtgaacagccgcctagtctgacaagaaacgggccactgtcctgcggccagaggttgcgaaagtccctaagctccatgacccgagtggtgggggggttggtggccttgagaggcgcacacccctacattgcagcactatattggggccatagcttttgcgctggatcactgatagctccctgttgggtcctgactgcagctcattgtttacaagataggccagccccggaggatctgacggtggtattgggtcaggagaggcgcaaccattcctgcgaaccttgtcagaccttggccgtccgatcttacaggctgcacgaggccttctcccccgtctcctatcagcacgatttggcactgctacgacttcaggaagatgctgatgggagttgtgctctgctcagtccatacgtacaaccggtgtgtcttccctccggggctgcccggccctctgaaacgactctctgccaggtggccggctggggacaccaattcgaaggagccgaggagtatgcatcctttctacaggaggctcaagtccctttcctctctctggagcgatgtagtgctccagatgtgcacggttcttcaattttacctggaatgctgtgcgccggctttttagagggcggaactgacgcttgccaaggggatagtggagggccactagtctgtgaggaccaagctgcagagaggcgtctgaccctgcagggcatcatttcctgggggtccggttgcggcgaccggaacaagcctggcgtctacacagacgtggcctattacctggcatggattcgggagcacaccgtctcc

SEQ ID NO: 10163 - DNA, 1845 bp, Artificial Sequence
  derived and/or modified sequence
atgagagctctgctgctgctgggattcctgctcgtttcccttgaatcgactctgagcattcctccctgggaagcacctaaagagcataagtacaaggccgaagagcatactgtcgtgcttaccgtcactggggagccttgtcatttcccattccagtaccaccgccagctctaccacaaatgtactcacaaaggcaggcctggaccacaaccgtggtgcgccaccactccaaacttcgaccaggaccagcggtgggggtattgcctcgagccgaagaaggtgaaggaccactgctccaagcactcgccatgccagaaaggaggaacctgcgtcaacatgccaagcggcccacactgcctctgcccgcagcacctcactggcaaccattgccagaaagaaaaatgcttcgaaccgcagctgctgcggtttttccataagaacgagatttggtatagaacggaacaggcagccgtcgcacggtgccagtgtaagggtccagatgcccactgtcagagattggcctcccaggcctgccggaccaatccgtgcctgcatggcggaaggtgcctggaggtggagggacatcgtctctgtcattgcccggtcggatacaccggagccttctgcgacgttgacaccaaggcctcctgctacgacggacggggactttcataccggggactggcgcgcaccaccttgtccggtgcgccgtgccaaccgtgggctagcgaagccacttaccgtaacgtcaccgcggaacaagcgaggaactggggacttggaggacacgccttttgtagaaatccagacaatgacattcgaccctggtgcttcgtgctgaacagggaccggctttcctgggagtactgcgacctggcccaatgccagactcctactcaggcagctcccccgacgccagtgtcgccgcggctgcacgtcccgctgatgcctgcccaaccagctccaccgaagccacagccaactacgagaactcctccacaatcacagaccccgggagctttgccagccaaacgggaacagccgcctagcctgactcggaacggccctctttcatgcggacaaaggctcagaaaatcgctttcatcaatgacccgagtcgtcggaggcctggtcgcgctccgcggcgcgcacccgtacattgccgccctctactggggtcactcattttgcgccggatccctgatcgccccgtgctgggtgctcaccgctgcacactgcctgcaggacagaccggcccctgaggacctgacggtggtgttgggacaggagaggcgcaaccactcgtgcgaaccgtgtcagaccctggccgtgcgcagctacagactgcacgaagcgtttagcccggtttcctaccagcatgacctggcgctgcttaggctgcaggaggatgcggacgggagctgcgccctgctgtctccttacgtgcagccggtctgcctgccgagcggcgccgcgaggccttcagaaaccactctttgccaagtggcaggttggggtcaccaattcgagggggcggaagagtacgcatcgttcctccaggaagcacaggtgcccttcctgtcccttgaaagatgctcggcaccggatgtccatgggtccagcatccttcctggaatgctgtgtgccggcttcctggaaggaggaaccgacgcctgccagggagattcgggcgggccgttggtgtgcgaggaccaggcggcggagcgccgcctgactctgcaaggaatcatctcgtggggctctggatgtggcgatcgcaacaagcccggggtgtacaccgacgtcgcgtactatctcgcctggatccgcgaacacaccgtctcg

SEQ ID NO: 10164 - DNA, 1845 bp, Artificial Sequence
  derived and/or modified sequence
atgagggctttgttgctcttaggattcctcctagtgagcctggagtccacactgagtatccccccgtgggaagcaccaaaggagcacaaatataaagccgaggagcacacagtggttctaacagtgactggcgagccttgccactttccgttccagtatcaccggcagttgtatcacaaatgcacgcacaagggacgacccggtcctcagccttggtgtgctaccacccccaatttcgatcaggaccagcggtggggatactgtctggagcccaagaaggtgaaggatcactgcagtaagcactcaccctgtcagaagggaggaacttgcgttaatatgcccagcggccctcactgtctctgtccccaacacctcacgggcaatcattgccagaaggagaaatgtttcgagccacagctgctccgtttctttcacaagaacgagatttggtatcgcactgagcaggcggcggtcgctagatgtcaatgcaaggggccagacgctcattgtcagagactggcgagccaggcatgtaggaccaacccttgcctgcacgggggcagatgtttggaggtggaagggcaccgcctgtgtcattgtcccgttgggtataccggcgcattttgtgacgtggatacaaaggcctcatgctatgacggtagaggtctctcctatcgagggttggctcggaccaccctctctggagctccttgtcagccctgggctagcgaggccacctacagaaatgtgacagctgagcaggccagaaattgggggttgggcgggcacgcgttctgccgcaaccccgataatgacattagaccctggtgttttgtattgaatagagacagacttagctgggagtactgtgacctagcccagtgtcagacgcctacccaggccgccccgccaacccctgtgagcccaagactgcatgtgcctctcatgcctgcacagccagccccgccaaagccacagcccactacaagaacgccccctcaaagccagacccccggggcccttccagccaaacgggagcagcccccaagcttgaccaggaacggccccctctcctgcggtcagagattgcggaaaagtctctcatctatgactcgggtagtgggagggcttgtggcactgaggggcgcacatccttatatagccgctctgtattggggacacagtttttgtgcagggtcactcatcgctccctgctgggtgctcaccgccgcccactgtttacaggacaggccggccccagaagatctaacagtggtgctggggcaggaacggagaaatcacagttgtgaaccctgccaaaccctagctgtgcgcagttatcgcctccatgaagcttttagccctgtttcttaccagcatgatcttgctctcctgcggcttcaggaagatgccgacgggagttgtgccctgctgtccccgtatgtgcagccggtttgtttgccaagtggcgccgcacgtccttccgaaaccacgctctgtcaggtagcgggatggggccatcaatttgagggcgcagaggagtatgcctcatttctacaagaggcccaggtaccattcctctcactagagcggtgctctgctccagacgtgcacgggtcctcaattcttcccgggatgctctgcgccggtttcctcgaaggtggaactgatgcttgtcagggtgatagcgggggacctctagtatgtgaggaccaggcagctgagagaaggctgactctgcaaggaataatttcctggggctccggatgtggagacagaaacaagcccggtgtgtacactgacgtcgcctattatctagcctggattagggagcatactgtatct

SEQ ID NO: 10165 - DNA, 1845 bp, Artificial Sequence
  derived and/or modified sequence
atgagagctctgctgctgctgggatttctgcttgtgtccctggagagcaccctctcgatcccgccatgggaggccccgaaggagcacaaatacaaagctgaagaacacactgtggtactcaccgtgactggcgaaccgtgtcacttcccattccagtaccaccggcaactgtaccacaagtgcactcataaggggcgcccgggaccgcagccatggtgcgcaactactccaaatttcgaccaggaccaacggtggggatactgcttggaacctaagaaggttaaagatcattgtagcaagcattcaccttgccaaaaaggtggaacctgcgtgaacatgccgtcgggaccccactgcctgtgtcctcagcacctgactggaaaccactgtcaaaaagagaagtgcttcgagccacagctgctgcgattcttccataagaatgaaatttggtaccgcacggagcaagctgcagtggccaggtgccagtgcaagggacctgatgcccattgccagagattggccagccaggcctgtcggacgaatccgtgcctccacggaggcagatgcctggaagtcgagggccacagactgtgccactgcccagtcgggtacaccggtgcgttttgcgacgtggacactaaggcgtcgtgttacgacgggcgcggtctgagctaccgcgggctcgcacggaccaccctgtcgggagcaccctgccagccgtgggcgtccgaagccacttaccggaatgtgactgcggaacaggccagaaattggggacttggagggcacgcgttctgccggaatccagataatgatatccggccgtggtgctttgttcttaatagggatcggctttcgtgggagtactgcgacctggcacaatgccaaaccccaacccaagcagcaccgcccactccggtgagccctagattgcacgtgcctctcatgccggcccagcctgcgccaccgaagccgcagcctacgactcgcaccccgccgcaatcgcaaacgccgggggccttgccggccaaacgcgagcagccgccttcgctgaccagaaatggacccctctcctgcggtcaaagactgaggaagagcctctcgtccatgacccgggttgtgggcggactcgtggccctgcggggagcgcacccctacatcgcagcgctgtactggggacattccttctgcgctggatcactgatcgcaccttgttgggtgcttaccgccgcacactgccttcaggaccgcccggccccggaggacctgaccgtggtgcttgggcaggaacgaagaaaccacagctgtgaaccatgtcaaaccctggctgtcagatcgtacaggctgcatgaagccttctcgcccgtctcgtaccagcatgatctcgcccttctgaggctgcaggaggatgcggatggttcatgtgccctgctttccccgtacgtccagcctgtgtgtctgccgtcaggagcagcccggcccagcgagactaccctgtgccaggtggcgggatggggacaccagttcgaaggcgccgaggagtacgcgtcattccttcaggaagcgcaggtcccattcctgtccttggagaggtgctctgcgcctgatgtccacggatcgtcgatcctcccggggatgctgtgtgctggattcctcgaaggtgggaccgacgcttgtcaaggagactcgggtggcccgctggtttgcgaggaccaggccgcagaaaggcgcctgactctgcagggaatcattagctggggatccgggtgcggagatcgcaataaaccgggagtgtacaccgacgtcgcctactacctggcgtggatccgcgaacataccgtgtct

SEQ ID NO: 10166 - DNA, 1845 bp, Artificial Sequence
  derived and/or modified sequence
atgagggcgctgctgctgctgggttttttgcttgtctccctcgaaagcaccctcagcattcccccctgggaagcaccaaaagaacataagtacaaggcggaagaacataccgtcgtgctgacggtgactggagaaccttgtcatttcccttttcagtaccatcgccagttgtaccacaagtgtacccataagggacgccccggacctcagccttggtgtgcaaccactcccaactttgatcaagaccaacggtggggttactgcctggaacctaagaaagtgaaggatcattgctccaagcattctccttgtcagaagggtggtacttgtgtgaatatgccaagcgggccacactgcctgtgtccgcagcaccttaccggaaatcactgtcagaaggaaaagtgttttgaacctcaactgctccgatttttccacaaaaatgagatatggtaccgcaccgagcaagcagccgtggccaggtgtcaatgtaagggacctgatgcacattgtcaaaggctggcatcccaagcctgtcgtaccaacccttgtctgcacggaggtagatgcctcgaagtggaggggcaccgcctttgtcattgcccggttggttacaccggagctttttgcgatgtggacactaaggcgagctgttacgatggaagaggattgtcataccggggtcttgcacggactaccctgtccggtgccccctgtcagccttgggcatcagaagcaacgtacaggaacgtcaccgcagagcaagcccggaactggggacttggaggccacgcattttgtaggaaccctgataatgatataaggccttggtgttttgtcctcaacagagatcgcctgtcctgggaatactgtgatcttgcccaatgccagacccctacccaggcagcgcctccgacgcccgtcagcccccgacttcacgtgcccctcatgccagcacaaccagcgccaccaaagcctcaaccaactacgaggaccccaccacaatcacagaccccaggagcactcccggcgaaacgggaacagcctccttcgctgaccagaaatggacctctttcatgtggtcaacgtctgagaaagtcactgagcagcatgactcgcgtggtcggtggtctggtggccctgcgcggggcccatccttacattgcggcactttattgggggcactcattttgcgcgggctccctcatagctccttgttgggtgctgaccgccgcacattgccttcaggataggcctgcacctgaagatctgaccgtggtgctcggacaagaacggcgaaaccattcctgtgagccctgtcagaccctcgccgtgcgtagctaccggcttcacgaagcattctccccagtatcataccaacacgatctggcattgcttaggttgcaagaggacgccgacggctcgtgcgccctgctttcgccatacgtgcaacctgtgtgtctcccgtcaggagccgccagaccctccgaaaccactctttgccaggtggcaggctggggacatcagttcgagggcgctgaagaatacgcgtcatttcttcaggaagcgcaggttcctttccttagccttgagagatgttctgctccagacgtgcatggctcctcaattcttcctggcatgctttgtgcagggtttctcgaaggtggaacggatgcttgccaaggagacagcgggggtccactcgtgtgcgaggaccaagccgcagaaagacgcttgacccttcagggaattatcagctggggaagcgggtgtggggacagaaacaaacctggcgtttacacggatgtcgcctactacctggcatggattcgggaacataccgtgtcg

SEQ ID NO: 10167 - DNA, 1845 bp, Artificial Sequence
  derived and/or modified sequence
atgcgggccttactgttgttagggtttctgttggttagtttagaatctacgctttcaataccaccgtgggaagcaccgaaggagcacaaatataaagctgaggagcatacggtggttcttacagtcacgggcgagccctgtcattttccgttccagtaccatcgacaactgtatcataaatgcacacacaaaggccgaccgggacctcaaccttggtgcgccacaacgcctaacttcgaccaagatcagagatggggttactgtctggagccgaaaaaagtcaaggatcattgtagcaagcattcaccgtgtcagaaaggcgggacctgtgtgaacatgccgagcgggccacattgcctgtgcccgcaacaccttacaggaaaccattgtcaaaaagaaaagtgttttgagccgcagttacttcggttttttcataaaaacgagatttggtatagaacggaacaggccgctgtcgctaggtgtcaatgcaaaggccctgatgctcattgccaacgactggcaagtcaagcatgcaggacaaacccgtgtttacatggcggccgttgcctggaagtagagggtcatagactgtgccattgtccggtggggtacacaggcgcattttgcgatgtggacaccaaggctagttgctatgatggacgcggtctttcttatcggggattggcgaggacgactctttcaggagctccgtgtcaaccgtgggctagtgaagcaacgtatagaaatgtgacagctgaacaggcccgcaattggggactgggtggccatgctttttgtcgtaatcctgacaacgacattcgcccttggtgctttgtgctcaatcgtgacaggttaagctgggaatattgtgatctggcgcagtgccaaacacctacacaagctgcacctccaacacctgtctcccctcgattgcatgtccctctcatgccggcccagccagcgcctccgaaacctcaacctacgacacggacaccgccacagtcacaaacaccgggagcgcttccagctaaacgcgaacaaccgccatccttaacgagaaacggcccgctttcatgtgggcaaagactaagaaaaagcctatcttcaatgactcgcgttgtagggggcttagtggctctgaggggtgcacatccttacatagcggccttgtattgggggcattctttttgtgcggggtcgctgatagcaccatgttgggtattaacagccgcccattgcctgcaggaccggccagcaccggaagatcttacagtggttctagggcaggaaagacgaaatcattcttgtgagccttgccagacccttgcggttcgttcttatcgcttacatgaagcattttcccccgtctcatatcagcatgacctggctttactgcgattacaagaagatgcagatggctcgtgtgcactgttaagtccgtacgtacagccagtttgcttaccttctggcgcggccagaccgtcagaaaccaccctgtgccaagttgccggatggggccatcagtttgagggagctgaagagtacgctagctttttacaggaagcacaggtgccgtttctttctcttgagaggtgctctgctcctgacgttcatggaagctctatactcccaggcatgctttgtgctgggtttctggaaggtggcacagatgcctgtcaaggcgattctggtggacctctcgtgtgcgaagatcaagcagcggagcgtaggctcacattacaggggattatctcttggggaagtgggtgcggcgatcgtaataaaccgggggtttatactgatgtagcctattatttggcctggattcgtgagcatactgtttca

SEQ ID NO: 10168 - DNA, 1845 bp, Artificial Sequence
  derived and/or modified sequence
atgagagcacttctccttctcggctttcttcttgtttcgcttgaatcgactctttcgattccgccctgggaagcaccaaaggaacataagtacaaggccgaagagcatactgtggtcttgaccgtgaccggagaaccgtgccactttccttttcaataccatcgtcaactgtaccacaaatgcactcataagggccggcctgggcctcaaccatggtgcgcaactacccctaacttcgatcaagatcagagatgggggtattgtcttgaaccgaaaaaagtgaaggatcactgcagcaaacattcaccttgtcagaagggcgggacctgcgtgaacatgccttcgggccctcactgcctgtgtccacagcacctgactggtaaccattgccaaaaggaaaaatgttttgaacctcagctgctccgcttctttcacaaaaatgaaatttggtaccggactgagcaggcagccgtggcaagatgtcagtgtaagggaccagacgcccactgtcaaagacttgcatcgcaggcatgtcgcaccaatccctgtctccacggaggccgctgtctggaggtcgagggtcatagattgtgtcattgccctgtcgggtacaccggcgccttctgtgacgtggacactaaggcctcgtgttacgatggaagaggattgagctatcggggtctggccagaaccactctgtcaggagccccgtgccagccctgggcctccgaagccacctaccgcaacgtcaccgccgaacaggcacgcaactggggccttggaggacatgcgttttgccggaaccctgacaacgatatacggccttggtgttttgtcctgaatagagacagactgagctgggaatactgcgaccttgcacaatgtcaaacgccaactcaggcggcaccgcctacccctgtgtctcctcgtttgcatgtgccccttatgccagcacagcccgcccctcctaaacctcagcctaccactcgcactcctccccaatcccaaacccctggagcactcccagcgaaacgggaacagccacccagcctgaccaggaatggcccgctctcctgtgggcagagactgcgcaagagcctgtcatcaatgactcgagtcgtgggcggtctggtggcgctgcgtggtgcgcatccctacattgcagccctctactggggtcatagcttctgtgctggatccctcatagcaccctgttgggtcctgaccgcggcccattgcttgcaagatagacccgcaccagaagatctgactgtggtgctgggacaagagcggaggaaccattcctgtgagccttgccaaaccctggccgtgaggagctacagactgcatgaagcctttagcccggtgagctatcagcatgatcttgcactgcttcgactccaggaagatgccgatggttcgtgtgcactcctttccccatacgtgcagcccgtttgcctcccttccggtgctgcgaggcctagcgaaaccactctgtgtcaagtggcagggtggggccaccagtttgaaggggcagaggaatacgcttcgtttctgcaagaagcccaggtgccttttctttctctggaacggtgctccgcaccagacgttcatgggtcaagcatcctgcccggaatgctttgcgcaggctttctggaaggaggaaccgacgcttgccagggagattcgggcggacctctcgtctgtgaggaccaagcagccgaacggaggctgacccttcaggggataatctcttgggggtcgggatgcggcgatcgcaacaaaccaggcgtctacactgatgtggcctactacctggcctggatcagagagcacacggtgtcc

SEQ ID NO: 10169 - DNA, 1845 bp, Artificial Sequence
  derived and/or modified sequence
atgcgcgctcttctgctcctcggattcctgctcgtatcacttgagtcaaccctgtctattccgccgtgggaagcgccgaaggagcacaagtacaaggcagaagaacatactgtggtactcaccgtcaccggcgaaccatgccacttcccgttccagtaccatcggcagctgtaccacaaatgcactcataaaggacgaccggggcctcagccgtggtgcgcgacgacccccaacttcgaccaggatcagcgctggggttactgtctggagcccaagaaggtgaaggaccactgctccaagcactcgccctgccagaagggcggcacgtgtgtcaacatgcctagcggaccacattgtctgtgcccgcaacacctgaccggaaaccactgtcagaaagaaaagtgctttgagccacagctcctgagattctttcacaaaaatgaaatatggtaccgaaccgagcaggccgcagtggcacgctgtcagtgtaaggggcctgatgcgcactgccaacgacttgcatcacaggcatgccgcaccaacccttgcctccacggaggccgctgcttggaagtggaaggtcatagactctgccactgcccggtcgggtacactggagccttctgtgatgtggacaccaaggcttcgtgttatgacggacgaggactttcttaccgtggactggcccgtacgactctctccggagccccatgtcagccctgggcctcggaagctacttacagaaatgtcaccgcagaacaagcacgcaattggggacttgggggtcatgccttctgccgcaatccggataacgatatccgtccttggtgcttcgttctgaacagggaccggctttcctgggaatactgcgacctcgcgcagtgtcagaccccaacgcaggctgcaccgcctactccggtgtccccgaggctgcacgtgcccctcatgccggcccagccggccccaccgaaacctcaaccaactacccggacgccgccgcagtcgcagaccccgggggctttgccggccaagcgggaacaaccaccatctctgacccgcaacggcccgctgtcgtgtggccaaaggcttcgcaagtcactgtcaagcatgactcgcgtcgtgggaggactggtggcgctgcggggcgctcacccctacatcgccgccctgtactggggacacagcttttgcgctgggtcactcatcgcgccttgctgggtcttgactgccgcacattgcctgcaagaccggccagccccagaggacctgaccgtggtcctggggcaggagcggagaaatcactcctgcgagccctgccaaactctggccgtgcgcagttaccgcctgcacgaggccttctctccagtctcataccaacatgaccttgcacttctcagactccaagaagatgccgatggatcttgcgctctgctgagcccatatgttcagccagtgtgcctcccttcgggcgccgcgcggccctcggaaactactctgtgccaagtcgcaggatgggggcaccaatttgagggcgctgaagaatatgcctcgttcctccaagaggcccaggtgccgtttctctccctcgaaaggtgctcggcaccggatgtgcatggctcctcgatcctgcctggaatgctctgcgcgggattccttgagggcggaactgacgcctgccagggtgattccggaggccctctcgtgtgcgaggaccaggctgccgagcggcggctgaccttgcagggtatcatctcctggggatccggatgtggtgacaggaacaaacctggagtgtacactgacgtggcttactacttggcgtggattagagaacataccgttagc

SEQ ID NO: 10170 - DNA, 1845 bp, Artificial Sequence
  derived and/or modified sequence
atgagggcgctgctcctgctcggttttctgttggtcagcctggaaagcactctgtcaattcccccctgggaggcgccaaaagaacataagtacaaagcagaagaacacactgtggtcctcaccgtgaccggagagccttgtcatttcccattccagtaccataggcagctctaccataagtgcactcataaaggaaggcctggcccacaaccatggtgtgccaccactcccaatttcgatcaagatcaacgttgggggtactgcctggaacccaagaaggtgaaggatcattgttccaagcattcaccatgtcaaaaggggggaacgtgtgttaacatgccttcgggtccccattgtctctgtccccagcatctcaccggtaaccactgtcagaaagagaagtgtttcgagccccaactgctgcgctttttccataagaacgagatttggtaccgtactgagcaagcggccgtggctcggtgccagtgtaagggtccggacgcacattgtcaaagactggcgagccaagcctgtagaacgaacccgtgcttgcatgggggccgctgtcttgaagtcgagggacatagattgtgtcactgcccagtggggtacaccggagcattctgtgacgtggacactaaggcaagctgctacgacggtcgagggctgtcttataggggtctggcccgcaccactctttccggggcaccatgtcagccatgggcgtccgaggccacctaccgtaacgtgaccgccgaacaggcgagaaactggggtcttggaggtcatgccttttgtagaaaccctgacaacgatatacgaccctggtgttttgttcttaacagggatcgattgtcgtgggaatactgcgatcttgctcagtgtcagaccccaacccaagccgcaccgcctaccccagttagccctagacttcacgtcccactgatgcccgcgcaacctgcaccgccaaagccgcaaccaaccacccgaacgcctccacaatcccagacgcctggggcacttccagcaaagcgggaacagcctcctagccttacccgcaatggacccctgtcatgtggtcagagactgagaaagagcctttcctccatgactagagtcgttggaggacttgtcgcgcttaggggagcacatccttacatagcagcactttattggggccacagcttttgtgcaggatccttgattgctccatgctgggtgctgactgccgcacattgtttgcaggacagacccgctcctgaagatcttaccgtggtgcttggccaggaacgaaggaatcattcctgtgagccatgccaaactctcgctgtgagatcatatagactgcacgaagcgttttcgcctgtgagctaccagcatgacctcgcccttcttaggctgcaggaagatgcagatggcagctgtgcccttctgtcaccatacgtgcagcccgtctgtctcccttcgggagcggcaagacccagcgaaactactctgtgccaagtggccggttggggacatcagtttgaaggagcagaagaatacgcatcctttctccaagaagcgcaagtgccatttctgtccctcgaaagatgctccgcacctgacgtccatggatcgtctatccttccagggatgctgtgtgctgggtttctcgaaggaggaactgacgcctgtcagggagattccggtggcccactggtctgtgaagatcaggcggcagaacgaaggctgactcttcagggaattatctcgtgggggagcggctgtggcgatcgcaataagcccggcgtgtacaccgacgtggcatactacctcgcatggattcgtgaacataccgtgtcg

SEQ ID NO: 10171 - DNA, 1845 bp, Artificial Sequence
  derived and/or modified sequence
atgagagcacttcttctgctgggattccttcttgtctcacttgaatcaaccttgtcgataccaccatgggaggcaccgaaggaacataagtacaaggctgaagagcatactgttgtgcttaccgtgaccggagaaccttgccattttccctttcaataccaccgacaactgtaccataagtgtactcataaggggcgccctggtccccaaccgtggtgtgcaaccacccctaactttgaccaagatcagagatggggatactgtctcgaaccaaaaaaggtgaaagaccattgctctaaacactccccctgtcagaagggaggaacttgtgtgaacatgccctccggacctcattgtctttgccctcagcatcttactggaaaccattgccaaaaagaaaagtgctttgagccacaactcctgcgctttttccacaaaaacgaaatttggtaccggacggagcaagcggccgtggcaagatgtcaatgcaaaggtcctgatgcacactgtcaacgcctggcatcacaggcatgtcgtacgaacccatgtctgcacggcgggcggtgcctcgaggtggaagggcatcgactttgtcattgtcccgtcggatacacgggagcattttgtgatgtggataccaaggcctcgtgttacgatggcagagggctgtcctataggggactggcccggaccaccctgtccggtgcaccctgccagccatgggcctcggaggcaacctacagaaatgtgactgcagaacaggcccggaattggggcctcggtggtcacgcattctgtaggaacccagacaatgatattcgcccttggtgtttcgtgttgaatagggatcgcctgtcatgggagtattgtgatcttgcgcaatgccagacccctacccaagcagcccctcctacccctgtcagccctagactccatgttccacttatgcctgcacaaccagcgcctccaaagcctcaacctaccactcggacgccccctcagtcacaaactccgggagctttgcctgcaaagagagaacagccccctagccttactcggaacggtcctctctcctgcggccaaaggctgcggaagtcactcagcagcatgactcgtgtcgtaggcggactggtggcgcttcgcggagcccatccatacatcgctgcactctactgggggcacagcttctgtgcagggagccttattgccccatgttgggtgctcaccgccgcacattgccttcaggatcgccccgcacctgaagatctcaccgtggtgctgggacaggaaaggcgaaatcactcctgtgaaccatgtcagacgctggcagtgagaagctacaggctgcatgaagcattctcgcctgtgagctatcagcatgaccttgcacttcttagattgcaagaagatgcagatggctcctgcgcactcctgtccccatacgtgcaacctgtctgccttccaagcggtgcagcacggccatccgaaaccactctgtgtcaggtggcggggtggggccaccagtttgagggagccgaggaatacgcctcctttctgcaggaggctcaagttccgtttctgtcactggaacgatgttcggccccagacgtacatggttcgtccattctgccgggtatgctctgcgccggatttcttgaggggggcactgacgcttgtcaaggggacagcggaggaccacttgtctgtgaagatcaagccgcagagcggagactcactcttcagggtattatctcttggggaagtggctgcggggaccggaacaagccgggagtatacactgatgttgcctactacctggcatggataagagagcacactgtgagc

SEQ ID NO: 10172 - DNA, 1845 bp, Artificial Sequence
  derived and/or modified sequence
atgcgcgcattgcttctgctcggattcttgctggtgtcccttgaatcgactctgagcatacccccgtgggaagccccaaaagagcataagtacaaggcagaagaacacactgtcgtcctgaccgttaccggagagccatgtcactttccattccagtaccatcggcagctgtaccacaaatgcacccacaagggccgcccgggccctcagccgtggtgcgctaccacgcccaatttcgatcaggaccagcggtggggttactgcctggagccaaagaaggttaaggaccattgctctaagcatagcccatgccagaagggagggacctgcgtgaatatgccgagcggaccccattgcctctgcccacaacacctcactggcaaccactgccagaaagaaaagtgcttcgagccacagctgctgagattcttccacaaaaatgagatctggtacaggaccgagcaagcggcggtcgcccgctgccaatgtaaaggtccggacgcccactgccagaggctggcctcacaagcctgccgcaccaacccttgcctccacggaggaagatgtctggaagtcgaggggcaccgtctttgccattgcccggtgggatataccggtgctttttgcgacgttgataccaaggcatcgtgttacgatggacggggactgagctacagaggcttggcgcggactaccctgtctggagcgccgtgtcagccgtgggcgtcagaagcaacctatcgcaacgtgactgcagagcaggctcgcaattggggccttggagggcacgccttctgtcggaacccggacaacgacatcagaccttggtgctttgtgctgaaccgcgaccgcttgagctgggagtactgcgatttggcccagtgccagacccctactcaggcggccccgccgactccggtgtcgccccgactccatgtgccattgatgccagctcagccggcgccaccaaagccgcaaccaaccacccgcactccgccgcaatcgcagactccgggggccctcccagctaaaagggagcagccgccgtccctgactagaaatggaccgctgtcgtgcggacagcgcctcagaaagtcactgagctcgatgactagagtggttggtggactggtggcccttcggggagcgcacccttacatcgcagccctgtactggggacattcgttttgtgccggatccctcatagcaccgtgttgggtgctgactgcagctcactgcctccaagaccgccctgcaccagaagatctgaccgtggtgctgggacaagaacggagaaaccacagctgtgaaccgtgccaaaccctcgccgttcggtcgtaccgcttgcacgaggcattttcacccgtgtcctatcagcacgatctcgctcttctgcggctccaggaggatgccgacggaagctgtgcgttgctgtcaccttacgtgcaaccggtctgcctcccatcgggggcggccaggccttccgaaacgaccctgtgccaggtcgcaggatggggtcaccaattcgagggagccgaagaatacgcctccttcctccaagaagctcaagtgccgtttttgtcgctggaacgctgctcggcgccagacgtgcatggatcgagcatcctgccaggaatgctctgtgcggggttcctcgaaggtggaacggatgcctgtcagggcgactccggtgggcccctggtgtgcgaagatcaggcggcggaacgccggttgacgctgcaaggtattatctcgtggggcagcggttgcggggacaggaacaagccaggcgtgtacacggacgtggcgtactacctcgcgtggatccgcgaacatacggtgtcc

SEQ ID NO: 10173 - DNA, 1845 bp, Artificial Sequence
  derived and/or modified sequence
atgcgcgcactccttcttctggggtttcttctggtgtcgctggaatcaactctctcgattcccccctgggaagcacctaaggaacacaagtacaaggcagaagaacacactgtggtcctcaccgtgaccggagaaccttgccacttcccatttcagtaccatcggcagctttaccataagtgtactcataagggtcgtccaggtccccaaccatggtgtgccaccaccccgaatttcgatcaggatcagcggtgggggtattgtctggaacctaagaaagtcaaggaccattgtagcaaacatagcccttgccaaaagggaggtacttgcgtgaacatgccatccggtccacattgcctgtgtccacaacatctcaccggaaaccattgtcagaaggaaaaatgttttgagccgcaactccttcggttctttcataagaacgagatatggtaccgcaccgaacaggcagcagttgcacggtgtcaatgcaaaggccctgatgcacactgtcaacgcctggcaagccaggcctgcagaaccaacccatgcctccatggcgggcgttgtctggaagtggaaggccatcggctttgtcattgtccagtgggttacaccggtgctttctgcgacgtggataccaaggcctcctgctatgacgggcgcggcctttcgtacagaggcctggcccgtactactctgtccggtgccccttgtcagccatgggcaagcgaagcgacgtatagaaatgtcaccgcagaacaggcacgaaactggggtcttggaggacacgcattttgccgtaaccctgataatgatattcggccttggtgtttcgtgctcaaccgcgacagattgtcatgggaatactgtgacttggcccagtgccagactcccacccaagcagccccgcctactccagtgtcgccccgtctccatgtgccgctgatgccagcacaacctgcgcctccaaagcctcagccaaccactaggacccctcctcagtcgcaaacccctggcgcactgcctgccaaaagagagcaaccaccgtcgttgaccagaaatggtccactttcgtgcggccaacgactgaggaaatccctctccagcatgacccgggtggtgggaggtcttgtagcactgcggggagcccacccctacatagcagcgttgtactggggacactccttctgcgctggtagcttgattgccccctgctgggtcctgaccgccgcacattgtttgcaagaccgccctgcccccgaggatcttaccgtagtgcttgggcaagagcgtaggaatcactcttgtgaaccgtgtcaaactctggcggtgagatcgtaccgcctccatgaggctttctccccggttagctaccaacacgatctcgctttgctgcgcctgcaagaagatgcagacggaagctgtgcactgctctctccatacgtccagcctgtgtgtctgccctcaggtgcggctcggccatcggaaactacgctgtgtcaggtggcaggatgggggcaccaattcgagggcgccgaggaatacgcatcgtttctccaagaggcccaagtcccctttctgtcacttgaaagatgttccgccccagatgtccacgggtcaagtattctccctggaatgctgtgcgctggctttcttgagggcggaaccgatgcgtgtcaaggagactccggtggtcctcttgtctgcgaagatcaggcggcagagcgacggcttaccctccagggaatcatttcgtggggttcaggttgtggcgaccgcaacaagcctggagtgtacacggatgtagcatactacttggcttggattagagagcatactgtgtcg

SEQ ID NO: 10174 - DNA, 1845 bp, Artificial Sequence
  derived and/or modified sequence
atgagggctctcctactgttgggattcctccttgtctccctggaatctacgctatcaatcccaccatgggaggccccaaaagaacataaatacaaagcggaggagcatacggtggtcttgactgtgacgggagaaccctgtcattttccgtttcaataccatcggcaattatatcataagtgtacccataaaggtcgaccaggcccccaaccttggtgtgctacgactccaaatttcgatcaggaccagcggtggggctattgtcttgagccaaagaaagtgaaagaccactgctccaagcatagcccatgccaaaagggtggtacgtgtgtaaatatgccctcgggtccacactgcttgtgcccgcaacatcttacgggtaaccattgccaaaaggagaagtgtttcgagccacagctgctacggttcttccacaaaaacgaaatatggtacaggacagagcaggcagccgttgcccgttgtcagtgcaaaggccccgatgcccactgccagcgtctcgcctctcaggcatgcagaactaacccttgcctgcatggtggtagatgtttggaagtcgaagggcaccgcctttgtcactgtccggtagggtacaccggtgccttctgtgacgtagataccaaagcgagttgctatgatggacgcggtctttcctatcgtggactcgctcgcaccacattatcaggagcaccttgccagccctgggcctctgaagcaacttaccgcaacgtcacagcagaacaagcacgtaattggggactgggaggtcatgccttctgtcgcaacccagacaatgatattagaccgtggtgttttgtgctaaatcgtgatagactgtcgtgggagtactgtgatctggctcagtgtcagaccccgacccaggctgcaccgcccaccccagtatcgccccgcttacacgtccctctcatgcccgcacaaccggccccgcccaagccacagccgaccacacgtacgcccccccagtcccagaccccgggtgcccttcctgccaaacgggagcagccgccttctctcacccgtaatggcccactcagttgtggacagcgcctcagaaaatcactcagctccatgacccgggtggttggcggcttggttgctttgaggggcgcacacccttatattgcagctctttactgggggcattcgttctgcgcaggatcgttgatcgcgccttgttgggtgttgacggccgcgcattgtctccaggacaggccggccccagaggatttgacggtggtgcttggtcaagaacgacgcaatcactcatgtgagccctgtcagacacttgctgtacgcagttaccgtctgcacgaagcattctcgccagtatcctatcagcacgatctggccttgttgagactgcaggaggatgcggacgggtcctgtgccttactctcaccttatgttcagccggtctgtctgccttcgggcgctgcaagaccaagcgaaaccacgctgtgtcaagttgctggttggggtcaccagttcgaaggcgcggaagagtacgcctcctttttgcaagaagcgcaggttcctttcctcagcctcgagcgctgctcagccccagatgttcatgggagctccatcctgcccggcatgttgtgcgccggcttcttggagggtggaacagatgcctgccagggggactctggaggacctctggtctgtgaggatcaggctgctgaacgtcgcctgactctacaggggatcatttcgtgggggagtggatgtggagatcggaataaaccgggcgtctacactgacgtggcttattacctcgcctggatccgtgagcatactgttagc

SEQ ID NO: 10175 - DNA, 1845 bp, Artificial Sequence
  derived and/or modified sequence
atgcgagctttgctgctgcttggctttctactcgtgagcctggagtccacattgtctatacctccgtgggaagcgcctaaagaacataaatacaaggccgaggagcacacagtggtcctcaccgtcactggggagccctgccactttccctttcaataccatagacagctctaccacaagtgcacacataagggcagacccggcccacagccatggtgcgcaactacacctaatttcgaccaggaccagcgctggggctactgcctggagccaaaaaaagtaaaagaccactgctcaaaacattctccgtgtcagaaagggggcacatgtgttaatatgccttccggaccacattgcctgtgtcctcagcacctgacaggcaaccactgtcaaaaggagaaatgttttgagccccagttgttgaggtttttccacaaaaacgagatctggtatcgcactgagcaggctgccgtcgctcgctgtcagtgtaaaggccccgacgctcactgccaacggctcgcctcacaggcctgtagaacaaacccttgtctgcacggggggcggtgccttgaggttgaaggacaccgcctctgccattgccccgtggggtatacgggcgccttttgcgatgtggacacaaaggcttcctgttacgatggccgcggactgtcgtatcgaggactggcccggactaccttgtcaggagccccctgccaaccgtgggcttctgaggcaacctacaggaatgttactgccgaacaggctaggaactggggcctgggtggccacgccttttgtcggaatcccgacaacgacatcagaccatggtgcttcgtgcttaatcgcgacaggttgtcatgggagtattgcgacctggcccagtgccagacccccacccaggccgcaccccctacccccgtgagtccgcgcctgcacgtgccattaatgccagcgcagccggctccacccaaaccgcagcccactactcgtacaccaccacagagtcagacccctggggcgctccccgctaagcgtgaacaacctccttcactcaccaggaacggcccactgtcttgtggtcagcggttgcggaagagcttgtcttcaatgacgcgggtcgttggaggacttgtcgcgctgagaggcgctcatccctatatagctgccctgtactggggccattctttctgtgcggggagtttgatcgccccttgctgggtcctgacagcagcgcactgtctgcaggatcggccagcccccgaggaccttaccgtagtcctgggacaagagaggaggaatcactcgtgtgagccatgtcagacactcgctgtgcgctcctaccggctccacgaggctttcagcccggttagttatcagcacgatctggcccttttgcgattacaggaagacgcagatggctcctgtgcattgctctctccgtacgtgcagccggtctgtctaccgtctggcgcagcccggccttccgagacgaccctttgccaggtggctgggtggggacaccagttcgaaggggccgaggaatacgccagctttttacaggaggcccaagtgccattcctaagtcttgagcgctgcagtgccccagacgtgcatggaagcagcattctacctggcatgctgtgtgctggatttctcgagggcggcactgacgcctgccagggagattcaggtggaccactggtatgtgaagatcaggctgcagagcgtagattgactctgcagggaatcatctcttggggcagtggctgcggggatcggaacaagccaggggtctacacagacgtcgcctactatctggcctggattcgggaacacacagtgtct

SEQ ID NO: 10176 - DNA, 1845 bp, Artificial Sequence
  derived and/or modified sequence
atgcgcgcacttctgcttctgggattcctgttggtgtcactggagtccactctttccataccaccttgggaagcccccaaggaacataagtataaggcagaggaacacaccgtcgtgctgacggtgacgggagaaccatgtcactttccctttcagtatcatcgccaactgtaccacaagtgtactcacaagggtaggcctggaccacagccatggtgcgcaaccactccaaactttgaccaagatcagagatgggggtattgtctggaacctaagaaagtgaaggatcactgttcgaagcatagcccttgccagaaaggtggaacctgtgtgaacatgccgtcgggacctcactgcctgtgtcctcaacatttgactggcaatcactgtcaaaaagaaaagtgtttcgaaccccagttgctgcggttcttccacaaaaatgagatttggtaccgaacggagcaggccgcagtggcaaggtgtcagtgtaagggacccgatgcacattgccagcggcttgcgtcgcaagcatgtaggaccaatccttgtctgcacggaggccggtgtctcgaagtcgaaggtcatcgcctttgtcactgccccgtgggttacactggagcgttttgtgatgtggataccaaagcctcatgttacgacggtcgtggactcagctacaggggcctggccaggaccaccctttccggggccccgtgccagccatgggcaagcgaagcaacttacaggaatgtcactgcagaacaagcccgaaattggggactgggcggccatgcgttttgccggaatccagataacgacatacggccttggtgttttgtcctgaacagagatcggctctcgtgggaatactgtgatctcgcccagtgccaaaccccaactcaagccgccccacccactcccgtgtcccccagacttcatgtgcctctcatgcctgcacagcctgccccacccaagcctcaacctaccactcgcacccctccccagtcccaaacccctggcgcactgcctgcgaagagagagcaaccaccttcgctgaccagaaacgggcctctgagctgtggacaaagactccgcaagtcgctctcgtccatgacccgtgtggtgggcggacttgtggcacttagaggtgcacatccctacattgcagccctgtactggggacatagcttctgcgccggctcccttatagcaccatgttgggtcctgactgccgcacactgcctgcaagatcgacctgcaccagaggaccttacggttgtgctcggacaggaaagacgtaatcattcgtgcgaaccatgccaaactctcgccgtccggtcctaccgtctgcatgaggccttttcaccggtaagttaccagcacgacctggcgctgcttcggctccaggaggacgccgacggttcgtgcgcactcctttccccttacgtccaaccagtgtgtctcccttcaggagccgccagacccagcgaaaccaccctttgccaagtggcaggttggggccatcaatttgagggagcagaggaatacgcgtcatttctccaagaggcgcaagtgcctttcctttcgctggaacgttgctcggcacctgacgtgcacgggtcgtcgatactgcccggtatgctttgtgcaggatttcttgaaggtggtaccgatgcatgtcaaggagacagcggggggcccctcgtctgtgaagatcaggcagcagagcgcagacttactctgcagggtatcatttcctggggtagcggatgtggagatagaaacaaaccgggagtgtacaccgatgtcgcatactacctcgcatggataagagaacatactgtgagc

SEQ ID NO: 10177 - DNA, 1845 bp, Artificial Sequence
  derived and/or modified sequence
atgagggccctcctattgctcgggttccttttagtctcactcgagtcgaccttgtcaatccccccctgggaagcaccaaaagaacacaagtataaagctgaagaacataccgtcgtgctgaccgtcacaggggagccctgtcacttcccctttcagtaccatagacaactatatcacaagtgcacgcacaagggaaggccagggccccaaccatggtgtgctacaacacctaatttcgatcaggaccagcgatgggggtactgtctggagcctaaaaaagtcaaagatcactgttcaaagcacagcccatgccagaaggggggcacctgtgttaatatgccgagtggtccacactgtttgtgtccccaacacctgacaggtaaccattgccagaaagagaaatgcttcgagccccaactgctgaggttctttcacaaaaacgaaatctggtatcgaactgaacaagctgctgtggcccgctgccagtgtaagggtcccgacgcccattgccagcgactggcgtcccaggcgtgtagaacgaatccatgtctccacggcggtcgctgcctggaggtggagggccatcgcctctgccactgccccgtgggctatacaggcgccttctgcgacgtcgataccaaggcctcatgctatgacggccgggggttgtcatataggggcctagccagaacaacgctgagtggtgccccatgccaaccatgggcatctgaggctacatatcgcaacgtaaccgccgagcaagccagaaattgggggctggggggtcatgccttctgccgtaatccagacaacgacatcagaccctggtgcttcgtactcaaccgagatagactgagctgggagtactgcgacctggctcagtgtcagaccccaacccaggcggcaccacccacacctgtgtccccgcgactgcacgtgcctttgatgcctgcacaaccagctccgcccaagcctcagccaacaacgcgcacccccccacagtcccagacgccgggtgccttgccggctaagcgcgagcagccgccttctctgacacgcaacgggccactaagctgcggtcagcggttgcgaaagagcctgtcttctatgaccagggtcgtgggggggctggtcgccctgagaggggcccacccctacatcgccgcactgtattggggacacagtttttgcgccgggtctttaattgccccatgctgggtgctgactgcagctcactgtctgcaagaccgtcccgctcctgaagatctgacagtcgttctgggacaggagcgccgcaatcactcttgcgaaccctgtcagacgctggccgtcagatcctacaggctgcacgaggcattctctccagtatcgtaccagcacgatttggctctcctgcggctgcaggaagatgccgacggatcatgtgccctcctctccccctatgtgcaacctgtgtgtctaccctccggtgccgcccgccctagtgaaactacattgtgccaggtcgcagggtggggccaccagtttgaaggcgccgaggaatatgcctcattcctgcaggaagcccaagtcccattcctgtccctcgaaaggtgttctgcccctgacgtgcacggatcctctatcctgccaggaatgctctgtgctggctttctcgaaggaggcacggatgcttgtcagggagatagcggggggcccctggtctgcgaagatcaagctgccgagagaaggttgaccctgcagggaatcatttcctggggcagcggctgcggtgacaggaacaagcccggtgtgtacacagatgtcgcgtattaccttgcttggatacgggaacataccgttagc

SEQ ID NO: 10178 - DNA, 1845 bp, Artificial Sequence
  derived and/or modified sequence
atgcgcgccctgctgctgctgggcttcctgctggtgagcctggagagcaccctgagcatccccccctgggaggcccccaaggagcacaagtacaaggccgaggagcacaccgtggtgctgaccgtgaccggcgagccctgccacttccccttccagtaccaccgccagctgtaccacaagtgcacccacaagggccgccccggcccccagccctggtgcgccaccacccccaacttcgaccaggaccagcgctggggctactgcctggagcccaagaaggtgaaggaccactgcagcaagcacagcccctgccagaagggcggcacctgcgtgaacatgcccagcggcccccactgcctgtgcccccagcacctgaccggcaaccactgccagaaggagaagtgcttcgagccccagctgctgcgcttcttccacaagaacgagatctggtaccgcaccgagcaggccgccgtggcccgctgccagtgcaagggccccgacgcccactgccagcgcctggccagccaggcctgccgcaccaacccctgcctgcacggcggccgctgcctggaggtggagggccaccgcctgtgccactgccccgtgggctacaccggcgccttctgcgacgtggacaccaaggccagctgctacgacggccgcggcctgagctaccgcggcctggcccgcaccaccctgagcggcgccccctgccagccctgggccagcgaggccacctaccgcaacgtgaccgccgagcaggcccgcaactggggcctgggcggccacgccttctgccgcaaccccgacaacgacatccgcccctggtgcttcgtgctgaaccgcgaccgcctgagctgggagtactgcgacctggcccagtgccagacccccacccaggccgccccccccacccccgtgagcccccgcctgcacgtgcccctgatgcccgcccagcccgccccccccaagccccagcccaccacccgcacccccccccagagccagacccccggcgccctgcccgccaagcgcgagcagccccccagcctgacccgcaacggccccctgagctgcggccagcgcctgcgcaagagcctgagcagcatgacccgcgtggtgggcggcctggtggccctgcgcggcgcccacccctacatcgccgccctgtactggggccacagcttctgcgccggcagcctgatcgccccctgctgggtgctgaccgccgcccactgcctgcaggaccgccccgcccccgaggacctgaccgtggtgctgggccaggagcgccgcaaccacagctgcgagccctgccagaccctggccgtgcgcagctaccgcctgcacgaggccttcagccccgtgagctaccagcacgacctggccctgctgcgcctgcaggaggacgccgacggcagctgcgccctgctgagcccctacgtgcagcccgtgtgcctgcccagcggcgccgcccgccccagcgagaccaccctgtgccaggtggccggctggggccaccagttcgagggcgccgaggagtacgccagcttcctgcaggaggcccaggtgcccttcctgagcctggagcgctgcagcgcccccgacgtgcacggcagcagcatcctgcccggcatgctgtgcgccggcttcctggagggcggcaccgacgcctgccagggcgacagcggcggccccctggtgtgcgaggaccaggccgccgagcgccgcctgaccctgcagggcatcatcagctggggcagcggctgcggcgaccgcaacaagcccggcgtgtacaccgacgtggcctactacctggcctggatccgcgagcacaccgtgagc

SEQ ID NO: 10179 - DNA, 2049 bp, Artificial Sequence
  derived and/or modified sequence
ctattgatctggactcctggataggcagctggaccaacggacggatgccatgagggctctgctgctcctggggttcctgctggtgagcttggagtcaacactttcgattccaccttgggaagcccccaaggagcataagtacaaagctgaagagcacacagtcgttctcactgtcaccggggagccctgccacttccccttccagtaccaccggcagctgtaccacaaatgtacccacaagggccggccaggccctcagccctggtgtgctaccacccccaactttgatcaggaccagcgatggggatactgtttggagcccaagaaagtgaaagaccactgcagcaaacacagcccctgccagaaaggagggacctgtgtgaacatgccaagcggcccccactgtctctgtccacaacacctcactggaaaccactgccagaaagagaagtgctttgagcctcagcttctccggtttttccacaagaatgagatatggtatagaactgagcaagcagctgtggccagatgccagtgcaagggtcctgatgcccactgccagcggctggccagccaggcctgccgcaccaacccgtgcctccatgggggtcgctgcctagaggtggagggccaccgcctgtgccactgcccggtgggctacaccggagccttctgcgacgtggacaccaaggcaagctgctatgatggccgcgggctcagctaccgcggcctggccaggaccacgctctcgggtgcgccctgtcagccgtgggcctcggaggccacctaccggaacgtgactgccgagcaagcgcggaactggggactgggcggccacgccttctgccggaacccggacaacgacatccgcccgtggtgcttcgtgctgaaccgcgaccggctgagctgggagtactgcgacctggcacagtgccagaccccaacccaggcggcgcctccgaccccggtgtcccctaggcttcatgtcccactcatgcccgcgcagccggcaccgccgaagcctcagcccacgacccggaccccgcctcagtcccagaccccgggagccttgccggcgaagcgggagcagccgccttccctgaccaggaacggcccactgagctgcgggcagcggctccgcaagagtctgtcttcgatgacccgcgtcgttggcgggctggtggcgctacgcggggcgcacccctacatcgccgcgctgtactggggccacagtttctgcgccggcagcctcatcgccccctgctgggtgctgacggccgctcactgcctgcaggaccggcccgcacccgaggatctgacggtggtgctcggccaggaacgccgtaaccacagctgtgagccgtgccagacgttggccgtgcgctcctaccgcttgcacgaggccttctcgcccgtcagctaccagcacgacctggctctgttgcgccttcaggaggatgcggacggcagctgcgcgctcctgtcgccttacgttcagccggtgtgcctgccaagcggcgccgcgcgaccctccgagaccacgctctgccaggtggccggctggggccaccagttcgagggggcggaggaatatgccagcttcctgcaggaggcgcaggtaccgttcctctccctggagcgctgctcagccccggacgtgcacggatcctccatcctccccggcatgctctgcgcagggttcctcgagggcggcaccgatgcgtgccagggtgattccggaggcccgctggtgtgtgaggaccaagctgcagagcgccggctcaccctgcaaggcatcatcagctggggatcgggctgtggtgaccgcaacaagccaggcgtctacaccgatgtggcctactacctggcctggatccgggagcacaccgtttcctgattgctcagggactcatctttccctccttggtgattccgcagtgagagagtggctggggcatggaaggcaagattgtgtcccattcccccagtgcggccagctccgcgccaggatggcgcaggaactcaataaagtgctttgaaaatgctgag

SEQ ID NO: 10180 - DNA, 1848 bp, Artificial Sequence
  derived and/or modified sequence
atgagagccctgctgctgctgggcttcctgctggtgagcctggagagcaccctgagcatccccccctgggaggcccccaaggagcacaagtacaaggccgaggagcacaccgtggtgctgaccgtgaccggcgagccctgccacttccccttccagtaccacagacagctgtaccacaagtgcacccacaagggcagacccggcccccagccctggtgcgccaccacccccaacttcgaccaggaccagagatggggctactgcctggagcccaagaaggtgaaggaccactgcagcaagcacagcccctgccagaagggcggcacctgcgtgaacatgcccagcggcccccactgcctgtgcccccagcacctgaccggcaaccactgccagaaggagaagtgcttcgagccccagctgctgagattcttccacaagaacgagatctggtacagaaccgagcaggccgccgtggccagatgccagtgcaagggccccgacgcccactgccagagactggccagccaggcctgcagaaccaacccctgcctgcacggcggcagatgcctggaggtggagggccacagactgtgccactgccccgtgggctacaccggcgccttctgcgacgtggacaccaaggccagctgctacgacggcagaggcctgagctacagaggcctggccagaaccaccctgagcggcgccccctgccagccctgggccagcgaggccacctacagaaacgtgaccgccgagcaggccagaaactggggcctgggcggccacgccttctgcagaaaccccgacaacgacatcagaccctggtgcttcgtgctgaacagagacagactgagctgggagtactgcgacctggcccagtgccagacccccacccaggccgccccccccacccccgtgagccccagactgcacgtgcccctgatgcccgcccagcccgccccccccaagccccagcccaccaccagaacccccccccagagccagacccccggcgccctgcccgccaagagagagcagccccccagcctgaccagaaacggccccctgagctgcggccagagactgagaaagagcctgagcagcatgaccagagtggtgggcggcctggtggccctgagaggcgcccacccctacatcgccgccctgtactggggccacagcttctgcgccggcagcctgatcgccccctgctgggtgctgaccgccgcccactgcctgcaggacagacccgcccccgaggacctgaccgtggtgctgggccaggagagaagaaaccacagctgcgagccctgccagaccctggccgtgagaagctacagactgcacgaggccttcagccccgtgagctaccagcacgacctggccctgctgagactgcaggaggacgccgacggcagctgcgccctgctgagcccctacgtgcagcccgtgtgcctgcccagcggcgccgccagacccagcgagaccaccctgtgccaggtggccggctggggccaccagttcgagggcgccgaggagtacgccagcttcctgcaggaggcccaggtgcccttcctgagcctggagagatgcagcgcccccgacgtgcacggcagcagcatcctgcccggcatgctgtgcgccggcttcctggagggcggcaccgacgcctgccagggcgacagcggcggccccctggtgtgcgaggaccaggccgccgagagaagactgaccctgcagggcatcatcagctggggcagcggctgcggcgacagaaacaagcccggcgtgtacaccgacgtggcctactacctggcctggatcagagagcacaccgtgagctag

SEQ ID NO: 10181 - RNA, 1991 nt, Artificial Sequence
  derived and/or modified sequence
gggaaauaagagagaaaagaagaguaagaagaaauauaagagccaccaugagagccuugcuuuugcugggauuccugcucgugucccuugaaagcacacugagcaucccgccaugggaggcgccuaaggagcacaaguacaaggcggaagagcauacagugguacuuacagucacgggagaaccgugucacuuccccuuccaguaccauaggcagcucuaucauaagugcacccacaaaggucggccagguccucagccguggugcgcgacaacuccgaacuucgaccaggaucagcgcuggggauacugccuggaacccaaaaaggucaaagaccacugcuccaaacacagccccugccaaaagggcggaacgugugucaacaugccauccgguccgcacuguuuguguccacagcaucugacggggaaucauugccagaaagaaaaguguuuugagccucaguuguugagauucuuccacaaaaacgaaauuugguaccgcacagaacaggcugccguagccagaugucagugcaagggaccggacgcacauugccagcgccucgcgagccaggcgugucggacgaauccuugucugcauggcggaaggugucuggagguggaggggcaccgccucugccauugcccugucggcuacacaggggccuuuugcgacgucgauaccaaggcgucgugcuaugacggcaggggacuguccuaccgcggguuggcccgcacuacguugucgggugcgcccugucaaccgugggccucggaagcgacguaucgaaacgugacggccgagcaagccagaaauuggggacucggagggcaugcuuuuuguagaaaccccgacaaugauaucaggccauggugcuuuguccucaacagggauagacugucgugggaauacugcgaccuggcucagugucaaacucccacgcaagccgcaccacccacacccgugucacccagacugcacguaccgcuuaugccugcccagccggcaccucccaaaccucaaccaacuacgcggacaccgccgcagucgcagaccccuggagcgcuuccggcgaaacgggaacagccgccuucccucaccaggaaugggcccuugagcuguggucagaggcugcgcaaaucacuuucgucgaugaccagagucguaggagggcucguagcauugcgaggugcucaccccuacauugcagcgcucuauuggggacauuccuuuugugcugguucgcuuauugcgcccugcugggugcugacggccgcacacugucugcaagauaggccggcacccgaggauuugacgguggugcuggggcaggagcggcggaaccacucgugcgaacccugccagacacuggcgguccggucauauaggcuucacgaggcuuucucaccgguaucauaccagcaugaccuugcguugcuucgccuucaagaagaugcggacggaucgugcgcacuccuuagcccauauguacagccggugugucucccguccggagcggccagacccucagagacaacgcuuugccagguggcaggguggggacaucaguuugaaggugcggaagaguacgcaucguuuuugcaagaagcgcaagugccguuccucucacuugagagaugcucagcgccugacgugcacggcagcucgauccuucccggaauguugugugccggguucuuggaggguggaacugacgccugccagggagauagcggagguccguuggugugcgaggaccaagcagcggagaggaggcucacacuccagggaaucaucagcuggggaucgggauguggagauagaaauaagcccgguguauauacggaugucgccuauuaccucgcguggaucagagagcacacaguguccugauaagcugccuucugcggggcuugccuucuggccaugcccuucuucucucccuugcaccuguaccucuuggucuuugaauaaagccugaguaggaag

SEQ ID NO: 10182 - protein, 622 aa, Artificial Sequence
  derived and/or modified sequence
MAHVRGLQLPGCLALAALCSLVHSQHVFLAPQQARSLLQRVRRANTFLEEVRKGNLERECVEETCSYEEAFEALESSTATDVFWAKYTACETARTPRDKLAACLEGNCAEGLGTNYRGHVNITRSGIECQLWRSRYPHKPEINSTTHPGADLQENFCRNPDSSTTGPWCYTTDPTVRRQECSIPVCGQDQVTVAMTPRSEGSSVNLSPPLEQCVPDRGQQYQGRLAVTTHGLPCLAWASAQAKALSKHQDFNSAVQLVENFCRNPDGDEEGVWCYVAGKPGDFGYCDLNYCEEAVEEETGDGLDEDSDRAIEGRTATSEYQTFFNPRTFGSGEADCGLRPLFEKKSLEDKTERELLESYIDGRIVEGSDAEIGMSPWQVMLFRKSPQELLCGASLISDRWVLTAAHCLLYPPWDKNFTENDLLVRIGKHSRTRYERNIEKISMLEKIYIHPRYNWRENLDRDIALMKLKKPVAFSDYIHPVCLPDRETAASLLQAGYKGRVTGWGNLKETWTANVGKGQPSVLQVVNLPIVERPVCKDSTRIRITDNMFCAGYKPDEGKRGDACEGDSGGPFVMKSPFNNRWYQMGIVSWGEGCDRDGKYGFYTHVFRLKKWIQKVIDQFGE

SEQ ID NO: 10183 - protein, 583 aa, Artificial Sequence
  derived and/or modified sequence
MAHVRGLQLPGCLALAALCSLVHSQHVFLAPQQARSLLQRVRRANTFLEEVRKGNLERECVEETCSYEEAFEALESSTATDVFWAKYTACETARTPRDKLAACLEGNCAEGLGTNYRGHVNITRSGIECQLWRSRYPHKPEINSTTHPGADLQENFCRNPDSSTTGPWCYTTDPTVRRQECSIPVCGQDQVTVAMTPRSEGSSVNLSPPLEQCVPDRGQQYQGRLAVTTHGLPCLAWASAQAKALSKHQDFNSAVQLVENFCRNPDGDEEGVWCYVAGKPGDFGYCDLNYCEEAVEEETGDGLDEDSDRAIEGRTATSEYQTFFNPRTFGSGEADCGLRPLFEKKSLEDKTERELLESYIDGRIVEGSDAEIGMSPWQVMLFRKSPQELLCGASLISDRWVLTAAHCLLYPPWDKNFTENDLLVRIGKHSRTRYERNIEKISMLEKIYIHPSLLQAGYKGRVTGWGNLKETWTANVGKGQPSVLQVVNLPIVERPVCKDSTRIRITDNMFCAGYKPDEGKRGDACEGDSGGPFVMKSPFNNRWYQMGIVSWGEGCDRDGKYGFYTHVFRLKKWIQKVIDQFGE

SEQ ID NO: 10184 - DNA, 1866 bp, Artificial Sequence
  derived and/or modified sequence
atggcccacgtgcgcggcctgcagctgcccggctgcctggccctggccgccctgtgcagcctggtgcacagccagcacgtgttcctggccccccagcaggcccgcagcctgctgcagcgcgtgcgccgcgccaacaccttcctggaggaggtgcgcaagggcaacctggagcgcgagtgcgtggaggagacctgcagctacgaggaggccttcgaggccctggagagcagcaccgccaccgacgtgttctgggccaagtacaccgcctgcgagaccgcccgcaccccccgcgacaagctggccgcctgcctggagggcaactgcgccgagggcctgggcaccaactaccgcggccacgtgaacatcacccgcagcggcatcgagtgccagctgtggcgcagccgctacccccacaagcccgagatcaacagcaccacccaccccggcgccgacctgcaggagaacttctgccgcaaccccgacagcagcaccaccggcccctggtgctacaccaccgaccccaccgtgcgccgccaggagtgcagcatccccgtgtgcggccaggaccaggtgaccgtggccatgaccccccgcagcgagggcagcagcgtgaacctgagcccccccctggagcagtgcgtgcccgaccgcggccagcagtaccagggccgcctggccgtgaccacccacggcctgccctgcctggcctgggccagcgcccaggccaaggccctgagcaagcaccaggacttcaacagcgccgtgcagctggtggagaacttctgccgcaaccccgacggcgacgaggagggcgtgtggtgctacgtggccggcaagcccggcgacttcggctactgcgacctgaactactgcgaggaggccgtggaggaggagaccggcgacggcctggacgaggacagcgaccgcgccatcgagggccgcaccgccaccagcgagtaccagaccttcttcaacccccgcaccttcggcagcggcgaggccgactgcggcctgcgccccctgttcgagaagaagagcctggaggacaagaccgagcgcgagctgctggagagctacatcgacggccgcatcgtggagggcagcgacgccgagatcggcatgagcccctggcaggtgatgctgttccgcaagagcccccaggagctgctgtgcggcgccagcctgatcagcgaccgctgggtgctgaccgccgcccactgcctgctgtaccccccctgggacaagaacttcaccgagaacgacctgctggtgcgcatcggcaagcacagccgcacccgctacgagcgcaacatcgagaagatcagcatgctggagaagatctacatccacccccgctacaactggcgcgagaacctggaccgcgacatcgccctgatgaagctgaagaagcccgtggccttcagcgactacatccaccccgtgtgcctgcccgaccgcgagaccgccgccagcctgctgcaggccggctacaagggccgcgtgaccggctggggcaacctgaaggagacctggaccgccaacgtgggcaagggccagcccagcgtgctgcaggtggtgaacctgcccatcgtggagcgccccgtgtgcaaggacagcacccgcatccgcatcaccgacaacatgttctgcgccggctacaagcccgacgagggcaagcgcggcgacgcctgcgagggcgacagcggcggccccttcgtgatgaagagccccttcaacaaccgctggtaccagatgggcatcgtgagctggggcgagggctgcgaccgcgacggcaagtacggcttctacacccacgtgttccgcctgaagaagtggatccagaaggtgatcgaccagttcggcgag

SEQ ID NO: 10185 - DNA, 1749 bp, Artificial Sequence
  derived and/or modified sequence
atggcccacgtgcgcggcctgcagctgcccggctgcctggccctggccgccctgtgcagcctggtgcacagccagcacgtgttcctggccccccagcaggcccgcagcctgctgcagcgcgtgcgccgcgccaacaccttcctggaggaggtgcgcaagggcaacctggagcgcgagtgcgtggaggagacctgcagctacgaggaggccttcgaggccctggagagcagcaccgccaccgacgtgttctgggccaagtacaccgcctgcgagaccgcccgcaccccccgcgacaagctggccgcctgcctggagggcaactgcgccgagggcctgggcaccaactaccgcggccacgtgaacatcacccgcagcggcatcgagtgccagctgtggcgcagccgctacccccacaagcccgagatcaacagcaccacccaccccggcgccgacctgcaggagaacttctgccgcaaccccgacagcagcaccaccggcccctggtgctacaccaccgaccccaccgtgcgccgccaggagtgcagcatccccgtgtgcggccaggaccaggtgaccgtggccatgaccccccgcagcgagggcagcagcgtgaacctgagcccccccctggagcagtgcgtgcccgaccgcggccagcagtaccagggccgcctggccgtgaccacccacggcctgccctgcctggcctgggccagcgcccaggccaaggccctgagcaagcaccaggacttcaacagcgccgtgcagctggtggagaacttctgccgcaaccccgacggcgacgaggagggcgtgtggtgctacgtggccggcaagcccggcgacttcggctactgcgacctgaactactgcgaggaggccgtggaggaggagaccggcgacggcctggacgaggacagcgaccgcgccatcgagggccgcaccgccaccagcgagtaccagaccttcttcaacccccgcaccttcggcagcggcgaggccgactgcggcctgcgccccctgttcgagaagaagagcctggaggacaagaccgagcgcgagctgctggagagctacatcgacggccgcatcgtggagggcagcgacgccgagatcggcatgagcccctggcaggtgatgctgttccgcaagagcccccaggagctgctgtgcggcgccagcctgatcagcgaccgctgggtgctgaccgccgcccactgcctgctgtaccccccctgggacaagaacttcaccgagaacgacctgctggtgcgcatcggcaagcacagccgcacccgctacgagcgcaacatcgagaagatcagcatgctggagaagatctacatccaccccagcctgctgcaggccggctacaagggccgcgtgaccggctggggcaacctgaaggagacctggaccgccaacgtgggcaagggccagcccagcgtgctgcaggtggtgaacctgcccatcgtggagcgccccgtgtgcaaggacagcacccgcatccgcatcaccgacaacatgttctgcgccggctacaagcccgacgagggcaagcgcggcgacgcctgcgagggcgacagcggcggccccttcgtgatgaagagccccttcaacaaccgctggtaccagatgggcatcgtgagctggggcgagggctgcgaccgcgacggcaagtacggcttctacacccacgtgttccgcctgaagaagtggatccagaaggtgatcgaccagttcggcgag

SEQ ID NO: 10186 - DNA, 1869 bp, Artificial Sequence
  derived and/or modified sequence
atggcccacgtgagaggcctgcagctgcccggctgcctggccctggccgccctgtgcagcctggtgcacagccagcacgtgttcctggccccccagcaggccagaagcctgctgcagagagtgagaagagccaacaccttcctggaggaggtgagaaagggcaacctggagagagagtgcgtggaggagacctgcagctacgaggaggccttcgaggccctggagagcagcaccgccaccgacgtgttctgggccaagtacaccgcctgcgagaccgccagaacccccagagacaagctggccgcctgcctggagggcaactgcgccgagggcctgggcaccaactacagaggccacgtgaacatcaccagaagcggcatcgagtgccagctgtggagaagcagatacccccacaagcccgagatcaacagcaccacccaccccggcgccgacctgcaggagaacttctgcagaaaccccgacagcagcaccaccggcccctggtgctacaccaccgaccccaccgtgagaagacaggagtgcagcatccccgtgtgcggccaggaccaggtgaccgtggccatgacccccagaagcgagggcagcagcgtgaacctgagcccccccctggagcagtgcgtgcccgacagaggccagcagtaccagggcagactggccgtgaccacccacggcctgccctgcctggcctgggccagcgcccaggccaaggccctgagcaagcaccaggacttcaacagcgccgtgcagctggtggagaacttctgcagaaaccccgacggcgacgaggagggcgtgtggtgctacgtggccggcaagcccggcgacttcggctactgcgacctgaactactgcgaggaggccgtggaggaggagaccggcgacggcctggacgaggacagcgacagagccatcgagggcagaaccgccaccagcgagtaccagaccttcttcaaccccagaaccttcggcagcggcgaggccgactgcggcctgagacccctgttcgagaagaagagcctggaggacaagaccgagagagagctgctggagagctacatcgacggcagaatcgtggagggcagcgacgccgagatcggcatgagcccctggcaggtgatgctgttcagaaagagcccccaggagctgctgtgcggcgccagcctgatcagcgacagatgggtgctgaccgccgcccactgcctgctgtaccccccctgggacaagaacttcaccgagaacgacctgctggtgagaatcggcaagcacagcagaaccagatacgagagaaacatcgagaagatcagcatgctggagaagatctacatccaccccagatacaactggagagagaacctggacagagacatcgccctgatgaagctgaagaagcccgtggccttcagcgactacatccaccccgtgtgcctgcccgacagagagaccgccgccagcctgctgcaggccggctacaagggcagagtgaccggctggggcaacctgaaggagacctggaccgccaacgtgggcaagggccagcccagcgtgctgcaggtggtgaacctgcccatcgtggagagacccgtgtgcaaggacagcaccagaatcagaatcaccgacaacatgttctgcgccggctacaagcccgacgagggcaagagaggcgacgcctgcgagggcgacagcggcggccccttcgtgatgaagagccccttcaacaacagatggtaccagatgggcatcgtgagctggggcgagggctgcgacagagacggcaagtacggcttctacacccacgtgttcagactgaagaagtggatccagaaggtgatcgaccagttcggcgagtag

SEQ ID NO: 10187 - DNA, 1752 bp, Artificial Sequence
  derived and/or modified sequence
atggcccacgtgagaggcctgcagctgcccggctgcctggccctggccgccctgtgcagcctggtgcacagccagcacgtgttcctggccccccagcaggccagaagcctgctgcagagagtgagaagagccaacaccttcctggaggaggtgagaaagggcaacctggagagagagtgcgtggaggagacctgcagctacgaggaggccttcgaggccctggagagcagcaccgccaccgacgtgttctgggccaagtacaccgcctgcgagaccgccagaacccccagagacaagctggccgcctgcctggagggcaactgcgccgagggcctgggcaccaactacagaggccacgtgaacatcaccagaagcggcatcgagtgccagctgtggagaagcagatacccccacaagcccgagatcaacagcaccacccaccccggcgccgacctgcaggagaacttctgcagaaaccccgacagcagcaccaccggcccctggtgctacaccaccgaccccaccgtgagaagacaggagtgcagcatccccgtgtgcggccaggaccaggtgaccgtggccatgacccccagaagcgagggcagcagcgtgaacctgagcccccccctggagcagtgcgtgcccgacagaggccagcagtaccagggcagactggccgtgaccacccacggcctgccctgcctggcctgggccagcgcccaggccaaggccctgagcaagcaccaggacttcaacagcgccgtgcagctggtggagaacttctgcagaaaccccgacggcgacgaggagggcgtgtggtgctacgtggccggcaagcccggcgacttcggctactgcgacctgaactactgcgaggaggccgtggaggaggagaccggcgacggcctggacgaggacagcgacagagccatcgagggcagaaccgccaccagcgagtaccagaccttcttcaaccccagaaccttcggcagcggcgaggccgactgcggcctgagacccctgttcgagaagaagagcctggaggacaagaccgagagagagctgctggagagctacatcgacggcagaatcgtggagggcagcgacgccgagatcggcatgagcccctggcaggtgatgctgttcagaaagagcccccaggagctgctgtgcggcgccagcctgatcagcgacagatgggtgctgaccgccgcccactgcctgctgtaccccccctgggacaagaacttcaccgagaacgacctgctggtgagaatcggcaagcacagcagaaccagatacgagagaaacatcgagaagatcagcatgctggagaagatctacatccaccccagcctgctgcaggccggctacaagggcagagtgaccggctggggcaacctgaaggagacctggaccgccaacgtgggcaagggccagcccagcgtgctgcaggtggtgaacctgcccatcgtggagagacccgtgtgcaaggacagcaccagaatcagaatcaccgacaacatgttctgcgccggctacaagcccgacgagggcaagagaggcgacgcctgcgagggcgacagcggcggccccttcgtgatgaagagccccttcaacaacagatggtaccagatgggcatcgtgagctggggcgagggctgcgacagagacggcaagtacggcttctacacccacgtgttcagactgaagaagtggatccagaaggtgatcgaccagttcggcgagtag

SEQ ID NO: 10188 - DNA, 2012 bp, Artificial Sequence
  derived and/or modified sequence
gggaaataagagagaaaagaagagtaagaagaaatataagagccaccatggcgcatgtacgcgggcttcaactgcctggctgcctggcgcttgcggcattgtgttcgctggtccattcgcagcacgtattcctcgcccctcagcaagcacgctcccttcttcaaagagtacggcgagcaaacacattcttggaggaggtcaggaaaggcaatttggaacgggaatgtgtcgaggagacttgctcatatgaagaggcttttgaagcgctggagtcgagcacagccacagatgtgttttgggccaagtacaccgcatgcgaaacagcgcggacgccgagggacaaattggcggcctgcctcgaagggaactgtgccgaggggttgggaacaaactatagaggacatgtgaatatcacgcgcagcgggatcgagtgtcagttgtggcgctcgcggtacccgcacaaaccggagattaactcgaccacccaccccggagcggatctccaagagaacttttgtcgcaatcccgactcctccacgacaggtccatggtgttacacgaccgaccctactgtaaggcggcaggaatgctcaatccccgtgtgcgggcaggatcaggtaacagtcgcgatgactccaagatccgaagggtcctcagtgaaccttagcccacctctggagcagtgcgtcccggaccgaggacagcagtaccagggaagattggctgtgacaacgcacggactgccgtgtctcgcatgggcatcggcgcaggcgaaagccctttccaagcatcaggatttcaattccgcggtccagttggtagaaaacttctgtcggaaccccgatggtgatgaggagggtgtgtggtgctatgtggcggggaaacccggcgattttggatactgcgacctcaattactgcgaggaagcggtggaagaggaaacgggtgacggactggatgaggactcagacagggcgatcgaagggaggacggcaacctcagaatatcagacgtttttcaacccgcggacgttcggttcgggagaggccgactgtggactgcggcctctcttcgaaaagaaaagccttgaagataagaccgaaagggaattgctcgaatcctacattgatgggagaatcgtggaggggtcggacgcagagatcggaatgtcgccgtggcaagtcatgctctttcgcaagtcgccccaagagctcctctgcggtgcgtccctcatttcagataggtgggtcctcactgctgcgcactgcctgctctatccgccgtgggataagaatttcactgaaaacgacttgcttgtcagaattggaaagcactcaaggacgcggtacgaacggaatattgagaaaatcagcatgttggagaagatctacatccaccccagatacaactggcgagagaatttggacagggatatcgcgctcatgaagctcaagaaacccgtagcattttccgactatatccatcctgtctgtttgccggacagagagactgcagcgtcattgcttcaggcggggtataagggaagagtcacggggtggggaaatcttaaggagacatggacagccaatgtagggaaaggacagccctcggtattgcaagtggtgaatctccccatcgtggaacggccagtgtgcaaggatagcacacgcatccgcattacggacaacatgttttgtgccgggtataaaccggatgaaggaaaaaggggagatgcatgcgaaggagacagcggagggccgttcgtgatgaaaagccccttcaacaataggtggtaccagatgggtatcgtgtcgtggggtgagggatgtgacagagatgggaagtacggtttctatacgcacgtgtttcggctgaagaagtggattcagaaggtgattgaccagttcggagagtgataagctgccttctgcggggcttgccttctggccatgcccttcttctctcccttgcacctgtacctcttggtctttgaataaagcctgagtaggaag

SEQ ID NO: 10189 - DNA, 1869 bp, Artificial Sequence
  derived and/or modified sequence
atggctcatgtgagaggactacagcttcccgggtgtttagccctggcagccctttgcagcttagtccattcacagcatgtgttcctcgccccacagcaagcccgatctctgctgcagagagttcggcgagcaaacaccttcctcgaagaggtaaggaagggtaatctggagcgggaatgcgtggaggaaacatgctcctacgaggaggcctttgaggctctggaaagtagtacagccaccgacgttttttgggctaagtacacagcctgcgagaccgcccggaccccaagggataaactggcagcttgtctcgaaggtaactgtgccgagggattggggacgaattatagaggccatgttaacatcacccgcagcgggattgaatgccagctatggcgctctaggtatccccacaagcctgagatcaacagtaccacccatccgggcgccgatctgcaggagaacttctgtagaaaccctgatagctctactaccggtccatggtgctacaccacagaccccactgtaagacggcaggaatgttccatccctgtttgtggacaggaccaggtgactgtcgcaatgacccctaggtctgagggatccagcgtgaatttgtcccctcccttagagcagtgcgtcccggaccgaggccagcagtaccagggacgactcgcagttacaactcacggactgccctgcttggcatgggccagtgcacaggccaaggctctgagcaaacaccaggactttaacagtgcagttcagctggtggagaacttttgtaggaacccggacggagatgaagaaggagtttggtgctatgtagcgggaaaaccaggtgattttgggtactgcgacctgaattactgcgaggaagcagtggaggaggaaaccggggacgggctggatgaggactccgaccgggccatcgagggaaggacagctacctcagaatatcaaaccttcttcaaccctcggaccttcggctccggggaggcagactgtggacttcgccccctctttgagaagaaatccctagaggataaaaccgaacgcgagctgctcgagagctatatagatggcagaattgtggaagggtcggacgccgaaattggcatgtccccctggcaggtcatgctgttccgaaagtccccccaggagttgttgtgtggcgccagcctgatttctgatcggtgggtgcttacagccgcacactgtttattatatccaccatgggataagaacttcaccgagaacgacttgctggtccgcatcggcaaacacagccgcactaggtacgaacgtaatatagaaaagattagtatgctggagaaaatatatattcacccaaggtataactggcgcgaaaatctggatcgggatattgcactaatgaaactcaaaaaacccgtagcatttagcgattacattcatccagtctgtttacctgatagggagactgcagcgtcgctgttacaggccggatacaaggggagagtcacgggatggggcaacctgaaagaaacttggacggccaacgtgggaaagggccaaccctctgttctacaggtcgtgaatctgccgatcgtagaaagacccgtgtgcaaagattctacacggatacgaatcactgacaacatgttctgtgcagggtataagcccgacgaaggcaaaaggggtgacgcttgtgaaggagactctgggggacccttcgtgatgaagagcccattcaacaataggtggtatcaaatgggtatagtaagctggggggagggctgcgacagagatggaaaatacgggttctatactcatgtctttagattaaagaagtggatacagaaggttatcgaccaatttggggagtag

SEQ ID NO: 10190 - DNA, 1752 bp, Artificial Sequence
  derived and/or modified sequence
atggcccatgtaaggggactgcagctgcccggctgcctggccctggcggccctctgtagcttggtacacagccaacacgtgttccttgctcctcaacaggccaggagtttactgcagagagtgcgaagggccaatacttttctcgaggaagtgcggaaaggaaacctggaaagggagtgcgttgaggaaacttgctcctacgaggaagccttcgaggccttggagagtagcacagctacagatgtattctgggctaagtatacggcctgtgagaccgctcggactcctagagataagctcgccgcttgtctggaggggaattgcgccgagggcttgggcacaaactaccgtggccatgtgaacatcactaggagcggaatcgaatgccagctgtggcgcagtcgctacccacacaagcccgaaatcaattccacaacccatccgggggcagatctccaagaaaacttctgcaggaaccctgactcctctactacaggcccttggtgttatacaacagaccctaccgtgcgacgtcaggaatgcagcattcctgtgtgtggccaggatcaagtgactgtggccatgacaccaaggtctgaagggtcttccgtgaatctaagtccccccctggaacagtgcgtccccgacaggggccagcagtaccagggtcgcttagccgttactacgcacggactgccttgtctcgcgtgggcatcagcgcaggcaaaggccctgtcaaaacaccaagactttaactcagccgtgcaactggtggaaaacttctgcagaaatccagacggcgatgaagaaggcgtgtggtgctacgtggccggaaagcctggagacttcggctactgcgacttaaactattgtgaggaggccgttgaagaagagacgggtgatggcctcgacgaggacagtgatcgggccatcgaaggccgtaccgccacctctgagtaccagacattcttcaatcctaggactttcggctctggggaagccgactgtggactgcggcctctctttgaaaaaaaaagccttgaagataaaacggaacgcgaactgctggaatcatacattgacggcagaatcgtggaggggagcgatgctgagattggcatgtccccgtggcaggtgatgcttttcagaaaaagtccccaggagctattatgcggcgcaagcctcatttctgaccgatgggtgctgacggctgcccattgtctactgtaccctccctgggataaaaattttacagagaatgatctgctggtacgcatcggaaaacattctagaacccggtatgagcgtaatatcgaaaaaatttccatgttggagaagatctatattcatccatccctcctgcaggctggatacaaggggcgcgtgacaggctgggggaatctgaaggaaacttggacagccaatgttggcaagggccagcccagtgtcttgcaggtggtcaatctccctattgtggagcgtcccgtttgcaaggactctactcgaattcgcatcacggataatatgttctgtgctggctacaaacccgatgaaggtaagcggggggatgcatgcgagggagactccggaggaccattcgtcatgaagtccccgtttaataaccgctggtaccagatggggatcgttagctggggcgaggggtgtgaccgagacggcaaatatggcttttacacgcatgtgtttaggctcaagaaatggatccagaaagtcatcgatcagttcggggagtag

SEQ ID NO: 10191 - DNA, 2023 bp, Artificial Sequence
  derived and/or modified sequence
ttaacccagaggggtcaggacagacaattcctcagtgacccaggagctgacacactatggcgcacgtccgaggcttgcagctgcctggctgcctggccctggctgccctgtgtagccttgtgcacagccagcatgtgttcctggctcctcagcaagcacggtcgctgctccagcgggtccggcgagccaacaccttcttggaggaggtgcgcaagggcaacctggagcgagagtgcgtggaggagacgtgcagctacgaggaggccttcgaggctctggagtcctccacggctacggatgtgttctgggccaagtacacagcttgtgagacagcgaggacgcctcgagataagcttgctgcatgtctggaaggtaactgtgctgagggtctgggtacgaactaccgagggcatgtgaacatcacccggtcaggcattgagtgccagctatggaggagtcgctacccacataagcctgaaatcaactccactacccatcctggggccgacctacaggagaatttctgccgcaaccccgacagcagcaccacgggaccctggtgctacactacagaccccaccgtgaggaggcaggaatgcagcatccctgtctgtggccaggatcaagtcactgtagcgatgactccacgctccgaaggctccagtgtgaatctgtcacctccattggagcagtgtgtccctgatcgggggcagcagtaccaggggcgcctggcggtgaccacacatgggctcccctgcctggcctgggccagcgcacaggccaaggccctgagcaagcaccaggacttcaactcagctgtgcagctggtggagaacttctgccgcaacccagacggggatgaggagggcgtgtggtgctatgtggccgggaagcctggcgactttgggtactgcgacctcaactattgtgaggaggccgtggaggaggagacaggagatgggctggatgaggactcagacagggccatcgaagggcgtaccgccaccagtgagtaccagactttcttcaatccgaggacctttggctcgggagaggcagactgtgggctgcgacctctgttcgagaagaagtcgctggaggacaaaaccgaaagagagctcctggaatcctacatcgacgggcgcattgtggagggctcggatgcagagatcggcatgtcaccttggcaggtgatgcttttccggaagagtccccaggagctgctgtgtggggccagcctcatcagtgaccgctgggtcctcaccgccgcccactgcctcctgtacccgccctgggacaagaacttcaccgagaatgaccttctggtgcgcattggcaagcactcccgcaccaggtacgagcgaaacattgaaaagatatccatgttggaaaagatctacatccaccccaggtacaactggcgggagaacctggaccgggacattgccctgatgaagctgaagaagcctgttgccttcagtgactacattcaccctgtgtgtctgcccgacagggagacggcagccagcttgctccaggctggatacaaggggcgggtgacaggctggggcaacctgaaggagacgtggacagccaacgttggtaaggggcagcccagtgtcctgcaggtggtgaacctgcccattgtggagcggccggtctgcaaggactccacccggatccgcatcactgacaacatgttctgtgctggttacaagcctgatgaagggaaacgaggggatgcctgtgaaggtgacagtgggggaccctttgtcatgaagagcccctttaacaaccgctggtatcaaatgggcatcgtctcatggggtgaaggctgtgaccgggatgggaaatatggcttctacacacatgtgttccgcctgaagaagtggatacagaaggtcattgatcagtttggagagtagggggccactcatattctgggctcctggaaccaatcccgtgaaagaattatttttgtgtttctaaaactatggttcccaataaaagtgactctcagcga

SEQ ID NO: 10192 - DNA, 1849 bp, Artificial Sequence
  derived and/or modified sequence
acactatggcgcacgtccgaggcttgcagctgcctggctgcctggccctggctgccctgtgtagccttgtgcacagccagcatgtgttcctggctcctcagcaagcacggtcgctgctccagcgggtccggcgagccaacaccttcttggaggaggtgcgcaagggcaacctggagcgagagtgcgtggaggagacgtgcagctacgaggaggccttcgaggctctggagtcctccacggctacggatgtgttctgggccaagtacacagcttgtgagacagcgaggacgcctcgagataagcttgctgcatgtctggaaggtaactgtgctgagggtctgggtacgaactaccgagggcatgtgaacatcacccggtcaggcattgagtgccagctatggaggagtcgctacccacataagcctgaaatcaactccactacccatcctggggccgacctacaggagaatttctgccgcaaccccgacagcagcaccacgggaccctggtgctacactacagaccccaccgtgaggaggcaggaatgcagcatccctgtctgtggccaggatcaagtcactgtagcgatgactccacgctccgaaggctccagtgtgaatctgtcacctccattggagcagtgtgtccctgatcgggggcagcagtaccaggggcgcctggcggtgaccacacatgggctcccctgcctggcctgggccagcgcacaggccaaggccctgagcaagcaccaggacttcaactcagctgtgcagctggtggagaacttctgccgcaacccagacggggatgaggagggcgtgtggtgctatgtggccgggaagcctggcgactttgggtactgcgacctcaactattgtgaggaggccgtggaggaggagacaggagatgggctggatgaggactcagacagggccatcgaagggcgtaccgccaccagtgagtaccagactttcttcaatccgaggacctttggctcgggagaggcagactgtgggctgcgacctctgttcgagaagaagtcgctggaggacaaaaccgaaagagagctcctggaatcctacatcgacgggcgcattgtggagggctcggatgcagagatcggcatgtcaccttggcaggtgatgcttttccggaagagtccccaggagctgctgtgtggggccagcctcatcagtgaccgctgggtcctcaccgccgcccactgcctcctgtacccgccctgggacaagaacttcaccgagaatgaccttctggtgcgcattggcaagcactcccgcaccaggtacgagcgaaacattgaaaagatatccatgttggaaaagatctacatccaccccagcttgctccaggctggatacaaggggcgggtgacaggctggggcaacctgaaggagacgtggacagccaacgttggtaaggggcagcccagtgtcctgcaggtggtgaacctgcccattgtggagcggccggtctgcaaggactccacccggatccgcatcactgacaacatgttctgtgctggttacaagcctgatgaagggaaacgaggggatgcctgtgaaggtgacagtgggggaccctttgtcatgaagagcccctttaacaaccgctggtatcaaatgggcatcgtctcatggggtgaaggctgtgaccgggatgggaaatatggcttctacacacatgtgttccgcctgaagaagtggatacagaaggtcattgatcagtttggagagtagggggccactcatattctgggctcctggaaccaatcccgtgaaagaattatttttgtgtttctaaaactatggttcccaataaaagtgactct

SEQ ID NO: 10193 - DNA, 1869 bp, Artificial Sequence
  derived and/or modified sequence
atggcccacgtgcggggcctgcagctgcccggctgcctggccctggccgccctgtgcagcctggtgcacagccagcacgtgttcctggccccccagcaggcccggagcctgctgcagagggtgcggcgggccaacaccttcctggaggaggtgaggaaaggaaacctggagagagaatgtgtggaggagacctgcagctatgaggaggcctttgaggccctggagagcagcacagccacagatgtgttctgggccaagtacacagcctgtgaaacagcccggaccccccgggacaagctggccgcctgcctggagggcaactgtgccgagggcctgggcaccaactaccggggccacgtgaacatcaccaggtctggaattgagtgccagctgtggaggagccgctacccccacaagccagagatcaacagcaccacccaccctggagctgacctgcaggagaacttctgcaggaacccagacagcagcaccaccggcccctggtgctacaccacagaccccaccgtgcggcggcaggagtgcagcatccctgtgtgtggccaggaccaggtgacagtggccatgacccccaggtctgagggcagctctgtgaacctgagcccccccctggagcagtgtgtgcctgaccggggccagcagtaccagggccgcctggccgtgaccacccacggcctgccctgcctggcctgggccagcgcccaggccaaggccctgagcaagcaccaggacttcaacagcgctgtgcagctggtggagaacttctgcagaaatccagatggagatgaggagggcgtgtggtgctacgtggccggcaagccaggggactttggctactgtgacctgaactactgtgaggaggccgtggaggaggagactggagatggcctggatgaagattctgaccgggccatcgagggccgcacagccaccagcgagtaccagaccttcttcaaccccaggacctttggaagtggagaggccgactgtggcctgcggcccctgtttgagaagaagagcctggaggacaagacagagcgggagctgctggagagctacattgatggccgcatcgtggagggcagtgatgctgagatcggcatgagcccctggcaggtgatgctgttcaggaagagcccccaggagctgctgtgtggggccagcctcatcagtgaccgctgggtgctgacagctgcccactgcctgctgtacccaccctgggacaagaacttcacagaaaatgacctgctggtgcgcatcggcaagcacagcaggaccaggtatgaaagaaacatcgagaagatctccatgctggagaagatctacatccacccccgctacaactggagggagaacctggaccgggacatcgccctgatgaagctgaagaagcctgtggccttcagtgactacatccaccctgtgtgcctgcctgaccgggagacagctgccagcctgctgcaggccggctacaagggccgggtgacaggctggggcaacctgaaggagacctggacagccaacgtgggcaagggccagcccagcgtgctgcaggtggtgaacctgcccatcgtggagaggcctgtgtgcaaggacagcacccgcatccgcatcacagacaacatgttctgtgccggctacaagccagatgagggcaagagaggagatgcctgtgagggggacagcggcggcccctttgtgatgaagagccccttcaacaaccgctggtaccagatgggcatcgtgtcctggggcgagggctgtgacagagatggcaagtatggcttctacacccacgtgttccggctgaagaagtggatccagaaggtgattgaccagtttggagagtag

SEQ ID NO: 10194 - DNA, 1752 bp, Artificial Sequence
  derived and/or modified sequence
atggcccacgtgcggggcctgcagctgcccggctgcctggccctggccgccctgtgcagcctggtgcacagccagcacgtgttcctggccccccagcaggcccggagcctgctgcagagggtgcggcgggccaacaccttcctggaggaggtgaggaaaggaaacctggagagagaatgtgtggaggagacctgcagctatgaggaggcctttgaggccctggagagcagcacagccacagatgtgttctgggccaagtacacagcctgtgaaacagcccggaccccccgggacaagctggccgcctgcctggagggcaactgtgccgagggcctgggcaccaactaccggggccacgtgaacatcaccaggtctggaattgagtgccagctgtggaggagccgctacccccacaagccagagatcaacagcaccacccaccctggagctgacctgcaggagaacttctgcaggaacccagacagcagcaccaccggcccctggtgctacaccacagaccccaccgtgcggcggcaggagtgcagcatccctgtgtgtggccaggaccaggtgacagtggccatgacccccaggtctgagggcagctctgtgaacctgagcccccccctggagcagtgtgtgcctgaccggggccagcagtaccagggccgcctggccgtgaccacccacggcctgccctgcctggcctgggccagcgcccaggccaaggccctgagcaagcaccaggacttcaacagcgctgtgcagctggtggagaacttctgcagaaatccagatggagatgaggagggcgtgtggtgctacgtggccggcaagccaggggactttggctactgtgacctgaactactgtgaggaggccgtggaggaggagactggagatggcctggatgaagattctgaccgggccatcgagggccgcacagccaccagcgagtaccagaccttcttcaaccccaggacctttggaagtggagaggccgactgtggcctgcggcccctgtttgagaagaagagcctggaggacaagacagagcgggagctgctggagagctacattgatggccgcatcgtggagggcagtgatgctgagatcggcatgagcccctggcaggtgatgctgttcaggaagagcccccaggagctgctgtgtggggccagcctcatcagtgaccgctgggtgctgacagctgcccactgcctgctgtacccaccctgggacaagaacttcacagaaaatgacctgctggtgcgcatcggcaagcacagcaggaccaggtatgaaagaaacatcgagaagatctccatgctggagaagatctacatccaccccagcctgctgcaggccggctacaagggccgggtgacaggctggggcaacctgaaggagacctggacagccaacgtgggcaagggccagcccagcgtgctgcaggtggtgaacctgcccatcgtggagaggcctgtgtgcaaggacagcacccgcatccgcatcacagacaacatgttctgtgccggctacaagccagatgagggcaagagaggagatgcctgtgagggggacagcggcggcccctttgtgatgaagagccccttcaacaaccgctggtaccagatgggcatcgtgtcctggggcgagggctgtgacagagatggcaagtatggcttctacacccacgtgttccggctgaagaagtggatccagaaggtgattgaccagtttggagagtag

SEQ ID NO: 10195 - DNA, 1869 bp, Artificial Sequence
  derived and/or modified sequence
atggcccacgtgcggggcctgcagctgcccggctgcctggccctggctgcactctgttccctagtgcattcacagcacgtctttttggccccccaacaggcccgaagccttctgcagcgcgttcgaagagccaacacctttctggaagaagtgagaaaggggaacctggagcgggaatgcgtcgaagagacctgcagctacgaggaagcctttgaggccttagaatccagcaccgctacagacgtgttctgggcaaagtacaccgcatgcgagactgccagaacacctcgggacaagttggccgcttgcctagaaggaaactgtgccgaggggttagggaccaactacagaggtcacgtgaacatcacacgctccggaattgagtgtcagctgtggagaagtcggtacccacacaagcccgagattaatagtacgactcaccccggagccgacctgcaggagaatttctgtcggaatcctgattcttctaccaccggcccatggtgctacaccaccgaccccaccgtgcgccgacaagagtgttcgattccggtgtgcggacaggaccaggtcacggtggccatgacaccccggtcagaaggcagcagcgttaacttatcacctcctctcgagcaatgtgttcccgataggggccagcagtatcaaggcaggcttgctgtgactacgcatggcctgccgtgcttagcctgggcatctgctcaggccaaggcactcagtaagcaccaagactttaattccgccgttcagttggtggagaacttctgcagaaaccctgacggagatgaggagggcgtttggtgttatgtcgcagggaaacccggagacttcggatactgcgacctgaattactgcgaggaagcggtggaggaggaaacaggcgacggtctggacgaggatagcgatcgggccattgaaggaagaactgccacatctgaatatcagacattttttaatccccggacatttggctctggagaggccgattgcggtctgcgcccgttgttcgagaaaaagagcctggaggataaaacggagagggagttgctcgaatcttacattgatggaaggatagtcgaaggctcagacgcggaaattggcatgagcccgtggcaggtgatgctattcagaaaaagtccacaagaattgttatgcggtgcaagcctgatctccgatcggtgggttctgaccgcagcgcattgcctgctgtatcctccctgggacaaaaacttcactgaaaatgacctgcttgtaagaatcgggaagcattcacgaactcgctacgaacgcaacattgaaaaaatttccatgctggagaagatctacatccacccccgatacaattggcgcgaaaacctggaccgtgacatcgcgctcatgaagctcaaaaagcccgtggcattctcagattacattcaccctgtgtgcctccccgatcgtgaaaccgcagcaagtctgctccaggcagggtataaggggcgggtaaccggttggggcaatcttaaggaaacgtggactgctaatgtgggaaaaggccagcctagcgtgctccaggtcgtcaacctgcccattgttgagcgacccgtgtgcaaagatagtacccgcattcgaataactgacaatatgttttgtgctggctacaagcctgacgaaggaaagaggggcgatgcttgtgagggagattctggcgggccatttgtgatgaaaagtccttttaacaataggtggtaccagatgggcatcgtgtcttggggtgagggctgcgatagggatggcaaatacgggttctatacccacgtgtttaggctcaaaaagtggatccagaaggtgatcgaccagtttggcgagtag

SEQ ID NO: 10196 - DNA, 1752 bp, Artificial Sequence
  derived and/or modified sequence
atggcccacgtgcggggcctgcagctgcccggctgcctggccctggctgcactctgtagcctggttcatagccagcatgtgtttcttgcacctcagcaggcacgaagcctgctccaacgtgtccggagagccaatactttcttagaggaggtgcgcaaggggaacctggaaagagagtgcgtggaggaaacatgttcctatgaggaagctttcgaggctctcgagtcatcgaccgcaaccgacgtattctgggccaagtatactgcatgtgagacggcccgaacccccagggataaactggcagcgtgcttagaggggaattgcgccgagggattggggaccaactatcgcggccacgtgaatatcacacgaagtggtattgaatgccagctgtggcgtagtagataccctcataagccagagattaattctaccacacaccccggagcagatttgcaagaaaatttctgcagaaatcctgattcttctaccacaggaccttggtgttacacaacagatcccacagtgaggagacaagagtgctctatccccgtttgtgggcaggatcaggtcaccgtggcgatgactccacgcagcgaggggtcttcggttaacctttcaccaccactggagcagtgtgtacccgatcgcggccagcaataccagggcaggcttgctgtgactacacacggcctaccctgtctggcatgggcctcagcccaggcaaaagcactcagcaagcaccaagattttaactccgccgtacaattggtggagaacttctgcagaaatccagatggcgatgaagagggggtttggtgttatgtagcagggaagcctggcgattttggatactgtgacctcaactactgcgaggaggcagtggaagaagagaccggagatgggctggacgaggactctgacagagccatcgaaggacgcacggctacttccgaatatcagacgttctttaatccgaggaccttcggctccggggaggctgactgcggtctgcggcccctcttcgaaaagaagtccttggaggacaagaccgaacgggagttactggagagctacatagacgggcggattgtcgaaggatctgacgcagagataggcatgagtccttggcaagtgatgctgttccggaagtctccccaggagctgctgtgcggcgcgtccctaatcagtgatcggtgggtgctgactgctgctcattgtctgctgtatcccccatgggataagaattttaccgagaacgacctcctagtgaggattggcaagcattcccggacaaggtacgagaggaatatagaaaagatttccatgttggagaaaatatacatccatccttccctgttacaggccggatacaagggccgcgtgactgggtgggggaacctgaaggagacgtggacagccaatgtgggcaaagggcagccttcagtgctacaggtggtgaacttacctattgtcgaacgtccagtgtgcaaagactccacacgcatacgcatcaccgacaacatgttctgcgctggatacaagccagatgagggtaaaaggggagacgcatgcgaaggggactccggtggccctttcgtgatgaagtcccctttcaataacagatggtatcagatgggcatcgtgagctggggtgaaggttgcgaccgcgatgggaagtatggcttctacacacacgtttttaggctcaaaaaatggatccagaaagttatagatcagtttggggaatag

SEQ ID NO: 10197 - DNA, 1869 bp, Artificial Sequence
  derived and/or modified sequence
atggcccatgtgcggggactgcagttacccggatgcctggccctggcggctttgtgcagcctggttcattcacagcatgtgttcctggctcctcagcaagcaaggtccctcctgcaacgggtccgtcgcgcaaacacctttttggaggaggttcgtaaaggcaatctggagcgcgaatgtgtggaggagacatgctcttacgaggaagcatttgaggccctcgaaagcagcaccgccactgatgtcttttgggccaaatataccgcctgcgagacagcgagaaccccccgagacaagcttgcggcttgtctggaggggaactgtgccgaaggcctgggcacaaattataggggccacgtcaacatcacccgaagtggaatagaatgccagctttggcgcagccgataccctcataaacctgaaatcaattctaccacccacccaggtgctgaccttcaggagaatttctgtcggaatcccgattcgtccaccaccggaccttggtgctatacaacggacccaactgtgcgcaggcaggagtgctcaatacccgtgtgtgggcaggaccaggttaccgtggctatgactcctcgctctgaaggctcttccgtcaatctctcccccccactggagcagtgcgtgccagatcgaggccaacagtaccagggcaggctggccgtaacaacccacggcctgccctgtctggcctgggctagcgcacaggcaaaagccctttcaaaacaccaagattttaattcagcagtccagctggtagaaaatttctgtagaaaccctgacggcgacgaggagggagtctggtgctatgtcgcgggtaagcctggggacttcggttattgcgacttaaactattgcgaagaggctgtggaagaagaaacaggtgatggcctagacgaggacagcgatcgagccattgaggggaggacagcaaccagcgagtaccagaccttcttcaacccccgaaccttcggctcgggagaagcagattgcggcctgaggcccctcttcgagaagaaatcccttgaggataagaccgagcgcgagctgctcgagtcgtatattgatggtagaattgtggaggggagcgatgcagaaatcggcatgtcgccatggcaggtcatgttattcagaaaatcaccacaggagctcctctgtggagcgagcctaatttcagatagatgggtactgacagcggctcactgcttgctttacccaccttgggacaaaaactttacagagaacgaccttctcgtgagaatcggtaagcactcccggacccggtacgagcgaaatatcgagaaaatctctatgctagaaaagatatatattcaccctcggtataactggagggagaacctcgaccgggacatcgcccttatgaagttaaagaagcccgtcgcctttagcgactatatccacccggtgtgtctaccagaccgcgaaaccgccgcttctctattgcaggctgggtacaagggcagggtgacaggctgggggaatcttaaggaaacttggacagccaacgtgggtaaaggtcagccgagtgtgctccaggtagtgaatctgcctatcgtagaacgcccagtgtgcaaggattctacccgaattcggattacagataacatgttctgtgctggctataaacccgacgaaggaaaacgtggtgatgcatgcgagggcgactccgggggacctttcgtgatgaagtcaccttttaacaacaggtggtatcagatgggcatcgtcagctggggagaggggtgcgaccgcgatggcaagtacgggttctacacacatgtattcagactgaaaaagtggattcagaaggtcattgatcagttcggagaatag

SEQ ID NO: 10198 - DNA, 1752 bp, Artificial Sequence
  derived and/or modified sequence
atggcacacgtgcggggactgcagctccccggatgcctggcattagcagcactctgtagcctggtgcacagccaacacgtgttcctcgcaccccaacaggccagatccctgctgcagcgagtgcgcagagccaatacattcctggaagaggtcaggaagggcaatttagagagggagtgcgtggaagaaacctgcagctatgaggaagcatttgaggcactggagagcagtaccgctaccgatgtgttctgggccaagtacacggcttgtgagaccgcgaggacaccacgagacaagttggctgcctgcctggagggtaactgcgcagagggcctgggtactaactaccgaggtcacgtgaacataacccggtctggcattgagtgtcaactgtggcgctctagatacccccacaagccagaaataaacagtaccacacatcccggagcagacctgcaggaaaacttttgccgcaaccctgactcttcaactacggggccttggtgttatactacagaccccacagtccgcagacaggagtgctctatacctgtctgcgggcaggatcaggtgaccgtcgcaatgaccccgcgaagtgaggggtccagtgtaaacctgtcccctcccctggaacagtgtgtgccagatcgcggacaacagtaccaaggtagactagccgtgaccacacatggactgccctgtttggcttgggcatctgcccaggcgaaggccttgtccaaacatcaagactttaatagcgctgttcagttagtagagaacttctgtaggaaccccgacggtgacgaggaaggggtttggtgttacgttgccggaaaaccaggcgactttgggtactgcgacctgaattactgcgaggaggctgttgaggaggaaaccggggatggccttgacgaggactccgatagggccatcgagggacgcaccgccacctccgaatatcagaccttctttaatcccaggactttcggatccggggaggcagattgcggtcttcgcccactgttcgaaaaaaaaagtttggaagacaagaccgaacgcgagttgctggagtcctacatagacgggaggatcgtagagggctccgatgcagaaattggcatgtctccttggcaggtgatgcttttccgtaagtcaccccaggaacttctttgtggtgcctccctgatttctgaccgctgggttctgaccgcagcacattgcctgttgtaccctccttgggacaaaaacttcacggaaaacgatctgctggtgaggatcggcaaacactctagaacccggtatgagagaaacattgagaagatctctatgttagaaaagatttatattcacccgagtctactgcaagccggatataagggaagggttactggctgggggaacctgaaggagacttggacagcaaacgtgggcaaaggccagccatccgtactgcaggtagtgaacctgcctatcgttgaaagacccgtctgcaaggactcgacccgtattcgaattactgacaacatgttttgcgcagggtataaacctgacgaaggcaagcgcggtgatgcctgcgagggtgattccggagggccattcgttatgaagtctccttttaacaaccgctggtaccaaatggggatcgtgagttggggtgaagggtgtgatcgggacggaaaatatgggttttatacgcatgtctttcgcctgaaaaaatggattcagaaggtcatagatcagttcggagagtag

SEQ ID NO: 10199 - DNA, 1869 bp, Artificial Sequence
  derived and/or modified sequence
atggctcatgtgagggggttgcagctccctggttgcctagccctcgcagccttgtgttccttagtccattcccagcatgtattcttggcccctcagcaggcgcgctccttgttacagcgcgtgaggcgggcaaatactttcctcgaggaggtgcgcaagggtaacttggagagagaatgtgtagaagagacctgttcctacgaagaagcatttgaggcactggaaagctcgacagcaacagacgtattttgggccaaatacaccgcctgcgagacagcacgcaccccaagggataagctggccgcttgcttagaaggtaattgtgctgaggggctcggaactaattatcgtgggcacgtgaatattactcgctccggaatcgaatgtcaactgtggcgttctcgttacccgcataaacctgagattaactcaactacacatcccggcgccgacctgcaagaaaatttctgcagaaaccctgattcctccacaaccgggccctggtgttatactactgatccaactgtgagacggcaggaatgcagcatccccgtgtgcggacaagatcaggtaacggttgccatgaccccaaggagtgaaggatcctctgtgaacctcagccctcccctggagcagtgcgtacctgatcgcggccaacagtaccaaggcagactagcagtgactacccatggactcccctgtctggcatgggcaagcgcccaggccaaagccctcagcaagcatcaagattttaatagtgcagtacagctggtggagaacttctgtaggaaccccgatggagacgaagagggcgtctggtgttacgttgccgggaagcctggggattttgggtactgcgatctgaattactgcgaggaggccgtggaagaagaaaccggcgatggtttggacgaggactcagatagggctatcgagggaaggaccgccacatccgaataccagacatttttcaacccccgtactttcggaagcggcgaagctgactgcggcctgaggcccctctttgaaaaaaagagcttagaggataagaccgaaagagaattactcgaatcttatatagacgggcgcatcgtcgaagggagcgacgccgaaatcgggatgtccccctggcaggtaatgctattccgcaagagtccgcaggaactgctgtgcggggccagtcttatcagcgatcggtgggttctgaccgccgcacactgtctgctgtacccaccttgggataagaacttcactgagaatgacctcctcgtaaggattggcaaacattcccggacaagatatgaacggaatatagagaaaatatccatgctggaaaagatctacatacacccaaggtataactggagagaaaatctggatcgcgacattgctcttatgaaactgaaaaaacctgtagctttctccgactatattcacccagtatgccttcctgaccgcgagactgccgcctccttgttgcaggcgggctataaaggtagggttactggatggggcaatctgaaggaaacatggaccgcgaacgtgggaaagggtcagccctcggtcctgcaggttgttaacctgccaattgtggagcggccagtgtgtaaagattccacgaggattagaataactgacaacatgttttgcgccggttataaacctgacgaaggcaaaaggggtgatgcgtgcgaaggcgatagcgggggtccattcgtgatgaagtccccgttcaataataggtggtaccagatgggcatagttagttggggagagggctgcgacagagacggaaaatatggattttacacacatgtgttcagactcaagaagtggatacagaaggtgatcgatcagttcggtgagtag

SEQ ID NO: 10200 - DNA, 1752 bp, Artificial Sequence
  derived and/or modified sequence
atggcccatgttaggggcctgcaattgcccggctgcctggccctcgccgccctgtgttcactcgtccatagccagcatgtgttcctggccccccaacaagcacggtctttgttgcaacgagttcgacgtgctaacaccttcctggaagaagtgcggaagggcaacctggaacgagaatgtgtcgaagaaacatgcagttatgaagaggcttttgaggccctcgagagctccaccgctaccgacgtcttttgggcgaaatacacagcctgcgagacagcccggaccccgcgcgataaactcgcggcgtgcctagaagggaattgcgctgagggactgggcacgaactaccgaggacacgtgaacatcaccagaagcggcatcgagtgccaactgtggagaagccgttatccccataaaccggaaataaacagcacgacccatccaggtgcagacctgcaggagaacttctgtcgcaaccctgacagttccacaaccggaccctggtgttacactaccgaccccactgtgagacggcaagaatgtagcatacccgtttgtggccaggaccaggttacagtggccatgacaccacgctcggaaggcagctccgtaaacctgagcccccccttggaacagtgtgtccccgatagaggccagcagtatcagggcaggctcgccgtgaccacccacggtctcccttgcttggcatgggcctctgctcaagcaaaggcactctcaaagcaccaagactttaatagcgcagtgcagctggttgaaaatttttgcaggaaccccgacggcgacgaggaaggggtgtggtgttacgttgccggcaaacccggagatttcggctactgcgatctaaactattgtgaagaggctgtggaagaagagactggcgatggcctggacgaagattccgatcgtgccatagaaggaaggaccgctacttctgagtaccaaactttctttaatccccggacgttcggctctggcgaggccgactgcggcctacgccccctgtttgagaagaagtctctcgaagacaaaaccgaaagggaactgttggagtcctacatcgacgggagaattgttgaagggtctgacgctgaaataggcatgtcgccatggcaggtgatgcttttccggaagagtcctcaagagctgttatgtggcgcatccctcatcagtgacagatgggtgctgaccgcggcacactgtctattgtatcccccgtgggacaagaacttcacagagaacgacttactggtgcggattggaaagcattctagaactcgatacgaacggaacatagaaaagatcagtatgctagaaaaaatttatatccacccttcactgctgcaggctggatacaaaggaagggtgactggatggggcaacttgaaggaaacctggacggccaacgtcggaaaaggacagcccagtgttcttcaagtcgttaatctccctatcgtggagagacccgtgtgcaaagatagcactcgtattaggatcaccgacaacatgttctgcgccgggtataagcctgatgaagggaagcgcggcgatgcatgcgaaggtgacagtgggggcccattcgtcatgaagtctccctttaacaaccggtggtaccagatgggaatagtatcatggggtgagggatgtgatcgggacggcaagtatggattttacacacacgtgtttcgactaaagaagtggatccaaaaagtaattgatcagttcggcgagtag

SEQ ID NO: 10201 - DNA, 1869 bp, Artificial Sequence
  derived and/or modified sequence
atggcacacgtgagagggctgcaattacctggatgcttagcactcgccgcactctgttccctagtgcattcacaacacgtgttcctcgcacctcagcaggctcgctccctgttgcaaagagtgcgtcgtgcaaatacatttcttgaagaagtccgcaaggggaacctagaaagggagtgcgtcgaggagacatgcagttacgaagaagcctttgaagctctcgagagttctactgcaacggatgtgttctgggccaaatacacagcatgtgagaccgctcgtacacctcgtgataaactggcagcttgtctagaagggaattgtgcagagggtctgggaacaaactacagaggtcatgtgaatattaccagaagcggtatcgaatgtcagctttggcgcagccggtatccacacaagcctgaaattaatagtactactcatccgggagctgacttgcaagagaatttttgtcgtaacccagattcttcaactactgggccgtggtgctataccacagatcccaccgtacggcgacaggaatgtagcatccctgtgtgtggccaggatcaggtgactgtggcaatgaccccgaggagtgaagggagttctgtgaatctgtctcctccattggagcaatgtgtgcccgaccgcgggcagcagtatcagggaagactggctgtaaccacccacgggctgccatgcctagcttgggcatctgcacaggcaaaagctctgagcaaacatcaagactttaattctgctgttcagctggtggaaaatttctgcagaaatcccgacggagacgaggaaggggtgtggtgttatgtggctggcaaacccggcgattttgggtactgtgatctcaactactgcgaagaggccgttgaagaagaaactggagatggactggatgaagattctgaccgggctatcgaagggaggactgccacaagcgaatatcagacttttttcaacccccggacttttggcagcggtgaagccgactgtggtcttaggcctctgtttgagaaaaagtcactcgaggataaaacagagcgggagttgttggagagctatatagacggaagaatcgtggaagggtcagacgcagaaatcggcatgtctccttggcaagtcatgttgttcagaaagagccctcaagaactactgtgtggagcaagtctgatttcagataggtgggttctgaccgccgcacactgtctgctgtacccaccttgggataagaacttcactgagaatgacctcctcgtaaggattggcaaacattcccggacaagatatgaacggaatatagagaaaatatccatgctggaaaagatctacatacacccaaggtataactggagagaaaatctggatcgcgacattgctcttatgaaactgaaaaaacctgtagctttctccgactatattcacccagtatgccttcctgaccgcgagactgccgcctccttgttgcaggcgggctataaaggtagggttacagggtggggtaacttaaaggagacatggacagccaatgttggaaaaggtcagccaagtgttcttcaggtggtgaacctgcccattgtggaacggcctgtgtgcaaggactccacaagaatacggatcacagacaatatgttttgcgctggatacaaacccgatgagggtaagcggggagatgcatgcgagggcgatagcggcggacctttcgtaatgaaaagtccctttaataatcggtggtatcaaatggggatcgtctcatggggggagggctgtgatagggacggaaagtatggcttctacacccacgtatttagactgaaaaagtggatccagaaagtaattgatcagttcggcgaatag

SEQ ID NO: 10202 - DNA, 1752 bp, Artificial Sequence
  derived and/or modified sequence
atggcacatgtacggggcctgcagctccctggatgtcttgcattggccgccttgtgtagcctggttcatagtcaacatgtgtttttggcccctcagcaagccagatcactactgcagcgagtgcgccgtgcaaacacatttttggaagaagtacgcaaaggcaacctcgagagggagtgtgtggaagagacttgtagttatgaggaggccttcgaggccctcgagtccagcactgctacagacgtgttttgggccaaatatacagcctgcgagaccgctagaaccccccgcgataagttggccgcctgtctcgaaggcaattgcgccgagggtcttggcacgaactaccgaggccacgtaaacattacaagaagcggcatcgaatgtcaactttggcgctcccgatatccacacaagcctgaaataaactcaaccacacacccaggcgctgatttacaagagaatttctgccgaaatccagactcttcaactaccgggccatggtgctacacaacagatcctactgttcggcggcaagagtgttctatccccgtttgtggccaggaccaggtcacagtcgcgatgacaccccgatccgagggttcttctgtaaatcttagtcctcctttggaacagtgcgttcctgatagaggccagcagtatcagggtaggctcgcagtgacgacacacggattgccctgccttgcatgggctagtgcacaggccaaagccttatccaaacaccaagactttaattcagcagtgcaacttgttgagaatttttgtcgtaacccggacggcgacgaggaaggggtgtggtgctatgttgcaggcaaaccgggagatttcggatattgcgatttgaattattgcgaggaggcagtcgaggaagaaacgggcgacggactggatgaggacagcgatcgagctatcgaaggacggacagccacaagcgagtaccagaccttcttcaacccacgaacctttggctccggcgaggctgattgcgggctgcgaccactgttcgagaagaaatcattagaagacaagacagagagggagctgctcgaatcttatatcgacggtcgcatcgttgagggttctgatgctgaaattggtatgtcaccttggcaagtgatgttatttcgcaaaagcccccaggaacttttgtgtggagcctctctgattagcgataggtgggtcctaacagctgcccattgtctgttgtaccctccatgggataaaaattttactgagaatgatttactagttcgaattggcaagcactcacggactcggtacgaacggaatatcgaaaaaatatctatgctcgagaaaatatatatacatccgtctcttttgcaggctggctacaagggtagagtcacgggctggggaaatctgaaggaaacatggaccgctaatgtgggcaaaggccagccctctgtgctgcaagttgtgaaccttcctatagtcgagaggccagtttgcaaagactccacacgtatccgaatcacagataatatgttttgcgcaggatacaaaccagacgagggaaagagaggcgatgcctgcgaaggagacagtgggggcccattcgtaatgaagtcaccttttaataatcgatggtaccaaatgggcattgtgtcgtggggagaaggatgtgacagagatggcaaatacggcttttacacacatgttttccgattgaagaaatggatccagaaagtgatcgatcagtttggcgagtag

SEQ ID NO: 10203 - DNA, 1866 bp, Artificial Sequence
  derived and/or modified sequence
atggcacacgtgcgcgggcttcagctgccaggttgcctcgcgctcgcagcactgtgttccctggtgcattcccaacatgtgtttctcgcaccgcaacaggcgcgctcactgctccaaagagtccggagagcaaatactttccttgaggaagtgaggaagggtaacctggaaagggagtgtgtcgaagaaacttgttcatacgaggaagcatttgaggccctggaatcgtcaaccgcaaccgacgtgttttgggcaaagtacacggcctgcgagactgcgcggacccctagagataagctggccgcatgtctggaggggaattgtgcagaagggctgggtaccaactatagaggtcatgtcaacattacccggtcgggaatagaatgtcaactttggcgcagccgctatccgcataagcctgagattaactcaactacccatcccggtgctgacctgcaagaaaacttctgccgtaaccccgacagctcaactaccggaccttggtgttacaccactgatcccaccgtgcgcagacaagaatgctccattcctgtctgtggtcaggaccaggtaacggtcgcaatgacccccaggtccgaaggatcgtcggtcaacttgtcgccacccctggagcaatgtgtccctgatagaggacagcaataccaaggtaggctggcagtgaccactcatggattgccatgtctggcatgggcgtccgcgcaagcgaaggctctttcaaaacatcaggatttcaactcagcggtccaacttgtcgagaacttttgccgtaaccctgatggagacgaagaaggggtctggtgttatgtggcaggaaaacctggtgatttcggctactgtgacctgaattactgcgaagaagcagttgaagaggaaaccggagatggtcttgacgaagattcagaccgtgcaatcgagggccggactgccacgtccgaatatcaaacctttttcaatccacgtaccttcggctccggcgaggctgattgcggtctgcgacccctctttgagaagaagagcctggaggataagactgaacgggaactgctggaatcttacatcgacggtcggattgtggaaggtagcgatgccgaaattggcatgtcgccctggcaagtcatgctgtttagaaaatcgcctcaagaactgctgtgtggagcatcacttatttcggatcgatgggtcctgaccgcggcgcactgccttctgtacccgccatgggacaagaactttacggaaaatgacctcctggtgagaataggtaagcatagcaggacccgttacgaaagaaacatcgaaaagatctcaatgcttgaaaagatttacatacatccgcgatacaattggcgtgaaaacctggatcgcgatattgcacttatgaaactgaagaagccagtggctttctccgattacattcatcccgtgtgcctcccagatcgtgaaaccgctgcaagccttcttcaagcgggttacaaagggcgcgtgaccggatggggaaaccttaaggaaacctggactgccaacgtgggtaaggggcagccgagcgtgcttcaagtggtgaatctgcccatagtggaacggccagtctgtaaggattcgaccagaatcagaattactgataacatgttttgcgccggatacaagcctgacgaaggcaaacgcggggatgcatgtgaaggtgactccggtggaccattcgttatgaaatccccattcaataacagatggtaccaaatgggaatagtgagctggggtgagggatgcgacagagacgggaagtacgggttctacacccatgtctttaggcttaagaaatggatccagaaagtgatcgaccagttcggagaa

SEQ ID NO: 10204 - DNA, 1866 bp, Artificial Sequence
  derived and/or modified sequence
atggcccatgtgagaggtttgcagttgcccggatgtcttgcactggccgccttgtgcagcctggtgcacagccaacatgtctttctggcaccccagcaagcaagatcacttcttcaaagggtcagacgggcaaatacgtttttggaagaagtgagaaagggaaaccttgaacgggagtgcgtagaagaaacttgctcgtacgaagaggcatttgaggccttggaatcatcaactgcaaccgacgtgttttgggccaaatacacggcatgtgaaacggcccgaactcctcgagataaactggcagcatgtctggaaggaaattgtgcagaaggactcggaaccaactatagaggacatgtgaatatcactcgcagcgggatcgagtgccaactgtggagaagccgctatccgcacaaacccgaaatcaactccaccactcacccaggtgccgatttgcaggaaaacttctgtcggaaccccgattcgtccaccaccggtccttggtgttacactaccgaccccactgtgagacgacaagaatgcagcatacctgtctgcgggcaagatcaggtcactgtggcaatgactccaaggtctgagggttcaagcgtgaacttgagcccccctctcgaacagtgtgtgccagatcgtggccaacagtaccaagggcgacttgcagtcactacgcatgggctcccttgtctggcatgggcatcggcgcaagctaaggcactgagcaagcatcaagacttcaattccgccgtgcaactcgtggagaacttttgccgcaatccagatggggacgaagaaggtgtgtggtgctacgtggccggcaagccaggcgactttggatattgcgatctgaactattgcgaagaagcagtcgaggaagaaactggagatggtctggacgaggatagcgaccgtgcaattgagggacgcaccgcaacttcggagtaccagacgttctttaacccacgtacttttggttccggtgaggctgattgtggactcaggcccctctttgaaaagaagtcgcttgaggataagaccgaaagggaacttcttgagtcctacatagatggacggattgtcgagggaagcgatgcagaaattggaatgtccccgtggcaagtgatgctcttcagaaagtccccacaagaactgctttgtggagcttctcttatctccgaccgttgggtcttgaccgccgcacattgtttgctttaccctccctgggacaagaatttcaccgaaaacgaccttttggtcagaattggcaagcactcccgtacccgctacgagagaaatatcgaaaagatttcgatgctcgagaagatctacatccacccgagatacaactggcgagaaaatctggatagagacattgcacttatgaaacttaagaaaccagtggccttttcggactacatccatcctgtgtgtctgcctgatagagagactgcagcgtcattgctccaggcaggctacaagggacgcgtgaccggatgggggaacctgaaggaaacctggaccgcaaacgtgggtaagggacagcctagcgtcctgcaggtcgtgaacctgccgatcgttgaacggcctgtgtgtaaggactcaacgcgaattcgaatcaccgataacatgttttgtgccggttacaagccagatgaagggaagagaggagatgcatgtgaaggagattccggaggaccatttgtcatgaagtccccatttaacaaccggtggtaccagatgggtatagtgtcgtggggtgagggttgtgaccgcgatggtaaatacggcttctacacgcatgtgttccgacttaagaaatggatccagaaagtgatagatcaattcggtgaa

SEQ ID NO: 10205 - DNA, 1866 bp, Artificial Sequence
  derived and/or modified sequence
atggcccacgtgcgaggcttgcaattgcctggatgcctggcccttgctgccctttgctccttggtgcacagtcaacacgtcttcttagccccccagcaggcgaggagcctattgcagcgggtgcggagagcaaatacattccttgaggaagtcaggaagggtaacctcgaaagagaatgtgtcgaggagacctgtagttatgaggaagctttcgaagctctcgaatcttccacagcaacagacgttttctgggccaaatataccgcctgcgagacagcccggacaccgcgggataagttggcagcatgcttggagggcaactgcgccgaaggacttggaactaactatagagggcacgtgaatataactagatcgggcatagagtgccagttgtggcggtcccgttatcctcacaaacctgaaatcaacagcactacacaccctggcgccgatctgcaagagaacttttgcaggaatccagatagcagcactaccggcccttggtgctacactacagatcccaccgtgcgcagacaggagtgttcgatcccagtatgcggacaggaccaagttacagttgctatgactccgaggtcagagggtagttccgtgaatctgagtccgcctctcgagcaatgtgtgcctgaccgtgggcaacagtaccaggggcggctagctgtcacgacacacggcctgccatgcctggcatgggcatccgctcaagctaaagcactgagcaaacatcaggattttaacagtgctgtccaattggttgagaatttctgtaggaacccggacggagatgaagaaggagtatggtgctacgtagctgggaagccaggcgattttgggtactgcgacctgaactactgcgaagaggcagtggaggaagagacaggcgatgggctggacgaggatagtgaccgggccatcgaaggccggaccgctaccagcgagtaccagacattttttaaccctcgaaccttcgggtcaggagaagctgattgcggactacggccgcttttcgaaaaaaaatccctggaggataagacagagagggaactgttagagtcatacattgacggccggatcgtagaggggtcagacgccgagattggtatgtccccttggcaggtaatgctgtttcgtaaatccccccaagagttgctgtgcggtgctagtttaatatctgaccgatgggtgctgactgctgcccactgtcttctgtatccaccttgggataagaacttcaccgaaaatgaccttcttgtccgaattgggaaacactctaggacgagatacgaaaggaacatagagaaaatttccatgctggagaagatttatattcatcctaggtacaactggcgcgagaatctcgaccgtgatatcgcactgatgaagctcaagaagccagtggcattcagcgattacattcaccccgtttgcttgccagatcgggaaactgcggccagcctattgcaggctggttataaggggcgggtgaccggctggggcaacttaaaagagacctggacggcaaatgtaggaaaagggcagccatctgtgctccaggtcgtaaatctgccaatcgtggagagacctgtttgtaaggactcaactcgtattcgtataaccgacaacatgttctgcgcgggctacaagcctgacgagggcaagagaggcgatgcttgcgagggggattctggtggcccattcgtgatgaaatcacctttcaataaccgctggtaccagatgggtatcgtcagctggggcgaggggtgcgaccgggacggcaagtacggcttttacacccatgtatttcgtcttaaaaagtggattcagaaagtgattgatcagtttggagag

SEQ ID NO: 10206 - DNA, 1866 bp, Artificial Sequence
  derived and/or modified sequence
atggcgcatgtccgcggactgcagctgcccggttgcctggcactagccgcgctttgctcactcgttcattctcaacacgtcttcttggctccccagcaagcgcggtctctgcttcagcgcgtccgtagggctaatacctttctggaggaagtgaggaagggcaaccttgagcgtgagtgcgtcgaggagacctgttcctatgaagaggctttcgaggccctggagagtagtaccgccaccgacgtgttctgggcaaagtacacggcctgtgagaccgctagaaccccccgcgacaaattggccgcctgcctggagggtaactgcgccgagggactgggtaccaactaccgcggtcatgtcaacattacccgtagtggtatcgaatgccagctgtggcgctcacgatacccgcataagcctgagatcaactcgacgacgcacccgggagccgacttacaggagaacttctgccgtaatcccgactcttcgaccactggaccctggtgctacaccactgacccaacggtccgtcgtcaagagtgttcgatcccggtgtgcggtcaagaccaggttacagtcgccatgacacctagatcagagggcagctccgtgaatctctccccacccctggaacaatgcgttcccgatagaggccagcagtaccagggcagactggccgttacaacccatggcctcccctgcctggcttgggcgagtgctcaggccaaggcccttagcaaacaccaggacttcaactcggccgtccagctggtggagaacttctgccgcaaccccgatggcgatgaagagggagtgtggtgttatgtcgccggcaagcccggtgacttcggttactgcgatcttaactactgtgaggaggccgtcgaggaggagactggagacggactcgacgaggacagcgacagagctatagagggcaggacagctacctccgagtaccagacctttttcaacccccgcaccttcggtagcggcgaggctgattgcggtcttcgtccccttttcgaaaaaaagtccctggaggacaagaccgagagggagctcctcgagagttacatcgacgggcgcattgttgagggctccgatgctgaaattggcatgtccccctggcaggttatgctattccgcaagtccccccaagagctcctctgtggggcctctctgatttccgaccgttgggtcctgacggctgcgcattgcctgctctaccctccgtgggataagaatttcaccgagaacgacctgctagttcgtattggcaagcattccaggacccgctacgagcgtaacatcgagaaaatctcgatgctggagaagatctatatccatcccaggtacaattggcgcgaaaacctcgatcgcgacatcgcccttatgaagctgaagaagccggtagccttttcggactacatccacccggtgtgcctgccggatagggaaaccgccgcctctcttcttcaggccggctacaagggccgagtaacaggctgggggaacctcaaggagacctggaccgctaacgtcggtaagggacagccctccgtcttgcaggtcgtcaatctgcctatcgttgagcggcccgtctgcaaggattctacccggattcgcattaccgataatatgttctgcgcgggttataagcctgatgaaggaaagcgcggagacgcttgcgaaggcgattctggtggaccctttgtcatgaagtcccctttcaacaaccgatggtaccagatgggcatcgtctcctggggtgagggttgcgaccgggacggtaagtatggtttctacacgcacgtgttccggcttaagaagtggatccaaaaggtcatagaccagttcggtgag

SEQ ID NO: 10207 - DNA, 1866 bp, Artificial Sequence
  derived and/or modified sequence
atggcacacgttagaggactccagctgccaggatgtctggcactggcagccctgtgcagtctagtccattcgcagcacgtgttcctagctcctcagcaggcacggtccttgctccagcgagtgcggcgggccaatacattcctcgaggaagttagaaaagggaacctagaaagggagtgtgtggaggaaacatgctcttatgaagaagcatttgaggccctagaaagttcgacagcaacagatgtattttgggctaagtatacagcctgcgaaacagcaaggactccacgggataagcttgctgcttgcctcgaaggaaactgtgcagaagggcttgggactaactacagaggacatgttaatattactaggtctgggatagagtgtcagctttggaggtctcgctaccctcataagccagaaatcaactcgacaactcacccaggggctgatcttcaggaaaacttttgtcggaatcccgattcatctactacagggccctggtgttacactacagatcccacagtgagacggcaggaatgttcaataccagtatgtgggcaggatcaggttactgtggcgatgactcctaggtccgaaggatcctccgtgaatttatcacccccactagaacagtgcgtgcccgatcgagggcagcagtaccagggaagactcgcagttactactcacggactaccatgtctagcatgggcttctgcccaggccaaagctttaagtaagcaccaggacttcaactccgccgttcagttagtagaaaatttttgccgcaatcccgatggagacgaggaaggggtgtggtgttatgtggctgggaaacctggggattttgggtattgcgatttaaattattgtgaggaagcggtggaagaggaaactggggatggattagatgaagatagtgatcgcgccatagaagggcgcactgcaactagtgaataccagactttcttcaacccaagaacattcggatctggagaagccgactgcgggttgcggccactctttgaaaaaaaatcattagaagataaaacagaaagggaactgcttgagtcatacattgatgggcgaatagttgaaggatctgacgcagaaattggaatgtctccttggcaggtaatgctgttccgaaagtctccacaggaactgctttgtggggcctcactcatatctgaccggtgggtgctgacagcagcacactgtttgctgtatcctccctgggataaaaacttcactgaaaacgatctgctcgttaggattggaaaacattcccgaacacgatatgaacgcaacatagagaagatatcaatgctagagaaaatatacattcaccctcgatataattggagggaaaaccttgaccgggacattgcactgatgaagctgaaaaaacccgtagcattttccgactatattcatcctgtctgtctccctgacagagaaacagcagcctctctcctgcaggctgggtataaaggaagggtaactgggtgggggaaccttaaagaaacttggacagccaatgtgggaaaagggcagcctagtgtactccaggttgtgaatttacccatcgtcgagcgcccagtatgtaaggactctacacgaataagaattactgacaacatgttttgtgcggggtataaacccgatgaaggaaaaaggggagatgcctgtgaaggggactccggagggcctttcgtaatgaagtccccctttaataatagatggtaccagatggggatcgtgtcatggggggaggggtgtgatagggatgggaaatacggattctatactcacgtgttcaggctcaagaagtggattcagaaagtgatcgatcagtttggagaa

SEQ ID NO: 10208 - DNA, 1866 bp, Artificial Sequence
  derived and/or modified sequence
atggctcacgtgcgcggcctccagttgccaggatgcctggccctggcggcgctgtgcagcctggtccattcacagcatgtgttcctggcaccgcaacaggctcggagcctgctgcagcgcgttcgacgggccaatacgttcctcgaagaggttaggaaagggaaccttgaacgggagtgcgtagaggaaacctgctcctatgaggaggcattcgaggctctggagtcctcaaccgcaaccgacgtgttctgggccaagtacactgcatgtgagaccgcacgcacgccacgcgataaactggcagcctgtcttgagggcaactgtgcggagggtttaggcaccaactatcgtggccatgtgaacattaccagaagcggcattgagtgccagctgtggcgctcacgttacccgcacaagccggaaattaacagcacaactcacccaggagccgacctgcaagagaatttctgccgcaacccagatagcagcacaacgggcccctggtgttacactacggatcctaccgttaggcggcaggaatgttcaatcccggtgtgtggccaggatcaggtgaccgtggccatgacccctcgatccgagggtagcagcgtgaacctgagcccgccattggaacagtgcgtccctgataggggccaacagtatcaaggtcgcctcgcggtcaccactcacggcttgccatgtctcgcgtgggcatccgcgcaagcgaaagcgctgtcaaaacaccaggactttaactccgctgtgcaactggttgagaatttctgtcgaaacccggatggggatgaggaaggtgtgtggtgctacgttgcaggtaagcctggcgattttggttattgtgacctgaattactgcgaggaagcagttgaagaagagacaggcgacgggctggatgaggacagcgatagggctattgaaggacgcaccgccacttcagagtaccaaactttctttaacccacgcacttttggcagcggggaagccgattgcggcctcaggccgctttttgaaaaaaaatcgctggaggataaaaccgagagggagctgctggagagctacatcgacggtagaatagtggagggtagcgacgcagaaattggtatgtctccgtggcaggtgatgttgttccggaagagtcctcaggaacttctgtgcggagccagcctgatcagcgatcgttgggttctgacggctgcgcactgcctgttgtacccgccatgggacaagaactttacggaaaacgacctcttagtacgcattggaaagcacagccgcacgcgctacgagcgtaacatcgaaaaaatatctatgctagaaaagatttatatccatccgcggtacaactggcgagaaaaccttgaccgagatatcgcactgatgaagctgaagaagccggtcgctttttcagactatatacatccagtttgtttacctgaccgggaaacagccgctagcctcctacaggctggatacaagggccgcgtgacgggctggggaaatttgaaggagacctggaccgcgaatgtcggtaagggtcaaccatccgtcctgcaagtggttaacctgccgattgttgaacgcccggtttgcaaagatagtacgcgtatacgaatcacggacaatatgttttgtgccggttacaagccggacgaaggtaagcgaggtgacgcgtgcgaaggtgatagcggcggcccgttcgtgatgaagagcccgtttaataaccggtggtatcagatgggtatcgtgagctggggcgagggctgtgaccgcgacggtaagtacgggttttacacccacgtctttcgtctgaaaaaatggatccaaaaggttatcgaccagtttggtgag

SEQ ID NO: 10209 - DNA, 1866 bp, Artificial Sequence
  derived and/or modified sequence
atggcacacgtgcgggggctccagctgcccggctgccttgccctggcagccctgtgctccctcgtacactcacaacatgtcttccttgcacctcagcaagcacgatctttgttgcaaagagtgcgaagagcaaacacgttcttggaagaagtgcggaaaggtaatttggagagagaatgcgtggaagaaacctgcagctacgaagaggccttcgaggctctcgaaagtagtaccgcaactgatgtcttctgggctaagtacacagcttgtgaaactgccagaacccctcgcgacaagctcgcagcctgtcttgagggtaattgtgccgagggacttggaacgaattatagaggacacgtgaacatcaccagatcagggattgaatgtcagctgtggagaagtcgctatccacacaagccagaaattaactctacgactcaccccggtgcagacctccaggagaacttttgtcggaatcctgatagcagtaccacagggccatggtgctacacgacggacccaacggtgagacgccaggagtgttcaatccctgtatgcgggcaagatcaagttacagttgctatgacaccacgctctgagggctccagcgtgaaccttagtccgcccctggaacagtgtgtacctgatcggggccaacagtaccagggaagattggccgttaccacacatggcttgccttgcctcgcttgggcctcagctcaggccaaggccctttctaaacatcaggacttcaacagtgcagtgcaactggtagagaatttttgtcggaacccagacggggatgaagaaggtgtctggtgttatgtggcggggaagccaggcgatttcgggtattgtgacctgaattactgtgaagaggcggtggaagaagaaacgggggatggcctcgacgaagattctgaccgcgctatcgaaggtcggacggcgacctccgaatatcagacgtttttcaatcctcgaacattcggtagtggggaggcagactgtggcttgaggcctctcttcgagaagaagtcactggaggataaaacagagagagagctgcttgagtcctacatcgatgggcgaatcgttgagggctcagatgctgagattggcatgagtccgtggcaggtgatgttgttccgcaagtcaccacaggaacttctgtgcggggctagcttgatcagtgacagatgggtcctgaccgcggcacactgtcttttgtatccaccttgggacaaaaatttcaccgaaaatgatctcctcgttagaatcggcaaacattcacggaccaggtacgaacgaaacatcgagaagatctccatgctggagaagatctacatccatcctcgctacaattggagagagaacctggacagagacatagctctcatgaagctgaaaaaacccgtggctttctcagactatattcaccccgtgtgcttgccagatagggagaccgctgcctctctgcttcaggcagggtataaaggccgggttactggatgggggaacctcaaggaaacctggaccgcaaatgttgggaagggtcagcctagtgtactccaggtcgtgaacctgccaatcgtggagcgaccagtgtgtaaggattcaacccgcattcgaatcaccgataatatgttttgcgctggatacaagcccgacgaaggcaagagaggcgatgcttgtgaaggcgactccggcggaccattcgttatgaagagcccattcaacaataggtggtaccagatgggaattgtgtcctggggagagggttgtgatagagatggcaaatacggcttttatacacacgtgttcagactcaagaagtggattcagaaggtgatcgatcagttcggggag

SEQ ID NO: 10210 - DNA, 1866 bp, Artificial Sequence
  derived and/or modified sequence
atggctcacgtcaggggactccaactgccaggctgcctcgcacttgcggccctgtgctcactggtgcacagccagcacgtgttcctggccccacaacaggcaagaagcctgctccagcgcgtccggagggccaatacatttctggaagaggtgagaaaaggaaacttggagagagagtgtgtggaggagacgtgcagttatgaagaggctttcgaggcactggaatcgtctacagccactgacgtattctgggccaagtataccgcttgtgagacagcgcgcacaccacgggataagctggccgcttgtttggaaggaaactgcgccgaaggcctgggcacaaactataggggtcacgtgaacattacccgcagcggcattgagtgccaactgtggcggagcaggtacccgcataagcccgagattaacagtactacccatccaggggcagacctccaggagaatttctgcaggaacccggacagtagcacaacagggccatggtgctatacaacagaccctacagtgagaaggcaggagtgctctattcccgtgtgcggacaagatcaggtcacagtagcgatgactccccgttcagaaggatcttcagttaatctctcaccccctttggagcagtgtgtgccagaccgcgggcaacaataccagggtagattggctgttactactcatggcctcccatgtcttgcttgggctagcgcccaggcaaaagcccttagtaagcaccaagacttcaactccgcagtgcaactggtggagaacttttgcagaaaccctgatggcgatgaagaaggcgtgtggtgctatgtggccggaaaaccaggtgatttcggatattgtgacctcaattattgcgaggaagctgtcgaagaagaaaccggagacggtctggatgaagacagcgatagagctatcgaaggtagaacagctaccagtgaatatcagacattctttaaccctaggacatttggctctggagaagccgactgtgggctgcgcccgctgtttgaaaaaaaatccctcgaagacaagacagagcgagagctcctcgagtcttacattgatggacgaattgtagagggaagcgacgctgaaatcggaatgtctccgtggcaggtgatgctgtttcggaaaagcccccaagaactgttgtgcggtgctagcctcatctctgatagatgggtcctcacagcagctcattgccttctgtacccaccctgggacaaaaattttacagaaaacgaccttttagtgcgcatcggcaaacatagtagaacccgctatgagagaaatatcgaaaagattagcatgctcgagaaaatctacatccacccaagatacaattggagggaaaacttagacagggacatcgctcttatgaaactgaaaaagcccgtggctttcagcgattatatacaccctgtgtgtctccctgacagagagacagccgcatcacttctgcaggccggttacaagggcagggttacaggctgggggaatctgaaggaaacttggacagcaaacgtgggaaaaggccaaccgagtgttttgcaggtggtgaacctgccgatcgtggaaaggccagtatgtaaggatagcacacgcatccgaattactgacaacatgttttgtgctggatacaaaccagatgagggaaaacgcggagacgcttgtgagggagacagcggcggaccctttgtgatgaagagtcctttcaataatcgctggtatcagatgggaattgtgagctggggcgaaggatgtgatagggatggaaaatacggattctatactcacgtgttcaggttgaagaagtggatccaaaaagttatcgatcaattcggcgaa

SEQ ID NO: 10211 - DNA, 1866 bp, Artificial Sequence
  derived and/or modified sequence
atggcgcacgtgcgagggcttcagcttcccggttgtcttgcactcgcggcactctgctcgctggtgcattcgcaacatgtgtttcttgccccacaacaggcaagatcgttgctgcagagggtgcgccgagcgaacaccttccttgaagaggtgcgcaagggaaacctggaacgtgagtgtgtggaagaaacttgttcttacgaagaggcattcgaggcactggaatcgtccaccgcaaccgacgtcttttgggcaaagtacactgcatgcgaaaccgcacgcaccccgagagataaactggcagcatgcctcgaaggtaactgcgccgaaggcctgggtacgaactaccgtggacatgtgaacattactcgctcgggtattgaatgtcagctctggcgctctcggtacccacataagccagaaatcaattccacgacccacccgggagcagatttgcaggaaaacttttgtcgtaaccctgattcctccactaccggaccttggtgctacaccactgaccctactgtgcgccgtcaagaatgtagcatcccagtgtgcggtcaagatcaggtgacggtggcaatgactcctcggtcggaaggatcatcagtgaacctgtcaccgcctctcgaacaatgcgtgcctgacaggggccaacaataccaggggcggctcgcagtgactacccatggactgccttgccttgcttgggcttcggcacaggccaaagcactctccaaacatcaagactttaacagtgcagtgcaactcgtcgaaaacttctgcagaaatccagatggagatgaggagggagtgtggtgctacgtggccggaaagccaggggattttgggtattgtgatctcaactactgcgaggaggcagtggaagaggaaaccggggatgggcttgatgaggattcggatcgggcaatcgaaggccggactgccaccagcgaataccagacctttttcaaccccagaactttcggttccggcgaagctgactgtggacttagaccactttttgaaaagaagtcacttgaagataaaaccgagagagaactcctcgaaagctacattgatgggaggatcgtggaagggagcgatgccgagatcggaatgagcccgtggcaggtgatgctttttcgcaagtcgcctcaagagcttctgtgtggtgcaagcctgatcagcgatcggtgggtgctcacggccgcacattgcctcctgtacccaccttgggataagaacttcaccgagaacgaccttctggtgcggatagggaaacatagccgtactcgctacgaacgcaacattgagaagattagcatgttggagaagatatacattcatcctcgttacaactggcgggagaaccttgatcgcgatattgcactgatgaagctgaagaagccagttgcgttttcggactacatccatcctgtgtgccttcctgacagagaaaccgcagcctcgctgcttcaggcgggatacaaggggcgggtgactggatggggaaacctgaaggaaacttggactgccaatgtgggaaagggtcagccctccgtcctccaagtcgtgaatctgccaattgtcgaacgaccagtgtgcaaggatagcacccgcataagaattactgacaatatgttctgtgccggttacaaaccagacgaagggaagagaggagacgcgtgtgaaggggatagcggtggtccctttgtcatgaaaagcccttttaacaacagatggtaccaaatgggtattgtgtcctggggagagggatgcgaccgtgatggaaagtatgggttctacacccacgtgttcagacttaagaaatggatccaaaaggttattgaccaatttggtgag

SEQ ID NO: 10212 - DNA, 1866 bp, Artificial Sequence
  derived and/or modified sequence
atggcccatgtgaggggcctgcaacttcctgggtgcttagccttagccgccctttgtagcctggtccactcacaacacgtatttctcgccccccagcaggcacggtctctgctgcagagagttagaagagctaacacattcctggaagaagtgagaaagggaaatctggagagagagtgtgtggaggaaacctgtagctatgaagaggcgttcgaggccctggagtcctcgactgctacggatgtcttctgggcgaagtatactgcttgcgagaccgccaggacaccaagagacaagttagccgcctgtcttgaggggaattgcgcggaagggctgggaactaactaccgagggcacgtgaatattacgcgcagtggcattgagtgccaactgtggcggtctagatatccacacaaacctgagatcaactccactactcacccgggcgccgatcttcaggagaatttctgccgtaatcctgactcgtctacaactggcccatggtgttacaccacagaccccaccgttcgcaggcaggaatgttctatccccgtgtgcggtcaagatcaagtgacagtcgctatgactcccaggagcgagggatccagtgtcaatttaagccccccacttgaacagtgcgtgcccgacagaggtcagcaataccagggccggcttgctgtgaccactcatgggctcccttgtctggcatgggctagcgcacaggccaaggcgctcagcaaacaccaggatttcaatagcgcggtccaacttgtggaaaacttttgtcggaatcctgatggagacgaagaaggagtgtggtgctacgtggctgggaaacccggcgactttgggtactgcgacctgaattactgcgaggaagccgtcgaggaggagacaggtgatggactggatgaggacagcgaccgggcaatcgaagggcggaccgccaccagcgagtaccagacattcttcaacccaaggacatttgggagtggggaggcggactgcggactgaggccgctgttcgagaagaaaagcctagaggataaaaccgaaagagaattattggaaagctacattgacggtaggatcgttgaaggttctgatgccgagataggaatgtccccctggcaagtgatgctatttaggaagagtccgcaagagctactatgtggagcttcactaatcagcgaccgttgggtgctcacggcggcacattgcctgctgtaccctccttgggacaagaattttacagagaacgatctactcgtgcgaatcggcaagcactctcgcacgcgctacgagagaaatattgagaaaatatccatgctggagaaaatttatatacacccacgatataactggcgcgaaaacctcgatagagacatcgctttgatgaagctgaagaagcccgtcgccttctcagactatatccacccggtgtgtttgcctgaccgcgaaacggccgcctcgctcttacaggccggatacaagggtcgggtgacgggttggggcaacttgaaggagacatggaccgcgaatgttgggaaagggcagccatccgtattacaagtggtcaacctgccaatagtggagcgtccggtttgcaaggactctactagaattagaattacagacaacatgttttgcgccgggtacaagcctgacgagggcaagagaggggatgcctgcgaaggcgattcaggcggcccatttgtcatgaagtctccctttaacaatcgatggtaccagatgggtattgtgtcgtggggggaggggtgtgaccgagacggaaagtatgggttctatacccacgtatttcggctcaaaaaatggattcagaaagtgattgatcagttcggggaa

SEQ ID NO: 10213 - DNA, 1866 bp, Artificial Sequence
  derived and/or modified sequence
atggcacatgtccggggcctgcagctgccgggttgcctggccctggctgcgctgtgttcactggtgcactcacaacacgtctttcttgcacctcagcaggcgagatcactcctgcagcgggtgcgcagggcgaatacctttctggaggaagtccgcaaaggaaacctcgagcgggaatgcgtggaagaaacttgttcatacgaagaggcttttgaggcactggagtcgagcaccgcgactgacgtcttttgggcaaaatacactgcttgcgagactgccagaaccccccgcgacaagctcgcggcctgcctggaaggaaactgtgccgaaggccttgggaccaactaccgcgggcatgtgaacattacccgctccggaatcgaatgtcaactgtggcgctcgcgttatccacacaagccggagatcaactccaccacccatcccggagccgacctgcaagagaatttctgtcgcaatcccgactcctcgaccacgggaccatggtgctacacgactgaccctactgtgcgccgccaagaatgcagcattccagtctgtggacaagaccaggtgactgtcgcgatgaccccaaggtccgagggctctagcgtgaacctgagcccgccgctggaacagtgcgtcccggatcggggacaacaataccaggggcgtttggcggtaactacccacggtctgccgtgcctcgcatgggcgagcgcacaagccaaagcactgtccaagcatcaggacttcaacagcgccgtgcaactcgtggaaaacttctgccgcaatccggatggagacgaagagggagtgtggtgttacgtggctggcaagcccggagattttgggtattgcgacctcaactactgcgaagaggcggtcgaagaggagactggagacggactcgatgaggattcagatagagcaatcgagggccgcaccgccacctctgaataccaaacctttttcaacccacgcaccttcgggtcgggggaagccgattgcggtttgcgcccgctcttcgagaagaagtcgctggaagataagaccgaacgcgaactcctggagtcgtacatcgacggacggattgtggagggcagcgacgccgaaatcggtatgtccccctggcaggtgatgctgttccggaagtcccctcaggagctgctctgcggggcatcgctgatttcggaccggtgggtgctgactgctgcgcactgcctgctgtacccgccgtgggacaagaacttcaccgagaacgatcttctcgtgcgtattggaaagcactcaaggactaggtacgagcggaatatcgaaaagatttcaatgctggagaagatctacattcaccctaggtacaattggcgggagaatctggacagagatatcgccctcatgaaacttaagaaacctgtcgctttctcggactatatccatccggtgtgcctcccagatcgggagactgctgccagcctgctgcaagcgggctacaagggccgcgttaccggctggggaaatctgaaggagacgtggaccgcgaacgtgggcaagggacaaccttctgtgcttcaggttgtgaatctgccgattgtcgaaagaccggtctgtaaggactcgaccagaatacgcatcacggacaacatgttctgcgccggatacaaaccggacgaaggaaagagaggcgatgcatgcgaaggagattccgggggccccttcgtgatgaaatcgccgttcaacaaccgatggtaccaaatgggaatcgtctcgtggggagaaggatgtgacagggacggaaaatacggtttttacactcacgtattccgtctcaaaaagtggatccagaaggtgatcgaccagttcggggag

SEQ ID NO: 10214 - DNA, 1866 bp, Artificial Sequence
  derived and/or modified sequence
atggcccacgtgcgcggcttgcagctacctggatgtcttgccctagctgccctatgctccctggtccacagtcagcacgtatttttagctccgcagcaggcaaggtctttactgcagagagtgcgccgtgccaatacgttccttgaggaggtgaggaaaggcaacctggaaagagaatgcgtggaggagacatgctcctatgaagaggccttcgaggccctcgagagttccacagccacggatgttttttgggctaagtatacagcctgtgaaaccgcaagaactcctagggacaaacttgcagcctgcctcgagggtaattgcgcagaagggctcggcactaactaccggggacatgttaatataactaggagcggtattgaatgccagctgtggcgctcccggtacccccataagccggaaataaacagcactactcatcccggcgcggatctccaggagaacttttgtaggaacccggacagtagtacaacagggccatggtgctacacgacagatcccaccgttaggcgccaggagtgtagcattcccgtctgcggccaagatcaggttacagtggctatgacaccgagatcagagggatcttccgtgaatctaagtcccccgctggagcagtgtgtacccgatcgcggccagcagtatcaaggacgactggccgtgactacacacggcctgccttgcttggcctgggcatccgcacaggctaaagccctctctaagcatcaggactttaactctgctgtccagcttgtagagaacttttgccgcaacccggacggagacgaagaaggggtgtggtgttatgtcgccggcaaacctggagactttggatactgcgacctgaactactgcgaggaagctgtcgaggaagaaaccggagacggcctggacgaggactcagacagggctatcgaaggacgaacagccacaagcgaataccagacattcttcaatcccagaaccttcggcagcggtgaggctgactgcgggctccgccccctgttcgaaaaaaagagcctggaagacaagactgagagagaactcctggaatcctatatcgatggccgtattgtggagggatccgacgccgagattggaatgagtccctggcaggtaatgctttttagaaaatctccccaggaactcttatgcggagcttcgctgatcagtgatcgctgggtcttaacggccgcccattgtctgctttatcccccctgggacaagaacttcacggagaatgacctcctggttaggattgggaagcacagtagaaccaggtatgagagaaacattgagaagatcagcatgttagagaagatttacatccacccaaggtataattggagggaaaacctggacagagacattgcgttgatgaagcttaagaagccagtcgctttcagcgactatatccaccccgtgtgcctgccagacagagagaccgccgcctcactgcttcaggcagggtataaggggcgcgtgaccggctggggcaacctgaaagaaacttggaccgctaacgtggggaaggggcagccttcagtcctgcaggtggtcaacctgcccatcgtagagcgtccagtttgtaaagattccacacggatacgcatcaccgacaacatgttctgcgcgggctataaacctgatgagggaaagaggggggacgcctgcgagggggactcagggggcccattcgtaatgaaaagcccatttaacaaccgctggtaccagatggggatcgtcagctggggagagggatgtgatagggacggtaagtatgggttttatacccacgtgtttcgtctgaaaaaatggattcagaaggttattgatcagttcggagag

SEQ ID NO: 10215 - DNA, 1866 bp, Artificial Sequence
  derived and/or modified sequence
atggctcacgtccgggggctgcagcttccgggttgtcttgcgctcgccgccctctgctccctggtccactcgcaacatgtgtttctggccccacagcaggcccgtagcctgctgcagcgcgtccggcgcgctaatacctttcttgaggaagtccgcaaaggcaacctggagagagagtgcgtggaggaaacctgtagctacgaagaagcattcgaagcactggaatcaagcaccgccactgacgtcttttgggccaagtataccgcttgtgaaaccgcccgcacccccagagacaagctcgcggcgtgtctcgaaggaaactgcgctgaggggctggggaccaactacagaggacacgtgaacatcactcgcagcggaatcgaatgtcagctgtggcggtcgcggtacccgcacaagcctgagatcaactcgaccacccatcctggagccgacttgcaagagaatttctgccgcaacccggactcatccacgacgggaccctggtgctacactacggatccaactgtgaggcggcaagagtgttctatcccggtgtgcggacaggaccaagtgaccgtggcaatgaccccgcgctcagaaggttcatccgtgaacttgtcgccgccgttggagcagtgcgtcccagatagaggacagcaataccaggggcgtctggcggtgactactcatggactgccgtgcctggcctgggcctccgcccaagcaaaagcgctctcaaagcaccaagacttcaactccgctgtgcagctcgtggagaacttttgccggaatcccgacggagacgaggagggagtgtggtgttacgtggcaggaaagccaggggatttcggctactgcgacttgaactactgcgaagaagctgttgaagaagagactggtgacggactcgacgaggactctgatcgggccattgaaggccggactgcgacgagcgaataccaaactttcttcaatccgcgcaccttcggttcaggtgaggcggattgcggcctcagaccgctcttcgagaagaaatccctcgaagataagaccgaacgggaactgctggagtcatacatcgacggccgcatcgtggaagggtcggatgccgaaattggcatgtccccctggcaagtgatgctctttagaaaatcgccacaggagctgctttgcggcgcctccctgatttccgaccgctgggtgctgactgcagcgcattgcctcctgtacccaccttgggacaagaacttcaccgagaacgacctgcttgtgcgaatcggaaaacactcgcgcactaggtacgaacggaatattgagaagatcagtatgctcgaaaaaatctatatccatccgagatacaattggagagaaaatttggaccgggacatcgcgctgatgaagctgaagaagcctgtggcgttctcggattacatacaccctgtgtgcctgccagatcgcgaaactgctgcaagcctgctccaggccggttacaagggcagggtcaccggatggggaaacctgaaagagacttggactgcaaatgtcggaaagggacagccgagcgttctgcaagtggtgaacctgccgatcgtcgagaggcccgtctgcaaagattcgacccgaatcaggatcaccgacaacatgttctgcgccggatacaagccagatgaaggcaagcgcggtgatgcctgcgagggagatagcggcggacctttcgtgatgaagtcgccgttcaataaccgctggtatcagatgggaatcgtctcctggggagaaggctgcgacagagacggcaaatacgggttctacactcacgtgtttcggctcaagaagtggatccagaaggttatcgatcagttcggagaa

SEQ ID NO: 10216 - DNA, 1866 bp, Artificial Sequence
  derived and/or modified sequence
atggcccacgtgaggggactgcaactcccgggctgcctcgccctggctgccctgtgttcacttgtgcattcacagcacgtctttctcgccccacagcaagcgagatccctgctccaaagggtccggagagccaacacctttttggaggaagtgagaaaggggaatctggaacgcgagtgcgtggaagaaacttgttcgtacgaggaggcgtttgaggccctggagagcagcaccgccaccgatgtattctgggctaaatacaccgcctgcgagactgcgagaacgccgcgggacaaacttgcagcgtgcctcgaagggaactgtgcagagggcctgggaaccaactaccgcggccatgtgaatatcacgagatccggcatcgagtgccagctctggcgatcacgctacccgcacaagcccgagatcaattcaaccacccacccaggagccgaccttcaggagaatttctgtcgaaacccggactcatcgactaccggcccgtggtgctacactaccgacccaaccgttcgcaggcaagagtgcagcattccggtgtgcggtcaagatcaggtgaccgtggccatgactccgcgcagcgaaggctcctcagtgaacctgagccccccgctcgaacagtgcgtgccggatagaggtcaacagtaccagggacggctggccgtgaccactcacggactgccttgcttggcatgggccagcgcgcaggcaaaggcccttagcaagcaccaagacttcaattcggccgtgcaattggtggagaacttctgtaggaacccagacggagatgaggagggagtgtggtgctacgtggcaggaaagcctggcgatttcggatactgtgacctcaattactgtgaagaggcagtcgaagaagaaaccggagacggactggacgaagatagcgatagagcgatcgagggaaggactgcgacttcggaataccaaactttcttcaatcctcggaccttcggctctggcgaagcggactgcgggcttcgccccctgttcgagaagaagtccctggaggacaaaactgagcgcgagctgctggaatcgtacatcgacggccgcatagtggaaggcagcgacgccgaaatcggaatgtccccatggcaagtgatgctgttcagaaaatcaccgcaggaattgctgtgtggagcaagcctcatctcggacagatgggtgctgacggccgcccattgcctgctctacccgccctgggacaaaaactttactgaaaacgatctcctcgtgaggattggaaaacattcaagaacccggtacgagcgcaatatcgagaagatctcaatgttggagaagatctacattcatccgcggtacaactggcgggagaacctcgaccgcgacatcgctctgatgaaactgaaaaagccagtggccttctcggactacatccacccggtgtgcctccctgaccgggaaactgccgcctcgctcctgcaggcgggctacaagggacgggttaccggatggggaaacctgaaggaaacttggactgccaacgtgggcaagggacaaccatcggtcctccaagtggttaacctgcctatcgtcgagcgcccggtctgcaaagattcgactcgcattagaatcaccgacaacatgttctgcgcgggatataagcctgatgaggggaagcgaggagacgcatgcgagggagactcgggaggacctttcgtgatgaaatcgcctttcaacaaccggtggtaccagatggggatcgtgagctggggcgaaggatgcgatcgagacggaaagtatggcttctacactcacgtgttcagactcaagaaatggatccaaaaagtcattgaccaattcggcgag

SEQ ID NO: 10217 - DNA, 1866 bp, Artificial Sequence
  derived and/or modified sequence
atggcacatgtgagggggctccagctgcctggatgtttggcgctggcggcgctttgttcactcgtccatagccagcacgtgttcttggccccgcaacaagcgcggagcttgttgcagcgtgtgcggcgggccaacaccttcctcgaggaggtgcgaaaggggaacctcgagagggaatgcgtcgaggaaacttgtagctacgaagaggcattcgaggcgctggagtcatccaccgctacggacgtgttctgggccaagtacacggcgtgcgagactgcccgcaccccgcgcgataagctcgcggcatgcctcgaagggaattgcgcggaaggactggggaccaactaccgaggccacgtgaatatcactcgctctggcattgaatgtcagttgtggcgctcgcgctacccccacaaaccggagataaactcaaccactcatccaggagcagatttgcaagagaacttttgtcgcaaccctgactcatcgaccaccgggccttggtgctacaccaccgacccgaccgtgcggcgccaggagtgctcgattccggtgtgcgggcaggaccaggtgactgtggccatgactcctcggagcgagggctcgtcggtgaatctctcaccaccattggagcagtgtgtccctgacaggggacagcagtaccagggacggctcgccgttacgacccacgggctgccatgccttgcctgggcctcggcgcaagcaaaagccctgagcaagcaccaagacttcaattcagctgtccagctggtcgaaaacttctgccgcaacccggacggcgacgaagaaggcgtctggtgttacgtggctggcaagccgggagacttcggatactgcgatctcaattactgcgaagaagcggtggaagaagaaaccggagatgggctggatgaggactccgaccgggcaattgaagggagaactgccacttcagagtaccaaaccttctttaatccacggaccttcggatcaggggaagcagactgtggactgcgtccactgttcgaaaagaagtcgctggaggacaaaactgaacgggagttgttggaatcctacatcgacgggagaatcgtggagggttcggacgcagaaatcggaatgtccccttggcaagtgatgctgttccgcaagtcaccacaagaactgctgtgcggagcttccttgatctccgacagatgggtgctgaccgccgcgcattgcctcctttacccaccttgggataagaacttcaccgagaacgacttgctcgtgagaatcgggaagcactcccggacgcgctacgaaagaaatatcgaaaagatctcgatgcttgaaaagatctacatccacccccggtacaattggcgcgaaaacctggacagagatatcgccctgatgaaactgaaaaagccggtggccttttcggattacatccacccggtttgcctgccggaccgcgaaactgccgcttccctgctgcaggccggatacaagggacgcgtcactggttggggaaatctgaaagaaacctggactgcgaacgttggaaagggccagccgagcgtgcttcaagtggtgaacctgcccatcgtcgagcgcccggtgtgcaaggattccacgaggatccgcatcaccgataacatgttttgcgcgggatacaagcctgatgaagggaagcgaggagatgcatgcgagggagactcgggcggccccttcgtcatgaagtccccattcaacaaccggtggtaccagatgggaatcgtctcttggggagaaggatgcgatcgcgacggaaagtatggtttctatactcatgtttttcgcctcaaaaagtggatccagaaggtcatcgaccagtttggcgag

SEQ ID NO: 10218 - DNA, 1866 bp, Artificial Sequence
  derived and/or modified sequence
atggcgcatgtgcgcggcctgcagctgccgggatgcctggcgctcgccgcgctctgcagcctggtgcactcccagcacgtgttcctggcaccacaacaggctagaagcctgttgcaacgcgtgcgccgtgccaacacttttctcgaagaagtgaggaagggcaaccttgagcgcgaatgtgtggaggagacgtgttcctacgaagaagcattcgaagctctcgagtcctcaactgcaaccgacgtattctgggccaaatacaccgcgtgtgaaaccgcgcgcaccccgcgtgacaaactcgccgcttgtctggagggaaactgcgcagaaggactcggaaccaattaccggggacatgtcaacatcactaggtcagggatcgaatgccagctctggcggagccgctacccccacaaacccgaaatcaacagcactacccacccaggcgctgacctccaggaaaacttctgccgtaaccctgattcgagcaccaccgggccgtggtgttacaccaccgatcccaccgtccgccggcaggagtgctcgatcccggtctgcggccaggaccaagtgactgtggcaatgaccccaaggtcggaagggagctccgtgaatctgtcgccgccattggaacagtgcgtgccggatcggggtcaacagtaccaggggcggctcgcggtgaccacccacggcctgccttgcctcgcctgggcctcagcccaagcgaaggccctctccaagcaccaggactttaacagtgcggtccagctggtggagaatttctgcaggaacccggatggggatgaagagggagtgtggtgctacgtcgcaggcaagcccggggatttcgggtactgtgatctcaactactgcgaggaagccgtggaagaggagactggcgacgggctggacgaggactccgatagagccatcgaaggcaggacggccacctcggaataccagactttctttaacccgcgcacttttgggtcaggggaagcagattgcggactgcggcccctgttcgagaaaaagtcactggaggacaagactgagagagaactgctcgaaagctacatcgatgggcgcatcgtggaagggtctgacgccgaaattggaatgtccccgtggcaggtgatgcttttccggaagtcgccgcaagagctgctgtgtggagcatcgctgatctcagacagatgggtcctgaccgccgcgcactgtctgttgtacccgccgtgggacaagaatttcaccgaaaacgatttgctcgtgagaattggtaagcactcgcggacgagatacgagagaaacatcgaaaagatttccatgctggagaaaatctatatccatccgcggtataactggcgcgaaaatctcgaccgcgacattgccctgatgaagctgaagaagccggtcgccttttcggattacatccatcccgtgtgcctcccggaccgcgagactgcggccagcctgcttcaagccggatacaaagggcgggtcaccggatggggcaatctgaaagaaacttggaccgctaatgtgggaaaaggtcagccttcggtcctgcaagttgtgaatttgccgatcgtcgagcggccggtgtgcaaggattcaaccagaatccgaatcaccgacaacatgttctgtgcgggatacaagccggatgagggcaagcgcggcgatgcgtgcgagggagactccggaggacctttcgtgatgaagtccccgtttaacaaccggtggtaccaaatgggaatcgtgagctggggcgaaggatgcgacagggatggcaagtacggattctacacccacgtgttcaggctgaagaaatggatccaaaaggtgattgatcaattcggagag

SEQ ID NO: 10219 - DNA, 1866 bp, Artificial Sequence
  derived and/or modified sequence
atggcccacgtgaggggcctccaactccccggatgcctggcactcgctgctctatgttcgctggtgcactcccaacatgttttccttgccccacagcaggctcgctccctgctgcagagggtccggagggctaatactttccttgaggaagtacgaaagggaaacctggaacgcgaatgcgttgaggagacctgcagctatgaagaagcctttgaagctctagaaagtagcaccgcgactgacgtcttttgggcaaagtacaccgcctgtgaaactgcacgaacccctcgggacaaactcgccgcctgtttggaaggcaactgcgctgagggtctggggacgaactatagggggcacgtgaacatcacgagatccggcatcgaatgccagttatggagatcacgttacccccacaaacctgagataaactcaacaacgcatccgggcgctgatctgcaagaaaatttttgtcggaaccctgattcctcgacaacggggccttggtgctataccaccgacccgacagtcagacgacaggagtgttctatccccgtgtgcggtcaggaccaggtcaccgtggcaatgacgcctcgctccgagggttcgtcagtcaatttgagccccccactagaacagtgcgttcctgacagggggcagcagtatcagggtcgcctggccgttacaactcatggactgccatgtctcgcgtgggcctccgcacaggcaaaggcattgtcaaagcaccaagatttcaatagcgctgtacagctggttgagaatttctgccggaatcctgacggcgatgaggagggggtgtggtgttatgtcgcaggcaagcccggcgacttcggctactgtgatctcaactattgcgaagaggctgtggaagaagagacgggggatggactggacgaggactccgaccgggccatagagggaagaacagctacctcagagtatcagaccttcttcaatccaaggacattcgggtccggagaggcagactgcggactgcggcctctgtttgaaaagaagtcactggaggacaagaccgaacgggaacttctcgaatcttacatcgatgggcggattgttgaagggtcagacgccgagattggaatgagcccctggcaagtgatgctgtttcgaaaaagtccccaggagcttctttgcggcgcctccctgatatctgaccggtgggttctaacggctgctcactgtctcttataccccccctgggacaaaaacttcaccgagaatgatctgctagtccggattggaaaacacagtcgcacccggtacgaaagaaatattgagaagatatccatgctcgaaaagatttacatccacccaaggtacaattggcgcgagaatctcgaccgcgacatcgccttgatgaagctgaaaaaaccggttgccttcagtgactacatccaccctgtgtgtctgcccgatcgcgagactgctgccagcctcttgcaggccggatacaagggacgggtcacaggttggggtaatttgaaggagacttggacagccaatgtgggaaaaggccaaccatctgtacttcaagtggtgaatttacctatagtggagcggcctgtgtgcaaagacagcacgagaatcagaataacagacaacatgttctgtgctggttacaagcccgatgagggaaagaggggagacgcttgcgaaggggatagcgggggtccattcgtgatgaaaagtccctttaacaaccgatggtatcagatggggatagtttcatggggagaaggctgcgacagggatggtaagtatggattttacacacatgtgtttcgcctgaaaaagtggattcaaaaggtgatcgaccagttcggggaa

SEQ ID NO: 10220 - DNA, 1866 bp, Artificial Sequence
  derived and/or modified sequence
atggcacacgtgcgaggcctacaactacccgggtgcctcgccctggctgctttgtgctccttggtgcatagccagcatgtgttcctagccccccagcaggcaaggagtctccttcaaagggtgcgacgcgccaatacttttctagaagaagttcgcaagggaaatcttgagagggagtgcgttgaggagacctgttcatatgaagaagcctttgaggccctggaatcaagcactgctaccgacgtgttctgggccaagtatactgcttgcgagacagcaagaacccccagggacaaactggccgcttgcctcgagggcaactgcgccgaggggctggggactaactaccggggccatgtcaatatcactagatcaggaatagaatgccaactgtggagaagccggtacccccacaagcccgagataaacagcaccacacaccccggcgctgacctacaggagaacttctgtcgtaatcccgactctagcaccacaggtccatggtgctacacaacagaccctaccgtgcggcgccaggaatgtagcattcctgtgtgcggccaggatcaggttactgtggctatgacccctcgcagtgaaggcagttctgttaacctgtctcctcccctcgaacaatgcgttcccgaccgcggacaacagtaccagggtcgattagccgtgaccacccatggcctgccgtgcttagcctgggctagtgcccaggctaaagcactgtccaagcatcaggattttaatagcgcagtccagctagtcgagaacttttgtcgcaacccagatggcgacgaagaaggtgtttggtgctatgtggcaggcaagcctggagacttcggctactgcgacctgaattactgtgaggaggccgtggaggaggagaccggcgatggcctagacgaggattcagatcgggccatagaagggagaaccgccacctcagaataccaaacttttttcaaccctcggacttttgggtcaggtgaagcagactgcgggctgcgccctctgtttgagaagaagtccctggaagataagaccgagcgcgagctgctggagtcatatatagatgggcgcattgtggagggtagtgacgccgaaattggtatgagtccttggcaggtgatgttattcaggaaaagcccccaggagctcctatgcggagcttctcttatttctgatcggtgggtcttaacagccgcccactgcttattatatcctccttgggacaagaatttcaccgagaatgatttactagtcagaataggcaagcatagccgaacccgctacgagcgcaatatcgagaaaattagtatgctggaaaaaatttatattcacccaagatataactggagagagaatttagaccgggatatcgccctaatgaagctgaagaaaccagtggccttttccgactacatccaccccgtgtgtcttcccgatcgcgaaaccgctgctagcttgctgcaagcaggatataaaggcagagttactggatggggcaacttaaaagaaacttggacagcaaatgtgggcaaaggccagccatcagtgctgcaagtggtcaacctccccatcgttgaacgcccagtttgcaaggactctacaagaatacggatcaccgataatatgttttgtgcagggtataagcccgatgagggtaaacggggggatgcttgtgagggcgattcagggggtccattcgtaatgaaatcccccttcaacaatcgatggtaccagatggggattgtatcctggggcgaagggtgtgacagagacggcaagtacggcttttacacccacgtgtttaggctgaagaagtggatacagaaggtcatcgaccagttcggggag

SEQ ID NO: 10221 - DNA, 1866 bp, Artificial Sequence
  derived and/or modified sequence
atggcacacgtgcggggactgcagttgcccggctgccttgccctggcggcgctctgctccctggtccattcccagcacgtgtttctcgccccgcaacaggcgcgcagcctcctccagcgagtgagacgcgccaacacgtttctggaagaagtgcgcaagggaaatctggagcgggaatgcgtggaggagacttgttcatacgaagaggcgttcgaagccctggaatctagcaccgcgactgatgtgttctgggccaagtacacggcctgcgaaaccgcacgcactccgagggacaagttggccgcgtgcctggaggggaactgtgccgagggactcggcaccaattaccgcgggcatgtgaacatcacccggtctggaatcgaatgtcagctctggcgctcccggtacccacataagccggagattaactcgaccacgcacccgggggccgaccttcaagaaaacttctgccgaaaccccgattcctcgactaccggaccatggtgctacactaccgatccgactgtgagacgacaggagtgctcgatcccagtctgcggacaagatcaggtcaccgtggctatgactcctagatcggaaggctccagcgtcaatctctctccgccacttgagcagtgcgttccagaccgcggccaacagtaccagggacgcctggccgtcactacccacgggttgccttgcctggcatgggcgtcggcacaagcgaaagccttgagcaaacaccaggatttcaactcggccgtgcagctcgtcgagaacttctgtcggaaccctgatggtgacgaggagggagtctggtgttacgtggcaggaaaacctggagacttcggatattgcgatcttaactactgcgaggaagctgtggaggaagaaacgggagatgggctcgacgaagattcagatcgcgccatcgagggacggacggctaccagcgagtaccaaaccttctttaatccgcggactttcggatcaggggaagcagactgcggattgcgcccgttgtttgagaagaaatctctcgaggacaagactgaaagagaactcttggaaagctacatcgatggacggatcgtcgagggaagcgacgcagagatcggaatgtccccctggcaggttatgctgttccggaagagcccacaggaattgctgtgcggcgcctccttgatctcggaccgctgggtgctgaccgcggcacattgcttgctctacccaccgtgggataagaatttcactgaaaacgatctgctggtgcggatcggaaagcactcacggacccggtatgaacggaacatcgagaagatatctatgttggagaaaatctacatccacccgcgctacaactggagggagaatctggacagagatattgcgctgatgaaactgaagaagccggtggccttctccgattacatccatccggtgtgcctgcctgatcgcgagactgcagcttccctgctccaagctggatacaaaggtcgggtgaccggatggggaaatctgaaggaaacctggactgccaacgtggggaaaggacagccgagcgttctccaggtcgttaacctgccgatcgtcgagcggcctgtctgcaaggactccacccgcattagaatcaccgacaacatgttttgcgccggttacaagccggacgagggtaagaggggggacgcttgtgaaggtgactcgggcggaccgttcgtcatgaagtccccgttcaataatcgttggtaccaaatgggaatagtgtcgtggggagaaggctgtgatagggacgggaagtacggcttttacacccacgtgttccgcttgaaaaagtggatccagaaggtaatcgaccagttcggagaa

SEQ ID NO: 10222 - DNA, 1866 bp, Artificial Sequence
  derived and/or modified sequence
atggctcatgtacgaggtctccagctcccaggatgccttgccttggctgcgctttgcagcctggtccattcccagcacgtgtttttagcgccgcagcaggcccgatcccttttgcagcgggtacgacgcgcgaacacatttcttgaagaggttagaaaagggaatcttgagagagaatgtgtggaggagacttgttcttacgaagaggctttcgaggccctggaaagctcaacagctaccgacgtgttctgggcaaaatacaccgcgtgcgagacggcgagaacacctcgagataagcttgccgcttgtcttgaaggaaattgtgctgagggtttaggaactaactatagaggtcacgtcaatatcactcggagtggtattgagtgtcagctgtggcggagccgatatcctcacaaaccggaaataaattcaactacgcacccgggcgcggatctacaggagaatttttgccgtaacccggactcgagcacgacaggcccttggtgctacacgaccgacccgacagtaaggcgacaggaatgttccatcccagtgtgtgggcaagaccaggtgaccgtggcgatgacccctcgatctgagggtagcagtgttaatctgagtccgcctctggagcagtgcgtgcctgaccgtggacagcaatatcaaggccgtcttgctgttacgactcacggactcccctgcctggcttgggcatctgcgcaggcgaaggccctctccaaacaccaagacttcaattccgctgttcagcttgtggaaaacttttgtcgaaatcccgatggtgacgaggagggcgtttggtgctatgtggcaggaaagccaggcgactttggctactgcgatcttaactactgtgaagaagctgtggaggaggaaactggagacggcctagacgaagatagcgaccgcgcgattgagggtcggaccgcaactagcgagtatcagacttttttcaatcccagaacattcggaagtggggaggcagactgcggccttaggccattattcgagaagaagagcctcgaggacaagaccgagcgtgagttgttagaatcatacatcgatggccgcatcgtcgaaggttctgatgccgaaattggtatgtccccctggcaagtcatgctcttccggaaatcgccccaggagcttctttgcggcgctagcctgatttcagaccgctgggtgctcacagctgcacactgtctcctctatccgccttgggacaagaactttactgagaatgacctgctagttcgcataggtaagcatagtcgaacgcgatacgagcgaaacatagagaagatctcgatgctggaaaagatctacattcacccgcgatacaattggcgcgaaaacttggatcgggacatcgccctcatgaagttaaagaagccggttgccttcagcgactatatccaccccgtgtgtctccctgacagagagacagcagcgagccttctccaagcaggatacaaaggccgggtgaccggatggggcaatttgaaagagacgtggactgccaacgtgggtaaggggcagccaagcgtcttgcaggtcgtcaatctgcctattgtagagcgtcccgtctgtaaagactctacacgaatccgaattacagataacatgttttgtgctggctacaaaccagacgaaggaaagaggggcgatgcttgcgagggagactccggcggtccttttgttatgaagtctccgtttaataaccgttggtaccaaatgggtattgtgagttggggtgaaggttgcgatcgtgacggcaaatacggcttctacacacatgttttccgtttgaagaaatggattcagaaggtgatcgatcaattcggcgaa

SEQ ID NO: 10223 - DNA, 1866 bp, Artificial Sequence
  derived and/or modified sequence
atggctcacgtgcgtggacttcagctgccaggttgcctcgcactcgcagcactttgctcactcgtccattcacaacatgtgtttcttgcaccccaacaagccagatccctgctgcaaagagtgaggcgggccaacacctttcttgaggaagtcaggaaggggaatcttgaaagagaatgcgtggaggagacttgctcctacgaggaagcatttgaggccctggaatcgtcgacggcgactgatgtgttctgggcgaagtacaccgcgtgtgaaactgcacggactcctagagataaacttgcagcatgtctggaaggaaactgtgctgaaggactgggtaccaattatcggggacacgtgaacattacccgttccggtatagagtgtcaactttggcgttccaggtaccctcataagccagagatcaattccaccacccaccctggggcagacctgcaggagaatttctgtagaaacccagattcatctaccaccgggccttggtgctacactactgaccctaccgttaggcgccaggaatgctccatcccagtgtgtggacaagatcaggtgaccgtggcgatgaccccacgtagcgaaggatcgtcagtgaacctcagccctccactggaacaatgtgtgcctgatagaggccagcagtaccaaggacggctggcggtcaccactcacggactgccatgtctcgcgtgggccagcgcacaagcaaaggcactctccaagcaccaagacttcaactccgccgtccaactcgttgagaacttttgtagaaatcctgacggtgacgaagagggggtgtggtgttacgtggcgggaaagccaggcgattttggttactgtgacctgaactactgcgaggaagcagtggaagaagaaaccggggatggactggatgaggacagcgatcgagcaatcgagggtcggaccgcaacttcagaataccaaacgttctttaatccgcgcacttttgggtccggagaagctgattgtggcctgcgccctctttttgaaaagaagtccttggaagataagacggaacgcgaacttctcgaatcatacatcgacggccggatcgtggaaggcagcgatgccgaaattggaatgtcaccatggcaagtgatgctttttagaaagtcgcctcaggagcttctgtgtggcgcgtccctcatttcagatcgttgggttctcactgccgcccattgtttgctgtacccgccatgggacaagaactttaccgaaaacgacctgctggtgcggatcggaaagcattcaagaaccagatacgagaggaacatcgagaaaatctcaatgcttgaaaagatttacattcacccccgctacaattggcgcgaaaatctcgacagagacattgctcttatgaagctgaagaagcctgtggcttttagcgactatattcacccagtgtgtctgccggaccgtgagactgccgctagcctcctccaagcgggatacaaaggaagggtcaccggctgggggaacctgaaagaaacctggactgcgaacgtgggaaagggccaacctagcgtccttcaagtggtgaaccttccgatcgtggaacggcccgtgtgtaaagattcgacgagaatcagaattactgataacatgttctgcgctggatacaaacctgatgaggggaaaagaggggatgcatgcgagggtgacagcggaggtccgtttgtcatgaagtcgcctttcaacaacaggtggtaccaaatgggtattgtgtcttggggtgagggctgtgaccgcgatggcaaatacgggttctacactcatgttttccgacttaagaaatggatacaaaaggtcatcgaccagtttggtgag

SEQ ID NO: 10224 - DNA, 1866 bp, Artificial Sequence
  derived and/or modified sequence
atggcgcatgtgcggggacttcagctgccagggtgcctggcgctggccgccctctgctcactggttcattcacagcacgtgtttttggccccccaacaagcgaggtcgctgctgcagcgagtccggcgcgccaacacctttctggaagaggttcggaagggcaacctggagcgggaatgcgtcgaagaaacttgctcgtacgaggaggcgttcgaagctctggagagttcaaccgctactgatgtcttttgggccaaatacactgcttgcgaaacggcccgcacccctcgggacaaattggccgcctgcctcgagggaaactgcgcggaaggactgggaaccaactaccggggccatgtcaatatcaccaggagcggtatcgagtgccaactgtggagatcccgctaccctcacaagcctgaaatcaactcgaccactcacccgggggcggatctgcaggaaaacttctgcagaaatcccgactcgtctaccacgggaccttggtgttacactactgacccaactgttcgccggcaagaatgttccatccctgtgtgcgggcaagaccaagtgactgtcgcaatgaccccaagaagcgaagggtcgtcagtcaacctgtcgcctcctttggaacagtgcgtgcctgacaggggacaacagtaccaaggccggctggcggtgactactcacggactcccttgtctcgcatgggcctccgcccaggcgaaagcgctctccaagcatcaggatttcaactccgcagtgcagcttgtcgagaacttctgccgcaatccggacggcgacgaggaaggagtctggtgctacgtggccggcaagccgggagatttcggctactgtgacttgaactactgtgaggaagccgtggaagaagaaactggggatggactggacgaggattccgaccgggcgattgaaggacgcactgccacctcggagtaccagaccttctttaacccgaggaccttcggaagcggtgaagcggattgcggactgcgtccgctgttcgaaaagaagtcgctggaggataaaaccgaacgggaacttcttgaaagctacatcgacggccgcattgtcgaaggttcggacgccgaaatcgggatgtccccctggcaggtgatgctcttccggaagtcaccacaagaactgctctgcggagcgtcactgatttcggacagatgggtgctgactgctgcccattgcttgttgtacccaccgtgggataagaatttcaccgaaaacgatctcctggtgaggattggcaagcattccagaacccggtacgagcgcaatattgaaaagattagcatgctggagaagatctacatccacccacggtacaactggcgcgagaacctggatcgcgacattgcgctgatgaaactgaaaaagccggtggccttctccgattacattcacccggtgtgcctgccagatcgcgaaaccgccgcctccctgctgcaggcaggatacaaaggtcgcgtgactggctggggcaatctcaaggaaacttggaccgccaacgtgggaaaaggacaacccagcgtgttgcaggtggtgaacctgccaatcgtggaaagacccgtctgtaaagactccacccgtatccgcatcaccgacaatatgttctgtgccggatacaagcctgacgaggggaagcgcggggacgcgtgtgagggagattccggtggaccattcgtgatgaagagcccgttcaataacagatggtaccagatgggaattgtgagctggggtgaaggatgtgatcgcgatggaaagtacggtttctacacccacgtgtttaggctgaaaaagtggatccaaaaggtcatcgaccagttcggggaa

SEQ ID NO: 10225 - DNA, 1866 bp, Artificial Sequence
  derived and/or modified sequence
atggcacatgtgcggggcctgcagcttccaggctgccttgccctcgcagcgttgtgcagtctcgtgcacagtcaacatgtctttctcgctccacagcaggcgagatcactgctgcagagagtgaggcgggccaacacatttctggaagaggttaggaagggcaatttggaacgggagtgcgtggaggaaacttgtagctacgaagaagcatttgaagccctcgagagcagcaccgctaccgatgtcttctgggctaagtacaccgcgtgcgagactgcaagaactccaagagacaagcttgccgcttgtctagaaggaaactgcgctgaagggttaggaactaactaccgcggtcacgtcaacatcacgcgcagtgggatcgagtgccaactttggcggtctaggtatccccataaacctgaaatcaatagcaccacacatcctggggccgacctgcaagagaatttttgtcgcaacccagactcgagtactaccgggccctggtgttacactactgatccaacagtcagaaggcaagaatgttctatccctgtttgtggtcaggaccaggtgacagtcgcaatgacccctcgctcagaaggctcctcggtgaatctctctcctccccttgaacagtgtgtgccagaccgaggacaacaatatcagggccgcctggccgtgaccacacacggattgccttgtcttgcgtgggcatctgcacaagcaaaagctctgagtaagcatcaggactttaattctgctgttcagctggtcgagaatttctgcagaaaccctgacggggacgaagaaggagtgtggtgctatgtcgctggcaaacctggcgattttggatattgcgatcttaattattgcgaggaggccgtggaggaagagaccggagacggattggacgaggatagtgatagagccattgagggaagaaccgcaacctctgaataccagacatttttcaatcctcgcactttcggaagcggggaggccgactgcggtctgagacccctgttcgagaagaagtctttggaggacaagacagagagagagcttttagagagctacatcgacgggaggatcgtggagggcagcgacgcagagatcggcatgagtccatggcaggtgatgctcttccgcaagtcgccccaggaacttttgtgcggtgctagcctgatctctgataggtgggtattgaccgccgcacattgtctgctctatccgccttgggacaaaaactttaccgagaacgacctcctggtgaggattggaaagcattcgagaactcggtacgagaggaatatcgagaagataagcatgcttgagaagatttacatccatcctcggtacaactggagagagaaccttgatagagacattgcattgatgaaacttaagaagcccgttgcattttctgactacatccacccggtttgcctgcccgaccgcgaaaccgctgcttctttgttacaggcaggttacaagggtagggtgacaggatggggcaaccttaaggagacctggacagctaacgttggcaagggccaaccatctgtgctgcaagtggttaacttgccaatcgtggaaaggcctgtgtgcaaagattcgacaaggatccggatcactgataacatgttttgtgccggatataaaccggacgaaggaaaaaggggagacgcttgcgaaggcgactctgggggcccctttgttatgaagtcccctttcaacaacagatggtaccagatgggaattgtgtcttggggtgaaggatgtgatagagatggaaagtatggcttttacacccacgtttttagacttaagaaatggatccaaaaagtcatagaccagtttggcgag

SEQ ID NO: 10226 - DNA, 1866 bp, Artificial Sequence
  derived and/or modified sequence
atggcccacgtcaggggactgcagttgcctgggtgtcttgcactcgctgctctgtgctctcttgttcacagtcaacacgtattcctggcacctcagcaagctcgatcacttctccagcgcgtccggagagctaatacattcctggaggaagtcaggaaggggaacctcgagagagagtgcgtggaagaaacctgctcctacgaggaagcatttgaggcccttgagagcagtaccgccacagatgttttctgggctaaatatactgcttgtgagaccgcccggaccccccgcgataaactggccgcttgtctcgaaggtaactgcgccgaaggactgggcacgaactatcgggggcacgtaaacattacacgatcaggtattgagtgccagttgtggaggagccgctatccacataagcccgaaattaacagcacgacacacccgggggcagacttgcaggaaaacttttgtaggaacccggactcctctacaacaggaccctggtgctacacaactgatccgaccgtcagacgacaagagtgcagcatcccagtgtgcggacaggaccaagtgacagttgctatgaccccccgtagcgaggggagttctgttaatcttagtccccccctggagcagtgtgtcccagatagaggtcagcagtatcaagggagattagcagtgaccactcacggcctcccttgtctggcttgggccagtgcacaggctaaggctctgagcaaacatcaggatttcaattctgcagtgcagctggtagagaacttctgccgcaaccctgacggagatgaggaaggtgtgtggtgctatgtggcaggaaagcctggcgatttcggctactgcgacctcaactactgcgaggaggcagtcgaggaggagaccggtgacggccttgacgaggacagcgaccgcgctatcgaaggccgcacagccacgtctgagtaccagacctttttcaatccaagaacctttgggtccggggaggccgattgcggacttcggcccctatttgagaagaaatctctggaggataagaccgagcgagagttgctggagtcctatattgatggaaggatcgttgagggctctgatgcagagatcggcatgagcccctggcaggtgatgctgttccggaaatcccctcaagaactgctctgcggcgctagcctcatctcagacaggtgggtccttaccgctgcccactgtctactgtatcccccttgggacaaaaatttcactgagaatgatctattggttcgtatcggcaagcatagcaggactaggtacgagcgcaacatcgagaaaatcagtatgcttgaaaaaatatacattcatcccaggtacaattggagggaaaacttggaccgagacatcgctctgatgaaactgaaaaaacctgtggcatttagcgactacatccaccccgtctgcctgccagaccgggaaaccgctgcatctctgctgcaggccggatacaagggccgagtaaccggctggggtaacttgaaggagacttggacagccaacgtggggaagggccagcccagcgtactccaggtggtgaatctccccatcgttgagaggcccgtttgcaaggactcgactaggattagaatcaccgataacatgttctgcgctggttataaaccagacgagggcaagagaggtgacgcctgcgaaggggactcgggcggacctttcgttatgaaaagcccatttaacaatagatggtaccagatgggtatcgtctcctggggcgaagggtgcgatcgggacggtaagtatgggttttacacccacgtctttcgactgaaaaaatggatacagaaggttatagaccagttcggggaa

SEQ ID NO: 10227 - DNA, 1866 bp, Artificial Sequence
  derived and/or modified sequence
atggcacacgtaagaggactccaattgcccggctgcctggctctggctgcactgtgtagcctggtgcactcacagcacgtattcctggctccacagcaagcgagaagcctgcttcaacgggtgcggcgagcaaacacgtttttggaggaagtgcgcaaaggcaacttggagcgggagtgtgtggaagagacgtgctcatatgaagaggcctttgaggcattggagagcagtacagccactgatgttttctgggcaaagtacacggcctgcgagacagcgcggacccctagggataagctcgccgcctgtctcgagggcaactgcgccgaggggctcgggacgaactaccgaggccatgtcaacattacccggtctggtatcgagtgtcagctttggaggtcccggtatccacataaacctgagatcaatagcacaactcatcctggtgcagatcttcaggaaaacttctgcaggaaccccgactccagcactacaggcccttggtgctacacgacggaccccaccgtgcgccgccaggagtgtagtatacctgtgtgtggccaggatcaggtgactgtggctatgactccacgcagcgagggatcctccgtgaacctgtccccaccactggaacaatgtgtcccggatcgggggcagcagtaccagggtaggctggcggtcacgactcatggcctcccgtgtttggcctgggcgtccgcacaggccaaggcattgtccaagcatcaggacttcaatagtgcggtccagttggtggaaaacttctgtaggaatcccgacggggatgaggaaggcgtgtggtgttacgtggcggggaagcccggggattttggctattgcgacctgaattattgcgaggaggcagtggaggaggaaaccggggacggcctggatgaagacagcgatcgggccatcgagggaagaacagcaacttctgagtatcagacattcttcaacccacggacttttggctctggcgaggctgactgtggtctgagacctttgttcgagaagaaaagccttgaagataaaacagagcgcgagctgctggagtcttatatcgacggcaggatcgtcgaaggctcagacgctgagatcggaatgtccccctggcaggtgatgctgtttcgaaaaagcccacaggagctgctgtgcggcgcatctctgatctctgatcgctgggtcctgaccgccgctcattgccttttgtatccgccttgggataagaacttcaccgaaaacgaccttctcgtgcgcattgggaaacattctcggaccagatacgagcgcaacatcgaaaaaatcagcatgctggaaaaaatttatatccatccacgatataattggcgcgaaaatttggaccgagacatcgctctgatgaagctgaaaaagcctgtggccttctctgactacatccacccagtttgcttgccagacagggagacggctgcctccctgctgcaggcaggctacaaggggcgagtcaccggttggggcaatctcaaggagacttggactgcgaacgtgggtaagggccagcccagtgtgctgcaggtcgtgaacctgccgattgtcgaacggccagtctgcaaagacagtaccaggataagaattacagataacatgttctgcgccgggtacaagccagatgaaggaaaacgcggcgacgcttgtgagggggattccggaggtccatttgttatgaagtctccctttaacaaccgatggtaccagatggggatcgtatcctggggcgagggctgcgacagagatggtaaatacggcttctatacacatgtatttcggcttaagaagtggattcagaaggtgattgatcagttcggcgag

SEQ ID NO: 10228 - DNA, 1866 bp, Artificial Sequence
  derived and/or modified sequence
atggcgcacgtgagaggactgcagctgccaggatgcttggccctggcggcgctgtgtagcttggtgcactcccagcacgtctttctggccccacagcaagcgaggtccctgttgcagcgcgtcagacgcgccaatactttcctggaagaagttaggaaaggaaacttggaacgggagtgcgtggaggaaacgtgcagctatgaggaagcgttcgaagcgctggagtcgtccaccgccaccgatgttttttgggctaagtacaccgcatgtgagacggccagaactccacgggacaaactcgcggcctgtctcgaaggcaactgcgcggagggactgggaaccaattaccgcggacatgtgaacatcactcgctcgggcattgagtgccagctgtggcggtcgcgttacccgcataaaccagaaatcaactcgactacccacccaggagcagacctccaggagaacttctgtcggaacccggacagctcgaccaccgggccgtggtgctacacgaccgacccgaccgtgcggagacaggaatgcagtatccctgtgtgcggacaggaccaagtgactgtggccatgaccccgagatccgaaggatcatctgtcaatctgagcccgccgcttgaacaatgtgtgccggatcggggacagcaataccaagggaggctggcggtcacgacgcatgggctgccttgcctcgcctgggcatctgcacaggccaaggcgctgtcgaagcaccaggacttcaactccgctgtgcagttggtggagaacttttgtaggaacccggacggggatgaagaaggagtctggtgctacgttgcgggcaagcctggagactttggctattgcgacttgaattactgcgaggaggctgttgaagaagaaactggagatggcctggatgaggacagcgaccgcgcgattgaaggacggaccgctacttccgaataccagacgttctttaacccgcggacctttggcagcggagaggcggattgtgggctgcgccccctgttcgagaagaaatccttggaggataagactgaaagagagctgcttgaatcatacatcgacggaagaattgtcgagggctcggatgccgagatcggtatgtccccgtggcaagtgatgctgttcaggaagtccccacaggagttgctctgcggagcctcgctgatctcggacagatgggtcttgaccgcagcgcattgcctgctctaccctccgtgggacaaaaacttcactgaaaatgatctgctcgtgcgcatcggtaaacactcccgcactcggtacgagaggaacatcgagaaaatctccatgctcgaaaagatctacatccacccgcggtataactggcgcgaaaatctggaccgcgacatcgcgctcatgaaacttaagaagcctgtggccttctccgactacatacatcccgtatgcctgcccgatcgagaaacggccgcttcgcttttgcaggcgggatacaaggggcgggtcactgggtggggaaacctgaaagagacgtggaccgcgaacgttgggaaaggacagccgtcagtcctgcaagtggtgaaccttccgatcgtggagcgccccgtgtgcaaggactccacccgcatccgcattactgataacatgttctgtgccgggtacaagccagatgaggggaaaaggggtgatgcttgtgaaggagactcaggaggtccgtttgtgatgaagtcgccgttcaacaatcgctggtaccaaatgggtatcgtctcctggggagaaggctgcgaccgcgatggcaaatacggtttctacacccatgtgttccgcctgaagaaatggatccaaaaggtgatcgaccagttcggagaa

SEQ ID NO: 10229 - DNA, 1866 bp, Artificial Sequence
  derived and/or modified sequence
atggctcacgtgagggggctccagctgcccggatgcctggccttggcagcactgtgctcgctggtacactcacagcatgttttcctagctccccagcaggccaggtccctcctccagcgggtgcgccgcgctaatactttcctcgaagaagttcgcaaagggaacctcgagagagaatgcgtggaagaaacatgctcatatgaagaagccttcgaagcccttgagtcatccacagctactgacgtattctgggcaaaatatacagcatgcgaaacagcccggactccccgggataaactggccgcctgtctggaagggaattgtgctgaaggactagggacaaattatcgaggacacgtaaatatcacacggtctgggatagaatgtcagctctggcggtcacgctatccacacaaaccggaaatcaactccacaacacacccaggggcggatcttcaggagaacttttgtcggaaccctgatagttctacaactgggccatggtgttacactacagatcctacagttcgacgacaggagtgttctattcccgtttgtggacaggaccaggtcacagtggctatgactccccggtccgaagggagttccgttaatctctcgccaccccttgaacagtgtgtgcctgatagaggacagcagtatcaggggagactggccgtgactacacatggattgccatgtttagcctgggccagtgcccaggccaaagcacttagtaaacaccaagatttcaactcagccgttcagttagtcgaaaatttctgccgaaatccagatggagatgaagagggagtttggtgttacgtggctggaaaaccaggagattttgggtattgtgatcttaactattgcgaggaagctgttgaagaagagactggagatgggctggatgaagactccgatagagccatcgaagggagaacagctacatctgagtatcagactttcttcaaccctaggacattcggatctggggaagcagattgtggattgaggccactctttgaaaagaaatctcttgaagataaaacagaaagagaacttctggaatcttatatcgacgggagaatagtagaaggatctgatgcagaaatcgggatgtccccttggcaggtcatgctgtttaggaaatctccccaggaactactctgtggagcttctctcattagtgatcggtgggtcctaactgccgctcattgtctactctaccccccctgggataaaaatttcacggaaaacgatcttttggtccggatagggaagcacagtcgcacacggtacgagcggaatatcgagaaaatttcaatgcttgagaagatatatattcatcccaggtataactggagggaaaacctcgatcgagatatagctcttatgaaactaaaaaaacctgtggcctttagtgattacatacaccccgtgtgtctacccgatagggaaactgccgcgtccctattacaggccggatataaagggcgggtaactggatggggaaacctaaaagagacttggacggcaaacgtggggaaagggcagccaagtgtgctccaagtggtcaatctgcctattgtcgaaaggcctgtgtgtaaagattctacaaggattagaataactgataatatgttttgtgcgggatacaagcctgatgaggggaaacggggagatgcttgcgaaggggattccggagggccttttgtaatgaaaagtccattcaacaataggtggtatcaaatggggattgtttcatggggagaaggatgcgaccgggatgggaaatatgggttctacacacacgtttttcggcttaaaaagtggatacagaaggtgatagatcagttcggagaa

SEQ ID NO: 10230 - DNA, 1866 bp, Artificial Sequence
  derived and/or modified sequence
atggcgcacgtgcgaggtcttcagctgcccgggtgcttagcactagcggccctttgctcattggtgcacagtcagcacgtgtttcttgccccccagcaggcacgttccctgttgcagagggtgagaagagctaacactttcctggaggaggtacggaaaggaaaccttgagcgggaatgtgtggaggagacctgtagttacgaggaggcattcgaggccctggagtccagtaccgccacagacgtcttttgggcaaaatataccgcatgcgagactgcgcggactcctcgcgataagctggccgcttgtttggaaggtaactgtgccgaggggctaggaaccaattatcgtggacacgtgaacattactcggtcgggcattgagtgtcagttatggagaagtcgctacccacacaaacccgagattaacagtacaacccaccccggcgcggatttacaggaaaacttctgccgcaaccccgactcctccacaactggtccttggtgttataccacggatccaaccgtcaggcggcaagagtgctcaattcctgtgtgcggccaagaccaggttaccgtcgcaatgactccgcggtccgagggctcctccgtgaacttgtcacccccactcgagcagtgcgtgcccgaccgcgggcaacagtaccagggtcgtctcgctgtcacgactcacggcctaccatgtctggcatgggctagcgcccaggccaaggcattgtctaaacatcaggattttaattcggcagtccagttggttgaaaatttctgtagaaatcccgatggcgatgaggaaggggtgtggtgctacgtggcaggaaaaccgggcgacttcgggtattgcgatcttaactattgcgaagaggccgtggaggaagagactggggacggacttgacgaagactccgacagggctatagaaggccgcacagcaacgagcgaatatcagacattcttcaatccgagaacgttcggctctggcgaggccgattgcggccttcgcccattgtttgaaaaaaagtcgctggaagataaaaccgagcgggagctgctggagtcatatattgacggaaggatcgtcgagggcagcgatgcggagataggaatgtccccctggcaggtcatgctgttccggaagagcccacaggaactcttatgcggtgccagtcttatatctgataggtgggtgcttacggccgcccactgtctcctataccccccctgggacaaaaactttacagagaatgatctgttggtgagaatcggcaaacattcgcggacgagatacgagcgcaacatcgagaaaatctctatgctcgaaaaaatttatattcatccaaggtacaattggagagaaaatttagacagggatattgcattgatgaaactcaagaaacccgtcgctttttcagattatattcatccagtctgtctgcctgaccgtgagaccgcggcaagccttttgcaggccggctataagggccgagtgaccggctgggggaacctgaaagaaacttggacagctaatgtgggaaaggggcagccttcggtacttcaggtcgttaacttgccaatagtcgagaggcccgtgtgcaaggactccactaggatcaggatcacagacaatatgttctgtgcaggatataagccagatgagggcaagcggggagacgcatgtgagggggattctggcggacctttcgtgatgaaatcgccgtttaataaccggtggtatcagatgggcattgtctcatggggggagggctgcgacagagatggaaagtacggcttctatactcatgtgtttaggctgaaaaagtggatccagaaggtgattgaccagtttggagag

SEQ ID NO: 10231 - DNA, 1866 bp, Artificial Sequence
  derived and/or modified sequence
atggcacatgtgagaggactccaactcccgggatgcctggctcttgccgcactgtgcagcctcgtgcattcacaacatgtgtttcttgcaccccaacaggcacgttcgctgcttcaacgggtgcgcagggccaacacgttccttgaagaggttcgcaagggaaacctggaacgagaatgtgtggaggaaacctgttcgtacgaagaagcgtttgaagctctggaatcctccaccgccacggatgtcttttgggcaaaatacactgcatgcgaaactgcccgtacgccacgggataagctcgcagcgtgtctggagggtaattgtgccgagggtctgggtacgaactacagaggacatgtcaacattacccgttcgggcatcgaatgtcaactgtggcgctctcgttacccgcataagcccgagatcaactccacgactcatccaggggcagaccttcaagagaacttttgtcggaacccggattcctcgaccactggtccttggtgttacaccactgatcctactgtgaggaggcaggagtgctccattcctgtgtgtggacaggaccaggtgaccgtcgctatgacccctaggtccgaaggatccagcgtgaacttgtcgccgcccctggagcaatgcgtgcctgatcggggccagcaatatcaaggacgactcgcggtgaccactcatgggctcccttgtctggcctgggcatcggcacaagcaaaggccctttctaaacatcaagatttcaattctgcagttcagctggtcgagaacttctgtagaaaccccgatggtgatgaggaaggtgtgtggtgctacgtcgcgggtaagcctggcgactttgggtactgcgaccttaactactgtgaagaggcagtcgaggaggaaacgggggatggccttgatgaggactcggaccgagcaatcgaaggacgaactgcaaccagcgaataccagactttctttaacccacgtactttcggcagcggagaggctgactgtggtcttagacccctcttcgagaaaaagtcgctggaagataagactgagcgcgaacttttggaaagctacatcgatgggaggattgttgaaggatccgatgcagaaattggtatgtctccgtggcaggtgatgcttttccgaaagtcaccacaggaacttctttgcggcgcgagcttgatatcggatagatgggtgctcaccgcagcccactgcttgctctatcccccttgggataagaatttcaccgaaaatgacctgttggtcagaatcggaaagcactctaggacccggtacgaacggaacattgaaaagatatcgatgctcgaaaagatctacattcaccctaggtacaactggcgtgaaaacctggatagagacatcgcgcttatgaaacttaagaagcctgtggcgttttcagactacattcatccggtgtgtctcccggatagagaaaccgccgcctcactgctccaagcgggttacaaagggagagtgactggatggggaaatcttaaggaaacctggactgcaaacgtcggaaagggacagccttcggtgctgcaagtcgtcaaccttcctatcgtcgaaagacccgtgtgtaaagactccactaggattagaattacggacaacatgttttgtgcgggctataaacctgatgaaggtaagcgcggcgatgcatgtgaaggtgattcgggaggcccttttgtgatgaaatcaccattcaacaatcgctggtaccaaatgggaattgtgagctggggtgagggatgcgacagagacgggaaatacggtttttacacccacgtctttcgtctgaagaagtggattcagaaagtgatagatcagtttggcgaa

SEQ ID NO: 10232 - DNA, 1866 bp, Artificial Sequence
  derived and/or modified sequence
atggcccatgtccgaggacttcagctgcctggatgtcttgccctggcagcgctgtgctccttggtgcactcccagcatgtgtttctcgcacctcagcaagcaagatcactccttcagcgcgtgcggcgcgccaacacctttctggaggaagtgcggaaggggaacctggagcgcgaatgcgtggaggaaacgtgttcgtacgaggaagcattcgaggcccttgaatcctcgactgcgaccgacgtgttctgggcaaagtataccgcatgcgaaaccgcccggacccccagagataagctggcggcctgcctggagggcaattgtgcagaaggtctgggaaccaactaccggggtcatgtcaacatcaccagaagcgggattgaatgtcaactgtggagatcccgctaccctcataaacctgagattaactcaacgacccacccgggtgccgatcttcaggaaaacttttgcagaaatccagatagctccacgaccggaccgtggtgttacaccaccgacccaaccgtgcggagacaagagtgttcaattcctgtctgtgggcaggaccaagtgaccgtggccatgacgcctcgatccgagggctcgtcggtgaacctgtcgccaccgctcgaacagtgtgtgccagatcggggacagcaataccaaggtcgtctggctgtgacgacccatgggcttccatgccttgcatgggcaagcgctcaggcaaaggcactttcaaagcaccaagactttaactcggcggtgcagctcgtcgagaacttttgtcgcaatcctgacggcgatgaagaaggggtgtggtgttacgtggcaggcaagcccggtgactttggatactgtgatctcaactactgtgaagaagcagtcgaagaagaaaccggtgatggactggatgaagattcagaccgcgcgatcgagggcaggaccgctaccagcgaataccaaaccttctttaacccacgtaccttcggatccggcgaggcggattgtggacttagacccctttttgaaaagaagtccctggaagataagacggaaagggaacttttggaaagctacatcgatggtcgtattgtggagggatccgacgctgagatcggaatgtcaccatggcaggtgatgctttttagaaaatccccccaagaacttctttgtggagccagccttatttcagaccgctgggtactcactgccgcacactgtttgctttaccccccttgggataagaactttactgaaaacgatcttcttgtccgtattggaaagcattcaaggaccaggtatgaacggaacatcgaaaagatatccatgctggaaaagatttacatccatcctagatacaattggagggagaacttggatcgcgacattgcactgatgaaattgaagaagcccgtggctttctccgactacatccatcccgtatgcctgcctgatcgcgagacggccgcatccctcctgcaagcgggttacaagggccgcgtcactggctggggtaaccttaaggaaacttggactgccaatgtgggaaagggccaaccatcggtgcttcaagtcgtgaaccttcccatcgtcgagcggccagtgtgtaaggactcaaccagaattcgaattaccgataacatgttctgcgcaggttacaagccagatgaaggaaagcgaggagatgcatgtgaaggggattcggggggaccttttgtgatgaagtcgcctttcaacaaccgttggtaccagatgggaattgtgagctggggcgaggggtgcgacagagatgggaaatacggattttacactcatgtctttagactgaagaagtggattcaaaaagtgatcgaccagtttggagaa

SEQ ID NO: 10233 - DNA, 1866 bp, Artificial Sequence
  derived and/or modified sequence
atggcccatgtccgaggcctgcagctgcccgggtgcctggcgctcgctgcactctgctcactggtccatagccaacacgtgttccttgctccccagcaggccagatccctccttcagcgcgtgaggagagccaatacttttttagaggaagtgaggaagggcaacctggagcgggaatgtgtggaggagacctgctcctacgaggaagctttcgaagccctcgaaagctcaacagccaccgatgtattttgggctaagtacacagcgtgcgaaactgcccgaacgccaagggataagcttgccgcctgtcttgaaggtaactgtgccgagggcctgggaacaaactaccgaggccatgtgaacatcaccagatccggcatcgagtgccaactctggcgaagcagatacccgcacaagccagagatcaactcaaccacacatcccggcgctgacctgcaggagaatttttgcagaaatcctgatagtagcaccacaggtccgtggtgttataccacagaccctacggttaggaggcaggagtgctctatcccagtttgtggtcaggatcaagtgaccgttgccatgacacctaggagcgaggggagctcagtcaacctcagccctcccctagaacaatgcgttcccgatagggggcagcagtaccaggggaggctggccgtgacaacccacggccttccttgcctggcatgggcctctgctcaggcgaaggcactaagcaagcaccaggactttaactccgccgtgcagctggtggagaatttctgtaggaaccccgacggggatgaggaaggtgtgtggtgttatgtcgccggcaaaccaggggatttcggctattgcgatctgaactattgtgaggaagcagtggaggaggaaactggagatgggctggatgaagattccgaccgagcaatcgagggaagaacagcaacctctgaataccaaaccttttttaatccccgaacctttgggtcaggggaggcagattgtggcctgaggccactgtttgaaaaaaaatccttggaggacaaaacagaaagggaactgctagagtcctacattgatggaaggatcgtggagggttcggatgccgagataggtatgtccccgtggcaggtaatgctctttagaaagtcgccacaggaactgctgtgtggggccagcctcattagcgacagatgggtgctcacagcagctcactgtctattataccctccttgggacaaaaatttcactgaaaacgatctgttggttagaataggaaagcactcccgcaccagatacgaacgtaacatcgagaagatttcgatgcttgagaagatttatatccatcccaggtacaactggcgtgaaaatctcgacagagatatcgcccttatgaagctgaaaaagcctgtggccttctctgactacattcatcctgtttgcttgcccgacagagaaactgccgcttcactgttacaggcgggctacaagggcagagtgaccgggtgggggaatttaaaggagacatggacagcgaatgttggcaagggtcagcccagtgtgctccaggttgtgaatcttccaatcgtggaacgacctgtctgcaaagacagtaccagaatcagaatcacggacaacatgttttgcgcagggtataaaccagacgaaggtaaacgaggtgacgcttgtgagggcgacagtggtggcccatttgtgatgaagagcccgtttaataaccgatggtatcagatgggcatcgtcagctggggcgagggatgtgatagagatggcaagtatggattttacacccacgtgtttcgcctgaaaaaatggattcaaaaggtaattgaccaattcggagaa

SEQ ID NO: 10234 - DNA, 1866 bp, Artificial Sequence
  derived and/or modified sequence
atggcgcatgtacgaggtttacaattaccgggttgtctagcgctagcggcgttatgttcgttagtacattcgcaacatgtatttctagcgccgcaacaagcgcgatcgttattacaacgtgttcgacgagcgaatacgtttttagaagaagtacgtaaaggtaatttagaacgagaatgtgtagaagaaacgtgttcgtatgaagaagcgtttgaagcgctagaatcgtcgacggcgacggatgttttttgggcgaaatatacggcgtgtgaaacggcgcgtacgccgcgagataaactagcggcgtgtttagaaggtaattgtgcggaaggtttaggtacgaattatcgtggtcatgttaatataacgcgttcgggtatagaatgtcaattatggcgttcgcgttatccgcataaaccggaaataaattcgacgacgcatccgggtgcggatctacaagaaaatttttgtcgaaatccggattcgtcgacgacgggtccgtggtgttatacgacggatccgacggtacgacgtcaagaatgttcgataccggtatgtggtcaagatcaagtaacggtagcgatgacgccgcgatcggaaggttcgtcggtaaatttatcgccgccgttagaacaatgtgtaccggatcgaggtcaacaatatcaaggtcgtttagcggttacgacgcatggtctaccgtgtctagcgtgggcgtcggcgcaagcgaaagcgttatcgaaacatcaagattttaattcggcggttcaactagtagaaaatttttgtcgaaatccggatggtgatgaagaaggtgtttggtgttatgtagcgggtaaaccgggtgattttggttattgtgatttaaattattgtgaagaagcggttgaagaagaaacgggtgatggtctagatgaagattcggatcgagcgatagaaggtcgaacggcgacgtcggaatatcaaacgttttttaatccgcgaacgtttggttcgggtgaagcggattgtggtttacgaccgttatttgaaaaaaaatcgctagaagataaaacggaacgtgaattactagaatcgtatatagatggtcgtatagttgaaggttcggatgcggaaataggtatgtcgccgtggcaagttatgctatttcgaaaatcgccgcaagaattattatgtggtgcgtcgctaatatcggatcgttgggtattaacggcggcgcattgtctattatatccgccgtgggataaaaattttacggaaaatgatttattagtacgaataggtaaacattcgcgaacgcgttatgaacgtaatatagaaaaaatatcgatgctagaaaaaatatatatacatccgcgatataattggcgagaaaatttagatcgtgatatagcgttaatgaaactaaaaaaaccggtagcgttttcggattatatacatccggtatgtttaccggatcgtgaaacggcggcgtcgctattacaagcgggttataaaggtcgtgtaacgggttggggtaatctaaaagaaacgtggacggcgaatgtaggtaaaggtcaaccgtcggttctacaagttgtaaatttaccgatagtagaacgaccggtttgtaaagattcgacgcgtatacgtataacggataatatgttttgtgcgggttataaaccggatgaaggtaaacgtggtgatgcgtgtgaaggtgattcgggtggtccgtttgtaatgaaatcgccgtttaataatcgatggtatcaaatgggtatagtatcgtggggtgaaggttgtgatcgagatggtaaatatggtttttatacgcatgtttttcgtttaaaaaaatggatacaaaaagtaatagatcaatttggtgaa

SEQ ID NO: 10235 - DNA, 1866 bp, Artificial Sequence
  derived and/or modified sequence
atggctcatgtcagaggactacagctgccaggctgcttagcgttagctgccctgtgctcactggtccactcacagcatgtcttccttgccccccaacaagctagaagcctgctccaacgggtccggcgggcaaataccttcctggaggaggtgcgcaagggtaacctggaaagggagtgtgtggaagaaacttgttcttatgaggaagctttcgaagctctggaatccagcactgcaacagacgtgttttgggcaaaatacacagcgtgtgagacagctcgcaccccgagagataaactggccgcttgtctagagggaaactgtgccgaaggcctgggcacaaattatcggggtcacgttaacataacaaggtctggcatcgagtgccagctgtggcgtagtaggtatccacacaaaccagaaatcaactccacaacccatcccggggccgatctccaagagaatttctgtcggaaccccgacagcagcacaacaggtccctggtgttatacgaccgatcctactgtgagaagacaggagtgctcgatccccgtgtgcgggcaggatcaggtgactgtcgccatgacaccgaggagtgaggggagtagcgtgaacctgtctccccccttggaacaatgtgtcccagaccgtggccaacaataccagggcagactggcagtgaccacccacggcctgccctgcctggcctgggcatctgcgcaggcgaaagcgctgtccaagcatcaggactttaatagcgctgtgcagctggtggagaacttctgtcgtaaccctgacggcgatgaggagggagtgtggtgctacgtggcaggtaagccaggtgacttcggttattgcgatttgaactattgtgaagaggccgtcgaagaagagaccggtgacggactggatgaagacagtgatcgggccattgaagggagaacggctacgagcgagtatcagactttttttaatcccaggacatttggctccggggaagccgactgtggactgcgccccctcttcgagaagaagtcattggaagacaagaccgagagagagctgcttgagtcctacattgacggccggatcgttgaggggtctgacgcagagatcggcatgagtccctggcaggtcatgctgtttagaaagtcaccacaagaactcctgtgtggagccagcctaatttcggatcgctgggtccttaccgccgcacactgtctactttaccccccatgggataagaacttcactgaaaatgatctcctagtaagaataggaaaacattcccgtactcgctacgaaagaaacatcgagaaaatatcaatgctggagaagatctatattcatcctcgctacaattggcgtgagaacctggaccgggacattgcgctgatgaaactgaagaaacctgtagccttctctgactatatccacccagtctgcctgcctgaccgggagaccgccgcaagcctcctccaggcaggctataaaggtcgggtgaccggctggggtaacctgaaggagacctggacagccaacgtgggcaaggggcagccctcagtgctgcaggtcgttaatttgcctattgtggaaagacctgtgtgtaaggattccaccagaattaggattacagacaatatgttctgtgccggctacaaaccagacgaaggtaaaaggggcgatgcatgcgagggggactctggaggcccctttgtcatgaagtcgcccttcaataataggtggtaccagatggggattgtgtcatggggcgagggctgcgacagggacggcaaatacggattctacacgcacgtcttccgactgaaaaagtggatccagaaggtgatagaccagttcggggag

SEQ ID NO: 10236 - DNA, 1866 bp, Artificial Sequence
  derived and/or modified sequence
atggcccacgtgagaggactgcaactgccagggtgcctggcactggctgcactctgctccctcgtgcactcgcagcacgtgttcctggcaccgcagcaggcacggtcgctcctccagagagtgcggagggccaacacctttctggaggaagtgaggaagggaaacctggaaagagaatgcgtggaggagacttgcagctacgaagaggcgttcgaggccctggagtcgtcgacggccaccgacgttttttgggctaaatacaccgcgtgcgagactgctcgcaccccacgcgacaagctggcagcttgcctggagggcaattgcgctgaagggctcggcacgaactaccgcggtcacgtcaatatcacccggtcgggcatcgagtgtcagctgtggcgatcccggtaccctcataagccggagatcaattctacgacccacccgggcgcggatcttcaggagaacttctgccggaaccccgactcatcgaccactggaccgtggtgctacaccactgacccgacggtgcgcagacaagaatgctccatcccggtgtgcggccaggaccaggtgactgtggccatgactccaagatcagaagggtcgtccgtgaacttgtcacccccacttgaacaatgcgtgccggatcgcggacagcaatatcaaggtagactcgccgtgaccactcatggactgccgtgcctcgcttgggcgtctgcgcaagcgaaagcactgtccaagcatcaagacttcaacagcgccgtccagctggtggaaaacttttgtcgaaaccctgatggggacgaagaaggagtgtggtgctacgtggccggaaagcctggtgacttcggatactgtgacttgaactactgcgaagaggccgttgaggaggaaactggagatggactcgatgaggactcagatcgggcaatcgagggacgaaccgccacctctgagtatcaaaccttcttcaaccccaggaccttcggctccggagaagccgattgcggcttgcgccctttgttcgagaaaaagagcctcgaagataaaactgaacgcgaattgcttgaaagttacatcgacggtcgcatagtggaaggaagcgacgcagagattggcatgagcccatggcaagtcatgctcttccggaagtccccccaggagttgttgtgtggagcatcgctgatctcagacagatgggttctcaccgccgcccactgcctgctgtaccccccttgggacaagaacttcacggaaaatgatctcctggtcaggattggaaagcacagccggacccgctacgaacgaaacatcgagaagatcagcatgttggagaagatatacatacacccgcgttacaattggagggaaaatctggatcgcgatatcgccctgatgaagctgaagaagccggtggctttctcggactacatccatccggtttgcctccctgacagagaaaccgcagcgagcctccttcaagccggctacaaaggaagggtgactgggtggggtaacctcaaggaaacctggactgctaacgtgggaaagggacagccgtcggtgctccaagtggtcaatcttccaatcgtggaaagaccagtctgcaaggactcgacccgcatccgcatcactgacaatatgttctgcgccggctataagccagacgaaggaaagcgcggagatgcttgtgagggggactcaggagggccattcgtgatgaaaagcccgttcaacaatcgctggtaccagatgggtattgtgtcttggggcgaaggctgcgaccgggacggaaagtacggcttctacacccatgtgttccgcctgaagaagtggatccagaaggtgatcgatcaatttggtgaa

SEQ ID NO: 10237 - DNA, 1866 bp, Artificial Sequence
  derived and/or modified sequence
atggctcatgtgcgaggactccagcttccgggatgcctcgctctggctgccttgtgcagtctcgtgcactcgcagcatgtctttctggccccacaacaggcgcgttcgctgctgcaaagggtacggcgagccaacaccttcctggaggaagtccgcaagggaaaccttgaacgggaatgcgtggaagaaacctgcagctacgaagaggcgttcgaggcccttgaatccagcactgccacggacgtgttctgggccaagtacactgcatgcgaaaccgcccggactccccgggataagttggccgcctgtctggaaggaaattgcgctgaaggtctgggaactaactatcgggggcatgtcaatatcacccgctcgggaatagaatgccagctctggagaagccggtaccctcacaagccggaaatcaatagtaccactcacccgggggcagacctgcaggagaacttctgccggaaccctgacagctcaaccactggtccatggtgctacactactgatccgaccgtgcggaggcaggaatgctcaatccccgtgtgcgggcaggaccaagtcaccgtggcgatgaccccaaggtcagaaggctcgagcgttaacctctcgcctccactggagcagtgtgtgcctgatcgcggccagcaataccagggccgcctggcggtcaccacgcacggcctcccgtgtctggcatgggcaagcgcccaagcaaaagctctttctaaacatcaagacttcaattcggcggtgcagctggtggaaaacttttgccgcaaccctgacggcgatgaagaaggtgtatggtgctatgtggccgggaagccgggcgactttggctactgcgatctcaactactgtgaggaggcagtggaagaggagactggagacggtctggacgaggacagcgatcgggcgatagagggacgcactgccacgtctgaataccagactttcttcaacccgaggaccttcggctctggtgaagcggactgtgggcttcggccgctcttcgagaaaaagtcactcgaggataaaacggagagagaactgcttgagtcctacattgacggacgcatcgtggaagggtccgacgccgaaatcggcatgtctccttggcaggtgatgctgtttcggaaatccccacaggaactgttgtgcggcgcttccctgatttcagatcgctgggtgttgacggccgcgcactgccttctgtaccctccatgggacaagaatttcactgagaacgacctgctggtccgtatcggaaagcactcaaggaccaggtacgagaggaatatcgaaaagatctcgatgctggaaaagatctacatccacccgcgctacaactggcgcgagaacttggatcgcgatatcgcactcatgaaactgaagaagccggtggcattctcggattacatccatcccgtctgtctgccagatcgagaaaccgcggcgtcgctgctccaggcaggatacaaaggccgcgtgaccggatgggggaacctgaaagagacttggacggcgaatgtcggaaagggccagccgtccgtgctgcaggtcgtcaatctccccatcgtggaacggccggtgtgcaaggattccacccggatcagaatcaccgacaacatgttttgcgcgggatacaagcctgatgagggaaagcgcggagatgcgtgtgagggagactcgggtggaccattcgtgatgaagtcccccttcaataacagatggtaccaaatgggcatcgtctcatggggagagggttgcgaccgggacggtaagtacggattttacacccacgtgtttaggttgaaaaagtggatccaaaaagttattgaccaattcggagaa

SEQ ID NO: 10238 - DNA, 1866 bp, Artificial Sequence
  derived and/or modified sequence
atggcccacgtgcggggactgcagctgccaggatgcctggcacttgccgcactgtgttccctggtgcattcacagcatgtgttcctggcacctcagcaggcaagatcgctcctgcaacgcgtgcgcagagccaacacgttcctggaggaagtgcggaagggaaatctggaacgggaatgtgtcgaggagacttgctcatacgaagaagcctttgaagcactcgaaagctccaccgccaccgacgtgttctgggctaagtacaccgcgtgcgagactgcccggacccctcgggacaaactggccgcgtgtctggagggaaactgtgcagaaggactgggtaccaattaccggggccatgtcaatatcacccggtcaggaatcgagtgtcaactttggagatctcgctacccgcacaaaccagaaatcaactcgactacccaccctggcgccgatctgcaggaaaatttctgtcgcaatccggattcctccaccaccggaccgtggtgctacacgaccgaccctactgtgcgccgccaagaatgctctatcccggtctgcggacaggatcaagtgactgtggccatgactccacggtcggagggaagctccgtcaacctgtcacctccactggaacagtgtgtgcccgaccgcggacagcagtaccaagggcgcctggctgtgaccacccacggcctcccttgtttggcctgggcgtctgctcaggctaaggctttgagcaagcaccaagacttcaactccgccgtgcagctcgtggagaacttctgccgcaatcccgatggagatgaggaaggggtgtggtgctatgtggcgggtaagccaggtgacttcggctactgcgatctcaattactgcgaagaagctgtggaggaagaaaccggcgacgggctggacgaagactcggacagagctattgaaggacggactgccacttcggaataccagactttcttcaatcctcgcaccttcggctccggagaagcggattgcggcctgcggccgctctttgaaaagaaatcactggaggataagaccgaacgggaactgcttgaatcgtatatcgacgggagaatcgtcgagggttcggacgcagagatcggcatgtcgccgtggcaggtgatgctgtttcggaaatcaccgcaggaactgctctgtggtgcgtccctcattagcgaccggtgggtgcttaccgcggcacactgcctgctttaccccccatgggacaagaacttcacggagaacgacttgctggtccgcatcggtaaacactcccgcaccaggtacgagcggaacatcgagaagatctccatgctggaaaagatatacatccatccaagatacaactggagagagaatctcgatagggacattgctcttatgaagctgaagaagccagtggccttcagcgattatatccatcccgtgtgtttgccggacagagagactgccgcgtcgctcctccaggccgggtacaagggaagagtaactggatggggaaacctgaaagaaacttggactgctaatgttggaaaagggcagccttccgtcctgcaggtggtgaatctgccgatcgtggaaagacccgtgtgcaaagactcaactcgcatcaggatcactgacaacatgttctgcgccggttacaagccggacgagggaaagaggggagacgcgtgtgaaggagacagcggtggaccattcgtgatgaaatcacctttcaataacagatggtaccaaatgggaatcgtgtcttggggagagggatgcgatagggatggaaagtacgggttttacactcatgtgttccgcctcaagaagtggattcagaaagtcatcgaccagttcggagag

SEQ ID NO: 10239 - DNA, 1866 bp, Artificial Sequence
  derived and/or modified sequence
atggcacacgttagagggctgcagttgccaggatgtttagctcttgccgctctgtgctccttagtccattcccagcatgtgtttcttgcccctcagcaagccagatcattgttacaacgtgtgagaagggcaaatacctttcttgaggaagtgaggaagggaaacttggaacgggagtgtgtggaggaaacatgcagttacgaggaggccttcgaggccctggaaagctctactgccacagatgtgttttgggccaagtataccgcttgtgaaacagcacgcactccaagggacaaattggctgcctgcttggaggggaattgcgcggagggcttgggcacgaattatcgagggcacgttaatatcactcgcagcggtatcgaatgtcagctctggagatccaggtatccccataagcccgagatcaacagtaccacacaccctggggctgatctccaggaaaatttctgcagaaaccccgacagctccacaacaggaccatggtgttatactacagaccccactgttcgcagacaggagtgttctatccctgtgtgtggtcaggatcaggttactgtagctatgaccccaagatctgagggatcaagcgtcaacctgtccccgcccctggagcagtgtgtgccggaccggggacagcagtaccagggacgcctggcggttacaacccatggcctgccgtgtctggcctgggcgtcggcccaggccaaggccttaagcaagcatcaggactttaatagtgcagtccagcttgttgagaacttttgtaggaatcctgacggcgacgaggagggggtctggtgttatgttgccggaaagcctggggactttgggtactgcgacctgaactactgtgaagaagccgtcgaggaggagactggagatggtctcgatgaagactcggatcgggccatcgagggccggaccgctacttcagagtatcagactttctttaacccaaggacatttggaagtggcgaggcggactgcggacttcgccccctgtttgaaaagaaatctctggaggacaagacggagcgggagctacttgaatcatacatcgatggcaggattgtggaggggtccgatgccgaaattggaatgtctccctggcaggtgatgttgtttagaaaatccccccaggagctcctgtgcggagcctcactaatttcagatcggtgggtgcttactgccgctcactgcctgctgtatcctccatgggacaaaaactttactgaaaatgatctcctggtacggattggtaagcacagccggacccggtatgagcggaacattgagaaaatcagtatgctcgagaaaatatatattcaccctcgttacaattggagagagaacttggacagagacatagccttgatgaaattgaaaaaacccgtcgcattttccgattatatacacccagtgtgtctgcccgacagggaaacagctgcttccctgctgcaggccggatataaaggccgcgtcaccgggtggggcaacctcaaagagacatggacagccaatgtaggcaagggccagcccagtgtattacaggttgtcaatcttccaatcgtcgagagacccgtgtgcaaggatagcacccggattaggatcacagacaatatgttttgtgccggctacaagcctgatgaaggcaagaggggcgacgcgtgcgagggagactccggcggaccctttgtgatgaagagccctttcaataaccgctggtaccagatggggattgttagctggggggaaggctgtgatcgggacgggaagtacggattttatacacatgtgttcaggctcaagaaatggatacaaaaggtgattgaccaattcggtgag

SEQ ID NO: 10240 - DNA, 1866 bp, Artificial Sequence
  derived and/or modified sequence
atggcccatgtgcgcggcctgcagcttcccggttgcctcgcactggccgccctctgctctctcgtacactcgcaacatgttttcctcgcaccacagcaagccaggtcgctgcttcagagggtgcgcagggccaacaccttcctagaggaggtgcggaagggcaacctggagcgggaatgcgtcgaggaaacatgtagctacgaagaggcatttgaggctctggagtctagcaccgctactgacgtattttgggctaaatataccgcgtgtgaaactgcccggacgccacgcgataagctggcggcctgcctggagggaaattgtgcggagggcctgggtacaaactatcggggacacgtcaatataacccggagcggtatagagtgccagttgtggcggagcaggtacccgcataagcctgagattaatagtactacgcacccgggggccgatttgcaggagaacttctgccgcaacccggattcgagcacaaccggcccgtggtgctacaccaccgaccccacagtacggcgccaggagtgcagcatcccggtgtgcggtcaggaccaggtgaccgttgccatgaccccccgcagcgaaggaagctcggtgaatctatccccccccctcgagcagtgtgtccctgatcgaggccagcagtatcagggacggttggcggtgactacccacggcttgccctgcctggcctgggccagcgcgcaggcaaaggccctctccaagcaccaggatttcaattcggcggtccagcttgtggagaacttctgcaggaaccccgatggagacgaggagggcgtgtggtgctacgtggcgggcaagcctggcgatttcggatattgcgatctcaactattgtgaggaagctgtggaagaggagaccggcgatggcctggatgaggattccgaccgcgcgatcgaggggcgaacagctacttccgagtaccagacgttttttaacccacgaacatttggttcaggcgaggccgactgcggattgcgccccctgtttgaaaagaagagcctggaagataaaacggagcgcgagctccttgagagctatatagatggacgaatagtggaggggtctgatgccgagatcggaatgtccccctggcaagtaatgctgttccgcaaatcaccacaagaactcctgtgcggcgcgtcgctgattagcgaccgttgggtcctcaccgcggcccactgcctactgtaccccccatgggacaagaattttacagagaatgatctgctagtgcgtataggtaaacattcgcgtacgcgatacgaacgtaatatcgagaagatttcaatgctggagaaaatctatatccatccaagatacaattggcgtgaaaatctcgacagggacatcgccctgatgaaactgaagaagcccgtcgcctttagtgattacatacatccggtctgcctaccagatcgggaaacggccgcgagcctgttgcaagccggctacaagggacgggttaccggctggggaaatctcaaagagacatggacggcgaatgtaggaaagggccagccctccgttctgcaggtagttaacctccccatagtcgaacggccggtatgcaaagatagtacgcgtatccgcatcacggataacatgttctgcgctggatacaagccagatgagggtaagcgaggcgacgcctgcgagggtgattctggtggaccattcgttatgaagagcccatttaacaaccgctggtatcagatgggcattgtgtcctggggcgagggctgtgatagagatggcaagtacggcttctacacccacgtgttccgcctgaagaagtggattcagaaggtaatagaccagtttggcgag

SEQ ID NO: 10241 - DNA, 1866 bp, Artificial Sequence
  derived and/or modified sequence
atggcccatgtgaggggtttgcagctgccgggatgtctcgctcttgcagctctttgtagcctggtgcattcacagcacgtctttctggcaccgcagcaggcaaggagcctgttgcagcgggttcgcagagcaaatacctttctcgaggaagtccgcaaaggtaatctggaacgcgaatgtgtggaagagacttgttcgtacgaagaggcatttgaagccctggaatcctccacggcaaccgacgtcttttgggccaagtacaccgcgtgtgaaaccgcacggacgcctagggataagctggccgcgtgtcttgaaggaaactgtgcagagggactgggtaccaattacaggggtcatgtgaatatcactaggtcaggtattgagtgtcaactttggcgttcgcgttacccacataaacctgagattaacagcactacccatcccggggcagatctccaagagaacttttgtcggaaccctgattcaagcactaccggtccttggtgctacactaccgacccaaccgtgcgcagacaggaatgttccatccccgtgtgcggacaagatcaggtgactgtcgcaatgactcctcggagcgagggttccagcgtgaaccttagcccgcccctggaacaatgtgtgcccgatagaggacagcaataccagggccgcctcgctgtgactacccacggattgccatgtctcgcatgggcgtcggcccaagcaaaggccctgtcgaagcatcaagatttcaattccgcggtccaattggtggaaaacttttgtagaaatcccgatggagacgaagagggcgtgtggtgttacgtcgctggaaagcctggcgatttcgggtattgtgatctgaactactgtgaggaggcagtggaagaggagactggagatggattggatgaagattcggatagagcgatagagggtcgaaccgcaacctcagagtaccagacgttctttaaccctcgtacgtttggttccggcgaggcggattgtggactccggccgctttttgaaaagaagtcacttgaggataagactgagagggaactgcttgagtcctacatcgatggacggattgtggaagggtccgacgcggagatagggatgagtccttggcaagtgatgttgtttcgcaagtccccccaggaacttctttgcggagcttcgttgatttccgacagatgggtgctgactgcagcacattgtctgctctacccaccgtgggacaaaaacttcaccgagaatgaccttcttgtcagaatcgggaagcactcccggacccgatatgaaagaaacattgaaaagatctcgatgcttgaaaagatttacattcatccacgctacaattggcgcgagaacctggaccgagacatagcacttatgaagctgaaaaaacccgtggcgttttcggactacattcacccagtgtgtctccctgatcgtgaaaccgctgcatcactgctgcaagccggatacaaaggaagggtgaccggttggggaaatttgaaggaaacctggactgcaaacgtgggaaagggtcaaccgtcagtgctccaagttgtgaatctgccaatcgtggagcgcccagtgtgtaaagactcgaccagaattagaatcaccgataacatgttttgtgccggatacaagcctgacgaaggtaagaggggtgatgcatgtgaaggtgactccggtggtccattcgtcatgaagagcccttttaacaacagatggtatcaaatgggtattgtctcatggggcgagggttgcgatcgggatggcaagtacggtttttacactcatgtgttccggctcaagaagtggattcaaaaagtgatcgatcaatttggtgaa

SEQ ID NO: 10242 - DNA, 1866 bp, Artificial Sequence
  derived and/or modified sequence
atggctcacgtccggggcctgcagcttcccgggtgtctcgcactcgctgcactgtgctcgctagttcattcccagcacgtttttctcgccccccagcaggcgaggtctctgctgcaacgagtccgaagggctaacacttttctagaggaagtaagaaaaggcaatcttgagcgcgaatgtgtcgaggaaacctgtagctatgaggaagcttttgaagctctggagtcgagtacggctacagatgtcttttgggccaaatacacagcctgcgagaccgcccgtaccccccgagacaagttggctgcgtgcctagaaggaaattgcgccgaggggttagggactaattatcgtggacacgtcaatatcacccgctccggtattgaatgccagctgtggagaagcagatatccgcacaaacccgagatcaactccaccacccaccccggcgcagacctccaggaaaatttttgtcgaaatccggatagttccaccacaggcccctggtgttataccaccgaccctaccgtgcgaaggcaggaatgttctattccagtctgcggacaggaccaggtaacagtcgctatgacccctaggtcagagggttcctctgttaatctctctcccccactcgaacagtgcgtgcccgatagggggcaacagtaccaggggcgcttggcagtgacaacccatgggcttccatgcctcgcctgggcatccgcccaagccaaggccttgtcaaagcatcaagacttcaactctgcagtacagcttgtggaaaacttttgcagaaatccagacggtgacgaagaaggtgtgtggtgctatgtggctggcaagccgggggatttcggatattgtgatctgaattactgcgaggaggcagtggaagaggagactggcgatggactagacgaggattcggatcgagccatagagggtcgaaccgctactagtgagtaccagacctttttcaatcctcgcacctttggctccggcgaggcagattgtgggctgaggccgctcttcgagaaaaagagcctggaggataagactgagagggaattgctggagtcctacatcgacgggcggatcgtggaaggctcagatgccgagatcggcatgtcaccctggcaggtcatgctgttcagaaaatccccccaggaacttttgtgcggtgcttccctaataagcgacaggtgggtgctgaccgcagctcactgcttgctttacccaccatgggataagaactttactgagaacgacttgctcgttcggattggtaagcatagccggacgagatatgagcggaacatcgaaaaaatcagcatgctagaaaaaatctatatccacccccgatacaactggcgagagaatctggaccgagacatcgccctcatgaaacttaaaaaacctgtggcgttttcagactatattcacccagtgtgtctccccgacagggaaaccgcagcgtctctgcttcaggcaggttacaaggggcgtgtcaccggctggggcaacttgaaggagacctggaccgcgaacgtgggtaagggtcaaccctctgtcctacaggtggtcaatctgccaattgttgaaaggcctgtctgtaaggattcaacgcgcatccgtattacagacaatatgttttgtgccggttataaacccgatgagggtaaaaggggtgacgcgtgcgaaggagactctggaggaccattcgtcatgaagagtccattcaataacaggtggtaccagatgggcatcgtctcttggggtgagggatgcgaccgtgacggaaaatatgggttctacacccatgtatttaggcttaaaaagtggatccagaaggtgatcgaccagtttggtgag

SEQ ID NO: 10243 - DNA, 1866 bp, Artificial Sequence
  derived and/or modified sequence
atggctcatgtgcggggtctgcagctccctggatgtttggccctggccgcgttgtgcagccttgtgcactctcagcacgtgttcctggccccccagcaggctcggagcctgttgcagcgggttcgcagagccaacacctttttggaggaggtgaggaagggcaacctggagagggagtgcgtggaggaaacctgtagttacgaggaggctttcgaggctttggagtcgtccaccgctacggacgttttctgggctaagtatactgcttgcgagaccgcccgcaccccccgcgataagcttgcagcctgtctagaggggaactgcgcggaaggtctcgggactaactaccgcggccatgtgaatatcaccaggagcggcatcgagtgccaactttggcgctcgaggtaccctcataagccagagatcaattcaaccacccatcccggcgcggatctgcaggagaatttctgtcgaaaccctgactcatctactaccgggccctggtgctataccacggatccaacagtgcgccggcaggagtgcagtatccctgtctgcggccaggaccaggtgaccgtggccatgacccctcgatccgagggatcctcagtcaatttgtctccccctttggaacagtgtgtacccgaccgcggccaacagtatcaggggcgtctggcagtgaccactcatgggttgccatgcctagcctgggcctccgcccaggctaaggccctgtccaaacaccaagattttaactcagccgtccagctcgtggaaaatttctgtcgcaaccccgatggcgatgaggagggcgtgtggtgttacgtggctggtaaaccgggagactttggctactgtgatttgaattactgcgaggaggccgtggaggaggagacaggtgacggactagacgaggatagcgaccgggccatcgagggtcgaaccgccacatcggaatatcagacattttttaacccccgtaccttcggaagtggagaagccgactgtgggcttcgaccccttttcgaaaagaaatccctcgaagataagactgagagggagctcctcgaatcatacatcgacggcaggatagtggaaggctctgatgccgagattggtatgtctccttggcaggtgatgctgttccggaagagccctcaggagctgctctgtggcgcctctctgatttccgatagatgggtactaaccgctgcccactgcctactgtatccaccctgggacaagaactttaccgaaaatgacttgctggtgagaataggcaagcacagtcgcacgaggtatgagcgtaatatcgaaaagatcagtatgctagagaagatatacatacatcccagatataattggagggagaatctggaccgtgacattgctctcatgaagctgaagaagcccgtagccttctcggactacattcatcccgtgtgcctgccagaccgcgaaacagccgcctcgttgctgcaggccggctacaagggcagggtaacaggctgggggaacctgaaggaaacgtggacggccaatgttggaaaaggccagcctagtgtcttgcaggtggtgaatctgcccatcgtagaacgccccgtctgcaaggatagcacccggatccgcataacagacaatatgttttgcgcgggctacaagcctgacgaagggaaaaggggagacgcctgcgagggcgactctggaggccctttcgtgatgaaatcccctttcaacaacaggtggtatcagatgggcatcgtgtcctggggggagggctgtgatagggacggcaagtacgggttttatacacatgtctttcggcttaaaaaatggatccaaaaggttatagaccagttcggcgag

SEQ ID NO: 10244 - DNA, 1866 bp, Artificial Sequence
  derived and/or modified sequence
atggcccacgtccgtggactgcagttacctggctgcctggctcttgcagccctatgctcactggttcatagccagcacgttttcctggcaccccaacaggccagaagtctgcttcaaagagtaaggcgcgccaatacatttttggaggaggtacgaaagggcaacctggagagggagtgcgttgaggagacctgcagctatgaggaggcgttcgaggccttagagagtagtactgctacagacgtgttttgggcaaagtacaccgcttgtgaaaccgcaaggacgcctcgcgataagctcgcagcttgtcttgagggtaactgcgcagaaggcctgggcaccaattacaggggtcacgtgaacattaccagatccggcattgaatgtcaactttggcggagcaggtacccacataagccggagataaattcaaccacacacccgggtgccgacctgcaggagaatttttgtaggaaccctgattcaagtacaactggcccttggtgctatacaacagatcctacggtgaggaggcaagagtgttccatcccagtctgtggacaagatcaggtgaccgtggcaatgacgcccaggagcgaagggagttccgtgaacctttctccccctctagagcagtgtgtaccagatcgaggccagcagtatcagggacgcttggccgtgactactcacgggcttccatgcctcgcctgggcatcggcccaggccaaggcgctatcaaagcaccaggattttaacagcgcagtccagctggtcgagaatttctgccgaaatcccgacggggacgaggagggcgtgtggtgttacgtagcgggtaagccgggtgacttcggttactgtgatttaaactattgtgaggaggccgttgaggaggaaaccggcgacggactggatgaggactccgacagggccatagagggtcgcaccgcaaccagcgagtaccaaacttttttcaaccctcgtacgtttgggtctggagaggcagattgcggtcttcgacctctgttcgaaaaaaagagcctcgaagacaaaacagagagggagcttttagagtcatacatcgacggcaggatcgttgaaggaagcgatgccgagataggcatgtccccctggcaggtcatgctgtttagaaagtcacctcaggagctactttgcggcgccagcctcatttctgaccggtgggtccttactgcggctcattgcctgttgtacccaccatgggataagaatttcactgagaacgacctcctggtgcgaatcggcaagcactcgcgaacccgatacgaacgcaacatcgaaaagatatcaatgctcgagaagatctatatccaccctaggtacaactggagagaaaacctggacagagacatcgccctgatgaagctcaagaagcccgtcgctttcagcgattacatccatccagtgtgccttccggatagggaaactgctgcgtccctgctgcaagctggatacaagggtcgggttacagggtggggcaatctgaaagaaacatggacagccaatgttggcaaagggcaaccctccgtgttacaggtcgtgaaccttcccattgtggaacgccctgtatgcaaggacagtacccggattaggatcacagataatatgttttgcgcgggttacaagcccgacgaggggaaaaggggcgacgcctgcgagggagatagcggcggccctttcgtgatgaagtcaccgttcaacaaccggtggtatcagatggggattgtgtcttggggggaaggctgtgatagggatggaaagtacggattttatacacacgtttttagactgaaaaagtggatccagaaggtaatcgaccagttcggagaa

SEQ ID NO: 10245 - DNA, 1866 bp, Artificial Sequence
  derived and/or modified sequence
atggctcatgtccggggcctacaacttccagggtgcctggcactcgcagcgctatgtagtctcgtgcattcgcaacacgtctttctggcaccgcagcaggcgcggtcactgttgcagcgcgtgcgaagggcaaacacctttctagaggaggtacggaaggggaacttagagcgggagtgtgtggaagagacctgcagttatgaagaggccttcgaggccctcgagagcagtacagccaccgacgtcttttgggccaaatacacggcctgcgagaccgccagaaccccccgggataaactagcagcctgcctggagggcaattgtgctgagggacttggtaccaattacaggggccacgtcaatataacccgtagcggaattgaatgccaactgtggcggagcagataccctcacaagccagaaataaattcaacgacacatccgggggcagacctgcaagagaatttttgcaggaaccccgattcctccacgactgggccctggtgctatacaacggaccctaccgtaaggcgccaggagtgttccattcccgtgtgcggccaggaccaggttactgtcgcaatgaccccgagaagcgaaggctcatctgtgaacctttctccccccctggaacagtgtgtccccgatagggggcagcagtatcagggccgtctcgccgttaccacacacggtctcccctgccttgcctgggcgagcgctcaagccaaggccttgagtaagcaccaggacttcaacagcgctgttcagctggtagagaacttttgcaggaaccccgacggtgatgaggaaggggtgtggtgttatgtggccgggaaacctggggacttcgggtactgtgacctgaattactgcgaggaggcagtggaggaggagactggagatggactggacgaggactctgatcgagcaattgaaggtcgcacagccacgtccgagtaccaaacttttttcaatccaaggacctttggttctggagaagcagattgtggactgcgacctctgtttgagaaaaagtctctggaagacaagacagagagggagcttttggaatcatatattgatggcaggatcgtagagggctcagacgcggagatcggaatgtccccatggcaagtaatgctgttccgaaaatccccccaggagctgctgtgcggtgcatcactgatctccgaccggtgggtgctgaccgctgcacattgccttttgtaccccccctgggacaagaatttcacagagaacgacctgcttgtgaggatagggaagcacagccgcacccggtatgagcgaaatatagagaaaatttccatgctggaaaagatatacatccaccctcggtacaactggcgtgagaatctcgatagagatatcgctctgatgaagctcaagaaacctgtggccttctcagactatatccaccctgtgtgtctgccggatcgtgaaaccgccgctagcctgctgcaggctggatataaaggcagagtgactggttggggcaatctgaaagaaacctggactgctaatgtgggaaagggccagccatcagttctccaggtggtgaatctgccaatagttgaaaggccagtttgcaaagactctacacgtatccgaatcaccgacaatatgttctgtgccggttacaagccggatgaaggtaagagaggggacgcttgtgagggggactccggcggcccattcgtgatgaagtcaccctttaacaatcggtggtaccagatgggtattgtaagttggggagaaggatgcgaccgagacgggaaatatggcttctacacccatgttttccgccttaagaagtggatccagaaggtgatagaccaattcggtgag

SEQ ID NO: 10246 - DNA, 1866 bp, Artificial Sequence
  derived and/or modified sequence
atggcccacgtcagaggactgcagttgcctggctgcctggcgcttgcagccctctgctcactcgtccactcccagcatgtgtttttggctccccagcaagcgcgctcactgcttcagagagtccggcgggcaaacacctttctggaagaagtccggaagggaaacctggaacgcgagtgcgtcgaagaaacgtgttcttacgaggaggcgttcgaagctcttgaaagcagtaccgccactgacgtgttctgggccaaatacaccgcctgcgagacggcgaggaccccgcgcgataagctggccgcatgcctggaaggtaattgcgccgagggcttggggaccaactatcgcggccacgttaacatcacccgaagcgggattgaatgccagctgtggaggagcagatacccacataagccggaaatcaattcgactacccacccgggggctgacctgcaggagaatttctgccgtaatccggactcgtcaactaccggaccatggtgttacactacggacccgaccgtgcgacggcaagaatgctccatccccgtgtgcggccaagatcaggtgactgtggctatgaccccgagatctgaaggatcgagcgtgaacctgtcacctccgctcgaacaatgtgtgccggaccgaggacaacaataccaggggcgcctggcggttacgactcacggacttccatgcctggcctgggcctccgcccaagcgaaagccctgtccaagcatcaagatttcaactccgctgtgcagctggtagaaaacttctgtcgcaatcccgacggcgacgaagagggagtgtggtgttacgtggcaggcaagcctggcgactttggatactgcgatctgaactattgcgaagaggcagtggaagaggagacgggcgacggactggatgaggactcggaccgcgcaatcgaaggaagaaccgccacctcggagtaccagaccttctttaacccaagaactttcggatccggagaagcggattgcggactgcggccactctttgagaaaaagtcactcgaggacaaaactgagcgggaactcctcgaaagctacatcgatggacggatcgtggaaggatccgacgctgagattggcatgagcccttggcaggtgatgctgttcaggaagagcccccaggaactcctttgtggggccagccttatcagcgatagatgggtgctcacggcggcccattgtctgttgtacccgccatgggataagaatttcactgaaaacgacctgctcgtacggatcggcaagcactcgagaactagatacgaacggaacattgaaaagatctcgatgctcgagaagatctacatccatccgcgttacaactggagagagaacctggacagggacatcgctttgatgaagctgaagaaaccggtggcattttcggattacatccacccggtgtgcctcccggacagagaaaccgcggccagcctgttgcaggcaggctacaagggacgggtgactggctggggtaacctgaaggagacttggactgccaacgtcggtaagggacaaccatcggtgttgcaagtcgtaaacctccctatcgttgagcgccccgtctgcaaggattccacccggatcagaatcactgacaatatgttctgcgccggatacaagccggatgagggcaaaagaggcgacgcctgcgaaggggactcgggcggccctttcgtcatgaagagcccgtttaacaatcgctggtaccagatgggtatcgtgtcgtggggtgagggatgcgaccgggatggaaagtacggtttctacacccacgttttcagactgaagaaatggatccagaaagtgattgaccaatttggagag

SEQ ID NO: 10247 - DNA, 1866 bp, Artificial Sequence
  derived and/or modified sequence
atggcacatgtgaggggactgcaattaccaggctgcctcgctctggcagcattatgctcactggtccatagtcagcacgtgttcctggcaccccagcaggctaggtcgctgttgcaaagagttcgcagagcaaatacattcttggaagaagtgaggaagggaaacctcgagagggagtgcgtggaggagacttgcagttatgaagaagcgttcgaagctctcgagtctagcacagctactgacgtcttctgggccaagtataccgcttgtgagaccgctagaactcctagggacaaactggcagcttgccttgaaggtaactgcgctgaaggtctgggcaccaactaccgcggtcacgtaaatattacgcgtagcgggatcgagtgtcaactgtggaggtctaggtatccccacaaacccgagatcaactccactactcatcctggcgccgacctccaggaaaacttttgtcggaacccggactccagcactacggggccgtggtgttacaccacggaccctacagtaaggcgccaggaatgtagcattcctgtgtgcgggcaggaccaggtcacagttgccatgaccccaagaagtgaaggttcctctgtcaatctttcccctcctctggaacagtgcgttcctgaccgtggtcaacaataccaggggcggctggcagtaactacccacggactgccatgcctggcctgggcttccgctcaagccaaggccctgagcaagcaccaggattttaactcagctgttcagttggttgagaatttctgtcggaatccggatggcgacgaggagggagtgtggtgctacgtggctggcaagcctggagattttggctactgcgacctgaactattgcgaggaggcagttgaggaagaaaccggcgatggactagacgaggactccgacagggcgatagaaggacggaccgccacaagtgagtatcagactttcttcaacccgaggacattcggctccggcgaggctgattgcgggctgagacccctatttgaaaaaaagtcactggaagacaaaaccgagcgggaactgctggagagctacattgacgggcgcatagtggagggatcagacgcggaaatcggtatgtctccttggcaggtcatgttgtttcgaaagtcaccccaggagctcttgtgcggcgccagcttaatttccgatcgctgggtcctgaccgccgcccactgtctgctgtaccctccttgggataaaaatttcaccgagaatgacttgctggtgaggataggtaagcacagccgaacaagatatgagagaaacatcgaaaagatttccatgctggaaaaaatttatattcacccccgctataattggcgggagaatctcgaccgcgacattgcattaatgaagcttaagaagcctgtcgccttctcggactacatacacccagtctgcctccctgatagggagacggccgcttccctactgcaggctggatacaagggccgagtcacaggatggggcaacctcaaggaaacatggaccgccaacgtagggaaggggcagccttccgtgctgcaagtagtgaacctgccaattgtggaacggccagtctgtaaagactcgacccggatcaggatcacagacaatatgttctgcgccggatacaagccggacgaaggcaagaggggtgacgcttgtgaaggagattccggcggcccctttgtgatgaagtcacccttcaataacagatggtatcagatggggattgtgtcttggggtgaggggtgtgaccgggacggaaagtacggattctatacccacgtcttccgtcttaaaaaatggatccaaaaagttattgatcagtttggcgag

SEQ ID NO: 10248 - DNA, 1866 bp, Artificial Sequence
  derived and/or modified sequence
atggcacacgtgcggggcctccagctgcccggatgtctcgccctggccgcactgtgttcccttgtccatagccagcacgtctttctggcaccgcaacaggcgcgctcgctgcttcagcgagtgcgaagagcaaacacttttcttgaagaggtgcggaaagggaatctggagcgggaatgcgttgaagaaacttgtagctacgaggaagccttcgaagcactggaatcgtccactgcaaccgatgttttttgggcaaagtacaccgcatgtgaaaccgcccggacgccgcgcgacaagctggctgcatgccttgaagggaactgcgcagaaggcttgggaaccaactaccgcggtcatgtgaatatcacccgatccgggatcgagtgccagctgtggcggtccagatatccacacaagcccgaaatcaattcgactacccatcctggagcagatctccaagaaaacttctgtagaaacccagattcgtccaccactggaccttggtgttataccactgatccaacggtgcggcgacaagagtgctcgatcccagtgtgtggtcaggatcaggtcactgtggctatgaccccgagaagcgaaggctcaagcgtgaatctgtcaccaccgcttgagcagtgcgtgccagatcgtggacagcaataccaaggtcgcttggcagtgactacgcatggcctgccttgtcttgcatgggcgtcagcacaagctaaagcccttagcaaacatcaggatttcaattctgcagtgcaactcgtggagaatttctgtcgcaaccctgacggcgacgaagagggagtctggtgttacgtggcaggcaagcccggtgattttgggtactgtgatctgaattactgtgaggaggcagtggaagaagaaacgggcgacggtcttgatgaagattcagatagggcaatcgaaggtcgcactgcaacctctgaataccaaaccttctttaaccctcgtactttcggatccggagaggcggactgtggacttaggcctctttttgaaaagaagtctctggaggacaagaccgaaagagaactgctcgagagctacattgacgggcgaatagttgaaggctcagatgccgaaataggtatgagcccttggcaagtgatgcttttcagaaaaagcccgcaagagttgctctgtggagcgtccctcattagcgacagatgggtgctgaccgcggctcattgtttgctgtaccccccttgggataagaacttcactgagaacgacttgcttgtccgcatcggtaaacactccagaactagatacgaacgtaacatcgagaagatctccatgctcgaaaagatttacatccatccaagatacaattggcgcgaaaacctggatagggatatagcactgatgaaacttaagaagcctgtggcatttagcgactacatccatcctgtgtgcttgcccgatagagagactgcggcctcgcttctccaagcaggctacaagggacgtgtcaccgggtggggtaatctgaaggagacttggacggcaaatgtcggaaagggacaaccttctgtccttcaagtcgtgaacctcccgattgtcgaaaggccagtgtgcaaagacagcacccgcataaggattaccgataacatgttttgcgcggggtataaaccagacgagggaaagcggggggacgcgtgcgagggtgactccggtggaccgtttgtgatgaagagcccatttaacaaccgatggtaccaaatgggaatagtgagctggggggaaggttgtgatcgagacggtaaatacggtttttacactcatgtctttcgtctgaagaagtggattcagaaggtcattgatcaatttggagaa

SEQ ID NO: 10249 - DNA, 1866 bp, Artificial Sequence
  derived and/or modified sequence
atggcacacgttcggggcttgcagttgccaggatgcctcgctctcgccgccctttgttctttggttcactcacagcatgtgtttctcgcgccacagcaggcgcgaagtttactccagcgcgtccgtagagctaacacttttctcgaggaagtgagaaaagggaacttagaacgcgagtgtgtcgaggagacgtgttcctacgaagaagctttcgaagcactcgagtcttctaccgcaaccgatgttttctgggctaaatacaccgcatgcgaaacagcgcgcacgcctagagataagctcgcagcctgtctggaagggaattgtgcggaaggactggggactaattatcgcggccacgtcaatatcacacgttcgggcatcgaatgtcagctctggaggtcacgatacccccataaaccagaaatcaatagtacaacgcatcccggcgccgatcttcaggagaacttttgtcgtaatcccgactcatcaaccactggaccttggtgttacaccacagacccaaccgtacgaagacaagaatgttcaatccccgtgtgcggacaggatcaggtgaccgtcgccatgactcccaggtcagaaggcagttccgtgaatctctcaccgccgctcgaacagtgcgtgcccgatcggggacagcaataccaaggaagactcgccgtaacaacacacggacttccctgtttggcttgggcatccgcgcaggccaaggcgctttccaaacatcaagatttcaactcagccgttcagctggtcgaaaacttttgtcggaaccccgatggcgatgaggaaggcgtgtggtgctacgtggctgggaaacctggagatttcgggtactgcgatcttaattactgcgaggaggcagtcgaggaagaaacaggagacggactggacgaggattctgatagagccattgaaggccgtacggccacgtcggagtaccaaacattctttaatccgaggaccttcggctcaggggaagcagactgcgggctgcgcccactcttcgagaaaaaatcactggaggataaaaccgaaagggagctgctggagtcctacatcgacggcagaattgtcgaaggatctgatgcagagatcggaatgtctccctggcaggtcatgttatttcggaagtctccccaggaactactgtgcggcgccagtcttatttcggatagatgggtgcttacagccgcccactgtctactctatccgccctgggataagaactttacggaaaacgatctcttagttagaatcggcaagcacagcagaacgaggtatgaaaggaatatagagaaaatctccatgcttgagaagatctacatacatcctcgttataattggagggagaacctggatagagacatagccttgatgaaactcaagaagcccgtcgccttttccgattatatacatcccgtgtgcctgcctgaccgggaaactgcagcaagtctgctgcaggctggttataaaggaagagtaactggttggggcaacctgaaggaaacttggactgctaatgtgggtaaaggtcagccctcagtcctccaggtggtgaatctgcctatcgttgagagaccggtttgtaaggatagcacacgcatccgaattaccgataatatgttctgtgccgggtataagccagacgagggcaaacgcggcgatgcgtgcgaaggggattcaggaggcccctttgtgatgaaatccccctttaataacaggtggtaccagatgggtattgtctcttggggggaggggtgtgacagagatggcaagtacgggttctacacccacgtgtttagactgaaaaaatggatccagaaggtgatcgatcaattcggtgaa

SEQ ID NO: 10250 - DNA, 1866 bp, Artificial Sequence
  derived and/or modified sequence
atggcccatgttcggggactccagttaccaggatgcctcgcgttggctgcattatgctctctggttcattcccaacatgtgtttcttgcaccacaacaagcgcggtcattacttcagcgtgtcagacgcgctaacacttttttggaagaagtgcgaaaaggcaatctggaacgggaatgtgttgaagaaacttgttcgtacgaagaggctttcgaggctctcgaaagtagtacagctacggacgttttttgggctaagtacacagcatgcgagacggcgagaaccccacgagataaactcgcagcatgcctggaaggaaattgcgccgagggattagggaccaattaccgtgggcatgtgaatatcacaagaagtggaattgagtgtcaactttggagatctcgctatcctcataaaccagaaattaatagtactactcatccaggtgctgatttgcaggaaaacttttgtcgaaatccagattcgtcaaccacaggtccttggtgttataccactgatccaacagttagaaggcaggagtgtagcatcccggtctgtggacaagaccaagtgactgtcgctatgaccccacgctcagaaggatcgagtgtgaatctaagcccaccccttgagcaatgtgttccagaccgtggacaacaatatcaaggaagactcgcagtcacaactcacggccttccctgccttgcctgggcctccgcacaggcgaaagcattatcgaagcatcaagatttcaattctgctgtgcagctcgttgaaaatttctgtcgcaacccagatggtgacgaagaaggagtttggtgttacgttgctggaaagccaggagatttcggatattgcgatttgaactactgtgaagaggctgttgaggaggaaaccggagatggacttgatgaggatagtgatagagctattgaaggacgaactgctacttctgagtaccaaacttttttcaatccgcgtacattcggttctggagaagcggattgcggcctaaggccgcttttcgagaaaaaaagcctagaagataagactgagagagagttgctagaatcatacattgatgggcgtatcgtagaaggttctgatgctgaaataggaatgtccccatggcaagtcatgctcttccgtaaaagtccacaagagttgttgtgcggagcttctctgatttcagaccgatgggtgttaacggctgcgcattgcttactttacccaccatgggataaaaattttactgaaaacgatcttcttgttcggattgggaagcactctcggacgaggtatgagagaaatatagaaaaaatttcaatgctagaaaagatttacatacatccacgatataattggcgtgaaaacttggacagagacattgccttgatgaaattgaaaaagcccgttgctttttctgattacattcacccagtctgcctcccagatcgagaaactgctgccagcttactacaggcaggttacaaaggacgtgtaacaggttggggaaatctaaaagaaacttggacagctaatgtgggtaaaggacagccatctgtccttcaggttgtcaatttaccaatagtcgagcgaccagtctgtaaagattccactcgaatccgaattacagataatatgttttgcgctggttataagcctgacgaaggaaagcgcggagatgcatgtgaaggggactctgggggaccatttgtaatgaagtcgccattcaataatcgctggtaccaaatgggaatagtgtcatggggagaaggttgcgatagagatggaaaatatggtttctacactcacgtgttccgtcttaagaagtggatacaaaaagtaattgatcaatttggagag

SEQ ID NO: 10251 - DNA, 1866 bp, Artificial Sequence
  derived and/or modified sequence
atggcgcatgttcgcggtctgcagctccccggctgcctcgccttagcagccctgtgttctcttgttcattcccagcacgtattcttagcgcctcagcaggcccggtcactgcttcagagggttaggcgcgcaaatacattcctggaggaagtgcgaaagggcaacctcgaaagagagtgtgtcgaggagacgtgtagctatgaggaagcgtttgaagctctcgagtcaagtaccgcaacagacgtattctgggccaaatacactgcttgtgaaacagctaggactcctagagataaactggccgcctgcttagagggtaattgcgctgagggtctcgggacaaactacaggggccatgtgaatatcaccaggagtggcatcgagtgccagctttggaggagtagataccctcacaagccagagattaatagtaccacccaccctggcgccgaccttcaagagaatttctgtagaaacccggactccagtactactggaccttggtgctacacaaccgacccgaccgtacggagacaggagtgctccattcccgtgtgcggacaggaccaggtgaccgtggcgatgaccccaaggtccgagggtagttctgtcaacttgagcccccccctggagcagtgcgtgccagacaggggacagcagtatcaggggcggctggccgttactactcacgggctcccttgcctggcttgggccagcgcccaggcgaaggccctcagcaagcaccaggactttaatagcgccgtccagctggttgagaatttctgtcggaaccctgacggagatgaggaaggggtatggtgctatgtcgcaggaaagccaggcgactttgggtattgtgatctaaattactgcgaagaggccgtagaagaagaaactggggatgggttggatgaggattctgatagggcgatcgagggcaggaccgcgacttcagagtaccaaactttttttaacccacgcacctttggaagcggcgaagccgactgcggcctaagaccacttttcgagaaaaaatccctggaagataagaccgaacgcgaactgctggagagttatatcgatggacgcattgtggagggatccgatgccgagatcggcatgagtccctggcaggttatgctcttcaggaagagtcctcaggagctactttgtggcgctagcttgatttctgacaggtgggtcctgacagctgcccactgtctgctttaccccccttgggacaagaactttacagagaacgacctgctagtccgtatcggaaagcactccagaacacgttacgagaggaatatagagaagattagcatgctggaaaagatctacatccaccccagatacaattggagggaaaacctggatagggatattgcgctgatgaaactcaagaagcctgtggcgtttagtgattacattcaccctgtgtgcctgcccgaccgcgaaacagcagctagcttgttgcaggctgggtataagggacgcgtaaccggttggggtaaccttaaggagacctggactgctaacgtcgggaaaggacagccgagcgttctccaggtggtgaatttaccgattgttgaaagacctgtctgtaaagatagcactagaatacgcataacagataatatgttttgcgctggctacaaacccgatgaaggcaagaggggagatgcctgcgaaggggatagtggcggcccctttgtcatgaagtcccccttcaataacaggtggtatcagatgggcatcgtgtcttggggagaggggtgcgatagggatggcaagtacgggttctacactcatgtgtttcggcttaagaaatggatccagaaggttatcgaccagttcggcgag

SEQ ID NO: 10252 - DNA, 1866 bp, Artificial Sequence
  derived and/or modified sequence
atggctcatgttcgtggattgcaattacctgggtgtttggctttggctgccctgtgttcccttgtacatagccaacatgtgttcttggctccccagcaggcaaggtctttacttcagcgagtccgtcgggctaacactttcttggaagaagtaagaaaagggaatttggagcgcgaatgcgttgaagaaacttgttcttatgaggaggcattcgaggccttggagtcttcaacagctaccgatgtattctgggctaagtacacggcttgtgagacagcaagaacgcccagagataaactggccgcttgcctggaaggaaattgtgctgaagggctaggcactaattaccgaggacatgttaatatcacaagaagcggaattgagtgtcagttgtggcggtcacgttatccacataaaccggaaatcaattccaccactcaccctggggccgacctccaagagaatttttgtagaaatcccgacagttcaacaacagggccatggtgctacaccaccgatcctacagtgagacgacaagagtgttcgatacctgtttgcggtcaagaccaggtaacagtggctatgactcctcggagcgagggcagctccgtcaatcttagccctcctcttgagcaatgtgtccccgatcgtggtcagcaatatcaggggagattggcagtgacgactcatggtcttccttgtctcgcatgggctagtgcacaagctaaggctctctcaaaacatcaagatttcaattcagccgttcaattggtagaaaatttctgccgcaaccctgatggagatgaagaaggtgtgtggtgctacgtcgccggtaagcctggtgactttggctattgcgacttgaactattgtgaggaagcagtggaagaggaaaccggcgacggactggatgaagatagcgatcgtgcaattgaaggtcgcactgctacctcggagtatcaaacattttttaacccaagaacattcggcagcggtgaggctgattgtggacttcgtcctcttttcgaaaagaagagtctcgaagataaaaccgaacgtgaactcctagagtcatatatagacgggcgaattgttgaaggaagtgacgctgaaatcggtatgagcccttggcaagttatgctcttccgtaagagtccccaagaacttttgtgcggcgctagcttgatttctgaccggtgggtgctgactgctgcgcattgtttgctttatcctccatgggacaaaaatttcaccgaaaatgacctgctcgttcgcataggaaagcattctagaactcgatatgaacgtaatattgagaagatttctatgttggagaaaatctacatccatcctaggtacaattggagagagaacctggatagagatattgcattgatgaagctcaaaaaaccggttgccttctctgactatatacacccagtttgccttcctgatagagaaactgccgcttcactcctgcaagctggatataaggggagagttacaggttggggcaacctcaaagaaacctggacagccaatgtcggtaaggggcagccttcggtacttcaagtggtgaatctgcccattgtcgagcgtcccgtatgcaaggattcaactaggattcgtattacagataacatgttctgtgccggttataagcctgatgaaggaaagagaggagatgcgtgcgagggggatagcgggggtccttttgttatgaaatctccattcaacaatcgttggtatcaaatgggaatcgtgagttggggggagggttgcgacagggatggtaagtacggattctatacacacgtgttccgtttgaaaaagtggatacagaaggtgattgaccaatttggggaa

SEQ ID NO: 10253 - DNA, 1866 bp, Artificial Sequence
  derived and/or modified sequence
atggcacatgtgcggggcctgcagctccctggttgcctggccttggctgctctgtgttcgttagtgcattctcagcatgtgtttttggcgccacaacaggcgagaagcctgttgcagcgagtgcggagagccaacacatttttagaggaggtgcgcaaagggaatttggaacgagagtgtgttgaagagacatgctcatatgaggaggctttcgaggccctggagtcttccaccgccactgacgtgttctgggccaaatacaccgcctgcgagacagcacgcacgccacgggacaagcttgcggcgtgcctggaaggtaattgtgccgaggggctgggcactaattatcgaggtcacgtgaatatcaccaggagtggtatcgagtgtcagctctggcgctcacggtatccacacaagcctgagatcaatagcacaactcaccctggtgctgacctgcaggagaacttctgtcgtaatcccgacagctccaccacaggtccgtggtgttacactactgacccaaccgttcgccgtcaggaatgttctattcctgtctgcggccaggatcaagtgaccgtcgcgatgacaccccgttccgaaggatcctccgtcaacctcagcccccctctcgagcaatgcgtgccagataggggacagcagtatcagggccggctggctgttacaacccacggactgccatgtctggcttgggcctccgctcaagcgaaggctctctcgaaacaccaggacttcaactcagccgttcagctggtggaaaacttctgccgaaacccagatggcgatgaggaaggcgtgtggtgttatgtcgctggaaagccaggagatttcggctactgcgacctgaattactgcgaggaggccgtagaggaagaaactggcgacggtctggacgaggattcagaccgggctatcgaaggacggaccgccaccagcgaataccaaaccttttttaacccacgcacattcggaagcggcgaggccgactgcggtctcagacccctgtttgagaaaaaatccctggaggataaaaccgaaagagaattgctcgagtcttacattgacgggagaattgtggaaggctccgatgctgaaattggcatgtccccttggcaggtgatgctcttccgcaagtctcctcaggagctgttgtgcggcgcaagtctcattagtgaccggtgggttctcaccgctgcccattgtcttttgtaccctccatgggataagaatttcacagaaaacgatcttctggtgcgaatagggaagcacagtcggactaggtatgagcgaaatatagaaaaaatctctatgcttgagaagatttatatccatccgcggtataactggcgggagaatctggaccgtgatattgcgttaatgaaattgaagaagcctgttgcgttctctgactatattcaccctgtgtgtttgccggatagagagaccgcagcatctctgttgcaggctggatacaagggaagggtgaccggctggggaaacctaaaagaaacttggactgcgaatgttggcaaggggcaacctagtgtgctgcaggtagtgaacctacccatcgtagagcgtccagtatgtaaggactctactcgcatcagaataaccgacaatatgttttgcgctggctacaaacctgatgagggcaaaaggggcgatgcctgcgaaggcgactcaggcggcccattcgtcatgaaatctcctttcaacaataggtggtaccagatgggtatcgtatcgtggggagagggctgcgaccgcgatggcaagtacggattctatacccatgtttttcgccttaagaagtggatccagaaagtcatagatcagtttggtgag

SEQ ID NO: 10254 - DNA, 1866 bp, Artificial Sequence
  derived and/or modified sequence
atggctcatgttagaggattacaattaccaggttgtcttgctttagcagctctttgtagcttagttcattcacaacatgtttttcttgctccacaacaagctagatcattacttcaacgtgttcgtagagcaaacacattcttagaagaagttagaaaagggaatttagaaagagaatgtgttgaagagacttgttcatatgaggaagcttttgaagcacttgaatcttcaacagctactgatgttttctgggcaaaatatacagcatgtgagacagcaaggacacctagagacaaattagcagcttgtttagaaggaaattgtgctgaaggtttaggaacaaattatagaggacatgttaatattactagaagtggaattgaatgtcaattatggagatcacgatatccacataaaccagaaattaattcaacaacacatccaggagcagatttacaagaaaatttttgtagaaatcctgacagttcaactactgggccatggtgttacactactgatccaacagttagaaggcaggaatgctctataccagtttgtggacaagatcaagttactgttgcaatgactccaagatcagaaggatcttcagttaatttatctccacctttagaacaatgtgttcctgatagaggacaacaatatcaaggtcgtcttgctgttacaacacatggactaccttgtttagcttgggcaagtgcacaagcaaaagctctttctaaacaccaagattttaatagtgcagttcaattagttgaaaatttttgtagaaatccagatggtgatgaagaaggagtgtggtgttatgttgctggaaaaccaggggatttcggttattgtgatcttaattattgtgaagaagctgttgaagaagaaactggagatggattagatgaagatagtgatagagcaattgagggaagaacagcaactagtgaatatcaaacttttttcaatccacgaacatttggttcaggagaagctgattgtggtttaagaccactttttgaaaaaaaaagtttagaagataagacagaaagagaacttttagaatcatatattgatgggagaattgttgaaggatcagatgctgaaattggtatgagtccatggcaagttatgctattcagaaaaagtccacaagaacttttatgtggagcaagtcttattagtgatagatgggtattgactgcagctcactgtttactttatccaccatgggataagaattttactgaaaacgatttacttgttagaattggtaaacattcaagaactagatatgaacgtaatattgaaaaaatttctatgttagaaaagatttatattcatccaagatataattggagggaaaacttggatagagatattgctcttatgaaacttaaaaaacctgtagctttttctgattacattcatccagtatgtttaccagacagagaaactgcagcaagtttattacaagctggatataaaggaagagtaactggatggggtaatttaaaggaaacttggactgcaaatgtcggaaagggtcaaccaagtgttttacaagtagttaatcttccaattgtagaaagacctgtttgcaaagatagtacaagaattagaattactgataatatgttttgtgctggatataaaccagatgaaggaaaaagaggtgatgcatgtgaaggagattctggaggaccattcgttatgaaatcaccatttaataatagatggtatcaaatgggtattgtttcatggggtgaaggatgtgacagagatggaaaatatggattctatactcatgtatttcgtttaaaaaaatggattcaaaaagttattgatcaattcggtgaa

SEQ ID NO: 10255 - DNA, 1866 bp, Artificial Sequence
  derived and/or modified sequence
atggcgcacgtacgcgggttgcagttaccggggtgcctagcgctggcagctctgtgcagtctcgtccatagtcagcacgtttttttagctccgcagcaagcaaggagcttgcttcagcgggtgcggcgtgcaaatacgttcctggaagaagtacgtaaaggcaatcttgagagagaatgtgttgaagaaacatgctcatatgaagaagcgtttgaagcgcttgaatcaagcacagcaaccgatgttttctgggccaagtacacagcgtgcgagactgctcggactccgagagacaaattggccgcctgcctagagggaaattgcgcggaagggcttggcacaaactatcgcgggcatgtaaacattaccaggtctggaatcgagtgtcagctctggcggagcaggtatcctcataaacctgagataaactcaacaacgcacccgggggcagatctgcaagaaaatttttgcagaaatccggattcaagcacaacaggcccttggtgctatacgacggatcccacagtgaggcgccaagaatgttcaattccggtgtgtgggcaggatcaagtcacagtcgcgatgacaccgcgttccgaaggctcgagcgtgaatctttcgcctcctcttgaacaatgcgtgcccgatcgtggccagcagtatcaaggaagactggccgttacaactcatggacttccgtgcctggcctgggcttctgctcaggcaaaagcattaagtaaacatcaggacttcaattcagcagtccagctcgttgaaaatttctgccgtaatccagacggggacgaagaaggggtttggtgctatgtggcagggaaaccgggcgattttggttactgcgatctcaactactgcgaagaggctgttgaggaggaaacaggagatggattagatgaggattctgatcgtgcgattgaaggccgcacggctacaagcgaatatcaaacgttttttaatccgagaacgttcggctctggcgaagccgactgcggccttcggcctctttttgaaaaaaaatcacttgaagataaaacagagcgcgagttgttggaatcatacatcgacgggcggattgtagaagggtctgacgcagaaattggaatgtcgccatggcaagtcatgttgttccggaagtcaccacaagagcttctgtgcggagcttcactgattagcgaccgctgggtgctgacggcagcacactgtttgttgtatccaccgtgggacaagaacttcacagagaatgaccttcttgtgcgtatcggcaaacattctaggacaagatacgaacgtaatatcgagaaaatttcaatgctggaaaaaatctatattcaccctcgctacaactggcgtgaaaacttagacagagacattgctcttatgaaactgaaaaagccagtcgccttttccgattacatccatccggtgtgtttaccagatagggaaacggcagcatcactactgcaagccggttataaaggcagagtaacaggctggggtaatctcaaggaaacatggaccgccaatgtgggaaaaggacagccttccgtcttacaagtggtaaaccttccgatagtagaacgtcctgtctgcaaggattccacgagaattcggataactgataatatgttctgcgctggttataaaccagatgagggcaaacggggtgatgcatgtgagggtgacagcgggggaccgtttgtaatgaaatcaccttttaacaacaggtggtaccagatggggatcgtatcttggggtgaagggtgtgaccgcgatggaaaatatggattttatacgcacgtgtttagattgaagaaatggattcagaaagtgattgatcagtttggggaa

SEQ ID NO: 10256 - DNA, 1866 bp, Artificial Sequence
  derived and/or modified sequence
atggcacatgtgcggggcttgcagcttcctggctgtctggcgctggcagccctgtgttccctggtgcacagccaacacgtgtttctcgccccccagcaagcaagatcactccttcagagagtgagacgggccaacacttttctcgaagaggtccgcaagggaaatcttgaaagagaatgtgtcgaagaaacctgctcctacgaggaagcatttgaagcactggaatcgtcgactgctacggacgtgttctgggcaaagtacaccgcatgtgaaaccgcaagaactccgagagataagctcgcagcctgcctggaaggtaactgtgctgaaggactggggaccaactacagaggacatgttaacatcactcgatcaggtatagagtgtcaactctggcgaagccgatacccccataaaccagaaatcaactccacgactcaccctggcgcagatctgcaagaaaacttctgccggaaccctgattcgtccacgaccggaccgtggtgttacaccaccgatcccactgtccgtaggcaggagtgctcaattcctgtgtgtggacaggaccaggtgactgtggcaatgacccctcgatcggagggatcatcggtcaacttgtcgcctccccttgaacaatgtgtgcctgaccggggacagcaataccagggtaggctcgcagtgaccactcatggacttccttgtctggcatgggcctccgcgcaagcgaaggcccttagcaagcatcaagatttcaatagcgcagtgcaactggtggaaaacttttgtagaaaccccgatggagatgaggaaggagtctggtgttacgtggcaggcaagccaggagacttcggttactgtgacctgaactattgcgaggaagcagtggaagaagaaaccggcgacgggctggacgaagattcggatcgcgctattgagggccgtactgcgacttcagaataccaaactttctttaaccccagaaccttcggttcgggggaggcagactgtggactccggccactctttgagaaaaagtcccttgaggacaagaccgagcgcgagctcctcgaatcctacatagatggacggattgtggaaggctcggatgcagaaatcggcatgtcaccctggcaggtcatgctgttcagaaagtccccacaagaacttctgtgcggggcgtcactgatttcggataggtgggtgcttaccgcggcacattgtctcttgtaccctccttgggataagaactttaccgaaaacgacttgcttgtccggatcgggaagcattccagaactcgatacgagagaaacattgaaaagatctcgatgcttgagaagatttacattcatccaagatataactggcgtgaaaatcttgatcgagatattgcccttatgaaactgaagaagccggtggccttctcggactatatccaccctgtctgtctcccagaccgagaaaccgctgcgtcactgcttcaggccggatacaagggacgtgtgaccggctgggggaacctcaaggaaacctggaccgccaacgtgggtaaggggcaaccgtcagtcctccaagtggtgaatctgcctatagtggaaagacctgtgtgtaaggattccactagaatacgcattaccgataacatgttttgcgccggttacaagcctgatgaaggtaaacgcggagatgcgtgtgaaggtgactctggaggacctttcgtgatgaaatctccattcaataaccgctggtaccagatgggaatcgtgtcatggggagagggttgcgatagagacggaaagtatggtttttacacccacgtgttccggctgaagaagtggattcaaaaagtgatagatcagttcggagag

SEQ ID NO: 10257 - DNA, 1866 bp, Artificial Sequence
  derived and/or modified sequence
atggcccatgtgcgtggcttgcagctccctgggtgtttagctctggctgccctgtgttccctggtacattcccagcacgtgtttctggcccctcagcaggcacggagcctgctgcagagggtcaggcgtgcaaacacgtttctcgaagaagtgagaaaggggaatcttgagagggagtgtgtggaggagacttgctcctacgaggaagcgttcgaagccttggaatcctctacggccacagacgtgttctgggccaagtatactgcctgtgagaccgctcgcacgcccagggataaactagctgcatgcctggagggaaactgtgccgaagggctagggacaaattatcgcgggcacgttaacatcactagatctggaatagaatgccagctctggcggagtaggtatccacacaagcctgagattaactccaccactcacccaggagccgatctgcaggaaaatttttgtagaaaccctgacagctcaactacaggcccctggtgctatacaacagatccaactgtgcgacgtcaggaatgtagcatacccgtgtgtgggcaggaccaggtaaccgtcgctatgacgccccgcagcgaaggctcaagtgtgaacctctccccgccacttgaacagtgcgtgccagatcggggacagcagtaccagggacgcctcgccgtgactactcatggactgccttgtctcgcctgggcatccgcacaagctaaggctttatctaaacatcaggacttcaactcagcagtacagctggtagagaatttctgcaggaatccagatggggacgaggagggagtttggtgctacgtggctgggaaaccaggggactttggctactgcgacctcaactactgcgaagaagccgttgaagaagagactggtgacggtctcgatgaagattcagaccgcgcgatcgaaggcagaaccgcaacatctgaataccagacttttttcaaccctagaacttttggatccggcgaagcagattgtggtctaaggcctctgtttgaaaagaaatccctcgaggataagaccgagcgagaactcctggagagctacatcgatggaagaatcgtagagggaagtgatgctgagatcgggatgtcaccctggcaagttatgctgtttcggaagtccccacaagagctcctctgcggagcctctcttattagcgaccgatgggttctaaccgctgcacattgtttgctgtatccaccgtgggacaaaaacttcacggagaacgacttactcgtgcggatcggcaagcattccaggacccgatatgagcggaatatagagaagatctcaatgctcgaaaaaatttacattcaccctcgctacaattggcgagaaaacctcgacagggatatcgcgctgatgaagctcaaaaaaccagtggccttttcggattacattcatccggtttgtcttccagacagagagaccgcggcgtctctgttgcaggcggggtacaaggggagagtgacgggatggggaaacttgaaggaaacctggaccgctaacgtcggcaaaggccagccaagtgtacttcaggttgttaatttgccaattgtggagcgccccgtctgtaaagacagcacaaggatccggatcacggataatatgttttgtgccgggtataagcctgacgaggggaaacggggagacgcatgtgagggggactcaggcgggccctttgtgatgaagtctccctttaacaatcgttggtatcagatggggatagtgtcctggggagaggggtgcgatcgggatggtaaatatggcttctacacacacgtctttagattaaaaaagtggattcagaaggtgatcgaccagtttggcgag

SEQ ID NO: 10258 - DNA, 1866 bp, Artificial Sequence
  derived and/or modified sequence
atggcgcacgtgaggggtttgcagctgcccggatgcctggccctggcagcgttgtgctcgctcgtgcattcccagcacgtgttcctcgcgccccagcaggcgaggtctttgctgcagcgcgtgagacgcgccaatactttcctggaagaggtccggaaaggcaaccttgaaagagaatgcgtcgaagaaacctgctcgtacgaagaagcatttgaggctcttgagtctagcacggccactgacgtgttctgggcgaagtacactgcctgcgagactgctcgcactccacgcgacaaactggcggcctgcctcgagggaaactgtgccgaaggcctggggaccaactaccgcgggcatgtcaacatcactcgctccggcattgaatgccagctgtggagatctcgttacccgcataagccagagatcaatagcaccactcacccgggcgccgacctgcaagaaaacttctgcaggaaccctgactcgtcaaccacgggtccctggtgctacactactgatcccacggtgcgccggcaagaatgctccatcccagtttgcggccaagaccaggtcacggtcgcaatgacgccccgcagcgaaggatcctcagtcaatctgagccctccactcgaacaatgtgtgcctgatcggggccagcagtatcagggcagactggcggtgacgacccatggactcccgtgcctggcctgggcctcggcccaggctaaagccctgtcaaagcatcaggacttcaacagcgcagtgcaactggtggagaacttttgtaggaaccccgacggagacgaagagggggtgtggtgctacgtcgctggcaagccgggggactttggatactgcgatctgaactactgcgaggaagccgtggaagaagaaactggagacgggctggatgaagatagcgacagagccatcgagggtcgcaccgcgacgtcggaataccaaactttcttcaacccaagaacctttggctccggagaggcggactgtggactccggccgctgttcgaaaagaagtcgttggaagataagaccgaacgcgaactcctcgaatcgtacattgatggacgcatcgtggagggctctgatgcagaaatcggaatgtcaccttggcaagtcatgttgttcagaaagtcaccgcaagaactgctgtgcggagcctcgctgatctcagaccggtgggtgttgaccgctgctcactgcctgctctaccctccatgggacaagaatttcactgaaaacgacctcctggtgcgcatcgggaagcacagccggactcggtacgagcgtaacatcgaaaagattagcatgcttgaaaagatctacatccatcccaggtacaactggcgcgaaaatctcgaccgggatatcgccctcatgaagctcaaaaagccggtggctttctctgactacatccaccctgtctgccttccggatcgcgaaaccgcggcgtcgctgctccaggcgggatacaagggtcgggtgactggttggggaaacctcaaagaaacctggaccgccaatgtcggcaaggggcagccttccgttctgcaggtggtcaacctgccaatcgtggagcggccggtgtgcaaggattcgactcgaatcaggatcaccgacaacatgttctgcgcgggctacaaaccagacgaaggaaagcgcggagacgcgtgtgaaggagactcaggcggaccattcgtgatgaaatcacccttcaacaaccggtggtaccaaatgggaatcgtctcatggggggagggctgcgatcgcgatggcaagtacggattttacacccacgtgttcaggctgaaaaagtggattcagaaggtgatcgaccaatttggagag

SEQ ID NO: 10259 - DNA, 1866 bp, Artificial Sequence
  derived and/or modified sequence
atggctcacgtcagaggacttcaacttcctggatgtctcgcactggctgcactgtgctccctggtccacagccaacacgtctttctggcaccgcaacaggcgcggtcccttcttcaaagagtgcgaagggctaatactttccttgaagaagtgcgaaaaggaaatcttgaacgggagtgcgtcgaggagacttgtagctacgaggaagcatttgaagcactcgagtcctccaccgcaactgacgtgttctgggcaaagtacaccgcttgtgaaaccgcacgcactcctagggacaaactcgcggcatgcctggaagggaactgcgcagaaggactgggaactaattacaggggacacgtgaatatcactagatccggtattgaatgccagctctggcgctccagatacccccataaaccggaaatcaactcaactactcaccccggcgcagatctgcaagaaaacttttgtcgtaatccagattcctccaccaccgggccatggtgctacaccactgaccctaccgtgcgcagacaggaatgttcgataccggtgtgtggtcaagaccaggtcactgtcgcaatgactccccgatccgagggctcttcagtcaacctctcacctcctctggaacagtgtgttccagatcgcggccagcagtaccaaggacgacttgccgtgaccacccatggattgccttgtctggcatgggcatctgcccaagctaaggcattgagcaagcatcaggacttcaatagcgccgtccagctggttgaaaacttttgcaggaaccccgacggggacgaagaaggtgtgtggtgctacgtggcgggaaagccaggtgactttgggtactgtgatctgaactactgtgaagaagcggtggaagaagagactggagacgggcttgatgaggactccgatcgcgcaatagagggacgcacggccacctccgaataccagacctttttcaacccgagaaccttcggatcgggtgaggctgactgtggcctcagacctctgttcgaaaagaagtcacttgaggacaagaccgagagggagctgcttgagagctatattgatggtcgcattgtggagggtagcgatgcagaaatcggtatgtcaccctggcaagtaatgctgttcagaaagagccctcaagaactgctttgcggagcctcattgattagcgatagatgggtccttactgcagcacattgccttctttaccctccttgggacaagaactttaccgaaaacgacctgctggtgagaatcggtaagcattcacgaactagatacgagaggaatattgagaaaatctccatgctggaaaagatttacatacaccctcggtacaactggcgggagaacctggacagagacattgcgcttatgaaactgaagaaacccgtggcattcagcgattacattcaccctgtctgccttcctgaccgagaaaccgccgcgtcacttctgcaagcaggatacaaaggacgcgtcactggatggggcaacctgaaagaaacgtggaccgcaaacgtgggaaaaggacagccgtcagtgcttcaggtggtgaatttgccaatcgtcgaacgccctgtgtgcaaggatagcacgcgtatccgcattactgataacatgttttgcgcaggttacaagcccgatgaagggaagagaggggatgcctgtgagggagattcgggaggaccttttgtgatgaagtcaccatttaacaaccgttggtatcaaatgggaattgtgtcgtggggtgaaggatgcgatagagatggtaagtatggattttacacccatgtctttcgcctgaagaaatggattcagaaggtgattgatcaattcggagaa

SEQ ID NO: 10260 - DNA, 1866 bp, Artificial Sequence
  derived and/or modified sequence
atggcccacgtgagaggcctacagctaccgggctgtctggccctcgctgccctttgcagcctggtgcatagccagcacgtgtttctggcaccacaacaggctaggagtcttctgcagagggtgcgtcgggctaacacattcttggaagaggtacgaaaaggaaacctggaaagagagtgcgtcgaagagacctgcagttacgaagaagcctttgaggcccttgaatcttccaccgccaccgacgtgttttgggctaagtatacggcatgcgaaaccgcccgaactccaagggacaagctagctgcgtgcctggaagggaattgtgccgagggcctgggtacaaactaccgcggacatgtgaatatcaccagatctggcatagaatgtcagttatggagatcccggtatccccacaagcccgaaattaactctaccacacaccctggtgcggatctacaggaaaatttctgccggaacccagactccagcaccactgggccttggtgttacactactgatcccacagttcgccgacaggaatgttcaattccagtgtgtggtcaggatcaagtgaccgtggccatgacaccaaggtccgagggtagctctgtgaatctgtccccaccgctcgaacagtgtgttcctgacagagggcagcagtatcaggggaggcttgccgttaccacccacggtctgccatgtctggcatgggcttcggcccaggctaaagcactgagtaagcatcaggacttcaatagcgccgtacagctcgtggagaatttttgcagaaatcccgacggcgatgaggagggcgtgtggtgctacgtcgctgggaaacctggagatttcggttactgtgaccttaactactgcgaagaagctgtcgaggaggagaccggagatggcctggatgaggactctgatagagccatcgagggccgaactgcaacatccgaataccaaactttttttaatccaagaacgtttggtagcggcgaagccgactgtggactcagaccactgtttgagaaaaaatccttggaagataaaacagagagggaattgttggagagttatatcgacggcaggattgtggaagggagcgacgcggagataggaatgtccccatggcaggttatgctgttccgaaaaagcccccaggaacttctctgcggtgcaagccttatcagcgacagatgggttctaacagccgcacactgcttactgtatcccccttgggacaaaaacttcaccgaaaacgatcttctcgtcagaattggcaaacacagtaggacccgatacgaaagaaatatcgagaagatctcaatgctggaaaagatttacatacatccccgatataactggcgagaaaacctggaccgagacatcgcactcatgaagctgaagaagccagttgctttcagtgattacattcaccctgtctgtctacccgacagggagactgctgcgtctctgcttcaagctggctacaaaggcagggttactggatggggtaaccttaaggaaacttggacagcaaatgtgggcaagggccagccctctgtgctgcaggttgttaaccttccaattgtggaaagaccagtttgtaaggactcaacgaggatccgcatcactgataatatgttctgtgctgggtacaagccagatgagggtaaaagaggcgatgcatgtgaaggtgacagcggcggccctttcgtaatgaaatcgcccttcaacaacagatggtaccagatggggatagtcagttggggtgaaggttgcgaccgagacgggaagtatgggttttacacgcacgtgttcagattgaagaagtggatccagaaagtcatagatcagttcggagaa

SEQ ID NO: 10261 - DNA, 1866 bp, Artificial Sequence
  derived and/or modified sequence
atggcccatgtccgtggcctccagctgccgggatgcctcgccttggccgcgctttgctccctggtgcactcccagcatgtgttcctggcgccacagcaggcgcgaagcctgcttcagagagtccgacgcgctaacacttttctggaggaggtccggaaaggaaacctcgagagagagtgcgtggaagaaacgtgctcgtacgaggaggcgtttgaagcactggaatcctccactgccactgatgtgttctgggccaagtacaccgcctgtgaaactgcccgaaccccgcgggacaagttggcggcatgccttgaaggcaattgcgccgaaggcctgggaactaactaccgcggacatgtgaacatcacccggtccggaatcgaatgccaactgtggcgctccagatacccccacaaacccgaaatcaacagcaccacccatcctggcgccgacttgcaagagaacttctgcagaaaccctgacagctccactaccggaccgtggtgctacactaccgaccccaccgtccgcaggcaagagtgttcgatccccgtgtgcggacaggaccaagtgacggtggccatgaccccgcgctccgaaggcagctccgttaacctgtctccaccgctcgagcaatgcgtgccggaccgggggcagcagtaccagggacgcttggcggtcactacccacggacttccgtgcctggcatgggcctcggcacaggccaaggcactgtcgaagcaccaggatttcaattccgctgtgcagttggtggagaacttctgtcggaacccggacggagacgaagagggcgtctggtgctacgtcgctggaaaaccaggtgatttcggatactgcgacctgaattactgcgaagaagctgtggaagaagagactggagatgggctcgacgaagattccgaccgcgccatcgagggcagaacggcgacctcggagtaccaaacttttttcaatccgcgcaccttcggatcaggtgaggcggactgcgggctcaggcctctgttcgagaagaagtcgctggaggacaagactgaaagagaactcctggagtcatacatcgacggccggatcgtggaaggctccgatgcggaaatcggtatgtccccgtggcaagttatgcttttccggaaatcgccgcaggagctgctctgtggcgcatcgctgatctcggatcgctgggtgttgacggcagcacactgtttgctctatcctccatgggacaaaaacttcactgagaatgatctgctcgtgagaatcgggaagcactcccgcacccggtacgaaagaaacattgaaaagatctccatgctcgaaaagatctatatccaccccagatataactggcgggaaaacctcgaccgcgatatcgctctgatgaaactgaaaaagcccgtggcattctccgattacatccatcccgtctgccttccagaccgggaaaccgcggcgtccctgctgcaggcgggatataaggggagggtgaccgggtggggaaatctcaaagagacttggacggccaacgtgggaaaggggcagccttcggtcctccaggtggtgaatctgccaattgtggaacgccctgtgtgtaaggactcgactagaattcgcatcaccgataacatgttctgtgccggctacaagcctgacgaaggcaagcgcggcgatgcatgcgaaggagacagcgggggacccttcgttatgaagtcccctttcaataaccggtggtaccagatgggaatcgtctcctggggtgaaggatgtgaccgggacggcaaatacggattttacacccatgtgttcagactcaagaagtggatccagaaggtgatcgaccagtttggagag

SEQ ID NO: 10262 - DNA, 1866 bp, Artificial Sequence
  derived and/or modified sequence
atggcacacgtcagaggccttcagctccctggatgtctcgccctagctgccctgtgttctctcgtccactcgcagcacgtctttttggcgcctcagcaggcccgctcactactgcagagagttcgcagggccaacacatttctggaggaggtccggaaggggaacctggaacgggagtgtgtcgaagagacttgttcgtatgaagaggctttcgaagcgttggagagctcaacagccaccgacgtgttttgggcaaagtacacagcatgtgagaccgccagaactccgagggacaagctggctgcctgcctggagggcaactgtgcggagggcctgggaaccaattatagaggtcacgtcaatatcactcggagtgggattgaatgccaattatggaggagtcggtatccccacaaaccagaaatcaactcaaccacgcatcctggcgccgaccttcaagaaaatttctgccgaaatcccgattcatctaccaccgggccttggtgttataccaccgatccaaccgtcagacggcaggaatgctccatcccggtgtgcggacaggaccaggtgacagtggcaatgacacctcgtagtgaaggcagctctgtgaatctgagtcctcctctggaacaatgcgtcccggaccgcggacagcagtatcagggacgacttgctgtgacaacccatggactgccatgcctggcatgggcttccgcccaagccaaggcactgagcaagcaccaggacttcaattccgccgtacagttggtcgaaaacttctgcaggaaccctgacggagacgaggaaggcgtgtggtgttatgtggccggcaaacctggtgattttggttactgtgacctgaactattgtgaagaggctgtagaagaggaaacaggagacggattggatgaggacagcgatagggccattgaggggaggacggcaaccagcgagtatcagacattcttcaaccccaggacatttgggtccggtgaggccgattgcggtttacggcctctgtttgagaagaaatccctggaggataagacagagcgagagctgttggagtcctacatcgatggtcgcatagtggaggggagtgatgcggagattggtatgagtccatggcaggttatgctctttcggaaatctccccaagagctactttgcggcgcttcattgatttcagatagatgggtgctaacagctgctcactgtctcctgtaccctccttgggacaagaattttacggaaaatgatctcctagtgcggatcgggaaacactcccgtactaggtatgaacgaaatatcgagaaaataagcatgctcgagaagatatatatacatccacgctacaattggcgggagaatttggacagagacattgccctgatgaagcttaagaagccggtcgcattctctgactatatacatcctgtgtgtctgcctgacagggagacagccgcctcgctattgcaggcaggctacaagggtcgggtcactggatggggtaatttgaaggagacctggacagctaacgtggggaagggccagccaagcgtgctccaggtggtgaacctacccatcgtggaaaggccagtgtgcaaggactccacaaggatcaggattactgacaacatgttttgcgcaggctacaagcccgatgaaggcaagagaggcgatgcttgtgaaggtgattctggcggcccctttgtgatgaaatcaccatttaataatcggtggtaccagatgggtatagtcagctggggagagggatgtgatagagatggcaagtacggcttctacacacacgtctttcggcttaagaaatggatccaaaaggtaatcgatcagttcggcgag

SEQ ID NO: 10263 - DNA, 1866 bp, Artificial Sequence
  derived and/or modified sequence
atggcacacgtccgcggcctgcaacttccagggtgtctggctcttgcagcactttgttcacttgtgcattcacagcatgtgtttttggcgccacagcaagcacggtcgctgcttcaaagagtccgccgggcaaacaccttcctggaagaagtgaggaagggaaaccttgagagagaatgcgtggaggaaacctgctcgtacgaggaagccttcgaggcactcgaatccagtacggccacggatgtgttttgggcgaaatacactgcatgtgagactgcccggaccccccgagataagctggcagcatgcctcgaaggaaactgtgctgagggcttggggactaattaccgcgggcatgtgaacattacccgctccggaatcgagtgccaactttggcggagccgataccctcacaaaccagagataaactccacgacgcatccgggcgctgacctgcaagaaaacttctgtaggaatcctgatagcagcaccaccggtccttggtgttacaccacggaccctactgtgcgcagacaggagtgctccatccctgtgtgtggtcaggatcaggtgactgtcgcaatgaccccgcgcagcgagggatcgtcggtgaacctttctccaccactggagcaatgtgtgcccgatcgggggcagcagtaccagggtcgcctggccgtgactacccacggactgccctgtctcgcgtgggcctcggcacaggcgaaggcccttagcaagcaccaggactttaacagcgccgtgcaactggtggaaaacttctgcagaaacccagacggtgatgaagaaggggtgtggtgctatgttgctggcaaacctggcgactttggctactgcgacctcaactactgcgaggaagcagtcgaagaagaaactggtgacggactcgatgaagattcggatcgagctattgagggaagaactgcgacttcagagtatcagactttcttcaatccccggaccttcgggtctggagaagcagattgtggacttcgtccattgttcgaaaagaagtcacttgaggataagactgaacgtgaattgctcgaaagctacatagatggacggattgtggaaggttcagacgcagaaatcgggatgtcaccttggcaagtcatgctgtttagaaagtcgcctcaggagcttctttgtggggcgtcacttatttccgaccggtgggtgctgaccgcggcacattgtctgctgtaccctccatgggacaagaactttaccgagaatgatctgcttgtcagaattggcaaacattcgagaaccagatacgaaagaaatatcgagaagataagtatgctggaaaagatttacattcaccccaggtacaactggagagagaaccttgacagggatatcgcactgatgaagctgaagaaacctgtggcattttccgattacattcatcctgtgtgcctgcccgacagagaaactgcggctagcctcctgcaagcggggtacaagggacgggtgacgggatggggaaacctcaaggagacttggactgcgaacgtgggcaaaggacagccatcagtgcttcaagtggtgaatttgccgattgtcgaaaggccagtgtgtaaggattcgactagaattagaataaccgataacatgttttgtgcaggttacaagccagatgaaggaaagcgcggcgacgcgtgtgaaggagatagtggaggacccttcgtgatgaaatcaccctttaacaacagatggtaccaaatgggaattgtctcatggggagaaggttgtgatcgcgatggaaagtacggattttacacccatgtgttcagattgaagaagtggattcaaaaggtcatcgatcagtttggagaa

SEQ ID NO: 10264 - DNA, 1866 bp, Artificial Sequence
  derived and/or modified sequence
atggcacatgtcagaggtttgcaacttccagggtgtctcgctctggcagcactttgttcattggtccacagccagcacgtctttctggctccccaacaggcaaggtccctcctgcagagggtgaggcgagcaaatacctttctggaagaagtgagaaagggcaacctggaacgtgagtgcgtggaagaaacctgctcgtacgaggaggcctttgaggctcttgagtcctccacggcaaccgatgtgttctgggccaaatacaccgcatgcgaaaccgcaagaacccctcgcgacaagctcgccgcatgcctggaggggaattgcgcagaaggactgggaactaactacagaggacatgtcaacattactcgcagtggaatcgagtgtcaactttggcggtcgagatacccccacaagccagaaatcaacagcaccactcacccaggagcagatctgcaagagaacttttgtaggaacccagattcgtccaccactgggccttggtgttacactactgaccctactgtcagacgtcaggaatgttcgattcccgtctgtggccaagatcaagtgaccgtggcaatgactccaagaagcgaaggaagctcagtgaacctttcccctccactggaacaatgtgttccggatcgcggtcagcaataccaagggcgtctcgccgtgactactcatggtttgccttgccttgcatgggcttccgcccaggccaaggcattgagcaagcaccaagacttcaattcagcggtgcaacttgtcgaaaacttttgcaggaaccctgacggggacgaagaaggagtgtggtgttacgtcgcaggcaagcccggagattttggttactgtgacctgaattactgtgaagaagccgtggaagaagaaactggggatggattggatgaggactcggatcgcgcaattgaaggacgaaccgccacttctgagtatcagacctttttcaatccaagaacctttgggagcggagaggcagattgtggccttaggcccctttttgagaagaaatccctggaagataagaccgaacgtgaattgttggagtcatacatagatggtcggattgtggaaggatcggatgcagagattggcatgtccccgtggcaagtgatgctttttagaaagtcacctcaagagcttctctgtggtgcttccttgatttccgatcgctgggtcctcaccgcagcacattgcctgctgtatccaccatgggacaaaaactttactgagaacgacctgctcgtgaggatcgggaagcactcacggacccgatacgagcgcaacatcgaaaagattagcatgctggagaaaatctacattcatcctagatacaattggcgggagaacctggaccgtgacattgcacttatgaaacttaagaagcccgtggccttttcggattacattcatccagtctgtctgccagatagagaaaccgcagcctcgctccttcaagcagggtacaaaggtagagtgactggatggggaaatcttaaggagacgtggaccgctaatgtggggaagggccagccctcggtgctgcaggtcgtgaaccttcctattgtggaaagacctgtgtgtaaggatagcactcgcatcaggatcactgacaacatgttctgtgcgggatacaagcccgacgaaggaaaacggggagacgcgtgtgaaggggactcgggtggtccttttgtgatgaaatccccgtttaacaacagatggtaccagatgggcattgtgtcatggggcgagggatgtgatagagatggtaagtacggattttacacccatgtgttcaggcttaagaagtggatccaaaaggttattgatcaatttggagaa

SEQ ID NO: 10265 - DNA, 1866 bp, Artificial Sequence
  derived and/or modified sequence
atggcccatgtaaggggtctgcagctgcccggatgtttggccctggccgctctctgttccttggttcattcacagcatgtgtttctggcacctcagcaggcccgcagtctgttgcagagggtgagaagagccaatacattcctggaggaagtgaggaaggggaatctggagagagagtgcgtggaggagacctgtagttatgaagaagcatttgaggcacttgagtcctccactgcgacagacgtattttgggccaaatataccgcttgtgaaaccgctagaaccccaagggataagctggccgcgtgtttggagggcaactgtgcagagggactcggcaccaactaccgggggcacgtcaatattactcggagtggaatcgagtgtcagctgtggagatctaggtatcctcacaaacccgagatcaattcaacaacacatcccggggctgaccttcaggagaatttctgccgaaaccccgacagctctacaactggcccatggtgctacaccactgatcccacagtccgaagacaggagtgtagtattccagtgtgcggacaggaccaggtgacagtagcaatgaccccacggtctgaggggtcaagtgttaacctgtccccacctctcgagcaatgtgtgcccgatagaggtcagcagtatcaggggagactggccgtcacaacgcacgggctcccctgcttggcttgggcgtcagcacaagccaaagccctttccaaacatcaagatttcaattccgctgtgcagttggtggagaatttttgccggaaccccgatggggacgaggaaggtgtgtggtgctacgtagccggcaagccgggagactttggatactgcgacctcaactattgcgaggaagcagtggaagaggagaccggcgatggattggacgaagattctgatagggccattgaaggaaggaccgccacctccgaatatcaaacctttttcaatccaagaaccttcggctctggcgaggctgattgtgggctgcgcccactgttcgaaaaaaaatccctggaagacaaaactgagcgggagctgctggaatcctacattgacggaagaatcgtggagggatcagacgcagagattgggatgtccccatggcaagtgatgctttttcgcaaaagccctcaggaacttctgtgcggtgccagcctcatcagcgacaggtgggtgctcaccgctgctcactgcctgctctatccaccttgggataagaacttcaccgagaacgacctgctcgttcggataggtaagcacagccggacgaggtacgaacgcaatatcgaaaagatctccatgctcgagaaaatttacatccaccccaggtacaattggagagaaaacctggatagagacatagccctgatgaagttgaagaaaccagtcgccttcagtgactatatccaccccgtttgcttgcctgacagggaaactgcagctagtctccttcaggctggctacaaggggcgggtgactggatggggcaatctcaaggaaacctggacggccaatgtgggcaagggacagccttcagtgctgcaagttgtcaacctccctatcgttgaaaggccggtgtgcaaggactcaactcgcattagaataacggataacatgttctgcgccgggtataaacctgatgagggcaaaagaggggacgcgtgcgagggagactccggggggccctttgtgatgaagtctccgtttaacaaccggtggtaccagatgggtattgtaagttggggtgaaggctgtgatagagacgggaagtatggattttacactcacgtgttccggcttaagaagtggattcagaaggtcattgatcaattcggtgag

SEQ ID NO: 10266 - DNA, 1866 bp, Artificial Sequence
  derived and/or modified sequence
atggcgcacgtacgaggcttgcagctcccgggatgtctggcactggcggcgctctgctccctcgtccactcccagcacgtgtttctcgccccccagcaggctagatcactgttgcagagagtgcggagggccaataccttccttgaggaagtccggaaaggaaacctggagcgcgagtgcgttgaggagacttgctcgtacgaggaagcattcgaggctctggagtcgtcgaccgccactgatgtcttttgggccaaatacactgcctgtgagactgcacgtaccccacgcgacaagctggcagcctgtctcgagggcaactgcgctgagggtcttggaaccaactaccgcggccacgtgaacattactcggtcgggaatcgagtgccaactctggagaagcaggtaccctcacaagccggaaatcaactccacgactcacccaggagcagatctccaagagaatttctgccggaaccccgacagctcgactactggaccgtggtgctacactaccgatcctactgtgcggaggcaagaatgctcgatcccagtctgtggtcaggaccaagtgactgtggccatgacgccgcgcagcgagggctccagtgtgaatctgagccctccactcgaacagtgcgtcccggatcgggggcaacagtaccaggggcgcctggcggtcacgactcatggactgccgtgcctggcgtgggcctccgcccaagccaaagctctctcgaagcatcaagacttcaactcggcggtgcagctcgtcgaaaacttctgtcgcaacccagacggagacgaagagggcgtctggtgctacgttgccggaaagccgggagattttggctactgcgacctcaattactgcgaggaagccgtcgaagaggagactggagacggactcgacgaggattctgacagagcaatcgagggacggaccgcgacctccgaataccagacgttcttcaacccgcggactttcggctcgggcgaggccgattgcggcttgcgcccgctgttcgaaaagaagtcattggaggacaagactgaaagagagttgctggagtcctacatcgatggtagaatcgtggaaggctcagacgccgaaatcggtatgagcccgtggcaagtcatgctcttccgcaaaagccctcaggaactgctctgtggtgcctcgctgatctcagacaggtgggtcctgactgccgcacattgcctgttgtacccaccctgggacaagaatttcactgagaatgatctgctggtgcgcattgggaagcacagccggacgagatacgagcggaacatcgagaagatctccatgctggaaaagatctacatccacccgcggtacaactggagagaaaacctggacagagatatcgctctgatgaagctgaaaaagccagtcgcgttctcagattacattcacccagtgtgcctgcccgatcgcgagacggccgcctcgctgttgcaagctgggtataaaggacgggtaacgggatggggaaacctgaaagaaacttggactgcaaacgtgggaaaaggccagccaagcgtgctgcaggtggtcaacctgccgattgtggaaagaccggtgtgcaaggactccaccagaattcgcatcactgacaacatgttctgtgcgggttacaagccagacgaggggaaacggggggacgcgtgcgaaggagattcaggtggcccgttcgtcatgaaatctccttttaacaatcggtggtaccaaatgggtatcgtgtcatggggagaaggatgcgaccgggatggcaagtacggattctacacccacgtgttccggttgaagaaatggatccaaaaggtgattgaccagtttggcgag

SEQ ID NO: 10267 - DNA, 1866 bp, Artificial Sequence
  derived and/or modified sequence
atggcacacgtacggggtttgcagctcccgggctgtctggctctcgcagctctgtgctcgctggtgcacagtcagcacgtatttctcgccccgcaacaggccagatccttactgcagagggtaaggcgagctaacacctttctcgaagaagtgcggaaggggaatctggagcgagagtgtgtggaggaaacgtgctcctacgaggaggcgttcgaggccctggaatcctcaacagctaccgacgtgttctgggcaaaatacaccgcttgcgaaacggctcgtacaccgcgggataagctcgcagcttgtctcgaggggaactgcgctgaaggactggggactaattatcgtgggcacgtgaatataaccagatctggcattgaatgtcaactgtggcgctcgcgctacccccacaagcccgagatcaattcgacaacacatcctggagcggatttacaggaaaacttttgtcgtaaccccgattccagcacaacagggccatggtgttataccacagaccctaccgtcaggagacaggaatgcagcatacctgtctgcggacaggatcaagtcactgtggccatgacacctcgtagcgaaggctcaagcgtaaatttgtctcccccactcgaacagtgtgtgccggataggggccagcagtatcagggccggctagctgtgacaacccacggcctgccttgtctggcctgggctagtgctcaggcaaaagcactgtctaagcaccaagactttaactcagcagtacagttagttgagaatttttgccgtaatcctgatggagatgaggagggcgtatggtgctacgtggccggaaaacccggtgatttcggttactgtgatctgaactattgcgaagaggctgttgaagaggaaaccggggacggcctggatgaggattccgaccgcgcaatcgaagggcggactgcaacctccgaataccagaccttttttaatccccggacttttggatccggggaggcggattgcggcctgagacctctgtttgagaagaagagcctggaggataaaaccgaacgggaactattggaatcatatatcgacggccgtatcgtcgaaggttctgacgccgaaattggaatgtcaccatggcaggttatgctttttaggaaaagccctcaggaactcttgtgcggcgcatcactcatctctgatcggtgggtactcactgccgctcattgcctgctctatcccccttgggacaaaaacttcacagagaacgacctgctggtgcggattggtaagcatagcaggaccagatacgaacggaatatcgagaaaattagtatgctggaaaaaatctatatacaccctcggtacaactggagagagaaccttgatcgggacatcgctctgatgaagctcaagaagccagtggccttctctgactacatccatcccgtttgcttaccggatcgtgagacagcagcttccctgctccaagctggctataaggggagagttactggatggggaaacctcaaggaaacctggacggcaaatgtgggcaaaggtcaaccttcagtgttacaggtggtgaatctgcccatcgttgagagaccagtgtgtaaagattccacacgtatacgtatcacggacaatatgttttgcgcgggctataagcccgatgaggggaaacgaggcgatgcctgcgaaggagactctggaggtccctttgtgatgaagtcgcccttcaacaaccggtggtatcagatggggatcgtttcctggggggaagggtgcgaccgggatgggaagtacggcttctatacacacgtctttagactgaaaaaatggatacaaaaggtcatagaccagttcggtgag

SEQ ID NO: 10268 - DNA, 1866 bp, Artificial Sequence
  derived and/or modified sequence
atggcacatgtgaggggccttcagctgcctgggtgtcttgcactggcggccctctgctccctggtgcattcgcaacatgtgtttctcgctccacaacaagcgcggtccctgcttcagagagtgagaagagccaataccttcttggaggaagtcaggaagggaaacttggaacgggagtgtgtcgaagaaacctgttcgtacgaagaagcattcgaggcactggaaagctccactgccaccgatgtgttctgggctaaatacactgcatgtgaaactgcccgtaccccaagagataagctggcagcatgtttggaaggcaactgcgccgaaggattgggtaccaactacaggggacatgtcaacattactcgatcaggaatcgaatgccaactgtggagatcgcgttaccctcataagcctgagataaactccaccacccatcctggcgcagatctccaggagaacttttgcagaaatccagactcgtccactaccggaccatggtgttacactaccgatcctactgtgagaaggcaggaatgctccatccctgtgtgtgggcaggatcaagtcactgtggcaatgacccctagatcggagggttcatcggtgaatctgagcccaccactggaacaatgtgtgcctgatcgaggccaacaataccaaggacgcttggcagttactacccatggactgccatgtctcgcttgggcctcagcacaggcaaaagcactctcgaagcatcaggatttcaatagcgcagtccaacttgtggaaaacttttgtaggaatccagatggtgatgaggaaggggtgtggtgctacgtggccggaaaacctggtgactttggctactgtgatctcaattactgtgaagaggctgtggaggaagaaaccggggacggcctggacgaggattcggatcgggcaatagaaggtcgaaccgcaacttcggagtaccaaacgttcttcaatccacggacgtttggatccggtgaagccgattgcggtctgcggccattgtttgagaagaagagcctggaagataagacggaaagagaacttctggaatcttacattgacgggcgaattgtggagggttcggatgcggagatcggaatgtcaccatggcaggttatgcttttcagaaagtccccccaggaactgctgtgtggagcgtcacttatctctgacaggtgggtgcttactgctgcgcattgccttctgtacccgccgtgggacaaaaacttcactgaaaacgatctgctcgtgcggattggtaagcattcaaggactcggtacgagagaaacatcgaaaagatttcaatgctggaaaagatctatatacatcctcgctacaattggagagagaaccttgaccgcgacatagcgctgatgaagttgaaaaagccggtggcattttcagattacatccatcctgtctgtctgccagatagggaaaccgcagcgagccttttgcaggcaggatataagggcagagtgactggctggggtaatctcaaggagacgtggaccgccaacgtcggtaaaggtcagcctagcgtacttcaggtggtgaatctgccgattgtggagcggcccgtgtgcaaggattcgactcggatcagaatcactgacaacatgttttgtgccggctacaagcctgatgaaggtaagaggggagacgcatgtgagggggactcaggtggaccattcgtgatgaaatccccattcaacaatcgttggtaccaaatgggcattgtcagctggggcgaaggatgcgatcgagacggaaaatacggattttacacccacgttttcaggctgaagaagtggatccaaaaggttattgaccaattcggggaa

SEQ ID NO: 10269 - DNA, 1866 bp, Artificial Sequence
  derived and/or modified sequence
atggctcatgttaggggacttcagctgcctggctgcctggccctggctgcgctatgctccctagtgcactcacagcacgtgttcttagcaccacagcaggcgcggtccctcctacagcgagtgcgcagagctaacacatttctggaagaagtacggaaaggtaatctcgagcgggagtgcgtcgaggagacatgctcctatgaagaggcattcgaggccctcgagagcagcactgccacagatgtgttttgggccaaatacacagcctgcgagacagcccggaccccaagagataagctggccgcgtgcttggaaggtaattgtgcggaaggtctgggcacaaactaccgaggccatgtaaacattacgcggtctgggatcgagtgtcagttgtggcgtagccgctatccccacaagcccgaaattaattctaccactcatcccggtgccgatttgcaggaaaatttctgccgtaatccggattcctccaccacagggccttggtgttataccaccgacccgaccgtgaggcgacaggaatgctcaataccagtctgtggtcaggaccaggttacggtggccatgactccaagaagcgagggaagttcggtcaacctgtcacccccactggaacagtgcgtgcctgaccggggacagcagtaccagggacgcctcgccgtgacaacccatgggctgccgtgcctggcttgggctagcgcccaggctaaggcactttccaaacatcaagattttaatagtgccgtgcagctggtggagaacttctgccggaacccggatggcgatgaggagggggtttggtgctacgtagcagggaagcctggagatttcggttattgtgatctgaactattgcgaggaagccgttgaagaggagacgggggacggtctggacgaggattcagatagagcaatagaaggtcggacagctacttccgaatatcagactttttttaaccctcgcactttcggtagtggcgaagccgactgtggccttcgtccattgttcgagaaaaaaagcctggaagataaaacagagcgtgaactgctggagagctacatcgacgggaggatcgtcgagggcagcgacgccgagatcggaatgtccccctggcaggtcatgctgtttagaaaaagcccgcaggaattactgtgtggggccagtttgatttcagatagatgggtcctgacggccgcccattgcctgctttaccctccttgggacaagaactttactgaaaacgacctgctcgttagaataggcaagcacagtcgcactcggtatgagcgaaatatagaaaagatttcaatgcttgagaaaatttacatccacccgaggtacaattggcgggagaacttggacagggatatcgccttgatgaagctcaaaaaaccggtagcattttcagattatatccacccggtatgcctccccgaccgggaaactgcagctagcctacttcaggcggggtacaaaggaagagtcacaggttggggcaaccttaaggaaacttggaccgccaatgtcggcaagggtcagccaagtgtcttgcaggtggtgaaccttcctatcgtcgagcggccagtgtgtaaagactcaactagaattcgaatcaccgacaacatgttttgtgctgggtacaaacccgacgagggcaagcgaggcgacgcgtgcgaaggtgattccggcggaccatttgtgatgaagtcaccattcaacaacagatggtatcagatgggtatcgtgagttggggagagggctgtgaccgtgacggtaagtatggcttttacacccacgtgttccgactcaagaagtggattcagaaagttattgatcagttcggagag

SEQ ID NO: 10270 - DNA, 1866 bp, Artificial Sequence
  derived and/or modified sequence
atggcacatgtcaggggcttacagctaccaggctgccttgcgctggctgctctgtgcagcttagtgcattctcaacatgtgtttctggctcctcaacaggccaggtcactcctgcagcgtgtgcggcgagccaatacctttttggaagaagtcagaaaaggcaacttagagagagagtgcgtggaggagacttgttcctatgaggaagcatttgaagcactcgaatcctctacagctacagacgttttctgggctaagtacaccgcttgcgagaccgccagaacaccgcgggataaactggccgcttgtctagaggggaattgtgccgagggactaggcacaaattaccgcggccatgtcaatatcaccagaagcggaatcgagtgtcagctgtggcgctcgaggtatccacacaaaccggaaatcaattcaaccacgcatccaggtgcagatctgcaagagaacttttgtcgaaaccccgatagctccactaccggtccctggtgctatacgaccgaccctactgtcaggcggcaggaatgttctatacccgtgtgcgggcaggaccaggtgacggttgctatgacccctaggtcagagggctcaagtgtgaatcttagtccacctctcgaacagtgcgtcccagatcgagggcaacagtaccaagggagactggcagtgaccacacatgggttgccatgcctagcatgggcctcggctcaggctaaagctctttcaaaacaccaagacttcaacagcgccgttcaactggtagaaaatttctgtaggaacccagatggcgatgaagagggagtgtggtgctacgttgcgggaaaacctggtgactttggctattgcgatctgaactactgtgaggaagccgtagaggaggaaactggtgacggtttagatgaggactctgaccgcgcaattgaaggccggactgctaccagcgaatatcaaacgttttttaatcctagaacgtttggcagcggtgaggcagattgcggcctcagacccctgttcgagaagaaaagtcttgaggataaaacagaaagggagctgctcgagtcctatatcgacgggcgtatagttgaaggtagcgatgccgagataggaatgtctccctggcaggtcatgctcttccggaagtccccacaggagctgctctgtggagcgtcactgattagcgaccgctgggtcttgacggcagcgcactgtttgctgtatcccccctgggataagaatttcactgagaatgacctcttggtacgaatcggcaagcattcgagaacccggtatgagaggaacattgagaagattagtatgctcgagaagatctatatccatccgagatacaactggcgggaaaaccttgatcgcgatattgctcttatgaaactaaaaaaacccgtggcattctctgactacattcaccctgtgtgcctgcctgaccgggaaaccgcggcctcactacttcaggcggggtacaaggggcgcgtcacaggctggggaaatttgaaagaaacatggactgctaacgtcgggaagggccaaccttcagtgctgcaggtggtgaatctcccaatcgtggagagacccgtttgtaaagattcaacgaggattaggatcaccgacaatatgttctgtgccgggtataagcctgacgagggcaaacgaggagatgcatgcgaaggtgattcagggggcccattcgtgatgaaaagtcctttcaacaacagatggtatcagatgggcatcgtgtcctggggcgagggttgcgaccgagacggaaagtacggcttctacacccacgtgtttcggctgaagaaatggatccagaaagtgatcgatcagtttggcgag

SEQ ID NO: 10271 - DNA, 1866 bp, Artificial Sequence
  derived and/or modified sequence
atggcgcacgtgagaggccttcagctgcctggctgtctggccctcgcggcactgtgttccctggtgcactcacaacatgtgtttctggcacctcagcaggcacgatcacttcttcaacgtgtcaggagagccaatacctttttggaagaggtgcgtaaggggaatttggaaagagaatgtgtggaagaaacttgttcatatgaagaggcctttgaagcactcgaatcgtcgactgcaaccgatgtgttctgggccaagtacaccgcgtgcgaaaccgcacggactcccagagataagctcgcggcctgtctggaaggcaactgtgccgaaggcctcgggaccaattatcgagggcatgtgaacataacgcgctcgggtatcgaatgccaattgtggcgaagcagatacccgcataaaccggagatcaacagtacgactcatcccggcgcagacttgcaggaaaacttctgcagaaacccagactcctccaccactggaccttggtgttacacgaccgacccgactgtccgccggcaagaatgttcgatacctgtgtgcggacaagaccaagtgactgtggcgatgaccccgcgctccgaaggtagcagtgtcaacttgtcaccaccgctggagcagtgtgtgccagatagagggcagcaataccagggtcgattggcggtgaccacccacggtctgccttgcttggcatgggcctcggcgcaggccaaagcacttagcaagcatcaggacttcaacagcgctgtgcagcttgttgagaacttttgccgcaatcctgatggcgatgaagaaggagtgtggtgttatgtcgcaggcaagccgggagattttggttactgcgacctgaattactgtgaggaggcggttgaggaggagactggtgacggcctggatgaggactcggaccgagcaatcgaaggtcgcactgcaacgtcagaataccagaccttctttaatccgaggacttttgggagcggagaggccgattgcggactgaggcctctctttgaaaagaagtcccttgaagataagaccgaacgggagcttctggaatcctacattgacggacggattgtcgagggatctgacgctgagattggtatgtctccatggcaagtaatgctttttcgcaagtcgcctcaagaacttctgtgcggagcatcgcttatttccgacaggtgggtgctcaccgctgcacactgtctcttgtaccccccatgggataagaatttcacggagaacgatcttttggtgcgcattggtaaacactctcggactcgttacgaacggaacattgagaaaatctcgatgcttgaaaagatttacattcatcctcgctacaattggagagagaacctcgatagggatatcgccctgatgaaacttaagaagcctgtcgcattttccgattacatacatcctgtctgtctgcctgacagagaaaccgccgcatcgcttctgcaagcaggctacaaaggtagggtgactggctggggaaatctgaaggaaacgtggactgcaaatgtcggtaaaggacaacccagcgtcttgcaagtggttaacctccctatcgtcgaacggccagtgtgcaaggatagcaccagaattcggataactgacaacatgttttgtgcaggatacaagccagatgagggaaaacgaggcgatgcatgtgagggagactcaggaggacccttcgtgatgaaatcgccctttaacaaccggtggtaccaaatggggattgtctcctggggggaagggtgtgatcgcgatggaaagtacggattttacactcatgttttccgactcaagaagtggatccagaaggtaattgaccagttcggcgaa

SEQ ID NO: 10272 - DNA, 1866 bp, Artificial Sequence
  derived and/or modified sequence
atggcccatgtgcgcgggctgcaacttccagggtgtcttgccttggcggcactctgctccctggttcactctcagcatgtattcctcgctccgcaacaagcaaggtctctcctccagcgtgtccgacgggccaacaccttcctggaggaggtgagaaaggggaatctggagagggaatgcgtggaagagacgtgttcttatgaggaggctttcgaggccctggagtccagtaccgccaccgatgtattttgggcgaagtacaccgcctgtgagacagcccggaccccccgtgacaaactggcagcctgcctggaaggtaattgtgcagaaggactggggactaactaccgcgggcatgtcaatatcacgcgctcaggcatcgaatgtcagttgtggcgctcacgctacccccacaagccggagatcaactccactactcatcctggggccgatctgcaggaaaatttttgccgcaacccagactcttcaacaactgggccatggtgttacacgacagatcccacggtccgtaggcaggaatgttcaatccccgtttgtggtcaggatcaagtgacggtggcaatgaccccccgtagtgagggcagttcagtcaacctgtctccccctttggagcagtgtgtgccagataggggccagcaatatcaagggaggctcgctgtgaccactcatgggttgccttgtctggcttgggcctccgcccaggccaaggcattaagcaagcaccaagattttaattctgccgtccagttagtggaaaatttttgtcggaatcccgatggagatgaagaaggagtctggtgctacgtggcagggaagccaggtgactttggatactgcgacctcaattattgtgaggaggcagtcgaagaagaaacgggggatggcctggacgaggactcggaccgagctatagaggggcgaacggctacatcggagtaccagaccttcttcaatcctcgtacattcggatcaggtgaagctgactgcggcctgagaccgctattcgaaaaaaaatccctggaagacaagacagagcgggagttgctggagtcatacattgatggccggatagtcgaaggaagtgacgccgaaatagggatgtctccctggcaggtcatgctgttcagaaagtcgccccaagagctgctgtgtggggcctcgctgattagtgataggtgggtccttactgccgcccactgcctcctttaccctccgtgggataagaatttcacagagaacgacctactggtgcgcatcggtaaacactcacgcacccgttacgaaagaaacatcgagaaaatttccatgctggaaaaaatctacatccacccccgttataactggcgggagaatctggaccgagatatcgctctgatgaaactgaagaagccggtcgcgtttagtgattacattcaccctgtgtgcctcccggaccgtgagaccgcagccagtcttctgcaagccggctacaaaggcagggtgacaggatggggcaatctgaaagaaacctggacggccaacgtggggaaggggcagccatctgtgctgcaggttgtcaacctcccaattgtagagcgccccgtttgtaaggatagtacgagaattcgcatcaccgataatatgttctgtgccggttacaagcctgacgagggaaaacggggggacgcatgtgagggagatagtggtggcccctttgtgatgaaaagcccgttcaataacagatggtatcaaatggggatcgtaagttggggggaggggtgtgatcgggacgggaaatacggtttttacacccacgtctttcgcctaaaaaagtggattcagaaagttatagaccaatttggggaa

SEQ ID NO: 10273 - DNA, 1866 bp, Artificial Sequence
  derived and/or modified sequence
atggcccacgtaaggggtctgcagctcccagggtgcctggctctggctgccctgtgttctctcgtgcattcccagcatgtctttctggcaccacaacaggcacgttcgctgctccagcgggtgcgcagggccaacacattccttgaggaggtccggaaaggcaacctggagagagagtgtgtcgaagagacttgcagctacgaagaggccttcgaggccctggaatcttccaccgcaacggatgtattctgggccaaatacaccgcttgtgagactgcaagaaccccacgcgataagctggccgcatgtttagagggaaattgcgccgaagggctgggcacaaattaccgagggcatgtgaacatcactaggtcaggcatcgaatgccagctgtggcggtccagatatcctcacaagcctgagatcaacagcacaactcatccgggtgcagatctgcaggagaatttttgcaggaaccccgactctagcacgacagggccctggtgctacacaacagatcccacggttaggcgacaagagtgtagcatccccgtgtgtggacaggatcaggtcaccgtcgccatgacacctcgtagtgaaggaagttctgtcaacttgagtccaccattggagcaatgtgtccctgaccgtggccaacagtaccagggaagactggctgtgaccacccacggcttgccttgcctcgcctgggctagcgcgcaggctaaggcgctttcaaaacaccaagacttcaatagtgcggtgcagcttgttgagaacttttgtcggaaccccgatggggatgaggaaggggtgtggtgttatgtggccggaaaacctggagacttcgggtattgtgacctcaactactgcgaggaagctgttgaagaagaaaccggggatggattagacgaggactctgatagggccatcgaagggaggaccgccaccagtgaataccagacattttttaatcccagaaccttcgggagcggcgaggccgattgcggactgaggccactgttcgagaagaaaagtctggaggacaaaactgaacgggagctgctggagtcttacatcgacggcagaattgtagagggatcagatgcagagatcggaatgagcccctggcaggttatgctctttcgcaaaagcccacaggagttgttgtgcggtgcaagcttgatcagtgatagatgggtgctcactgcagcccactgcctcctgtaccccccctgggacaaaaacttcaccgaaaatgatctgctggtacgaatcggcaaacattccagaacgcgctacgagcgcaacatcgagaagatctccatgttagagaagatatatattcatcctcgctacaactggcgagagaacctggatcgggatatagccttgatgaagctcaagaaacccgtcgccttttctgactacatccatccagtgtgcctccccgatcgcgagaccgccgctagcctgctgcaggctggctacaaaggacgtgttaccggttggggcaatctcaaagagacatggactgctaatgtggggaaaggacaaccatctgtgttgcaagtggttaacctgcccattgtcgagcgcccagtttgtaaagattctacaaggatcaggatcaccgacaacatgttttgtgctgggtacaagcccgatgaagggaaaaggggcgatgcttgcgagggagattccggtgggccgttcgtgatgaagtccccctttaacaatcgatggtaccaaatgggcatcgtaagttggggggagggctgcgaccgggatgggaaatatggtttttacactcacgtgttcagactcaaaaaatggattcagaaggtgatagaccagtttggagaa

SEQ ID NO: 10274 - DNA, 1866 bp, Artificial Sequence
  derived and/or modified sequence
atggcacacgtcagggggctgcaattgccaggatgccttgccttagccgctctctgctccctggtacattctcagcatgtgtttctagccccgcagcaggcgcgctctcttctgcagagggtgcgacgagccaatacctttttggaggaggttcgcaaaggtaacctagagagggagtgcgtggaggagacctgcagttacgaggaggcttttgaagctctcgagtcatcaaccgccacagacgttttctgggccaagtacacagcctgtgagacagctaggactcccagggataaattggcggcctgtctcgagggcaattgtgccgagggcctgggaaccaattacagggggcacgtgaatatcacccgttccggcatcgagtgtcagctctggcggtcccgctacccccataagccagagattaactcaacaactcacccaggagccgatctgcaggaaaacttctgtagaaaccctgactcgtccaccacagggccatggtgctataccaccgacccaaccgtgaggcggcaagaatgttccattcccgtgtgtggacaggatcaggttacggtcgccatgaccccacgttcagagggctcctcggtgaacctgagcccaccactggaacagtgcgtgccagatcggggacagcagtatcagggtcggctggctgtaactacacatggtcttccttgtctggcctgggcatcagcccaagcaaaagctttgagcaaacatcaggatttcaactccgcagtacagttagtcgaaaatttctgtagaaatcccgatggcgatgaggagggggtttggtgttacgtggcaggaaagccaggcgacttcggatactgcgacctgaattactgcgaagaggctgtcgaagaggagacaggagatgggctggatgaggattctgaccgtgccatcgagggaagaaccgccacgtcggaataccagaccttctttaaccctcgaacattcgggtctggtgaggccgactgcggccttcgacccctgttcgaaaaaaaaagcctcgaggacaaaaccgaaagagagctgctggagtcttacatagatgggaggatagttgagggatccgatgccgagattggcatgtccccctggcaggtgatgctatttcgcaaatcaccccaagagctcttgtgtggcgcttccttgatcagcgatagatgggttctcaccgccgcgcactgcctgctgtacccaccatgggacaagaactttacagagaatgatttgttggtgcggatcgggaagcacagtcggacccgatatgagcgcaacatcgagaagatctcaatgctggaaaaaatatacatccacccgcgatataactggcgggaaaaccttgacagagatattgcactcatgaagctgaaaaagcctgttgccttttccgattacatacatccggtatgcttaccggaccgcgaaactgcagctagtctactgcaggctggctacaagggcagagtgaccggctggggtaacctaaaagaaacctggactgctaacgtcggcaaaggacaacccagcgtactccaagtggtgaacctacctattgtcgagaggcccgtgtgcaaggattctactaggataaggatcaccgacaatatgttttgcgcaggatacaaacccgacgaggggaagaggggggatgcctgtgagggggactcaggtgggccttttgtcatgaagtccccttttaataaccgatggtaccagatggggattgtcagttggggtgaagggtgcgaccgggatgggaagtatgggttttatacccatgtcttcagattgaagaaatggattcaaaaagtgatagatcagtttggagag

SEQ ID NO: 10275 - DNA, 1866 bp, Artificial Sequence
  derived and/or modified sequence
atggctcacgtgagaggattgcagctgcctggctgccttgccctggctgcactgtgctccctggtgcactctcagcacgttttcttggcacctcagcaagcacgttccctgctccaacgtgttcgcagagcaaatacattcctggaagaggtccgtaaaggtaatctcgagagagagtgtgtggaggaaacttgcagctacgaggaagccttcgaagccctggagagctccaccgccaccgatgtcttctgggctaagtacacagcttgtgagactgcccgcacaccacgcgataaactggctgcctgcctcgaaggtaattgtgccgaaggactcggtaccaactacaggggacatgtgaacattaccaggtccggaatcgaatgccagttgtggaggtcaaggtatcctcataagcccgagatcaactctaccactcacccaggcgcagatttgcaggagaatttctgtaggaacccagatagcagtacaactggaccctggtgttatactacagacccaactgtcagacgtcaggaatgctctatacctgtgtgtggacaggatcaggtaacagtggccatgacacctcgctccgagggatctagtgtcaacctctctcctccccttgaacaatgtgtccccgaccgtggccagcaataccagggaagactcgctgtcaccactcacggtctgccctgcctcgcatgggcttctgcccaagctaaggccctgagtaaacaccaggattttaattctgccgttcaactggtggaaaatttctgcagaaaccctgacggcgatgaggagggtgtctggtgttacgtagccggaaagcccggcgacttcggttattgcgacctcaactactgtgaggaagctgtggaggaggagactggcgacggcctggacgaggattctgatagagcaattgagggcagaaccgccacctccgagtaccaaactttctttaacccccgcacttttggatctggtgaagccgactgcggactgcgtcccctgtttgagaagaagtctctcgaagataaaaccgagagggagttgctcgagtcctacatcgacggaaggatagtggaaggatccgatgctgagataggcatgagtccctggcaggttatgctgttccgcaagtctccacaagagctcctgtgcggagcctcactcatcagcgaccgttgggtgctcaccgcagcccactgtctgctgtatccaccttgggacaagaactttactgagaacgacttgttggtacgcattggcaagcactctagaacaaggtacgagcgcaatattgagaagatttccatgttggagaaaatctacatccatcctcgttacaattggagggagaacctggacagggatatcgcactgatgaagctgaagaagccagtcgcattctcagactacatccaccccgtgtgtctgcctgatcgcgagaccgccgccagcctcctgcaggccggttacaagggaagggttactggttggggaaatttgaaagagacctggaccgctaatgtgggtaagggacagccatccgtcctgcaagtggtgaatctccccattgtggagcgcccagtctgcaaggatagcacaagaatcaggatcactgataacatgttctgcgcaggctataagcctgatgaaggaaaacgcggtgacgcatgcgaaggagattctggaggaccctttgtgatgaagtcccctttcaacaacagatggtatcaaatgggtattgttagttggggtgagggttgtgatagagatggaaaatatggcttttatacccatgtgttccgcctgaagaagtggatacagaaagtgattgatcagtttggagaa

SEQ ID NO: 10276 - DNA, 1866 bp, Artificial Sequence
  derived and/or modified sequence
atggcccatgtccgagggctgcaactcccaggttgtttggcactggccgcgctctgttccctggtgcattcgcagcacgtctttcttgcaccccagcaggcccgtagcttgctgcagcgtgtgaggcgagccaacacttttctggaagaggtgcgcaaaggtaacctggaacgggaatgtgtggaggaaacctgcagctacgaagaagcgttcgaagcactggaaagctcaaccgcaactgatgtattctgggcaaagtacaccgcatgtgagactgcccgcacccctagagataaactggcagcatgtcttgaggggaattgtgccgaagggttgggaaccaattacagaggtcacgttaacatcactaggtcagggattgagtgccaactgtggcgttcgcggtacccacacaaaccagaaatcaacagcactactcatcctggtgcagatcttcaggaaaacttttgccgcaaccccgactcctccacgacgggcccatggtgttacactaccgatcccaccgtgcgccggcaagagtgctcgattccggtgtgtgggcaagatcaagtgacggtagctatgaccccaagatcagaaggttcgagcgtgaatctcagtccaccccttgagcaatgtgtccctgaccggggccagcagtaccagggacgtctcgcggtgaccacccatggtttgccttgcctcgcgtgggcaagcgctcaagcaaaggcactgagcaaacatcaggatttcaattccgctgtccaactggtggagaacttttgtcgtaacccggatggcgatgaggaaggagtctggtgctacgtggccggaaaaccgggcgactttggttactgcgatcttaactactgtgaagaagcggtggaggaagaaactggggatggtcttgatgaggattccgacagagcaattgaaggacggactgcaacttccgaataccagacctttttcaaccctagaaccttcggcagcggcgaggcagattgtggtcttaggcctctgtttgagaagaagtctcttgaagataagactgaaagagagctcttggaatcctacattgacgggaggattgtggaaggatcggatgcggagattggtatgagcccatggcaagttatgctgtttagaaagagcccacaagagctgctttgcggagcgtcgcttatatcagaccgttgggtgctgaccgctgctcactgtctgttgtaccctccctgggacaagaactttaccgagaatgaccttctcgtcaggatcggtaaacatagcagaacgagatacgaacgcaacatcgaaaagatatcaatgctggaaaagatctatatacaccctagatacaattggagagagaacctggatagggatatcgccctgatgaaactcaaaaagcccgtggcattttctgattacatccatcctgtgtgtctcccagaccgtgagactgcagcctcactccttcaagcaggatacaagggtagggtgactggctggggaaaccttaaagaaacttggactgcgaatgttggaaaggggcaaccgtccgtgttgcaagtcgtgaacttgcctattgtcgaacgtccagtctgcaaggattcgacgagaatacgcattactgacaacatgttttgtgcaggttacaaacctgacgagggaaagcggggagacgcctgtgaaggggactccgggggcccctttgtcatgaagtcacctttcaataatcgatggtatcagatgggcatcgtatcatggggagaaggctgcgatcgagatgggaagtatggattttacacccatgtgttccgtcttaagaagtggatccaaaaggtcattgaccagtttggagag

SEQ ID NO: 10277 - DNA, 1866 bp, Artificial Sequence
  derived and/or modified sequence
atggcacatgtgcgtggtctgcaactgccaggatgtcttgcattggcagcgctgtgctcacttgttcactcccagcatgtctttctggcaccacagcaggcaagatccctcctgcaaagagtgaggcgggcaaataccttcctggaggaagtgcgcaagggaaacctggagagagaatgtgttgaagaaacctgttcctatgaagaggcgtttgaggcccttgaatcgtctaccgcaactgatgtgttttgggcaaagtacactgcttgcgagactgctagaacgcccagggacaagttggccgcatgccttgagggtaattgtgctgagggactcggaactaattaccggggtcacgtgaacatcactagaagcggaatagaatgtcagctttggagatcgcgctaccctcataagccagagataaacagcactactcatccaggagcagatctccaagaaaacttctgtagaaacccagactcctcaaccaccggcccttggtgctacaccaccgaccccacggtgcgcagacaagaatgttctataccagtgtgcggtcaggatcaagtcaccgtggcaatgactcctagatctgaaggatcctcagtgaacctctcgcctccgctcgaacaatgcgtgccggatagagggcagcaataccaaggccgcctggcggtgactacgcacggcctgccctgcctcgcatgggcatcggcacaagcaaaagccctctcgaaacatcaggatttcaactccgcagtgcagctcgtggaaaacttttgccgaaatccggacggggacgaagaaggcgtgtggtgttacgtggctggaaagccaggagactttggatactgtgatcttaactattgtgaagaagcagtggaggaagagactggagacggactggacgaagattccgaccgagcgatcgaagggagaactgctacctccgaatatcagaccttcttcaatccacgcacctttgggtcaggagaagcagattgtggactgcggcctctcttcgaaaagaaaagccttgaggacaagactgagcgggaacttcttgagtcgtacatcgatgggcgcattgtggagggatccgacgcagaaatcggtatgtccccatggcaagtgatgcttttcaggaagtccccacaagaactcctgtgtggggcatcactgatctccgatcgctgggtccttaccgctgcacattgtctgttgtaccctccgtgggataagaacttcaccgagaatgatctcctggtcagaatcggaaagcactcccggactagatacgaacgcaacatcgagaagattagcatgcttgagaagatctacatccatccaaggtacaattggcgggagaatcttgacagagatattgcactcatgaaacttaagaagcctgtcgccttctcagattacattcacccagtctgcctgccggacagagaaaccgcagcctcgcttctgcaagccggctacaagggaagagtgactggctggggaaatctgaaggaaacttggaccgcaaacgtgggcaaggggcagccctcagtccttcaggtggtgaatctgccaattgtggaacggcctgtgtgtaaggattcgactaggatccgcatcactgataacatgttttgtgcaggatacaagcctgatgagggcaaacgcggtgacgcatgtgagggggattcgggtggaccatttgtcatgaagagtccgttcaacaatagatggtaccagatggggattgtaagctggggcgaagggtgtgatcgggatggcaagtacggattctacactcacgtctttcgacttaagaaatggatccagaaagtgatcgaccaatttggagag

SEQ ID NO: 10278 - DNA, 1866 bp, Artificial Sequence
  derived and/or modified sequence
atggcacatgtgcggggcctccagcttcccggttgcctcgccctggcggctctttgttcacttgtgcattcgcaacatgtgtttctggcccctcaacaagcacgctccctgctccagagagtgcgccgggcaaataccttcctggaggaagtcagaaagggaaacctggagagggagtgtgtggaagaaacgtgctcgtacgaagaagcgtttgaggcccttgagagctcgactgccaccgacgttttttgggccaaatacaccgcatgtgaaactgcacgcacccctagagacaagctggccgcttgccttgagggtaactgcgcagaaggcttgggaacgaattacaggggtcatgtgaacatcacccgtagcggaattgaatgccagctttggaggagcagataccctcataagccagaaatcaactcaacgactcaccctggagcagacctgcaagaaaacttctgcagaaatcccgattcctccactaccggaccctggtgttacaccaccgaccctaccgtccgcaggcaagagtgttccataccggtgtgtggacaggatcaagtgactgtggccatgactccacgctcagaaggctcatcggtgaacttgtccccgcctctggaacagtgtgtgcctgatcgtggtcaacagtaccaaggacgtcttgccgtcaccactcatggtctgccatgcctcgcttgggcctcggctcaagcaaaggcacttagcaagcatcaggactttaactcagccgtgcaactggtggagaacttctgtcgcaacccagatggagatgaagagggcgtctggtgttacgtggcaggaaaacctggagattttggatactgcgatttgaattactgtgaggaggccgtggaggaggagactggtgatggactggatgaagattcggatcgcgcgattgaggggcgcaccgcaaccagcgaatatcagaccttctttaaccctcgtacgttcggatcgggtgaggcagattgcggtctgcgacctctgtttgaaaagaaatcactggaagataagaccgaacgggagcttctggaatcatacattgacgggaggattgtggaaggatccgatgcagagattggtatgtcgccatggcaagttatgctgtttcggaagtcgcctcaggagcttctctgcggtgcatcactgatctcggatagatgggtgcttacggcggcacattgcctgttgtaccctccttgggacaagaactttaccgaaaacgatttgctggtcaggatcggtaagcattcccggacccgttacgaaagaaacattgagaagattagtatgcttgaaaagatctacattcatccgcgatacaactggcgcgagaacttggaccgcgatattgcactcatgaaacttaagaagccagtggccttttcagactacatccatccagtgtgtctgcccgatagagaaactgcagcttcgcttctgcaggccggttataagggacgggtcacgggctgggggaacctcaaggaaacctggactgctaacgtgggaaaaggacagccaagcgtgctgcaagtggtgaacctccccatcgtggaacgtccagtctgcaaggacagcaccagaattaggattactgacaacatgttctgcgcaggatacaagccagacgaaggaaagaggggtgacgcatgcgagggcgactcgggcgggccctttgtgatgaagtcgccttttaacaatcgctggtaccagatgggcatcgtgtcctggggcgaaggttgtgatcgggatggtaagtacggcttctacacccacgtgtttagacttaagaagtggattcagaaggtgatcgatcaattcggagag

SEQ ID NO: 10279 - DNA, 1866 bp, Artificial Sequence
  derived and/or modified sequence
atggcccatgtgcgaggcctccagttgcctggctgtctcgcgctggcggcgctttgcagcctggtccactcccaacatgtctttctggcgccacagcaggcacggtccctcctgcaacgcgtgcggcgggccaacactttcttggaagaagtgagaaagggaaacctggagcgggagtgcgtggaggaaacctgctcgtacgaagaggccttcgaggccctcgaatcgtctactgcgaccgacgtgttttgggccaaatacaccgcgtgcgaaactgcgagaacgccgcgagataagctggcagcttgtctggagggcaattgcgctgagggactgggcactaactaccgcgggcacgtgaacattaccaggtccggaatcgagtgccaactttggcggtcccggtaccctcacaagccagagatcaactcgaccacccacccaggtgccgacttgcaagaaaacttctgccggaacccggactccagcactaccggaccgtggtgctataccaccgatccgactgtgcgcagacaggaatgttccatccctgtctgcgggcaagatcaagttaccgttgcgatgactccgaggtccgaaggatcatcagtcaatctgtcaccgcccctcgagcagtgcgtcccggacagaggccagcagtaccaggggcggctggccgtgacgactcatggactcccatgtctggcctgggcatccgctcaagccaaagcgctgtcaaagcatcaagacttcaacagcgccgtccagctggtcgagaacttctgccgcaacccagatggggatgaggaaggagtgtggtgttatgtggctggaaaacctggtgacttcggttactgtgatctcaattactgcgaagaagcggtcgaagaagagacgggggatggattggacgaggactcagatcgtgcgattgagggccggacggcgacttcggaataccagaccttcttcaatccgcgcacgttcggcagcggcgaggctgattgcggcctgcggccgctcttcgagaaaaagtcattggaggacaagaccgaaagagagctcctggaatcctacattgacggtcgcatcgtggagggttcagacgcagagatcggaatgtcaccgtggcaagtgatgctgttccgcaaatcaccacaggaactgctgtgcggagccagccttatctcggaccggtgggttcttaccgcggcgcactgcctgctgtacccaccctgggacaaaaactttactgaaaatgatctcctggtgcgcatcgggaagcactccagaactagatacgagcgcaatatcgaaaagatatcaatgcttgaaaagatctacattcatcctcgctacaactggcgcgaaaacctggacagagacatcgcgttgatgaaactgaaaaagcctgtcgccttctccgactatatccatcccgtctgcctgcccgatcgggaaactgctgcctcattgctgcaggcgggctacaaaggacgggtgaccggctgggggaacctcaaggaaacctggaccgcgaatgtgggcaagggccagccatcggtgcttcaggtggtgaacctgcccatcgtggagcgacctgtctgtaaggacagcactaggatcagaatcaccgataacatgttttgcgccggctacaaacctgacgaaggtaagagaggagacgcttgtgagggcgatagcggaggaccgttcgtgatgaagagccccttcaataacagatggtaccagatgggaatcgtgtcgtggggagaggggtgcgatagagatggaaagtatggcttttacacccacgtgttccggctcaagaagtggatccagaaggttatcgatcaatttggagag

SEQ ID NO: 10280 - DNA, 1866 bp, Artificial Sequence
  derived and/or modified sequence
atggcccacgttagagggttgcagttacctggctgtttagccctggccgccctgtgtagcctggtccactcacaacacgtctttctggcccctcagcaggcccgttcgctgcttcagcgagttagaagagccaatacgttcctagaagaggttagaaagggcaatttagagcgagaatgtgtagaggaaacatgtagttacgaggaggccttcgaggcactcgaatcttctacagctacagacgtgttttgggcgaaatatactgcttgcgagaccgcccgaactccaagggataaactcgccgcctgtctcgagggcaactgcgccgaaggcctgggcactaattaccgtgggcacgtgaatataactcgcagcgggatcgagtgccagctatggcgcagcaggtacccacataaacccgagattaacagcactactcaccctggcgcggatctgcaggaaaatttctgcaggaatccagattcaagtactaccgggccttggtgctatactacagatcccaccgtgcggcgacaggagtgctctatccctgtgtgcggacaggaccaggtgactgtcgccatgacaccccggtcggagggcagttcagtgaacttgagcccccctttggaacagtgtgtcccggacagggggcaacagtaccaagggcggctggccgtcaccacgcatggactgccatgcctagcttgggcgagtgctcaggccaaagctttaagtaagcatcaggacttcaatagcgcggtacaactagtcgagaacttttgccgcaacccagatggggacgaagagggcgtgtggtgttacgtggctgggaagcccggcgactttggctattgtgacctgaattattgcgaagaagctgttgaagaagaaacaggagatggtctggatgaggatagcgatagagctatcgaggggcgcaccgccaccagtgagtaccagacctttttcaacccgaggacgttcggcagcggggaggccgactgtggactcaggccccttttcgagaagaagtcactcgaggacaaaacggaaagagaactgctcgagagttatatcgacggccggattgttgagggctctgatgccgaaataggcatgagtccgtggcaggtgatgctgtttcggaagtccccgcaggaactgttgtgcggtgccagcctaatttcggatcggtgggtcctgaccgccgcacactgccttctttacccgccctgggacaaaaatttcacagaaaatgacctgctagttagaataggcaaacacagcagaacccggtacgagcgcaatatcgaaaaaatttcaatgctggagaaaatctatatccatcctagatacaactggcgcgaaaatctagacagagatatcgctctgatgaaactcaaaaaacctgtcgctttctccgattacattcaccctgtttgcctgcccgaccgggaaaccgcggccagtctcctgcaggcgggatacaaaggaagagtgacaggttgggggaacctgaaagaaacgtggactgctaatgtgggcaagggacaaccttctgtgttgcaggtggtgaatctacccatcgtggagagacctgtttgcaaggactctacaaggattcggatcacggacaacatgttttgcgccggctataaacccgacgaagggaagcgcggtgatgcatgtgagggggacagcggcggaccttttgttatgaagtccccatttaacaacagatggtatcaaatgggtatcgtaagttggggcgagggatgcgatcgggatggcaaatacggattctacacgcatgtgttccgacttaagaaatggattcagaaagtgatcgaccagttcggagaa

SEQ ID NO: 10281 - DNA, 1866 bp, Artificial Sequence
  derived and/or modified sequence
atggcgcatgtccgcggactccaactgcccggatgcctggcactggccgcgctgtgctccctcgtgcactcgcaacacgtgttcttggcgccgcagcaggcccggagcctgctccaaagagtgagacgcgccaacactttcctggaagaagtccgtaagggaaacctggaacgggagtgtgtcgaggagacttgctcgtacgaagaggctttcgaagctctcgaatcgtcaactgcgacggatgtgttctgggcaaaatacaccgcctgcgagactgcccggaccccgagggacaagctcgcagcatgcctcgaaggaaactgtgccgaaggactgggcaccaattacagggggcacgtgaacattactcggtccggtattgaatgtcagctgtggcgctcgaggtacccacacaagcctgagattaactcaaccacccatccgggagccgacctgcaggaaaacttttgtaggaaccctgactcgtcaactaccggcccgtggtgttacacgacggatccaaccgtgcggcggcaggaatgctcgatcccggtgtgtggtcaggatcaagtcaccgtggcgatgactccgagatcggagggttcatccgtgaatctgagccccccactcgagcagtgtgtcccagacagaggccagcagtaccagggacggctcgcagtgaccacgcatggtctgccttgcctcgcgtgggcgtccgctcaggccaaagcactctcgaagcaccaggacttcaactccgcggtgcagcttgtggagaacttttgccgcaacccagatggcgacgaggaaggagtgtggtgctacgtcgccggaaagccaggcgacttcggatactgtgacctgaattactgcgaagaagcagtggaggaagagactggggatggactggacgaagattcggacagagctatcgagggacgaaccgcaacgtcggagtaccaaacttttttcaacccccgcacctttggaagcggtgaagcagattgcggcctgcgcccactgttcgagaagaagtccctcgaggacaagaccgagcgcgagctcctcgaatcatacattgatggtcggattgtcgaaggatcggacgcggagatcgggatgtcgccttggcaggtcatgctgttccggaagtcgccccaggagctcctttgcggtgcgtcgcttatcagcgaccggtgggtcctgaccgctgcgcactgcctgctctacccgccctgggacaagaactttactgaaaacgacctgctggtcagaatcggcaagcactcgcgcactcggtacgaaagaaacatcgaaaagattagcatgctggaaaagatatacattcacccacgatacaactggcgggaaaacctggatagggatatagcactgatgaaactgaaaaagccggttgccttcagcgactacatccaccctgtgtgcctcccggacagagagacggctgcgtccctgctgcaagccggatacaagggacgcgtcaccggttggggaaatttgaaagagacgtggactgccaacgtgggtaagggccagccgtcggtccttcaggtggtgaatctgccgatcgtggaacggccagtgtgcaaggatagtactagaatccgcatcactgacaatatgttctgcgctgggtacaagcctgacgaagggaaaagaggagacgcatgtgagggagactcaggcggccctttcgtgatgaagtcgccgttcaataatcgctggtaccaaatgggcatcgtgtcctggggagagggctgcgatcgcgacgggaaatacggattctatacccacgtgttccggctgaagaagtggatccagaaggtcattgatcagttcggagaa

SEQ ID NO: 10282 - DNA, 1866 bp, Artificial Sequence
  derived and/or modified sequence
atggcgcacgtgaggggcctgcagcttcctggatgccttgcccttgccgcactgtgctcactggtgcattcgcaacacgtgtttttggcgccacagcaagcccgctcgctcctgcaacgggtcaggcgagccaatactttcttggaagaggtgaggaagggaaacctcgaacgcgaatgcgtcgaagaaacctgctcctacgaggaagccttcgaggctttggagtcatcgaccgcgactgacgtgttctgggccaaatacaccgcgtgtgaaaccgccagaactccgagagataagctggcggcgtgtctggaggggaactgtgcggaaggactggggactaactatcgcgggcatgtgaacatcaccaggtcgggcattgagtgccagttgtggcggtcgaggtacccccacaagccagagatcaactccactacccatccgggggctgacctgcaggagaacttctgccgcaacccggattcaagcaccacggggccgtggtgctacaccactgaccccaccgtccgcaggcaggagtgctccatcccagtgtgcggacaagatcaggtgaccgtcgcaatgaccccaagatccgaaggaagcagcgtcaatttgagcccgccgctcgaacagtgcgtgcctgacagaggacagcaataccaggggcgcctcgctgtgacgacccacggactgccatgcctcgcctgggcgtctgcccaagcgaaggccctgtccaaacaccaggacttcaactccgccgtgcagctcgtcgaaaacttttgccgaaacccagatggtgatgaggagggagtatggtgctacgtggcaggtaaaccaggagacttcggatactgtgacctcaattactgcgaggaggcggtcgaagaggaaaccggtgatggcctggacgaggattctgaccgggccatcgaaggacgaacggccacttcggaataccagactttcttcaaccctcgtaccttcggatcgggggaggcagactgtggactgcggcccttgtttgagaagaagtctcttgaggataagactgaacgggaactgctggagtcttacatcgatggaaggatagtggaaggaagcgacgcagagatcggcatgtccccgtggcaggtgatgctcttccggaaaagtcctcaggaactgctgtgtggcgcttccctgatctccgacaggtgggtgctgactgcagcccactgccttctgtaccctccgtgggacaagaatttcaccgagaacgaccttctcgtaaggatcggaaaacattctcgtactagatacgaacgcaatatcgagaagattagcatgcttgaaaagatctacatccatccacggtacaattggcgcgaaaatctggaccgggatatcgcactgatgaagctgaagaagcctgtcgcattctcggattacatccaccctgtctgtctgcccgaccgtgaaaccgcggcttcgctccttcaagcgggctacaaaggacgggtgacgggctgggggaatcttaaggaaacttggactgctaacgtcggaaaaggccagccatcagttctccaggtcgtcaacctgccgatcgtggaaagacctgtgtgcaaggactcgaccagaatccgcattaccgataacatgttttgcgctgggtataagcccgacgaaggaaagcgcggggacgcatgcgaaggtgactccggaggaccgtttgtgatgaaatcgccgttcaacaatcggtggtaccaaatgggcatcgtgtcctggggagagggctgcgaccgcgacggtaagtatggattttacactcacgtgttcagactgaagaaatggattcaaaaggtcattgaccagttcggtgag

SEQ ID NO: 10283 - DNA, 1866 bp, Artificial Sequence
  derived and/or modified sequence
atggcccatgtccggggcctccagcttccgggatgcctcgccctcgccgctctgtgtagcctggtccactcgcagcacgtgtttctggctccgcagcaggcgcgctccctcctgcagcgggtgagaagagctaataccttcctggaagaagtgagaaagggaaacttggaaagggagtgcgtggaggaaacctgcagctacgaggaggcgttcgaagcattggaaagttccaccgcgacggatgtcttttgggctaaatacaccgcctgcgagactgcccgcactccgcgggataaactcgctgcgtgcctggaaggaaactgtgccgaaggtctgggtaccaattacagagggcatgtgaacataacgcggtcaggaatcgaatgtcagctgtggaggtcacgctacccacacaaaccagagatcaactcaaccacccatccgggtgcagacctccaggagaatttctgccggaacccagattcgtccactactggcccatggtgctacacgaccgatcccaccgtcagacgccaggaatgttccatcccagtgtgcggccaggatcaggtgaccgtggcgatgaccccaagatcggaagggagctcagtcaacctgagcccgccactggagcagtgcgtcccagatcgcggacagcaataccagggccgcctcgcggtgaccactcatggcctgccgtgcctggcctgggcttcggctcaagcgaaagccctgtccaagcaccaagacttcaactccgcggtgcaactggtggagaacttctgcagaaaccccgatggagacgaggaaggcgtgtggtgctacgtggctggaaagccaggagacttcggatactgtgatctcaactactgcgaagaagctgtggaagaggaaactggagacggactggatgaggactccgatagagcgatcgaaggaagaaccgcaacgagcgaatatcagaccttctttaaccctagaaccttcggaagcggtgaggccgactgcggactcagacctctcttcgaaaagaagtcattggaggacaagactgaaagagaattgctggagtcgtacatcgacgggcggatcgtggagggatcagatgcggaaatcgggatgagcccttggcaggtcatgctgttccggaagtcgccgcaggaacttctgtgtggagcctccctgatctctgaccgctgggtgctcactgccgcacactgcttgctgtacccgccttgggacaagaacttcaccgagaatgatctgctggtgcggatcggaaaacactcccggactcgctacgaacggaacatagaaaagattagcatgcttgagaaaatctacatccacccgcggtataactggcgcgagaatctggaccgcgatatcgcactgatgaaactcaaaaagcctgtggccttttccgactacatccatccggtgtgccttcctgatagggaaactgcagcttcgctcctccaggccggatacaagggaagagtgactggctggggaaaccttaaggagacttggaccgcgaatgttggtaagggacagccatcagtgctgcaggtggtgaatctgccaattgtcgagcggccggtgtgcaaggactcaactagaatccgcatcaccgataacatgttttgcgcgggctacaagccggacgaagggaagagaggggatgcatgcgaaggggacagcggtggtccatttgtgatgaagagccccttcaacaaccggtggtatcaaatgggaatcgtgtcatggggcgagggatgcgatagggatggcaagtacggcttctacacccacgtgttccgactgaagaagtggattcagaaagtgattgaccagttcggtgaa

SEQ ID NO: 10284 - DNA, 1866 bp, Artificial Sequence
  derived and/or modified sequence
atggctcacgtgaggggcctgcagctgccaggttgcctcgccttggctgcattgtgtagcctggtgcatagtcagcatgttttcttagctccacagcaggcgaggagtctactgcagcgggtccgtcgtgccaatacgtttctagaagaagtgcgcaagggcaaccttgaaagagaatgtgtagaagaaacatgtagctatgaagaggctttcgaggcccttgagagtagcaccgctacagacgtgttttgggcgaaatacaccgcatgtgagacagccaggactcctagagacaagctcgcggcatgccttgagggcaattgcgccgaagggctgggcaccaactatcgaggacatgtgaacattaccaggagcggcattgagtgccagctttggaggtcaaggtacccccacaaacctgagatcaattcaactacgcatcctggggccgaccttcaggagaatttttgcagaaacccggacagtagcaccactggcccgtggtgctacacgactgaccccacagttcggagacaggagtgctccattccagtttgcggacaggatcaggttacagtggcaatgactcctaggtccgaaggttcaagcgtgaacctgtcccctcctttggagcagtgtgtccccgatcgcgggcagcagtatcagggcaggttggccgtgacgacccacggcttgccttgcctggcctgggccagcgcacaggcaaaggccctctccaagcaccaggatttcaactccgccgtccaattggtggagaatttttgcaggaaccctgatggggatgaagaaggagtgtggtgctacgtggccggtaagcccggtgatttcgggtattgtgacctgaattactgcgaagaggccgtcgaggaggagacaggagatggtctcgacgaagacagcgaccgagccattgaagggcgtactgctactagcgaataccaaacattttttaacccacgaaccttcggaagcggtgaggcagactgtggactgcgacccctatttgaaaagaagtccctagaggataagacggaaagagagttgctggagtcatacattgatgggcgcattgtggaggggtcagatgccgaaatcgggatgagtccttggcaggtgatgctgttccgcaagtctccccaggaactgctgtgcggcgcttccctgatcagtgatagatgggtgctcaccgcagcccactgccttctgtatccaccctgggacaagaatttcaccgagaatgacctcctcgtgcgcataggtaaacactctcgcactcgctacgagaggaatatcgaaaagatcagtatgctggagaagatttatattcacccccggtataactggcgtgagaatcttgacagggatattgccttaatgaagctcaagaagcctgtggccttctcagattacattcatccggtttgcctgcccgatagagagactgccgcgtcactgctgcaggcagggtataaggggagggtgactgggtggggcaatctgaaggaaacttggaccgccaacgtcggaaaaggccagccaagcgttttacaggtggtgaatctgcctatcgtggagcggcctgtgtgcaaggatagcactcgaataagaattacagacaacatgttttgtgctggatataaaccggacgaagggaagagaggagacgcctgtgagggtgattccggtggtcctttcgtgatgaagagtccattcaataaccgctggtaccagatggggatcgtgtcttggggggagggatgtgaccgagatggtaagtatggcttttatacgcatgttttccgcctgaaaaaatggatacaaaaagtaatcgatcaattcggagag

SEQ ID NO: 10285 - DNA, 1866 bp, Artificial Sequence
  derived and/or modified sequence
atggcacatgtgcgcgggctgcaactccctggctgcttggcactcgctgctctgtgcagtctcgtccactcacagcacgtgttcttagccccacagcaggctcgctcattattgcagagagtcaggcgggccaatacttttctcgaggaagtacggaagggcaacctagagcgcgaatgcgttgaggagacatgttcctacgaggaggcttttgaagctctcgagtcatctaccgctacagacgtcttctgggcaaaatacacagcttgcgagaccgctagaactcctcgggataagcttgccgcttgtttggaggggaattgtgcggagggtcttggcacaaactaccgaggacacgtcaatattacacggtccggcatcgagtgtcagttatggcgctccagatatccccataaaccggagatcaattcaacgacccatcccggagcagatcttcaggagaacttctgcaggaaccctgattctagtactaccgggccttggtgctacacaacagatcccaccgtaagacggcaggaatgtagcattcctgtgtgcggccaggaccaggtgaccgtagccatgacgcctagatcagagggatcgtccgtgaatctgagtccccctttggagcagtgtgtgcccgatcgcgggcaacaataccagggacgattagctgtaaccactcacggtctaccctgtctggcctgggcatctgctcaagcaaaggcgctaagcaagcaccaggacttcaactccgcagtccaactggtggagaacttctgcagaaatcctgacggcgacgaggaaggcgtctggtgttacgtggcagggaaaccgggcgactttgggtactgtgatctgaactactgcgaggaggccgtggaagaggaaaccggagatggcctggatgaagactcagaccgtgccatagagggacgaaccgcaaccagtgagtatcagaccttttttaacccgcgcaccttcggctctggagaagccgactgcggtctgaggccactcttcgagaaaaaaagcctcgaagataagacggagagggagctactcgaaagttacatcgatggcagaatcgttgagggctctgacgcagagatcggtatgtctccctggcaggtgatgctcttccgcaaatctcctcaggagctgctgtgcggagcgagccttatctctgataggtgggttctgaccgcagcccattgcctgttatatccaccctgggataaaaactttaccgagaatgatctattggtgcgcattgggaaacacagcaggacccggtatgaaagaaacatcgaaaagatttccatgctcgaaaagatatatattcatcccaggtataattggagggaaaacctcgacagggacattgcgctcatgaagctgaaaaagccagttgccttctccgattatatacacccagtctgcctaccggacagggagaccgcagcatcgctactacaggcggggtacaaggggcgagttacaggctgggggaaccttaaagagacatggactgcaaatgttggcaaggggcagccgagtgtgctgcaagtggtcaacctgccaatagtagagaggcctgtttgtaaagacagcacaagaatcaggatcaccgataatatgttctgtgctggttataagccagacgaaggaaagagaggagatgcgtgcgaaggagattcggggggaccctttgttatgaaatctcctttcaataacagatggtaccagatgggcatcgtaagctggggggaagggtgtgatagggacgggaaatacggcttctatacccacgtgtttcgcctgaaaaagtggatccagaaggtaatcgatcagtttggggag

SEQ ID NO: 10286 - DNA, 1866 bp, Artificial Sequence
  derived and/or modified sequence
atggcccatgtcaggggcctgcaactccctgggtgcctcgcgctggcagccctgtgctctctcgtgcattcacagcacgtttttctcgccccccagcaggccagaagcctgctgcagagggttaggagagccaacacatttcttgaggaagtccgcaaaggtaaccttgagcgtgaatgtgtggaggagacctgttcctacgaagaagccttcgaggccctggagtcgtccactgccaccgatgtgttttgggccaaatatacagcttgtgaaaccgctagaacaccgcgcgataaactggctgcttgtctcgagggtaattgcgcagaggggctggggaccaattaccgtggccacgtgaatattaccagatcaggaatcgagtgccagctctggcgatcccgttaccctcacaagcccgagattaatagcaccacacaccctggggcggacctgcaagaaaatttttgcagaaacccagactcttctacgaccggaccatggtgctatactacggatccgaccgtgcgccggcaggagtgttctatcccggtgtgtggacaagatcaggtgactgtcgctatgactccaaggtcagaagggtcatctgtgaacctgtcccccccgctggagcagtgtgtgcccgatcgcgggcaacagtaccagggccggttagcagtcaccacccatggcctcccctgcctcgcctgggcgtctgcgcaggccaaagctctgtctaaacaccaggacttcaacagcgccgtgcagctcgtggaaaacttctgtaggaacccagatggagacgaggagggagtctggtgttacgtggccggaaagcccggcgatttcggctattgtgacctcaactactgtgaagaggccgtggaggaagaaacaggagatggactcgatgaggactctgaccgagcaatcgagggacggaccgctaccagcgaatatcagaccttcttcaatcctagaacttttggaagtggagaggcagactgcgggctgcgaccattgtttgagaagaaatccctggaagacaaaactgagcgtgagctactcgagtcctatattgatggccgcatcgtagagggaagtgatgcggaaattggtatgtctccctggcaggtcatgctgtttagaaaatcgccacaggagcttctgtgcggagcctctctcatcagcgacaggtgggtgctcaccgctgcgcactgcctactgtaccccccatgggataagaacttcaccgaaaacgaccttctggtgaggatcggcaagcattccagaacacggtatgagcgcaacatcgaaaaaatatcaatgttggagaagatatatattcatcccagatacaactggcgggaaaacttggaccgggacatcgctctgatgaagctgaaaaagcccgttgccttctccgactatattcacccagtgtgccttccagacagagaaacagctgcgtccctgctacaggcaggctacaaaggccgggtgaccgggtggggaaacctgaaggagacctggactgctaatgtgggaaaaggccaaccgtctgtgttgcaggtggtcaacctccccatcgtggagcggcccgtatgcaaggacagcaccagaattcggattaccgacaatatgttctgtgctggatacaagcctgacgaagggaaacgtggtgacgcttgcgagggcgattcaggaggccctttcgtgatgaagagcccttttaacaacaggtggtaccagatggggatcgttagctggggagagggctgcgaccgggacgggaaatatggtttttacacacatgtgtttagattgaagaaatggatccagaaagtgatcgaccagttcggagag

SEQ ID NO: 10287 - DNA, 1866 bp, Artificial Sequence
  derived and/or modified sequence
atggctcacgtgaggggattgcaactacctggatgtttagcccttgccgccttatgctcgctggttcacagtcagcatgtgttcctggccccccaacaagctagatctttgctgcagcgcgtgcgcagggcgaatactttcctggaagaagttcgcaagggaaacctcgagagggagtgtgtggaagagacgtgctcctatgaagaagcatttgaagcactcgaatcttctacagcaacggacgtgttttgggctaagtatacggcctgcgagaccgcacgcaccccgagagacaaattagctgcttgtcttgaagggaactgtgccgaggggcttggaaccaattaccgcgggcatgtcaacataacaaggtcaggcattgagtgtcagctctggaggagcagatacccacacaagcctgagatcaatagcaccacgcacccaggggccgacctgcaggaaaacttctgccgtaatcccgactccagcaccaccggcccttggtgttacaccactgacccgaccgttcgacgtcaggagtgcagtatccccgtgtgtggtcaagatcaagtgaccgtggccatgacccccagatcagaagggtctagcgtaaatttatcgcctccattagagcagtgcgtgcccgatagaggacaacaataccagggacggcttgcagttacgacccacggactgccctgcttggcctgggccagcgcccaggctaaggctctgtcaaagcatcaggacttcaatagcgctgtgcagctggtggagaatttctgcaggaatcccgacggcgacgaggagggggtatggtgctacgttgccggtaagcctggcgattttgggtattgcgacttgaattattgcgaggaggccgtggaggaagagactggtgatggcctggacgaagacagtgatcgcgctattgaaggcaggaccgctacctcggagtatcagactttcttcaacccacgcacatttggtagcggggaagccgactgcggccttcggccactgttcgaaaaaaaaagtctagaggacaagactgagagagaattgttggagtcttacatagacgggagaattgtggaggggagtgatgcagagattgggatgagtccttggcaggtcatgctgtttcgcaagtcgccacaagaactcctctgtggggcctcactgattagtgatcgatgggtactcacagccgcgcactgtttactctaccccccctgggataaaaacttcaccgagaatgatttgctcgtcaggataggaaagcactcgagaacgcgatatgaaagaaacatcgaaaagatatctatgcttgaaaagatatatatacacccccggtataattggcgcgagaatctagacagggatatcgctctgatgaaattaaaaaagccagtggcattcagcgactatatccaccccgtgtgcctacccgatagggagacggcggcatcactcttacaggcgggctataaaggaagagttacagggtggggtaatctcaaagagacctggactgctaatgtgggcaagggccagccatcagttctgcaggtggtgaatttgccaatcgtcgaacgacctgtatgcaaagacagcactcgtataagaattacagataacatgttctgtgctggctataagcccgatgaggggaagagaggcgacgcgtgcgagggggattccgggggccctttcgtgatgaagagcccatttaacaaccgctggtatcagatggggattgtgtcctggggagaggggtgcgacagggacggcaagtatgggttttacacgcatgttttccgcctgaaaaaatggattcaaaaagttattgaccagtttggtgag

SEQ ID NO: 10288 - DNA, 1866 bp, Artificial Sequence
  derived and/or modified sequence
atggctcacgtgcgcggactccagctgcccggatgtctcgccctcgctgctctgtgcagcctggtccactcacagcacgtgttcctcgctcctcagcaggcgagatccctgctccagcgcgtgagaagagccaacactttcctcgaagaagtcaggaagggcaatctggaacgcgaatgtgtggaagaaacctgctcctacgaagaggctttcgaggccttggagagcagcaccgccacggacgtgttctgggccaaatacacggcatgcgaaacagcccgcaccccgagggacaagctggctgcctgcttggagggcaattgcgctgagggtttgggtactaactatagaggtcatgttaacatcactagatccggtatcgaatgccagttgtggagatctaggtacccccacaagcctgagatcaacagcaccactcacccgggcgcagatttgcaggagaacttctgcaggaatcccgactctagtaccaccggcccatggtgctacacaaccgacccaaccgtaaggcgccaagagtgcagtatccctgtatgtggtcaagaccaggtgaccgttgcaatgaccccaagatccgaaggttcatcagtgaatctctcccctcctctggaacagtgtgtgcctgaccgcggccagcagtaccagggacgcctggcagtcaccacccacggcctgccatgtctggcttgggcctccgcacaggctaaagccctgtccaaacaccaggatttcaacagcgccgtgcaactggtggaaaacttttgcaggaaccctgacggagatgaggagggtgtttggtgctacgtagccggcaagcccggtgactttggatactgcgacctgaactattgtgaagaggcagtggaggaagagacaggcgatggtctcgatgaggacagtgacagagctatcgagggacgcactgccacttccgagtaccagaccttcttcaatccgaggaccttcggttctggtgaggcagactgcggtctgagaccactgttcgagaagaagtccctggaagacaaaacagaacgcgaactgttggaatcctacatagacggtcgcatcgtagagggatctgacgctgagattggcatgtctccatggcaggtgatgctctttaggaagagtccccaggagctgctgtgtggtgcttccctgatttccgacaggtgggtgctgacagccgcccactgcttgttgtaccccccctgggacaaaaacttcactgagaacgatctgttggtgaggattggcaagcactcacgcacacgctatgagagaaatatcgaaaagatttccatgctcgaaaagatctacattcatcccagatataactggcgcgaaaacctggaccgcgatatagcattgatgaagctgaaaaagcccgtggctttctcagattacattcatcccgtgtgtctccccgacagggaaactgccgcttctctgttgcaggctggttataagggtcgcgtgacgggctggggtaatctgaaggaaacttggaccgctaacgtgggaaaaggacagcctagcgtcctccaagtggtaaacctgcctatcgtggaaaggcccgtctgcaaagactctaccagaatacgcattacagacaacatgttttgcgccggctacaaaccagacgagggtaagcgcggcgatgcctgtgagggcgactctggaggcccattcgttatgaagtccccatttaacaataggtggtaccagatgggtatcgtgagctggggtgaaggttgcgacagagatggaaagtatggattctacacacacgtgttcagactcaagaagtggattcagaaagtgatcgatcagtttggcgag

SEQ ID NO: 10289 - RNA, 2012 nt, Artificial Sequence
  derived and/or modified sequence
gggaaauaagagagaaaagaagaguaagaagaaauauaagagccaccauggcgcauguacgcgggcuucaacugccuggcugccuggcgcuugcggcauuguguucgcugguccauucgcagcacguauuccucgccccucagcaagcacgcucccuucuucaaagaguacggcgagcaaacacauucuuggaggaggucaggaaaggcaauuuggaacgggaaugugucgaggagacuugcucauaugaagaggcuuuugaagcgcuggagucgagcacagccacagauguguuuugggccaaguacaccgcaugcgaaacagcgcggacgccgagggacaaauuggcggccugccucgaagggaacugugccgagggguugggaacaaacuauagaggacaugugaauaucacgcgcagcgggaucgagugucaguuguggcgcucgcgguacccgcacaaaccggagauuaacucgaccacccaccccggagcggaucuccaagagaacuuuugucgcaaucccgacuccuccacgacagguccaugguguuacacgaccgacccuacuguaaggcggcaggaaugcucaauccccgugugcgggcaggaucagguaacagucgcgaugacuccaagauccgaaggguccucagugaaccuuagcccaccucuggagcagugcgucccggaccgaggacagcaguaccagggaagauuggcugugacaacgcacggacugccgugucucgcaugggcaucggcgcaggcgaaagcccuuuccaagcaucaggauuucaauuccgcgguccaguugguagaaaacuucugucggaaccccgauggugaugaggaggguguguggugcuauguggcggggaaacccggcgauuuuggauacugcgaccucaauuacugcgaggaagcgguggaagaggaaacgggugacggacuggaugaggacucagacagggcgaucgaagggaggacggcaaccucagaauaucagacguuuuucaacccgcggacguucgguucgggagaggccgacuguggacugcggccucucuucgaaaagaaaagccuugaagauaagaccgaaagggaauugcucgaauccuacauugaugggagaaucguggaggggucggacgcagagaucggaaugucgccguggcaagucaugcucuuucgcaagucgccccaagagcuccucugcggugcgucccucauuucagauagguggguccucacugcugcgcacugccugcucuauccgccgugggauaagaauuucacugaaaacgacuugcuugucagaauuggaaagcacucaaggacgcgguacgaacggaauauugagaaaaucagcauguuggagaagaucuacauccaccccagauacaacuggcgagagaauuuggacagggauaucgcgcucaugaagcucaagaaacccguagcauuuuccgacuauauccauccugucuguuugccggacagagagacugcagcgucauugcuucaggcgggguauaagggaagagucacgggguggggaaaucuuaaggagacauggacagccaauguagggaaaggacagcccucgguauugcaaguggugaaucuccccaucguggaacggccagugugcaaggauagcacacgcauccgcauuacggacaacauguuuugugccggguauaaaccggaugaaggaaaaaggggagaugcaugcgaaggagacagcggagggccguucgugaugaaaagccccuucaacaauaggugguaccagauggguaucgugucguggggugagggaugugacagagaugggaaguacgguuucuauacgcacguguuucggcugaagaaguggauucagaaggugauugaccaguucggagagugauaagcugccuucugcggggcuugccuucuggccaugcccuucuucucucccuugcaccuguaccucuuggucuuugaauaaagccugaguaggaag

SEQ ID NO: 10290 - RNA, 1869 nt, Artificial Sequence
  derived and/or modified sequence
auggcucaugugaggggguugcagcucccugguugccuagcccucgcagccuuguguuccuuaguccauucccagcauguauucuuggccccucagcaggcgcgcuccuuguuacagcgcgugaggcgggcaaauacuuuccucgaggaggugcgcaaggguaacuuggagagagaauguguagaagagaccuguuccuacgaagaagcauuugaggcacuggaaagcucgacagcaacagacguauuuugggccaaauacaccgccugcgagacagcacgcaccccaagggauaagcuggccgcuugcuuagaagguaauugugcugaggggcucggaacuaauuaucgugggcacgugaauauuacucgcuccggaaucgaaugucaacuguggcguucucguuacccgcauaaaccugagauuaacucaacuacacaucccggcgccgaccugcaagaaaauuucugcagaaacccugauuccuccacaaccgggcccugguguuauacuacugauccaacugugagacggcaggaaugcagcauccccgugugcggacaagaucagguaacgguugccaugaccccaaggagugaaggauccucugugaaccucagcccuccccuggagcagugcguaccugaucgcggccaacaguaccaaggcagacuagcagugacuacccauggacuccccugucuggcaugggcaagcgcccaggccaaagcccucagcaagcaucaagauuuuaauagugcaguacagcugguggagaacuucuguaggaaccccgauggagacgaagagggcgucugguguuacguugccgggaagccuggggauuuuggguacugcgaucugaauuacugcgaggaggccguggaagaagaaaccggcgaugguuuggacgaggacucagauagggcuaucgagggaaggaccgccacauccgaauaccagacauuuuucaacccccguacuuucggaagcggcgaagcugacugcggccugaggccccucuuugaaaaaaagagcuuagaggauaagaccgaaagagaauuacucgaaucuuauauagacgggcgcaucgucgaagggagcgacgccgaaaucgggaugucccccuggcagguaaugcuauuccgcaagaguccgcaggaacugcugugcggggccagucuuaucagcgaucgguggguucugaccgccgcacacugucugcuguacccaccuugggauaagaacuucacugagaaugaccuccucguaaggauuggcaaacauucccggacaagauaugaacggaauauagagaaaauauccaugcuggaaaagaucuacauacacccaagguauaacuggagagaaaaucuggaucgcgacauugcucuuaugaaacugaaaaaaccuguagcuuucuccgacuauauucacccaguaugccuuccugaccgcgagacugccgccuccuuguugcaggcgggcuauaaagguaggguuacuggauggggcaaucugaaggaaacauggaccgcgaacgugggaaagggucagcccucgguccugcagguuguuaaccugccaauuguggagcggccaguguguaaagauuccacgaggauuagaauaacugacaacauguuuugcgccgguuauaaaccugacgaaggcaaaaggggugaugcgugcgaaggcgauagcggggguccauucgugaugaaguccccguucaauaauaggugguaccagaugggcauaguuaguuggggagagggcugcgacagagacggaaaauauggauuuuacacacauguguucagacucaagaaguggauacagaaggugaucgaucaguucggugaguag

SEQ ID NO: 10291 - RNA, 1752 nt, Artificial Sequence
  derived and/or modified sequence
auggcccauguuaggggccugcaauugcccggcugccuggcccucgccgcccuguguucacucguccauagccagcauguguuccuggccccccaacaagcacggucuuuguugcaacgaguucgacgugcuaacaccuuccuggaagaagugcggaagggcaaccuggaacgagaaugugucgaagaaacaugcaguuaugaagaggcuuuugaggcccucgagagcuccaccgcuaccgacgucuuuugggcgaaauacacagccugcgagacagcccggaccccgcgcgauaaacucgcggcgugccuagaagggaauugcgcugagggacugggcacgaacuaccgaggacacgugaacaucaccagaagcggcaucgagugccaacuguggagaagccguuauccccauaaaccggaaauaaacagcacgacccauccaggugcagaccugcaggagaacuucugucgcaacccugacaguuccacaaccggacccugguguuacacuaccgaccccacugugagacggcaagaauguagcauacccguuuguggccaggaccagguuacaguggccaugacaccacgcucggaaggcagcuccguaaaccugagcccccccuuggaacaguguguccccgauagaggccagcaguaucagggcaggcucgccgugaccacccacggucucccuugcuuggcaugggccucugcucaagcaaaggcacucucaaagcaccaagacuuuaauagcgcagugcagcugguugaaaauuuuugcaggaaccccgacggcgacgaggaaggggugugguguuacguugccggcaaacccggagauuucggcuacugcgaucuaaacuauugugaagaggcuguggaagaagagacuggcgauggccuggacgaagauuccgaucgugccauagaaggaaggaccgcuacuucugaguaccaaacuuucuuuaauccccggacguucggcucuggcgaggccgacugcggccuacgcccccuguuugagaagaagucucucgaagacaaaaccgaaagggaacuguuggaguccuacaucgacgggagaauuguugaagggucugacgcugaaauaggcaugucgccauggcaggugaugcuuuuccggaagaguccucaagagcuguuauguggcgcaucccucaucagugacagaugggugcugaccgcggcacacugucuauuguaucccccgugggacaagaacuucacagagaacgacuuacuggugcggauuggaaagcauucuagaacucgauacgaacggaacauagaaaagaucaguaugcuagaaaaaauuuauauccacccuucacugcugcaggcuggauacaaaggaagggugacuggauggggcaacuugaaggaaaccuggacggccaacgucggaaaaggacagcccaguguucuucaagucguuaaucucccuaucguggagagacccgugugcaaagauagcacucguauuaggaucaccgacaacauguucugcgccggguauaagccugaugaagggaagcgcggcgaugcaugcgaaggugacagugggggcccauucgucaugaagucucccuuuaacaaccggugguaccagaugggaauaguaucauggggugagggaugugaucgggacggcaaguauggauuuuacacacacguguuucgacuaaagaaguggauccaaaaaguaauugaucaguucggcgaguag

SEQ ID NO: 10292 - RNA, 1869 nt, Artificial Sequence
  derived and/or modified sequence
auggcacacgugagagggcugcaauuaccuggaugcuuagcacucgccgcacucuguucccuagugcauucacaacacguguuccucgcaccucagcaggcucgcucccuguugcaaagagugcgucgugcaaauacauuucuugaagaaguccgcaaggggaaccuagaaagggagugcgucgaggagacaugcaguuacgaagaagccuuugaagcucucgagaguucuacugcaacggauguguucugggccaaauacacagcaugugagaccgcucguacaccucgugauaaacuggcagcuugucuagaagggaauugugcagagggucugggaacaaacuacagaggucaugugaauauuaccagaagcgguaucgaaugucagcuuuggcgcagccgguauccacacaagccugaaauuaauaguacuacucauccgggagcugacuugcaagagaauuuuugucguaacccagauucuucaacuacugggccguggugcuauaccacagaucccaccguacggcgacaggaauguagcaucccuguguguggccaggaucaggugacuguggcaaugaccccgaggagugaagggaguucugugaaucugucuccuccauuggagcaaugugugcccgaccgcgggcagcaguaucagggaagacuggcuguaaccacccacgggcugccaugccuagcuugggcaucugcacaggcaaaagcucugagcaaacaucaagacuuuaauucugcuguucagcugguggaaaauuucugcagaaaucccgacggagacgaggaaggggugugguguuauguggcuggcaaacccggcgauuuuggguacugugaucucaacuacugcgaagaggccguugaagaagaaacuggagauggacuggaugaagauucugaccgggcuaucgaagggaggacugccacaagcgaauaucagacuuuuuucaacccccggacuuuuggcagcggugaagccgacuguggucuuaggccucuguuugagaaaaagucacucgaggauaaaacagagcgggaguuguuggagagcuauauagacggaagaaucguggaagggucagacgcagaaaucggcaugucuccuuggcaagucauguuguucagaaagagcccucaagaacuacuguguggagcaagucugauuucagauagguggguucugaccgccgcacacugucugcuguacccaccuugggauaagaacuucacugagaaugaccuccucguaaggauuggcaaacauucccggacaagauaugaacggaauauagagaaaauauccaugcuggaaaagaucuacauacacccaagguauaacuggagagaaaaucuggaucgcgacauugcucuuaugaaacugaaaaaaccuguagcuuucuccgacuauauucacccaguaugccuuccugaccgcgagacugccgccuccuuguugcaggcgggcuauaaagguaggguuacagggugggguaacuuaaaggagacauggacagccaauguuggaaaaggucagccaaguguucuucagguggugaaccugcccauuguggaacggccugugugcaaggacuccacaagaauacggaucacagacaauauguuuugcgcuggauacaaacccgaugaggguaagcggggagaugcaugcgagggcgauagcggcggaccuuucguaaugaaaagucccuuuaauaaucggugguaucaaauggggaucgucucauggggggagggcugugauagggacggaaaguauggcuucuacacccacguauuuagacugaaaaaguggauccagaaaguaauugaucaguucggcgaauag

SEQ ID NO: 10293 - RNA, 1752 nt, Artificial Sequence
  derived and/or modified sequence
auggcacauguacggggccugcagcucccuggaugucuugcauuggccgccuuguguagccugguucauagucaacauguguuuuuggccccucagcaagccagaucacuacugcagcgagugcgccgugcaaacacauuuuuggaagaaguacgcaaaggcaaccucgagagggaguguguggaagagacuuguaguuaugaggaggccuucgaggcccucgaguccagcacugcuacagacguguuuugggccaaauauacagccugcgagaccgcuagaaccccccgcgauaaguuggccgccugucucgaaggcaauugcgccgagggucuuggcacgaacuaccgaggccacguaaacauuacaagaagcggcaucgaaugucaacuuuggcgcucccgauauccacacaagccugaaauaaacucaaccacacacccaggcgcugauuuacaagagaauuucugccgaaauccagacucuucaacuaccgggccauggugcuacacaacagauccuacuguucggcggcaagaguguucuauccccguuuguggccaggaccaggucacagucgcgaugacaccccgauccgaggguucuucuguaaaucuuaguccuccuuuggaacagugcguuccugauagaggccagcaguaucaggguaggcucgcagugacgacacacggauugcccugccuugcaugggcuagugcacaggccaaagccuuauccaaacaccaagacuuuaauucagcagugcaacuuguugagaauuuuugucguaacccggacggcgacgaggaagggguguggugcuauguugcaggcaaaccgggagauuucggauauugcgauuugaauuauugcgaggaggcagucgaggaagaaacgggcgacggacuggaugaggacagcgaucgagcuaucgaaggacggacagccacaagcgaguaccagaccuucuucaacccacgaaccuuuggcuccggcgaggcugauugcgggcugcgaccacuguucgagaagaaaucauuagaagacaagacagagagggagcugcucgaaucuuauaucgacggucgcaucguugaggguucugaugcugaaauugguaugucaccuuggcaagugauguuauuucgcaaaagcccccaggaacuuuuguguggagccucucugauuagcgauagguggguccuaacagcugcccauugucuguuguacccuccaugggauaaaaauuuuacugagaaugauuuacuaguucgaauuggcaagcacucacggacucgguacgaacggaauaucgaaaaaauaucuaugcucgagaaaauauauauacauccgucucuuuugcaggcuggcuacaaggguagagucacgggcuggggaaaucugaaggaaacauggaccgcuaaugugggcaaaggccagcccucugugcugcaaguugugaaccuuccuauagucgagaggccaguuugcaaagacuccacacguauccgaaucacagauaauauguuuugcgcaggauacaaaccagacgagggaaagagaggcgaugccugcgaaggagacagugggggcccauucguaaugaagucaccuuuuaauaaucgaugguaccaaaugggcauugugucguggggagaaggaugugacagagauggcaaauacggcuuuuacacacauguuuuccgauugaagaaauggauccagaaagugaucgaucaguuuggcgaguag

SEQ ID NO: 10294 - protein, 338 aa, Artificial Sequence [sequence omitted]

SEQ ID NO: 10295 - protein, 151 aa, Artificial Sequence
  derived and/or modified sequence
MLKSSFATCVLVSEEDKHAIIVEPEKRGKYVVCFDPLDGSSNIDCLVSVGTIFGIYRKKSTDEPSEKDALQPGRNLVAAGYALYGSATMLVLAMDCGVNCFMLDPAIGEFILVDKDVKIKKKGKIYSLNEGYARDFDPAVTEYIQRKKFPP

SEQ ID NO: 10296 - DNA, 1462 bp, Artificial Sequence
  derived and/or modified sequence
gcaccacgagcgctgcggacactcggggcggcagtcggtctgtcagtcctcccgccaggtcccgcggcccgcacctgccgcccgcacctgcagctccgcacctgcggccagtgcctactgccctctcttgccgcccgcacctgcagccccgcacctgccgcttgcacctgcagccccgcgctctacccggttcaagcatggctgaccaggcgcccttcgacacggacgtcaacaccctgacccgcttcgtcatggaggagggcaggaaggcccgcggcacgggcgagttgacccagctgctcaactcgctctgcacagcagtcaaagccatctcttcggcggtgcgcaaggcgggcatcgcgcacctctatggcattgctggttctaccaacgtgacaggtgatcaagttaagaagctggacgtcctctccaacgacctggttatgaacatgttaaagtcatcctttgccacgtgtgttctcgtgtcagaagaagataaacacgccatcatagtggaaccggagaaaaggggtaaatatgtggtctgttttgatccccttgatggatcttccaacatcgattgccttgtgtccgttggaaccatttttggcatctatagaaagaaatcaactgatgagccttctgagaaggatgctctgcaaccaggccggaacctggtggcagccggctacgcactgtatggcagtgccaccatgctggtccttgccatggactgtggggtcaactgcttcatgctggacccggccatcggggagttcattttggtggacaaggatgtgaagataaaaaagaaaggtaaaatctacagccttaacgagggctacgccagggactttgaccctgccgtcactgagtacatccagaggaagaagttccccccagataattcagctccttatggggcccggtatgtgggctccatggtggctgatgttcatcgcactctggtctacggagggatatttctgtaccccgctaacaagaagagccccaatggaaagctgagactgctgtacgaatgcaaccccatggcctacgtcatggagaaggctgggggaatggccaccactgggaaggaggccgtgttagacgtcattcccacagacattcaccagagggcgccggtgatcttgggatcccccgacgacgtgctcgagttcctgaaggtgtatgagaagcactctgcccagtgagcacctgccctgcctgcatccggagaattgcctctacctggaccttttgtctcacacagcagtaccctgacctgctgtgcaccttacattcctagagagcagaaataaaaagcatgactatttccaccatcaaatgctgtagaatgcttggcactccctaaccaaatgctgtctccataatgccactggtgttaagatatattttgagtggatggaggagaaataaacttattcctccttaaaaaaaa

SEQ ID NO: 10297 - DNA, 629 bp, Artificial Sequence
  derived and/or modified sequence
acatcttggaaattcaaatactcaatagctctcgaattctaggaatcttgagaagaggcctggattaaggattcagacgtgggccctcagatggctatggcattgctggttctaccaacgtgacaggtgatcaagttaagaagctggacgtcctctccaacgacctggttatgaacatgttaaagtcatcctttgccacgtgtgttctcgtgtcagaagaagataaacacgccatcatagtggaaccggagaaaaggggtaaatatgtggtctgttttgatccccttgatggatcttccaacatcgattgccttgtgtccgttggaaccatttttggcatctatagaaagaaatcaactgatgagccttctgagaaggatgctctgcaaccaggccggaacctggtggcagccggctacgcactgtatggcagtgccaccatgctggtccttgccatggactgtggggtcaactgcttcatgctggacccggccatcggggagttcattttggtggacaaggatgtgaagataaaaaagaaaggtaaaatctacagccttaacgagggctacgccagggactttgaccctgccgtcactgagtacatccagaggaagaagttcccccca

SEQ ID NO: 10298 - DNA, 1487 bp, Artificial Sequence
  derived and/or modified sequence
attgtggctaccagggggtcaggatgcgggcggtggagccctctggcctttgtgtggtagccgaggactctgtgtcagcgaccgttttccgggaaacttccgggcgagactcacatcttggaaattcaaatactcaatagctctcgaattctaggaatcttgagaagaggcctggattaaggattcagacgtgggccctcagatggccccgcgctctacccggttcaagcatggctgaccaggcgcccttcgacacggacgtcaacaccctgacccgcttcgtcatggaggagggcaggaaggcccgcggcacgggcgagttgacccagctgctcaactcgctctgcacagcagtcaaagccatctcttcggcggtgcgcaaggcgggcatcgcgcacctctatggcattgctggttctaccaacgtgacaggtgatcaagttaagaagctggacgtcctctccaacgacctggttatgaacatgttaaagtcatcctttgccacgtgtgttctcgtgtcagaagaagataaacacgccatcatagtggaaccggagaaaaggggtaaatatgtggtctgttttgatccccttgatggatcttccaacatcgattgccttgtgtccgttggaaccatttttggcatctatagaaagaaatcaactgatgagccttctgagaaggatgctctgcaaccaggccggaacctggtggcagccggctacgcactgtatggcagtgccaccatgctggtccttgccatggactgtggggtcaactgcttcatgctggacccggccatcggggagttcattttggtggacaaggatgtgaagataaaaaagaaaggtaaaatctacagccttaacgagggctacgccagggactttgaccctgccgtcactgagtacatccagaggaagaagttccccccagataattcagctccttatggggcccggtatgtgggctccatggtggctgatgttcatcgcactctggtctacggagggatatttctgtaccccgctaacaagaagagccccaatggaaagctgagactgctgtacgaatgcaaccccatggcctacgtcatggagaaggctgggggaatggccaccactgggaaggaggccgtgttagacgtcattcccacagacattcaccagagggcgccggtgatcttgggatcccccgacgacgtgctcgagttcctgaaggtgtatgagaagcactctgcccagtgagcacctgccctgcctgcatccggagaattgcctctacctggaccttttgtctcacacagcagtaccctgacctgctgtgcaccttacattcctagagagcagaaataaaaagcatgactatttccaccatcaaatgctgtagaatgcttggcactccctaaccaaatgctgtctccataatgccactggtgttaagatatattttgagtggatggaggagaaataaacttattcctcctt

SEQ ID NO: 10299 - DNA, 1017 bp, Artificial Sequence
  derived and/or modified sequence
atggccgatcaagctcccttcgacaccgacgtcaatacactgaccagattcgtaatggaagagggaagaaaagcacgtggtacaggagagcttactcagctgctgaactccctgtgtaccgcggtgaaggccatttcctcagctgtaaggaaagctggcattgcccatctgtacggtatagctggctccacaaacgtaaccggtgatcaggtcaagaaactggacgtgttgtctaatgacttagttatgaacatgctgaaatcaagctttgccacatgtgttcttgtgtccgaagaggacaagcacgctatcattgtggaaccagagaagaggggcaagtatgttgtgtgtttcgacccactggacgggagctcaaacatcgactgcctcgtttctgtggggacaatatttgggatatacagaaagaaatcgaccgatgaaccatctgaaaaagatgcactccaacctggcagaaatctcgtcgccgcaggttacgccctgtatggctccgccacaatgttagtgctcgccatggactgtggtgtgaactgttttatgctggaccctgcaatcggcgaatttatccttgtggacaaagacgtgaagatcaaaaaaaaaggtaagatttacagcctgaatgagggttatgcaagagatttcgacccagctgtcaccgagtacatccagagaaagaagttccctcccgataattcagccccctacggtgccaggtacgtgggatcgatggtggccgatgttcatcggacactggtgtacggtggcatctttctttatcctgccaacaagaaatcccccaatggaaaactgcggctcctctacgagtgcaaccctatggcctacgtaatggaaaaggcgggggggatggcaacgacaggcaaggaggccgttttggacgtgattcccaccgacatccaccagagagcccccgtcattctgggctccccagacgatgttctcgagtttctgaaggtctacgagaaacattctgcgcaatag

SEQ ID NO: 10300 - DNA, 1017 bp, Artificial Sequence
  derived and/or modified sequence
atggccgatcaggcaccatttgacactgacgtgaatacgctgacccgatttgtaatggaagagggccggaaggctcgcggtaccggtgaacttacacagctcctgaactctctgtgtaccgccgtgaaggcgatcagctccgctgtgagaaaagctggaatcgcacacctttacggaatcgctggaagcacaaacgtgactggagatcaggtcaaaaagctagatgtgctgtccaatgatttggttatgaatatgctgaagtcgtccttcgcaacctgcgttctggtttcagaggaagataaacacgccatcatcgttgagcccgagaaaagaggcaaatatgtggtctgttttgacccactggatggcagttcaaacatagactgtctggtctccgtgggtactatatttggaatttaccgtaaaaagtcaacagacgaacccagtgaaaaggatgccctgcagccgggcaggaatctagtggcagccggttatgcactgtacgggagtgccaccatgttggtcttggccatggactgcggcgttaactgtttcatgttggatcctgcaatcggcgaattcatccttgtggacaaggatgtgaaaattaaaaagaaaggtaagatttactcactgaatgagggctatgcccgggatttcgaccccgcagtaaccgaatacatccagcgtaagaaatttccgccagataacagtgccccatacggcgctcggtacgtcgggtcaatggtcgctgacgtccatcgaaccctggtgtatggcggcattttcctttatcccgcgaacaaaaaatccccaaacggaaaacttcggctactttatgaatgcaatcccatggcctatgttatggaaaaagctggcggaatggcaaccacgggcaaggaggcagtgcttgacgtcatacccaccgacatacatcaaagagccccagtaatcctcgggtcaccagatgacgtgctggaattcctaaaggtctatgaaaaacactctgcacagtag

SEQ ID NO: 10301 - DNA, 1017 bp, Artificial Sequence
  derived and/or modified sequence
atggctgaccaggccccctttgacacagatgtgaacaccctgaccaggtttgtgatggaggagggcaggaaggcccggggcaccggggagctgacccagctgctgaacagcctgtgcacagctgtgaaggccatcagcagcgctgtgaggaaggccggcatcgcccacctgtatggaattgctggcagcaccaacgtgactggagaccaggtgaagaagctggatgtgctgagcaatgacctggtgatgaacatgctgaagagcagctttgccacctgtgtgctggtgtctgaggaggacaagcacgccatcatcgtggagcctgagaagaggggcaagtatgtggtgtgctttgaccccctggatggcagcagcaacatcgactgcctggtgtctgtgggcaccatcttcggcatctacaggaagaagagcacagatgagcccagcgagaaggatgccctgcagcccggcaggaacctggtggccgccggctacgccctgtatggcagcgccaccatgctggtgctggccatggactgtggggtgaactgcttcatgctggaccctgccatcggggagttcatcctggtggacaaggatgtgaagatcaagaagaagggcaagatctacagcctgaatgaaggctacgcccgggactttgatcctgctgtgacagagtacatccagaggaagaagttccccccagacaacagcgccccctatggagcccgctacgtgggctccatggtggctgatgtgcacaggaccctggtgtatggaggcatcttcctgtacccagccaacaagaagagccccaacgggaagctgcggctgctgtatgagtgcaaccccatggcctacgtgatggagaaggccggcggcatggccaccaccgggaaggaggccgtgctggatgtgatccccacagacatccaccagagggcccctgtgatcctgggcagcccagatgatgtgctggagttcctgaaggtgtatgagaagcacagcgcccagtag

SEQ ID NO: 10302 - DNA, 1017 bp, Artificial Sequence
  derived and/or modified sequence
atggccgaccaggcccccttcgacaccgacgtgaacaccctgaccaggtttgtcatggaggagggccgcaaggccaggggcaccggggaacttacccagctcttgaactccttatgcaccgccgtgaaggctatctcttcggctgtcaggaaggccgggattgcacacttgtatggcattgccggaagtacaaacgtgaccggcgatcaggtcaaaaagctggacgtcctgtcaaacgatctagtaatgaatatgctcaaatccagcttcgccacctgtgttcttgtgagtgaagaggacaaacacgcaataatcgtggagcccgaaaagcggggcaagtatgtcgtgtgctttgaccctttagatggtagctccaacattgattgtctcgtttcggtgggcacaattttcggtatatatagaaagaagtcaacagatgaaccatccgagaaagatgcactgcaacccggcaggaatttggtagccgcgggctacgccttgtacgggagcgctactatgttggtgctagccatggattgtggtgtcaactgttttatgctggatccagctatcggcgagtttattctcgtcgataaagatgtcaaaatcaagaaaaaggggaagatctacagcctcaatgagggatacgcgagggactttgaccccgcggtgacagaatatatccagcggaagaagttccctcccgacaatagtgcgccatatggagcccggtatgtggggagcatggtagctgatgtgcacagaacgctcgtttatggggggattttcttatacccggctaataagaagtcacctaacggaaagttgcggctactttatgagtgcaatcccatggcctacgtgatggagaaggctggtggtatggcaacaactggcaaggaggccgtgcttgatgtcatccctactgatatccaccagcgcgcccccgtcatcctcggatcccccgatgatgttctggagttcctcaaggtatacgagaagcatagcgctcagtag

SEQ ID NO: 10303 - DNA, 1017 bp, Artificial Sequence
  derived and/or modified sequence
atggccgaccaggcccccttcgacaccgacgtgaacaccctgaccaggtttgtgatggaggaaggccgaaaagccaggggcacgggagagttgacccaacttctcaattccctatgcaccgctgtgaaggccataagctcagccgtgcgcaaggccggcatcgcgcacctgtacggaatagcagggtctacaaacgtgaccggcgatcaggtgaaaaagctggacgtgctctctaatgacctcgtaatgaatatgttgaaaagctcattcgctacctgcgttctggtgagtgaggaggacaagcatgccatcatcgttgagccagaaaaaagagggaaatacgtggtgtgttttgacccacttgatggtagcagcaatatcgattgcctggtgtcagtgggcacaatattcggaatttatcgcaaaaaatccacagatgaaccctccgagaaggatgctctgcagccaggcagaaacctcgtggctgccgggtatgcactatatgggagcgctacaatgctcgtccttgccatggactgtggagttaattgttttatgctggacccagccatcggcgagttcattctcgttgacaaggatgtgaagatcaaaaagaagggaaaaatttacagtttgaacgaagggtatgctcgcgacttcgacccagctgttacagagtatatccagagaaagaaatttcccccagataactcagcaccatatggtgccaggtacgtcggcagcatggtagccgatgtgcatcgaacactagtctacggtgggatatttctgtaccctgctaataagaaatcgccaaacggtaagctgagactcctgtatgagtgtaacccgatggcctatgttatggagaaagccggcgggatggccacaacaggcaaggaggcagtgctcgatgtgatacccaccgatatccatcagcgcgccccagtgatattaggttcacctgacgatgttctcgaattcctgaaggtatatgaaaaacacagcgctcagtag

SEQ ID NO: 10304 - DNA, 1017 bp, Artificial Sequence
  derived and/or modified sequence
atggccgatcaagcccctttcgatacggacgtaaataccttgacacggttcgtcatggaggaaggtcgcaaggctcggggaactggcgagctgactcagctcctgaatagtctgtgtacggccgtgaaagctattagctccgctgtccgcaaagctggcattgcccacctgtatggaatcgccggttccaccaatgtgacaggggaccaggtgaagaaactggatgttctctctaacgatctcgtgatgaatatgttaaagagctctttcgcaacttgcgtgctggtgagcgaggaagataagcatgctattatagtggaaccagagaaaagaggtaaatatgttgtttgttttgaccccctggacggttcctccaacatcgactgtctggtttccgtgggtacgatctttggcatttatcggaagaagtcaacagacgagccctctgagaaggatgccttacagccaggtcggaacctggtggctgctgggtacgccttgtacggctctgcaacaatgctggtacttgctatggactgcggcgtgaactgctttatgctcgacccggcaattggcgagtttatccttgttgataaggacgtgaagatcaagaagaaaggaaagatctacagtctgaacgagggctatgcacgcgatttcgatcctgcagtgaccgagtacattcaacgaaagaagtttccaccagataacagtgcgccatacggcgctcgatacgtgggctccatggtcgccgatgtacaccggaccttagtgtacgggggaatttttctttaccccgcaaacaagaagtcccctaacggcaagctccggctgctgtacgagtgtaaccccatggcctacgtaatggagaaggctggcggaatggccactacaggcaaggaagccgtgctggacgtgatcccaacagacatccaccagagagcccctgtcattttaggctctcccgatgacgtactggagtttctaaaagtttacgaaaagcactctgcccagtag

SEQ ID NO: 10305 - DNA, 1017 bp, Artificial Sequence
  derived and/or modified sequence
atggctgaccaagccccttttgatacagatgtgaatacactgacccggttcgtgatggaagagggcaggaaagcaaggggaaccggtgaacttacacagttgctgaattcactatgcactgccgtcaaggccatctccagtgcggtccggaaagcgggaattgcccacctgtatgggatagccggaagcacgaatgtaaccggggaccaagtgaagaaactggatgtactctctaatgatctagtaatgaatatgttgaaaagttcttttgccacatgtgtgctcgtgtctgaggaggacaagcacgctattatagtcgagccagaaaaacggggaaaatatgtggtctgttttgatcccctcgacgggtcctccaacattgattgcctggtgagcgttggaactatattcggaatatatcggaagaaatctaccgacgagccgtccgagaaggacgctctgcagccaggcagaaatttggtggccgctggctatgctctgtacggatctgcaaccatgctggttctcgccatggactgcggggtgaactgcttcatgctcgatccagctataggggaattcattttggtggataaggatgtaaaaataaaaaagaaaggcaaaatttattcactgaacgagggctatgcccgagacttcgacccggcagtgaccgagtacatccagaggaaaaagttccctcctgacaattccgcaccctacggagccaggtacgtgggctcaatggtggccgacgttcacaggaccttggtgtacggaggcatcttcttatacccagctaataagaagtccccaaatggaaaattgaggttattgtatgaatgcaacccaatggcgtacgtgatggaaaaggcaggcggaatggccaccacgggcaaggaagccgtattggacgtgattcctacagacatccaccagcgtgctccggtgatcctggggtctcctgacgacgtgcttgagtttctgaaggtctatgagaaacattctgctcagtag

SEQ ID NO: 10306 - DNA, 1017 bp, Artificial Sequence
  derived and/or modified sequence
atggccgaccaggcccccttcgacaccgacgtgaacaccctgaccagattcgtgatggaggagggcagaaaggccagaggcaccggcgagctgacccagctgctgaacagcctgtgcaccgccgtgaaggccatcagcagcgccgtgagaaaggccggcatcgcccacctgtacggcatcgccggcagcaccaacgtgaccggcgaccaggtgaagaagctggacgtgctgagcaacgacctggtgatgaacatgctgaagagcagcttcgccacctgcgtgctggtgagcgaggaggacaagcacgccatcatcgtggagcccgagaagagaggcaagtacgtggtgtgcttcgaccccctggacggcagcagcaacatcgactgcctggtgagcgtgggcaccatcttcggcatctacagaaagaagagcaccgacgagcccagcgagaaggacgccctgcagcccggcagaaacctggtggccgccggctacgccctgtacggcagcgccaccatgctggtgctggccatggactgcggcgtgaactgcttcatgctggaccccgccatcggcgagttcatcctggtggacaaggacgtgaagatcaagaagaagggcaagatctacagcctgaacgagggctacgccagagacttcgaccccgccgtgaccgagtacatccagagaaagaagttcccccccgacaacagcgccccctacggcgccagatacgtgggcagcatggtggccgacgtgcacagaaccctggtgtacggcggcatcttcctgtaccccgccaacaagaagagccccaacggcaagctgagactgctgtacgagtgcaaccccatggcctacgtgatggagaaggccggcggcatggccaccaccggcaaggaggccgtgctggacgtgatccccaccgacatccaccagagagcccccgtgatcctgggcagccccgacgacgtgctggagttcctgaaggtgtacgagaagcacagcgcccagtag

SEQ ID NO: 10307 - protein, 866 aa, Artificial Sequence
  derived and/or modified sequence
MFSMRIVCLVLSVVGTAWTADSGEGDFLAEGGGVRGPRVVERHQSACKDSDWPFCSDEDWNYKCPSGCRMKGLIDEVNQDFTNRINKLKNSLFEYQKNNKDSHSLTTNIMEILRGDFSSANNRDNTYNRVSEDLRSRIEVLKRKVIEKVQHIQLLQKNVRAQLVDMKRLEVDIDIKIRSCRGSCSRALAREVDLKDYEDQQKQLEQVIAKDLLPSRDRQHLPLIKMKPVPDLVPGNFKSQLQKVPPEWKALTDMPQMRMELERPGGNEITRGGSTSYGTGSETESPRNPSSAGSWNSGSSGPGSTGNRNPGSSGTGGTATWKPGSSGPGSTGSWNSGSSGTGSTGNQNPGSPRPGSTGTWNPGSSERGSAGHWTSESSVSGSTGQWHSESGSFRPDSPGSGNARPNNPDWGTFEEVSGNVSPGTRREYHTEKLVTSKGDKELRTGKEKVTSGSTTTTRRSCSKTVTKTVIGPDGHKEVTKEVVTSEDGSDCPEAMDLGTLSGIGTLDGFRHRHPDEAAFFDTASTGKTFPGFFSPMLGEFVSETESRGSESGIFTNTKESSSHHPGIAEFPSRGKSSSYSKQFTSSTSYNRGDSTFESKSYKMADEAGSEADHEGTHSTKRGHAKSRPVRDCDDVLQTHPSGTQSGIFNIKLPGSSKIFSVYCDQETSLGGWLLIQQRMDGSLNFNRTWQDYKRGFGSLNDEGEGEFWLGNDYLHLLTQRGSVLRVELEDWAGNEAYAEYHFRVGSEAEGYALQVSSYEGTAGDALIEGSVEEGAEYTSHNNMQFSTFDRDADQWEENCAEVYGGGWWYNNCQAANLNGIYYPGGSYDPRNNSPYEIENGVVWVSFRGADYSLRAVRMKIRPLVTQ

SEQ ID NO: 10308 - DNA, 2598 bp, Artificial Sequence
  derived and/or modified sequence
atgtttagcatgagaattgtgtgtttggtcctgtccgtggttggtacggcatggacggcagattcaggcgaaggcgattttcttgcagagggaggcggagtccggggcccaagagtggtggaacgacatcaaagcgcatgtaaagattcggactggcctttctgctcggatgaagattggaactacaaatgtccatccggttgtagaatgaagggtttgattgatgaggtgaaccaagatttcactaaccgtatcaataaactgaagaattcattgtttgaataccaaaagaacaataaggatagccactcattgactactaacataatggaaattctgcgaggtgatttttcaagtgccaacaaccgggacaatacttacaatcgagtgagcgaggacctgcgatcccgtattgaagtcttgaaacgcaaagtcattgaaaaggtgcaacatatccagctccttcagaaaaatgttagggcgcaacttgtcgatatgaagcggcttgaggtcgatattgacataaagatcagatcgtgccggggatcctgttctcgcgctcttgcgcgggaggtcgatcttaaggattacgaggaccagcaaaagcaattggagcaggtcatcgccaaggatctgcttccatccagagatcgccaacatctgcctttgataaagatgaagcccgtgccagacctggtgcccggcaactttaagtcacagttgcaaaaggtccctcctgaatggaaagccctgactgatatgccacagatgcgcatggagctggaacgccccggcggcaacgaaattacccgtgggggctccacctcgtacggcactggatcggaaaccgaaagccctaggaacccctcgtcggccggttcctggaacagcggttcgagcggtcctggatccaccggaaatagaaacccagggagctccggaactggaggtactgcgacttggaaacctggtagctcgggaccgggatcgactggctcctggaactccggttcgtccggaacgggaagcaccggcaatcaaaatcctggttcgccacgccctgggagcaccggaacttggaacccaggatcgtccgagcggggttccgcaggacattggacttcagagagctccgtttcgggttccaccggacaatggcactccgaaagcggatcattccgtccagattctcctggttcgggaaacgctcgtcctaacaacccggactggggtaccttcgaggaggtgtcgggtaacgtgagcccaggtaccaggagagaataccatactgaaaagctggtgacgtcgaagggggataaggaacttcgcaccggtaaggagaaggtcacctccggctcgactacgacgaccagaagatcctgttccaagacggtgacgaaaactgtgatagggccagatggacataaagaagtgaccaaagaagttgtgacctctgaagatggaagcgattgtccggaggcgatggatctgggaactctctcaggcataggtaccctcgatggctttcgccacagacatccagatgaggcagccttctttgacaccgcgtccactggcaaaacttttccaggcttcttttctcccatgcttggagagtttgtctccgaaaccgagagcagaggctcggagtccggtatattcaccaacaccaaggaaagctcctcccatcatcctggtatcgcagaattcccttcgcgtggcaagtcctcatcatactcgaagcaatttacttcctcaacgtcctacaaccgtggagactccacctttgaaagcaaaagctacaagatggccgatgaggcaggctcggaagcggaccatgaaggtacccattcaaccaagcggggccatgccaagtcaagacctgtgagagactgcgacgatgtgctgcagacccatccttcaggaactcaatccggcatattcaatatcaagctccctggttcatcaaagattttctcagtttattgtgaccaggaaaccagccttggggggtggcttcttattcagcagcgaatggacggctccctcaactttaacaggacctggcaggattacaagcgggggtttggaagcctgaacgatgagggcgagggcgagttttggctgggtaacgactacctgcatctgcttacccaaaggggatcagtgctgagagtcgaacttgaggattgggcaggtaacgaggcttatgcagagtaccatttcagagtgggatcggaagcagaagggtacgcactgcaggtgtccagctacgaagggacggcgggagacgcacttattgaaggatcggtggaggaaggggccgaatacaccagccacaacaacatgcagttttcgacttttgatagagacgctgatcaatgggaagaaaattgcgctgaagtgtacggcgggggttggtggtacaacaattgtcaggccgctaacctgaacggaatctactaccccgggggatcctacgaccctaggaacaattcaccttacgaaatcgagaacggtgttgtgtgggtgtcatttcgaggggcagactacagcctgcgggcagttagaatgaaaatccggccacttgtgacgcaa

SEQ ID NO: 10309 - DNA, 2598 bp, Artificial Sequence
  derived and/or modified sequence
atgttttctatgcgtattgtgtgtcttgtgctttcggtcgttggtacggcttggaccgcagattccggcgagggggatttcctcgcagagggcgggggcgtgcgaggaccgagagtagtggaacggcatcagtcagcatgcaaggattccgactggccgttttgtagcgatgaggattggaactacaagtgcccctctggttgtcgcatgaaaggacttatagatgaagtcaatcaggactttacgaatcgaatcaataagctgaagaattccctttttgaataccaaaagaacaataaggactcccacagccttaccaccaatatcatggagattctgcgtggcgatttctcatcagcaaataacagagataacacctacaaccgggtgtccgaagatctgagatcacggatcgaagtgctgaagcggaaggtcattgagaaggtccagcacatccaacttcttcagaagaacgtcagagctcagctggtggatatgaagcgacttgaagtggacatcgatatcaagatccgttcctgtagaggatcatgctcacgagcactggcccgagaggtggatctcaaggactacgaagatcagcaaaagcagcttgaacaggtgattgccaaggacctcctcccctcgcgcgacagacaacatcttccattgatcaagatgaagcccgtgccagatcttgtgccaggcaactttaagtcgcagcttcagaaagtgcctccagaatggaaggcacttactgatatgccccaaatgagaatggaactggaacggcccggaggaaatgagattacccgcggcggttcgaccagctacggtaccggttccgaaaccgagtcgccgcgaaaccctagctcggcgggctcttggaacagcgggagctccggcccaggttcgaccgggaatagaaaccccggctcatccggaactggcgggacggcaacttggaagcctggcagctctggtcccggatctactggtagttggaacagtggatcaagcggaactggaagcacgggcaaccagaaccctggatcccctaggcctggatccaccggaacctggaacccaggatcctcagaaagaggatcagccggacactggacctcagagtcgtccgtgagcggatcgactggacagtggcatagcgaaagcggttccttccggccggactcaccaggatccggaaacgcaagaccaaacaacccagactggggtacgtttgaggaagtgagcggaaacgtcagccctggtactagaagggaataccacactgagaaactcgtcacctctaaaggtgacaaagagcttcggactggtaaagaaaaagttacctcgggttccacgactacgactagaaggagctgctcgaaaactgtcactaaaaccgtgattggaccagatggccataaagaagtgaccaaggaagtggtgactagcgaggatggtagcgactgtcctgaagccatggatctcgggaccctttcgggcataggtactctggatggattccggcatcgtcatccagacgaggccgcgttctttgacaccgcaagcactggtaagacgtttccagggttcttctccccaatgctgggggagtttgtgtcagaaaccgaatcgaggggatcggaatccgggatattcaccaatactaaggaatcgagctcccaccaccctggaattgcagaatttccgtcacggggaaaatcgtcgtcatactccaagcagttcacttcctccaccagctataaccggggagattcgacttttgagtccaagagctacaaaatggcagacgaagcagggtccgaagccgaccacgaaggtactcattcgactaagcggggtcacgcgaaaagccggccagtgagagattgtgatgatgtgcttcagactcacccgtccggtactcagtcagggattttcaacataaagctgcctggaagctccaagatctttagcgtgtactgcgatcaagaaactagcctgggtgggtggctgctcatccaacaaaggatggatggttcgttgaacttcaatcgcacttggcaggattacaagcgagggttcggttccctcaacgatgaaggagaaggcgaattctggctgggcaacgactacctccatctcctcacccagcggggttcagtgcttcgggtggaattggaggactgggcaggtaatgaggcatacgcggagtaccattttcgtgtcggaagcgaagccgagggctacgcacttcaggtgtcatcgtacgaaggcaccgcaggtgatgctttgatagaaggttcggtggaagagggagctgaatacacttcgcataacaacatgcagttttccacgtttgatcgcgacgcagatcaatgggaagaaaactgcgccgaagtgtacggagggggttggtggtacaacaactgtcaggcggctaacctcaacgggatatactatcccggtggatcgtacgaccctcgcaacaattcgccgtacgaaatcgaaaatggggtggtctgggtttcctttaggggcgcggattactcactccgggcagtgaggatgaagattagaccgctggtgactcaa

SEQ ID NO: 10310 - DNA, 2598 bp, Artificial Sequence
  derived and/or modified sequence
atgttcagcatgcgaatcgtctgcctggtgttgtcggttgtgggcaccgcctggacggccgattcgggagaaggcgacttcctcgccgagggaggaggagtgcgcggaccacgggtagtggagagacaccagagcgcctgcaaggactccgactggcctttttgttcagatgaggactggaattacaaatgtccgtccggctgccgaatgaaaggcctgatcgacgaggtgaaccaggatttcactaaccggatcaacaaactgaagaactcgctcttcgagtaccagaagaacaataaggacagccatagcctgacgactaatatcatggaaatcctgagaggtgacttttccagcgcgaacaatcgggataatacctacaatcgcgtcagcgaagatctccggtcacggatcgaggtactgaaacgcaaggtcatagaaaaagtacagcatatccagctcctgcagaagaatgtccgcgcccaactcgttgacatgaaaagactcgaagtcgatattgacattaagattaggtcatgtcgcggttcatgctcacgcgccctcgcaagggaagtggacctgaaagattacgaggatcaacagaaacagctggagcaagtgatcgcgaaggacctgcttccgtcgcgtgaccgccagcacctgccccttatcaaaatgaagccggtcccggatctcgtgccgggcaactttaagtcgcagctgcagaaggtgcctcctgagtggaaggccctcacggacatgccacagatgcgtatggaactggagaggccaggtggtaacgagatcacccgcgggggaagcaccagctacggtaccggatccgagactgagtcgccacgcaacccttcatctgctggatcgtggaacagtgggagctccggtccagggtcgactggcaaccgcaatccggggtccagcggcactggcggcaccgcaacctggaagccaggctcatcagggcccggctcgaccgggtcgtggaattctggatcatccggaactggctcgaccggaaaccaaaatccgggaagcccgcgccctggatcaactggaacttggaacccggggagcagcgagcgcggctcagcgggacactggacctcggaatcctcagtgtcaggctcgacgggacaatggcactctgaatccggatcgttcagaccggactcacccggctccggaaacgctcggcctaacaacccggactggggcacctttgaggaagtgtccgggaacgtgtcacccggaacccgcagagagtaccatacggagaagctggtcacttcaaagggagataaagaattgcgcactggaaaggaaaaagtcacttcgggctcgactaccactactagacggagctgctccaagacggtcaccaagactgtgatcggaccggatggtcacaaagaagtcactaaagaagtcgtgacctccgaggatgggtcagactgcccggaagcgatggacctgggaactctgagcggtatcggcaccctcgatggcttcagacatcgccaccccgatgaggcagcgtttttcgacacggcaagcaccggaaaaacctttccaggttttttctcaccgatgcttggagagttcgtgtccgaaactgaatcacgcgggtcagaatcgggcatcttcaccaacacgaaagaatcgtcctcccaccatccagggatagccgagttcccgtcacgcggcaagagcagctcatattcgaagcagttcacctcatctacttcctataaccggggggatagcactttcgagtcgaagtcgtacaagatggcagacgaagctggctccgaagctgaccatgaggggacgcactctacgaaacgcggtcatgcgaagtccagaccggtgcgcgattgcgacgacgtgctgcagacccacccaagcggaacccaatcaggcatcttcaatatcaagctcccagggagctcgaagatctttagcgtctactgcgatcaggaaacctcgctcggtggctggctgttgatccagcaacggatggacggctccctgaacttcaatcgcacctggcaggactacaagcggggattcggatccctgaatgatgaaggcgaaggggagttctggcttggaaatgactatcttcacctgctgacccagagaggctccgtgttgagagtcgaactggaggactgggcgggaaatgaggcttacgctgaataccacttccgcgtgggttccgaggcagaaggatacgcccttcaagtctccagctacgaaggcaccgccggagacgcgcttatcgagggttcggtggaagagggcgcagaatataccagccacaataacatgcagttttcgactttcgacagagacgcagaccaatgggaagaaaactgtgcggaagtgtacggaggaggctggtggtacaacaactgtcaagccgccaacctgaacggaatctattacccagggggatcctacgacccgcgcaacaacagcccgtacgagattgaaaatggtgtggtgtgggtgtccttccgaggggccgattactcgctccgcgccgtcagaatgaagatccggcctctggtgactcaa

SEQ ID NO: 10311 - DNA, 2598 bp, Artificial Sequence
  derived and/or modified sequence
atgtttagcatgcgcatcgtgtgcttggtgctgagcgtcgtgggaaccgcctggacggccgactccggtgaaggagacttcttggccgagggcggaggagtccggggaccccgtgtggtggaaaggcatcagagtgcgtgcaaggactccgactggccattctgttccgacgaggactggaactacaaatgtcctagtggctgccggatgaaagggctgatcgacgaagtgaaccaagatttcactaaccgcatcaacaaattgaagaattcgctgttcgagtaccaaaagaacaataaagattcgcactcgctgactaccaacatcatggaaatcctgcgcggtgacttctctagcgcaaacaaccgcgacaatacctacaatcgtgtgtcagaggatctgcgcagcagaattgaagtcctgaagagaaaggtgatcgaaaaggtccagcacatccagctgcttcaaaagaacgttcgagctcaactggtcgatatgaagaggctggaggtggacatcgacatcaagatccgctcgtgcagaggatcctgctcacgcgccttggccagagaagtcgacctcaaggattacgaagatcagcaaaagcagctggagcaagtcatcgctaaggatctccttccatcgcgggacagacagcatctcccgctgattaagatgaaacccgtgcctgacctggtcccggggaactttaagtcccaactgcagaaagtgccaccggagtggaaagccctgaccgacatgccacagatgcgtatggaacttgagcgcccgggaggaaatgagatcaccagagggggtagtactagctacggaaccgggagcgaaactgaatcgcctcgaaacccgtcgtccgcaggctcgtggaactctggttcctccggaccaggatccaccggaaaccgaaaccctggatcatcggggacgggaggaaccgcgacctggaagccgggctcgagcggtccgggtagcactggaagctggaattccggttcgtcaggaaccggctcgaccggaaaccagaatcctggttctccccgcccgggctcaaccggcacttggaatccgggatcgtctgaacgcggaagcgcggggcattggactagcgagtcctccgtgtcaggaagcaccggacagtggcattcggaatccgggtccttccggccagattcgccgggctcaggcaatgctagacctaacaacccggattggggcacctttgaggaggtatcgggaaatgtaagccctggaacgcggagggagtaccacaccgaaaagctcgtcacctcgaagggtgataaggaactgcgcactggaaaggaaaaggttacgtccggaagcactaccacgacccgtagatcctgctcgaaaactgtgactaaaaccgtgataggcccagatggacataaggaagtgaccaaagaggtggtcactagcgaggacggttcggactgcccggaggcgatggatctgggcaccctttccgggatcggaaccctggacggctttcggcataggcacccagatgaagcggcatttttcgacaccgccagcactggcaagaccttccccggcttcttctcaccgatgctgggcgaattcgtctccgagactgaaagccgcggatcggagagcggaattttcactaatactaaggaatcatccagccatcatccgggcatcgcggagttcccgtcaagggggaaatcctcgtcatactccaagcaatttacctcatcgacgtcatacaacagaggcgactcaacgttcgagtcgaagtcttacaagatggcagacgaagctggatcagaggcagatcacgaaggcactcacagtactaagcgaggacacgcaaagagcagacctgttagagattgcgacgacgtgctccaaacgcacccgtcgggcacccagtcaggaatcttcaacattaaactccccggctcctccaaaatcttcagcgtttactgcgaccaagaaacttcgcttggtggatggctcctcatccagcagcgcatggatggatcacttaacttcaaccgcacctggcaggactataagcgcggatttgggtcactgaatgatgaaggggaaggagaattctggctcggaaatgactatctccacttgctcacgcagcgcgggtcagtgctgcgagtcgaactcgaagattgggccgggaacgaggcctacgcggaataccactttagggtgggatcagaagctgaggggtacgccctccaggtgtcatcatacgaggggaccgcgggagatgcactgattgaggggtccgtggaggaaggagccgaatacacttcgcacaataacatgcaattctcgactttcgatcgggacgctgaccagtgggaagagaactgtgccgaggtgtacggaggcgggtggtggtacaacaattgtcaggcggccaacctgaacggaatctattacccaggaggatcctacgacccacgcaacaattctccgtacgaaatcgaaaacggcgtggtgtgggtatctttcagaggcgctgattactcgttgcgcgcagtgcggatgaagatccggccactggtcactcaa

SEQ ID NO: 10312 - DNA, 2598 bp, Artificial Sequence
  derived and/or modified sequence
atgttttccatgagaattgtctgcctggtcctctcagttgtgggcaccgcctggactgccgacagcggggaaggagacttcttagccgaaggagggggggtaaggggcccccgggtagtagagaggcaccagagcgcctgcaaggatagtgactggccgttctgttcagatgaggattggaattacaaatgcccttccgggtgtcggatgaaaggccttatagatgaggtgaaccaagatttcaccaatcgaatcaacaagttaaagaactccctcttcgaataccagaaaaacaacaaggacagccacagtctgaccacgaatatcatggagatacttcgcggagatttttcttcggctaataatcgcgataatacatataaccgggtgagtgaagacctacgcagcagaatcgaggtgctcaagaggaaggtgatagagaaggtccagcatattcagctgctccagaaaaacgtgagagctcagctagtagatatgaagcgtctggaggtggacatcgacatcaagattaggtcatgtcgagggagctgctcccgagctttagcacgggaagtagatctaaaggactatgaggatcagcagaagcagcttgagcaagttatcgccaaagacttgttgcccagccgggatcggcagcatcttccactgatcaagatgaagccagttcctgatctagtgccaggaaactttaagagccaactgcagaaggtgccaccggagtggaaggccttaactgatatgcctcagatgaggatggaactggagagacctgggggaaacgagatcacccgtggagggtctaccagctacggaacagggtccgaaaccgagtcccctcggaaccctagctccgccgggtcatggaatagcggcagtagtggtcccgggtccacagggaacagaaaccctggctcttcaggcaccggtggcactgcaacttggaaacccggatcttccggcccaggcagcacgggcagctggaactctggaagttctgggacaggatctacaggcaatcagaatcctgggtccccacgtccaggcagcacaggtacttggaacccagggtctagcgaaagggggagtgcgggtcattggacaagcgagtcaagtgtgagcggtagtaccgggcagtggcactctgaaagcggctcttttcggcccgacagtccaggctctggtaacgctcgtccaaataaccccgactggggcacgtttgaggaggtgtctggaaacgtgagccctgggacaaggagggagtatcacacggaaaagctggtcacaagcaaaggggataaggaactgcgtaccggtaaagagaaagttacctccggctcaactacgaccacccggcgcagctgctctaaaacggtgacgaagacggtaattggacccgatggtcacaaagaagttacaaaggaagtggtgacatccgaggacgggagcgattgtcccgaggcaatggacttggggaccttgtccggcattggaactctggatggctttcgccacaggcatccagacgaggctgctttctttgataccgcatccacgggtaaaacatttcctggtttcttcagccctatgttgggcgagttcgtgagcgaaactgaaagccggggtagcgaaagcggtatcttcactaatacaaaagagagttcaagccaccatcccggtattgcagagtttccatccaggggcaagtcttccagctacagtaaacagtttactagcagcacttcatataatcggggggattcaacctttgaatcgaaatcctacaaaatggctgatgaggccgggagtgaggccgatcatgaaggcactcattctacaaagagggggcacgccaaaagtcgccctgtgagggattgtgatgatgtgctgcaaacccaccccagtggcacccagagcggcatttttaatatcaagctgccaggaagttcgaagattttcagtgtctattgcgaccaggagacgagtcttgggggctggctgctgatacagcagcgtatggatggtagccttaacttcaaccgcacatggcaggactacaaaagaggttttgggtccctgaatgatgagggcgagggagaattttggctggggaatgattatctgcatcttcttacgcagcgcggatccgtattgagggtcgaactggaggactgggccgggaatgaggcttacgcagagtatcactttcgcgtgggcagtgaggccgagggctacgcccttcaggtatcttcctacgaaggaaccgccggagacgccctgatagagggctccgtggaagagggcgccgagtacacaagtcacaacaatatgcagttttccacttttgatcgagacgcggaccagtgggaagaaaattgcgccgaagtctatggcggaggttggtggtataataactgccaggccgctaatctcaatgggatttactaccccgggggctcctatgatccccggaacaatagtccctatgagattgaaaacggagtggtctgggtgtcctttagaggcgcagactattccctgcgcgctgtaaggatgaagatccgccctcttgtaactcag

SEQ ID NO: 10313 - DNA, 2598 bp, Artificial Sequence
  derived and/or modified sequence
atgttctcaatgaggatcgtctgtcttgttctgagcgtggtcggcaccgcctggaccgccgattcgggtgagggggactttcttgcagaaggtggaggcgtgagaggcccgcgggtcgtggagcgccaccaaagcgcatgtaaagattcggattggccattttgttcagacgaggactggaattacaagtgtccgtcaggctgccggatgaaaggacttattgacgaggtgaaccaagatttcaccaacaggatcaacaaacttaagaactcactctttgagtaccagaagaataacaaggattcgcactcgctcacgaccaacataatggagattcttcgcggtgacttttcatcggcaaacaaccgggacaatacctacaaccgtgtgtcggaggacctccgctcccgcattgaggtgctgaagagaaaggtcatcgaaaaagtgcagcatattcagctgttgcagaagaacgtccgggcacagttggtggatatgaagagactggaagtcgatattgacataaagataagatcgtgtcgcggatcttgctcgagggcacttgcaagggaagttgatctgaaggattacgaggatcagcagaagcaactcgaacaagtgattgcgaaagaccttcttccctcaagagatcgacagcatctgcctcttatcaagatgaaacccgtgccggatctcgtgcccggaaactttaagtcgcaactgcaaaaggttcctccagaatggaaggcactgaccgatatgccccaaatgcgcatggaactcgaaagaccagggggaaacgaaattacccggggtgggtccacttcctacggcaccgggagcgaaacggaatcccctagaaatccctcgtccgccggttcttggaactccggtagctcgggcccaggttcgacgggcaatagaaaccccgggtcgtccggaaccggtgggactgcaacttggaagccaggaagcagcggtcccggatcaaccggcagctggaacagcggttcctctggaaccggttctactggaaaccaaaaccccggttcaccaagaccgggcagcactgggacctggaatcccggatcgtcggaacgcgggtcggcaggccactggacttccgaatcctccgtgtcgggatcaaccggtcagtggcattcggaatcaggttcgtttcggcctgatagcccgggctcgggtaatgcaagaccaaacaaccctgattggggtacctttgaagaagtgtcaggaaatgtgtcgccaggaacccgacgggaataccacactgagaaacttgtgactagcaaaggggataaggaattgcgcaccggaaaggaaaaggtgacttccggatcgaccaccactactcgtcgctcctgctcaaagactgtgactaagaccgtgattggacccgatgggcacaaggaagtgactaaagaggtggtcacgagcgaggacggatcggattgccctgaggcgatggacctcggcaccctctccggaatcggtaccctcgatggatttcggcatagacatccagacgaggctgcgtttttcgataccgcatcgaccggaaagacgtttcctggcttcttttctccaatgctgggagaatttgtcagcgaaactgagagcagaggatcagaatctgggatattcaccaataccaaggaatcttcatcccatcatccaggaatcgcagaattcccttcccggggtaaatcgagctcgtactcgaaacaatttactagctcgaccagctacaataggggagactcgacctttgaatccaaatcttacaagatggcggatgaggcaggaagcgaggccgaccatgaggggacccacagcaccaaacgaggccatgctaagtcacgcccagtgcgcgattgtgacgatgtgctgcaaacccatccttcggggactcagtcaggtattttcaacataaagctgcccggttcctcaaagatctttagcgtctactgtgatcaggagactagcttgggagggtggcttcttattcagcaacgcatggacgggagcctgaacttcaatcgaacttggcaagactacaagcgcggatttgggtccctgaacgatgaaggagaaggcgaattttggctcggaaatgattacctgcatcttctcactcaacgcgggagcgtgctccgcgtcgaactggaagattgggctgggaacgaagcatacgcggagtaccatttccgtgtcggatcagaagcagagggttacgcactgcaggtgtcatcgtacgaaggtactgccggagatgcactcatagaaggaagcgtggaagagggcgcagagtacacttcacacaataacatgcaatttagcacttttgatcgagatgccgatcaatgggaggaaaactgcgccgaagtctatggaggtggatggtggtacaacaattgtcaggcagctaatctcaacggtatctactatccaggcggttcctacgatcccaggaataactccccatacgaaatcgaaaatggtgtggtgtgggtgagcttcagaggtgccgactattcgctccgggcggtgcgcatgaaaatccgtccgttggtcacccaa

SEQ ID NO: 10314 - DNA, 2598 bp, Artificial Sequence
  derived and/or modified sequence
atgttcagtatgagaatcgtctgcctggtcctctcagtcgtgggaaccgcctggaccgcagactcaggggaaggtgacttcctggccgagggcggaggagtccgcggccctagagtggtggaacgccatcaatcagcctgcaaagattcggactggcctttctgtagcgacgaagattggaactacaagtgcccctcgggatgcaggatgaaggggttgatcgacgaggtgaatcaagactttactaataggatcaacaagctcaagaactcactgtttgagtaccagaaaaacaacaaagattcccattccctgacgaccaacatcatggaaattcttagaggcgatttttccagtgcgaataaccgggataatacctacaacagagtgagcgaggacctgcgctcccggatcgaagtgcttaaacgcaaggtgattgagaaggtgcagcacatccagttgctgcagaagaatgtgcgcgcgcagctggtggacatgaaacggctggaggtggacatcgacataaagatccggtcttgccggggaagctgttctcgcgccctcgcgcgggaagttgacctgaaggactacgaggatcaacagaagcaactcgaacaggttattgccaaggatctgctgccttcgcgcgatagacaacacctcccgttgatcaagatgaagccagtcccggatctggtgccagggaacttcaagtcccaactgcaaaaagtgcccccagaatggaaggcactgactgacatgccgcagatgagaatggagctcgaacgtcccggcggaaatgaaataaccagaggcgggtccacctcgtacggcaccggctcagaaacggagtcgccgcggaacccgtcgagcgccggttcatggaactctggatcctcgggaccgggttcaactggaaacagaaacccagggtcaagcggaactggaggaaccgcgacttggaagccgggatccagcggccccggaagtacgggatcgtggaactcgggatcttcaggaacgggatccactgggaatcagaatccgggaagcccacgcccgggatcgaccggaacttggaaccccggatcctctgaacgcggctccgctggacactggacctcggaaagctccgtgtcgggcagcacgggacaatggcactccgagtccggaagttttcgccctgacagcccgggctctggaaacgcacgccctaacaaccccgactggggcacgttcgaggaggtgtcaggaaatgtgagcccagggacccgacgcgagtaccataccgaaaagctggtcacgtcgaagggcgataaggagctgaggactgggaaagagaaggtcaccagcggatcaaccactaccacccggaggtcctgctccaagactgttactaagactgtgatcggtcctgacggtcataaagaggtgactaaagaagtcgtgacttcggaggacggatccgactgcccggaggcgatggatctcgggactctgtccggtatcggcaccttggacgggttccggcatcggcacccagatgaggccgctttcttcgataccgcctcaactggcaagactttcccgggtttcttctcgccaatgctcggagagtttgtgtcagaaaccgagtcgcgaggatcggagtccggtatcttcaccaacactaaagaaagctcatcacaccatccgggaatcgcggaattcccgtcgagagggaagagttccagctactcgaaacagtttacttcaagcacctcctacaacaggggagacagtaccttcgagtcgaagtcatacaaaatggccgacgaagccggtagcgaggctgatcatgaagggacgcacagcaccaagcgaggccatgccaaatcacggccagtgcgggattgtgacgacgtgttgcaaacccacccttctggcacccagagcgggattttcaacattaaactccctggatcgtccaagatcttttccgtatactgcgatcaggagactagtctgggaggctggcttctgatccagcaacgcatggacggctccctgaactttaatcggacttggcaggattacaagagaggtttcggctcacttaacgatgaaggtgagggcgaattctggcttggaaacgactacctccacctgctcactcagcgcggaagcgtcctgcgggtggaactcgaggactgggctggtaatgaggcttacgcggaataccacttccgcgtcggatctgaagcggaaggatacgcactccaggtatcctcgtacgaaggaaccgcaggggacgccctcatcgaaggatcggtggaagaaggagcggaatacacctcccacaacaatatgcagttctctaccttcgacagggacgcagatcagtgggaagaaaattgcgctgaggtgtacgggggcggatggtggtacaacaattgtcaggccgcaaatctgaatggaatctattatccgggcggatcgtacgacccccgcaataactctccgtacgaaatcgaaaacggtgtcgtgtgggtgtcattcagaggagcagattattcgttgagagctgtgcgcatgaaaatcaggccgctggtcactcaa

SEQ ID NO: 10315 - DNA, 2598 bp, Artificial Sequence
  derived and/or modified sequence
atgttctccatgcgcatcgtgtgcctggtgctgtccgtggtcggaacggcctggactgctgactccggcgaaggggacttcctggcggaagggggtggagtgcgcggaccgcgggtggtggaacggcatcagtcggcctgcaaagattcggattggccattttgttcggacgaggactggaattacaagtgtccatcggggtgtaggatgaaaggcctcattgacgaggtgaaccaggacttcacgaacaggatcaacaagttgaagaattcgctctttgaataccaaaagaacaacaaagactcacactcgctgaccactaatatcatggaaatccttagaggagacttcagttcggcaaacaaccgggataatacctacaatagggtcagcgaagacctgcgcagccggatcgaggtcctgaagcggaaggtcatcgaaaaggtgcagcatatccaactgctgcaaaagaatgtcagggcccaactggtcgacatgaagcgccttgaagttgacattgatatcaaaatccggtcatgccgcggctcgtgcagccgggccttggcaagagaagtcgacctgaaggactacgaagaccagcagaagcagctggagcaggtgatcgctaaggatctcctgccatcaagggacagacagcaccttccactcatcaaaatgaagcccgtccctgatcttgtgccaggcaacttcaaatcccagttgcaaaaagtgccaccggagtggaaggctctgactgacatgccgcaaatgcggatggagctcgaacggccggggggaaatgaaatcaccagaggcggcagcacctcgtacggcactggatcagaaactgagtcgccgcgcaacccgagctcggcaggttcatggaacagcgggagctccggacccggttcaaccggaaatcggaacccgggcagctctggcacgggtggcactgccacctggaaacccggctcaagtggacctggaagcaccggttcctggaactctggctcgtcgggaactggtagtaccgggaaccagaaccccggctcaccgcggcctggatcaacgggaacgtggaaccctggttcatccgagcgcgggtcagccggacattggactagcgaaagttccgtgtccgggtccaccggccagtggcactcggaaagcggctcatttcggccagattcgccaggttcggggaacgccaggccaaataacccggactgggggacctttgaagaggtgtcgggcaatgtgtcaccgggaacccgcagagaataccataccgagaagctcgtgacctcaaagggagacaaggagctgcgaactggaaaggaaaaggtgacctcgggatcgaccaccactactaggcgttcgtgctccaaaactgtgaccaagaccgtgatcggacctgacggccataaggaggtgaccaaggaggtggtgaccagcgaagatggatccgactgtccggaggccatggacttggggactctctccggtatcgggaccctggatgggttccgccaccgccatccggacgaagctgcgttcttcgataccgcttcaactggaaaaacctttccgggattcttctcgccgatgctcggtgagtttgtgtccgaaactgaaagccgcggaagtgagtccggaattttcactaacactaaggaatcatcctcacatcacccaggaatcgcagaattcccatcgcgaggtaaaagttcgtcctacagcaagcaattcacctccagcacttcctacaaccgcggagactcgactttcgaatccaagtcatacaagatggcggacgaagcagggtccgaagccgaccatgagggtacccacagtaccaaacgcggacacgcaaagtcaagacctgtgcgcgattgcgatgatgtgcttcagacgcacccgagcggaactcaatcgggaattttcaacattaaactgcccgggtcatcaaagatcttttccgtatactgcgaccaagaaacgtctctgggtggatggctcctgatccaacagagaatggacggatcactcaacttcaatcgcacttggcaggattacaaacgcggctttggaagcctgaacgatgagggagagggcgagttctggctgggaaacgactacctgcacttgctgactcagagagggagcgttctgcgggtcgaactcgaggattgggcgggaaatgaagcgtacgccgaatatcacttcagagtcggatcagaagcagagggctacgcccttcaagtgtcctcctacgagggaactgccggcgatgccctgatcgaaggatcagttgaagagggagccgaatacaccagtcacaacaatatgcagttcagcacgttcgaccgggacgcagatcaatgggaagagaattgcgctgaggtctacggcggaggctggtggtacaataactgccaggccgcgaacctcaatggaatatactatcctggaggatcctacgatccccggaataactccccgtatgagatcgagaacggagtcgtgtgggtttcattcagaggagcggactactctctccgcgcggtgagaatgaagatcagacctctggtcacccag

SEQ ID NO: 10316 - DNA, 2598 bp, Artificial Sequence
  derived and/or modified sequence
atgttctcgatgcggatcgtgtgtctcgtgctgtctgtggtgggaacggcttggaccgcagatagcggcgagggcgactttttggccgaaggtggtggtgtgcgcggaccgcgcgtcgtcgaaaggcatcagtctgcctgcaaggattcggattggccattctgctcggatgaggactggaattacaagtgcccttccgggtgccgcatgaagggactgatcgacgaggtgaatcaagactttactaatcgcattaacaaattgaagaatagcttgttcgaataccagaaaaacaacaaggattcccattcactcactactaatatcatggaaatccttcgcggagacttctcctctgccaataatcgcgataatacctacaacagagtctctgaggatctgcggtcccgcattgaagtgcttaagcgtaaagtcattgagaaggtgcagcacattcagctgctccaaaagaacgtccgcgcacagctcgtcgacatgaagcggctggaagtcgacatcgatatcaaaatacggtcatgtaggggatcgtgctcgagagcgctggccagggaagtggacctgaaggactacgaggaccagcaaaagcagctcgaacaggtcatcgccaaagatttgcttccatcccgcgaccggcagcacctgccgctcatcaaaatgaagccggtgccggatctcgtgcctggaaactttaagtcacagttgcagaaggtgcccccggagtggaaggcgctcacggacatgccgcaaatgagaatggaattggaacggccgggtggcaacgagatcacccgcggaggatccacctcgtatggtaccgggtcagaaactgaatctccgcggaatccctcgagcgccggatcctggaatagcggaagctctggacctggtagcaccggaaataggaacccaggatcgtccggaaccggaggaaccgctacttggaagccgggctcttcgggaccgggatccacggggtcgtggaactccggatcctcgggaactggatcgaccggcaaccagaatccagggtcaccgcgcccaggttccactggtacttggaaccctggctcttccgaacgtggtagcgcggggcactggaccagcgaatcatctgtgtccggatcaaccgggcagtggcactcggagagcgggtcattcagaccggactcgccgggatcgggcaacgcccgcccaaacaaccccgattggggtacttttgaagaggtcagcggaaatgtgagcccgggtacccgcagagaataccacaccgaaaagctcgtgacttcgaagggcgacaaagagctgcgcaccggaaaggaaaaggtcactagcggatcaaccaccaccactagaaggagctgcagcaagaccgtcaccaagaccgtgattggacccgacggacacaaggaagtgactaaagaagtggtgacctcggaagatggctcggactgtccagaggccatggacctgggcaccctttcggggattgggaccttggatggctttcggcacagacacccagacgaggcagccttctttgataccgccagcactggaaagactttccctggattcttctccccaatgctgggcgaattcgtctcagaaactgagagccgcggaagcgaatcgggaatctttaccaacacgaaagagtcgagcagccatcatcctggaatcgcggaattcccttcgagagggaaatcctcctcctacagcaagcaattcacgtcgtcaacctcctacaatcggggagacagcaccttcgagtcgaagtcctacaagatggcggacgaggcggggtctgaagccgatcacgaaggcacccattcgacgaaacgcggccacgcaaagtcgaggccagtccgggactgcgatgatgtcctccagacccacccgtcgggaacccagtccggcattttcaatatcaaactgccaggaagcagcaaaatcttctccgtgtactgcgaccaggaaaccagcttgggtggatggctgctgatccagcagaggatggacggtagtctcaatttcaacagaacttggcaagattacaagcggggctttggctcactgaacgacgaaggcgaaggggagttctggctcggaaacgattacctccacctgcttacccaaagaggctcggtgctgagggtggaactggaagattgggcgggcaatgaagcgtacgcagaataccacttccgcgtcggttcagaagctgaggggtacgcgctgcaggtgtccagctacgagggcacggcgggagatgctctcatcgaggggtcagtcgaagaaggggccgaatacacgtcccacaacaatatgcagtttagcaccttcgatcgagacgccgaccaatgggaagagaattgcgcggaagtgtacggcggcggatggtggtacaataactgtcaggccgccaacctcaatggcatctactaccctggaggctcatacgacccgcgcaacaactcaccgtacgaaatcgagaacggagtggtctgggtgtcatttcgcggcgccgactactcgctgcgggcggtgagaatgaagatccggccactggttacccaa

SEQ ID NO: 10317 - DNA, 2598 bp, Artificial Sequence
  derived and/or modified sequence
atgtttagtatgaggatcgtttgtctggttcttagcgtggttggcaccgcttggaccgctgatagtggtgaaggggacttcttggctgaggggggcggcgtgcgcggccctcgggtagtggagaggcatcagagtgcatgcaaggattccgattggcccttctgtagtgatgaggactggaactataagtgcccttcagggtgtagaatgaaaggcctgatagatgaggtaaaccaggatttcaccaatagaatcaacaagttaaagaattccctgttcgagtaccaaaagaataataaggactctcactcattaactacgaacatcatggagatcttgcgaggggacttctcttccgcgaacaaccgagataacacatataatagagtgagcgaggaccttaggagcagaatagaggttcttaagagaaaagtgattgaaaaggttcagcacatacaactgttgcagaagaacgtgcgcgcccaactcgtggatatgaagaggttggaggtagacatcgacataaaaattagatcttgcaggggaagctgttcacgagctctcgcacgtgaagttgacctcaaggactatgaggaccaacagaaacagttagaacaagtgattgcgaaggatctgctgccctcgagggacagacagcatctcccattgattaaaatgaagcccgtcccagatctggttccaggaaattttaagagccagctccagaaggtcccaccggaatggaaggctctgaccgatatgcctcagatgaggatggagctcgaacgacccggtggtaacgagatcacccgcggtggttccacatcctacgggactgggagcgaaacagagtctccgaggaacccgtcctcagctggtagctggaattccggaagttcagggcccggatcaacagggaaccgaaatccaggcagttccgggacaggggggaccgcaacttggaagcctggcagcagcgggcccgggagtacaggttcttggaactcaggcagttctgggacgggatccacaggtaatcagaacccaggctctcccaggcctggatctacaggcacttggaaccccgggagctcggagagaggatctgccggccattggacaagtgagagttctgtctccgggtctaccggtcaatggcactcagagtcgggctcgttcaggccggattctcctggaagtggaaatgcaaggcccaataatcccgattggggtacattcgaggaagtatccgggaatgtttcccccggcactagacgcgaatatcatacagagaagctggttacaagcaaaggcgataaggaactgagaacaggaaaagaaaaggtcacttcaggttctaccacaaccaccaggcgaagctgctcaaagactgtgaccaaaactgtgataggtcctgacggccacaaagaagtaacaaaggaggtcgtgacatcagaagatgggtccgactgtcccgaggcgatggatttaggcacactgtcgggcattggcacactggatggttttaggcacagacaccccgacgaggccgccttctttgacacagcctctacgggaaagacctttcccgggtttttctctcccatgcttggcgaattcgtaagcgaaacggagtccagaggctctgaatctggcattttcaccaatacgaaggagtccagctctcaccaccccgggattgctgaatttccgtctaggggcaagtcttcgtcatactctaagcaattcacgtcttcaacctcctataatagaggcgatagtaccttcgagagcaaatcatataaaatggctgacgaagccggatcagaggccgaccatgaaggaacacactccactaaaagaggacatgcaaagagcagaccggtccgagattgcgatgacgtccttcagactcatccgagcgggacacagtctggaatattcaacattaaactcccaggcagctcaaaaatattcagcgtctattgtgaccaggagacttcactgggaggatggctgcttatccagcagaggatggacgggtccctcaacttcaaccgaacgtggcaggactataaacgagggttcggatctctaaatgatgagggcgaaggagaattctggctagggaatgactatctgcatctgttgacccaaagaggatccgtgctgcgggtggaacttgaggattgggccggcaacgaagcctatgcagagtatcacttcagagtcggttctgaggccgaagggtacgccctgcaagtgagctcttatgagggcacagccggagatgctttgatcgaaggatcagtggaggagggtgccgaatatacgagccataacaatatgcagtttagcacatttgaccgagacgccgaccagtgggaagaaaattgtgccgaggtttatggcgggggctggtggtataataattgtcaggccgcgaatctgaatggcatctattaccccggagggtcctacgacccacggaataattctccttatgagatcgagaatggagtcgtctgggtgtcctttaggggagccgactatagcctgagagcggtgaggatgaaaatcagaccactggtaacgcaa

SEQ ID NO: 10318 - DNA, 2598 bp, Artificial Sequence
  derived and/or modified sequence
atgttttctatgcgaattgtttgcctcgtcctgtcagttgttggaaccgcatggaccgctgactccggcgaaggcgacttcctcgccgaaggcggaggcgtgagggggcctcgggtcgtcgaacgtcatcaaagcgcctgtaaggactcagactggcccttttgctccgacgaggactggaactataagtgtccttccggctgcaggatgaaggggctaatagatgaggtcaatcaggattttaccaataggattaataagcttaagaatagcttatttgaataccagaaaaataacaaagactcacactctctgaccacgaatatcatggagatcctgaggggggatttttcctcagctaataacagagataatacctataaccgagtctcggaggatctgagatctcgaatagaagtgctcaaacggaaggtcattgaaaaagtacagcacatccagctgcttcagaagaatgtgcgtgctcagctggtcgacatgaagagactggaagtggatattgacattaagatccggtcgtgcaggggttcctgttcacgggccctggctcgagaggtggatcttaaggactatgaagatcagcaaaaacagctggaacaggtcatagctaaggatctgctgccctccagagacaggcaacacctgcccttaataaaaatgaagcccgtgcctgatctcgtccctggcaactttaagtcacagctgcaaaaggtgccacctgagtggaaagcattgaccgatatgcctcagatgcgcatggagttggaaaggccgggggggaatgagattacccgcggcggctctacctcttacggtaccggaagcgaaactgagtccccacgtaatccatccagcgcggggagttggaactcaggatcctccggacctggatcaacaggtaaccgcaatcctggatcaagcggaaccggcggcacagcaacatggaagcctggctcgagcgggcctggctccaccgggtcctggaactccgggagtagtggtactggctccactggcaatcaaaaccctggttcacccaggccagggagtacaggcacttggaatccaggatctagtgagaggggttctgcaggccactggacctcggagagcagtgtgtcagggagcacaggacaatggcactccgagagcgggtcctttcgcccagattcacccggaagtggaaatgcccgccccaataaccccgactggggcacattcgaagaggtctctggcaacgtgtctccgggaactagacgcgaataccataccgagaagctggtgactagcaagggggataaggagttgcgtacaggcaaggagaaagtcacttctgggtcaaccacaactactaggcggtcctgtagtaagaccgttacgaaaactgtgatcggaccagacggccataaagaagtgacaaaggaggtggtgacatcggaggacggttccgattgccctgaggccatggacctgggcactttgtcagggataggtacactagatggattcaggcatcgacatccagacgaggctgcattcttcgacactgcctcaacaggaaaaacttttccaggtttctttagtcccatgctgggagagtttgtgtccgagactgagtcccgcggttctgagtccggcatatttaccaatacaaaagagtctagcagccaccatcctggtatagctgagttccctagcagaggtaaaagcagttcctactccaagcagtttacctccagtacatcttacaatagaggcgacagtacattcgagtcgaagtcatacaaaatggccgacgaagcgggctcagaggcggatcacgagggcacacactccactaagcgtggccacgccaagagcaggcccgttagagattgcgacgacgtccttcagacacacccctcaggcacacaatcaggcattttcaatatcaagctgcctggaagttctaagattttcagtgtttattgcgaccaggaaacgtcgttgggaggctggcttctgatccagcagagaatggatggatcccttaattttaatcgtacgtggcaggactataagagaggtttcgggagcttaaatgacgagggagagggcgagttctggttgggtaatgactatctacatctcctgacgcagaggggttccgtgctaagagtcgagctcgaggattgggcaggaaacgaagcatacgctgagtatcattttcgggtggggagcgaggccgagggatatgcattacaggtaagcagctatgaagggacggcgggagatgcccttatcgaaggttccgtcgaggaaggggccgaatatacatcccataataacatgcagttcagtactttcgaccgggacgctgaccagtgggaggagaattgtgccgaggtatatggcggcggatggtggtacaacaactgccaagctgccaacttaaatgggatctactatcccggagggtcatatgacccccgtaataacagtccttacgagattgagaatggtgttgtgtgggtgagctttcggggcgctgattactctttgagggcggtgcgaatgaagattaggcctctcgtaacccag

SEQ ID NO: 10319 - DNA, 2598 bp, Artificial Sequence
  derived and/or modified sequence
atgttttccatgcgtatcgtgtgcctggtgctgagtgtcgtgggcacagcatggaccgctgattctggagaaggagactttcttgccgagggtggcggggttcggggccctcgggtggtagagcgtcatcagagtgcctgcaaagacagtgattggccattctgttccgacgaagattggaattacaagtgtccctcaggatgccgaatgaaaggtctgatagacgaggttaaccaggattttacaaataggatcaataagctgaaaaattccctgtttgagtaccagaagaataataaggattctcactcgcttacaaccaacataatggagatcttgcggggtgatttctctagtgctaacaatcgggataacacctataatcgagtgagcgaggacttgcggtcccggatcgaggtgttgaaacgcaaggtgatagagaaggtgcaacacatccagttgctgcagaagaatgtaagggcccagcttgtcgacatgaagagactcgaagtggatatagacattaagattcggtcctgcaggggcagctgcagccgagccctcgccagagaagtcgatctaaaagattacgaagaccagcagaagcaactggaacaggttattgctaaagacctgctcccctcaagagaccgacagcatcttcccctcatcaagatgaaaccggtacccgatcttgtgccagggaatttcaaatcacagctgcagaaggtaccccccgagtggaaagccttgacggatatgccacaaatgcggatggaactcgagcgcccaggaggcaatgagatcactagaggcggatcaacgagttatggcaccggctctgaaaccgagtcgccgaggaatccatcctcggccgggtcttggaactccgggtcatccggacccggttccaccgggaaccggaacccagggtcctccggcacgggtggtacagctacctggaaacccgggtccagcggccctggatcaaccggctcctggaactccggaagttctggcacaggtagcacaggcaatcagaaccccggttctccccggcctggatccacggggacatggaatcctggctcttcagagagggggagcgccgggcactggacctcagagagctcagtcagcggtagcaccggacagtggcattccgagtcgggatccttccggcctgactcccctgggtccggcaatgctaggcccaacaacccagactggggtactttcgaagaggttagcggaaatgtcagtcccgggacaaggcgagaataccatacagaaaaactagtcacctcaaagggcgataaggagctgcggactggcaaggagaaagtgacctctggctccacaaccaccacccgtcggtcttgcagcaagaccgtgacaaagacagtgatcggtcccgatggccataaggaagtgactaaggaagttgtcacgagcgaggacggcagcgactgtcccgaggcaatggatctcggaaccttatccggtatcggaacgctggatgggttccgtcatagacaccccgacgaggccgcattcttcgacaccgcgagcactggcaaaaccttccccggatttttttcccctatgctcggtgagtttgtttccgagactgaatctcgagggtcagagtcggggatcttcaccaacacaaaggaaagctccagccaccacccagggatcgccgagttcccatcacgcggcaagagttcctcctattcaaagcagtttaccagcagtacatcttacaaccggggagattcaactttcgaatcaaagtcttacaagatggccgatgaggccggatcagaggccgaccacgagggtacacattcaactaaacgagggcatgcaaagtcccggccggttagagattgcgatgatgttcttcaaacacacccctcagggacgcaaagcggtattttcaacatcaaacttcccgggtcctcaaaaattttctctgtgtactgtgatcaggaaacttctttaggcggctggctcctaatacaacagcgcatggatgggtccctcaacttcaaccgaacctggcaggactacaagaggggcttcgggtcactgaatgacgagggcgagggagaattttggctgggcaacgattatctgcacctcctgacccaacgagggagtgttttgcgggtggagctggaggattgggccggtaatgaggcatatgcggaatatcacttccgcgtgggaagtgaggctgagggctatgcattacaggtcagttcgtacgaaggtaccgctggagacgccttaatagaaggctctgtggaagagggtgctgagtacacttcacataacaacatgcagttcagcaccttcgaccgcgatgcggaccagtgggaggaaaattgcgccgaggtgtatgggggagggtggtggtataataattgccaggccgctaatttaaatgggatttactacccagggggcagttatgatcccaggaacaactcaccgtatgaaatcgaaaacggagtggtatgggtcagtttcagaggggccgactacagtctgcgggctgtgagaatgaaaattcgccccctggtgacccaa

SEQ ID NO: 10320 - DNA, 2598 bp, Artificial Sequence
  derived and/or modified sequence
atgttctcaatgagaatcgtgtgtcttgtgctgtccgtggtcggaactgcgtggaccgccgactccggagaaggggatttcctcgccgagggcggaggtgtgcgggggccgagagtggttgaaagacatcagtccgcgtgcaaggactcggactggcctttctgctcagacgaggactggaactacaagtgcccttcgggatgcaggatgaagggactcatcgatgaagtcaaccaggatttcaccaacagaatcaacaagctgaagaattcgctgttcgagtaccaaaagaacaataaggacagccactccctcaccaccaatatcatggagattctgcgcggggattttagcagcgccaacaatagggacaatacttacaaccgagtgagcgaggatctccggtcgcgcatcgaagtgctgaagagaaaggtgatcgaaaaggtgcagcacattcaattgcttcagaagaatgtgcgcgcccagctggtggacatgaagagactggaggtggacattgacatcaagatccgttcgtgccggggatcctgctcgagggccctggcgcgggaggtggacttgaaggactacgaagatcagcaaaagcagctggaacaagtgatcgcaaaggatctgctgccgagccgggacagacagcatctgccgctgatcaagatgaagccagtgcctgacctcgtcccggggaatttcaaatcacagctgcaaaaagtgcctcctgaatggaaggccctcactgacatgcctcaaatgcggatggagctcgagcggccggggggtaacgagatcactcgcggtggctctacttcctacggcacgggctcagaaactgagtcgccgcgcaacccatcttccgcggggagctggaatagcggaagcagcggaccgggctccaccggcaatcggaacccgggatcatcgggtactggaggtaccgccacttggaagccgggttcgagcggacccggatcgaccggatcctggaactcggggtcgtcgggaactggatcgactgggaaccagaatccggggtcgccgcggcccggatccaccggcacgtggaatcctggttctagcgaaagaggatccgccggacattggacttcggaaagctcagtgtctggttcaaccggacaatggcactcagagtcaggatcgttccggccggattcgccgggaagcggaaatgccaggcccaataacccggactggggtaccttcgaggaggtgtcaggaaacgtgtccccgggtaccagacgcgagtaccacaccgaaaagctggtgacctccaaaggcgacaaagagttgaggaccggcaaggagaaggtcacgtcaggcagcacgaccacgacccgccgatcatgcagtaaaaccgtgactaagactgtgattggaccggatggtcataaggaggtcaccaaggaagtcgtgacgtcagaagatggctcggattgccctgaggcgatggacctgggaaccctttcgggaatcgggactctcgacggattcaggcataggcatccagacgaagcggcttttttcgataccgcgtctaccggcaaaactttcccgggctttttcagcccgatgctcggagaattcgtctcagagacggagtcccgcggttcggaaagcggaatcttcaccaataccaaggagtcgtcctcccaccatccggggatcgcggagttcccttcaagaggaaaatcctcctcctactcaaagcagtttacgagctcgaccagctacaatcggggcgattcaacttttgaatcaaagagctacaagatggcagatgaggctggaagcgaggctgaccatgagggtactcactccaccaagcgtggtcacgctaagtcaagaccagtgagagactgtgacgacgtccttcagacccatcccagcggaacccagtcgggaatcttcaatatcaaacttccgggatcgagcaagatctttagcgtgtactgtgatcaggaaaccagcctgggaggatggctgctgattcagcagaggatggacggatccctcaacttcaatagaacttggcaagattacaagagaggattcggctccctgaacgacgagggagagggcgaattctggctgggaaacgattacctccatctcctgacccagcgggggagcgtgctccgggtggaactggaggactgggccggaaacgaggcctacgccgagtaccatttccgcgtgggatccgaagccgaaggatatgcactgcaggtttcctcctacgagggtactgcgggcgatgccctcatcgagggatcagtggaagagggagccgagtataccagccacaataacatgcagttctcgaccttcgacagagacgctgaccagtgggaagagaactgcgcggaagtgtacggtggaggatggtggtacaataactgccaggcagctaatctgaacggaatctactaccctggaggcagctacgacccccgcaacaactccccatacgaaatcgaaaacggagtggtgtgggtttccttccggggagctgactactccctgcgggccgtcaggatgaagatccggcccctcgtgactcaa

SEQ ID NO: 10321 - DNA, 2598 bp, Artificial Sequence
  derived and/or modified sequence
atgtttagcatgaggatagtgtgcctggtccttagcgtggtgggtacagcttggaccgcagactcgggagagggcgattttcttgcggaaggcggaggagtgcgcggaccccgcgtcgttgagcggcatcagtcagcctgtaaggatagtgactggcctttttgcagtgacgaagactggaattataagtgtccatccggttgtagaatgaaaggactcatcgatgaggttaaccaggatttcaccaaccggattaacaaactcaagaacagtttgtttgaatatcagaaaaacaacaaggactcccacagcctcacaactaacatcatggaaatcctcagaggcgatttcagctctgccaacaatcgagataacacctataatcgggtgagtgaggatctgcgctcccggatagaggttctgaagagaaaggtcatcgaaaaggtgcagcatattcagcttcttcagaaaaatgtgcgagctcagctcgtagatatgaagaggctcgaggttgacatcgacatcaagatccggagttgtagagggagttgttccagagccctggcccgcgaggttgatcttaaagattacgaagaccagcaaaagcaattggaacaggttatagctaaggatttgctgccatcacgcgacaggcagcaccttcctctgatcaagatgaaaccagtaccagacttagtgcctgggaattttaagtcccagctccagaaagttcctcccgagtggaaagcgttgacagatatgccacagatgcggatggaacttgagaggccaggaggcaacgaaatcactcgcggaggatccacatcatacggaaccggatccgagaccgaatcacctcgcaatccctccagcgcgggatcttggaatagcggctcaagcgggcctggctcgactggaaatcgcaacccagggtcttccggaaccggcggcactgccacctggaagcctggatcgtctggccccgggtctacaggtagttggaactctgggtccagcggcacgggcagtacagggaaccagaaccctggatcccctaggcccggcagcaccggaacttggaaccccggttcgtctgaacggggttctgcagggcactggactagcgagtccagcgtgtccgggtcaaccggccagtggcactcggagtctggatctttccgccctgactccccaggttccggcaacgctcgaccgaataatcctgactggggaacctttgaggaggtgtcgggaaatgtgtcacccggtacccgcagggaataccacactgagaagctcgtcacaagcaagggggataaagaactgagaacaggaaaagaaaaggtgacaagcggcagcactacaaccacacggagatcctgttctaagaccgtgacaaaaactgtcataggtcctgacggccacaaggaggtgactaaggaagtcgtgacctcagaagacggaagcgactgcccagaagcaatggatttgggcaccctttccggcattgggacattggacggctttcgacaccgccatcctgatgaggccgcttttttcgatacagctagcactggtaaaacttttcccggcttcttcagtcctatgctaggcgaattcgtatccgaaactgagtcccgcgggtcagagtccggtatcttcacaaacaccaaagagagtagcagccaccatccgggaatcgccgaattcccctcgcggggcaagtcctccagttatagtaagcagttcaccagcagcaccagttacaaccgcggggactctacgttcgaaagcaaaagctataagatggctgatgaagccggatccgaggccgaccacgagggcacacacagtaccaagcgagggcatgctaagagccgacccgttagggattgtgacgatgtcctgcagacacatcccagcggaacacagtctggaatcttcaatatcaagctgcccggctcttctaagatcttttctgtgtattgtgatcaggaaacatcactaggcggttggcttttgatccagcagagaatggacgggtccctgaattttaatcggacttggcaggactataaaagaggttttggctcattgaacgatgagggggaaggagagttctggttgggtaatgattacctgcacctactcacccagcgtggttctgtgctccgcgttgaacttgaagattgggccggcaacgaggcttacgcggaataccacttccgggtcggcagtgaagcagaggggtatgccctgcaggtgtcaagctacgaaggtactgccggcgatgcattgattgaaggaagcgttgaagagggagcagagtacaccagtcataacaatatgcaatttagcaccttcgacagagacgccgatcagtgggaggaaaattgcgcggaagtgtatggagggggctggtggtacaacaattgccaggccgctaacctgaatggaatctattacccaggggggtcttacgatcctcgcaacaatagcccttacgagatcgaaaatggtgtagtttgggtctccttcagaggggccgattattcattacgagcagtcaggatgaaaatccgcccgcttgtcactcaa

SEQ ID NO: 10322 - DNA, 2598 bp, Artificial Sequence
  derived and/or modified sequence
atgttcagcatgcgcatcgtttgcctcgtgctctcggtggtcggtaccgcttggaccgcagattccggtgagggtgacttcctggctgagggaggtggtgtgcggggaccaagggtagttgagaggcaccaaagcgcgtgcaaagattccgactggccattttgctccgatgaggactggaattataagtgtcccagtggctgccgcatgaagggcctcattgatgaagtgaatcaagatttcactaatcgcatcaataagctgaagaacagcctgttcgagtatcagaaaaataataaggacagtcattcgctgaccactaatatcatggagattctgcgtggcgatttctccagcgcaaacaatcgagataatacgtacaaccgcgtgagcgaagatctgaggtcgcgtatcgaggttctcaagcggaaggttatagaaaaggtgcagcatatccagctcctgcagaagaacgttagggcccagctagtcgacatgaagcgcttggaggtggatatcgatataaagattcgttcgtgccggggttcctgcagccgggctctggctcgagaggtagatttgaaggactacgaggaccagcagaagcagctggagcaagtgattgcgaaggatctactcccgtccagggatcgacagcatctgccactaatcaagatgaagccggtccccgatctagtaccaggtaatttcaagtcacagctgcagaaagtaccgcctgaatggaaggcattgacagatatgcctcagatgcggatggagctagagcgcccaggaggcaacgaaatcacccgtggcggctcgacctcctacggcacgggatccgaaaccgaaagcccacggaacccctctagcgcaggctcgtggaatagcggatcgtccggaccaggctctaccggcaacagaaacccaggaagctcggggacgggtggcaccgccacctggaagccgggcagcagcggcccgggaagtacgggttcgtggaacagtggttcatcgggcactggctccacgggcaaccaaaaccctggcagcccccggccaggctcaacaggaacgtggaaccccggtagctcagagcgcgggagcgccggtcactggacgtcggaatcttccgtgtccggatccactggccagtggcactccgaatccggtagcttccgtccggattccccgggcagcggcaacgcccgcccaaataaccccgactggggtacgttcgaggaggtgtcaggcaacgtgtcccccggaacgcgtcgcgagtaccacacagagaaacttgttaccagtaaaggggacaaagaactgcgcacgggcaaagagaaggttaccagtggaagcacaactacaacgagacggtcgtgctcgaagactgtgaccaagacagttatcggccccgatggccacaaggaggttaccaaggaggtggtgacgagcgaggacgggtctgattgtccggaagcgatggatttgggaacattgagtggtataggaaccttggatggttttcgccaccgccatccagatgaggctgcattcttcgatactgcgagcacgggaaaaaccttcccgggcttttttagcccgatgctgggcgagttcgtcagtgagactgagtctcgcggcagtgagagcggcatttttaccaacaccaaggagagtagcagccatcatcccgggatcgctgaattcccgtcccgaggaaagagcagcagctattccaagcagtttacctcgagcactagctacaacagaggcgacagcacgttcgagtccaaaagctacaagatggccgacgaggcaggctcagaggccgatcatgaaggaacccactcaaccaagcgcggacacgctaagagtcgcccggtgagggattgcgatgatgtcttacagacgcaccccagcggaacccaaagtggcatcttcaacattaagctgccgggttcgtctaaaatcttcagtgtatactgtgaccaagaaacgagtttgggcggctggttgctgattcaacagcgcatggatggctcgctaaatttcaatagaacttggcaggattacaagcgcggctttggtagcctgaatgacgaaggagaaggagagttttggttgggtaacgattatttgcacttgctgactcaacgtggctcagtcttgcgagtcgagctggaagattgggccggcaacgaggcctacgccgaatatcacttccgggtgggatccgaggccgaaggctatgccttgcaggtgtcaagctacgagggtaccgctggagacgccttgatagagggatcagttgaagagggcgcagagtataccagccacaataatatgcagttctccacgtttgaccgtgacgcagaccaatgggaggaaaattgtgctgaggtatatggtggcggttggtggtataataactgccaagccgccaacttaaacggtatctactaccccggaggaagctatgatccaaggaacaattcaccatacgaaattgagaatggtgtggtttgggttagtttccggggggcagactattcgctgcgcgccgtacgtatgaagatccggcccctggtaacccag

SEQ ID NO: 10323 - DNA, 2598 bp, Artificial Sequence
  derived and/or modified sequence
atgttcagtatgagaatcgtgtgtctggtactcagtgtggtcggcaccgcttggacggccgacagtggagagggagactttcttgccgagggaggcggggttagaggtcccagggtggtggagcgacaccagagtgcatgcaaggattctgactggccgttctgtagcgatgaggattggaattataaatgcccatcagggtgcaggatgaaaggcttgattgacgaagtgaatcaagactttacaaatcggattaacaagctgaagaatagtctgttcgagtaccagaagaacaacaaagattcgcactccctgactactaacattatggagatcctgaggggcgatttctcctccgcgaataacagagacaatacctacaacagggtgagcgaagatttaaggtcacgaattgaggtgttgaaaaggaaagtgatcgaaaaggttcagcacattcagttactgcagaaaaacgtgcgcgctcagctggtagatatgaaaaggctcgaggtggacatcgatattaagatcagatcttgcagggggagctgctctcgcgcactggcccgcgaagtagatttgaaggactatgaggaccagcaaaagcagctggagcaggtgatcgctaaagatctgctgcccagccgcgacaggcaacatctccctctgataaagatgaagccggtgcctgacttggttccaggtaatttcaaaagccagctccagaaggttcctccggaatggaaggctctgacggatatgccacagatgcgtatggaattggaaaggcccggcggaaatgagatcacccgcgggggtagcacgtcttacggtactgggtccgagactgagtcacccaggaacccaagttctgccgggagctggaatagcgggtccagtggccctggcagcactggcaatcgaaatcctggctcgagcggaaccggcgggactgctacctggaagcccggctcctcggggcctggtagcaccggctcctggaattcgggctcctcaggcaccggttcgaccggcaaccagaaccccggcagccccaggccaggcagcacaggaacttggaaccctggtagcagtgaacggggcagtgctgggcattggacttctgagtcttcagtgagcggaagcactggccaatggcattcagaatctgggtctttcagaccggactcccccggctcggggaatgccagacctaacaatcccgattggggtacctttgaggaagtgtccggaaatgtgtctccgggaactcgccgtgagtatcacactgagaagctggttacctctaaaggagataaggagctgaggactgggaaggagaaagtgacaagtgggagcactacaactactaggcgatcttgcagcaagaccgttacaaagaccgtgattgggccagacgggcacaaggaggtcacgaaggaagtggtgacctctgaggacggatcagattgccctgaagctatggacctgggaacattgagcggcattgggaccctggatggcttccgtcataggcatcctgatgaggcggccttcttcgacactgcctctaccggcaagacatttcctgggtttttcagccccatgctcggcgaattcgtgagcgagaccgagagcaggggcagcgagagcggcatcttcacgaataccaaagagtcctcatcccatcaccccgggattgcagaattccccagtagagggaagtcctcaagctatagtaaacaatttacctcaagtacgagttataaccggggcgactctacttttgagagtaaatcgtacaaaatggccgacgaggcaggttccgaggctgaccatgaggggacacattccactaagagggggcacgccaagagtagacccgtccgggactgtgacgacgtacttcaaacacacccctccgggacacagtccggaatcttcaatataaagctaccaggcagcagcaagatcttcagcgtctactgcgaccaggagacttccctcggcggatggctgctcatccaacagagaatggatggctccctgaatttcaaccggacatggcaagattacaagcggggtttcggaagtcttaacgacgagggcgagggcgagttctggctgggcaacgactacctccatttgttgacacagcgcggatctgttctgcgagtcgaactcgaggactgggccggaaacgaggcctacgcggaataccactttcgcgtcggtagtgaggccgaagggtacgctctgcaggtgtcgagctacgaaggcaccgcgggggacgccctgattgaggggtctgtagaggagggtgcggaatacacctctcataacaatatgcagttctccacctttgacagggacgctgaccagtgggaagagaattgcgccgaggtgtacgggggcgggtggtggtacaacaactgccaggctgcaaaccttaatggcatctattatccaggcgggtcatacgaccctaggaacaacagtccctacgagatcgaaaatggtgtggtatgggtttctttcaggggggcagactatagcctcagagcggttagaatgaaaatacgccctctggtgacccag

SEQ ID NO: 10324 - DNA, 2598 bp, Artificial Sequence
  derived and/or modified sequence
atgttttccatgaggatagtgtgccttgtgctgagcgtggtcggaactgcctggactgcggattcgggtgagggggacttccttgcagaagggggcggcgtccggggtccgagagtggtcgagaggcaccaatcggcatgtaaggactccgattggcctttctgttccgatgaggattggaattacaaatgcccaagcggctgccggatgaagggactgattgatgaagtgaaccaagattttacgaacaggatcaacaagctgaagaactcgctgttcgaataccagaagaacaacaaagattcacactcgctgaccaccaatatcatggaaatacttcgtggtgatttttcgagcgccaacaacagggataacacttataaccgcgtcagcgaggatcttcggtcgagaatcgaggtgctcaaacgcaaggtcattgaaaaggtgcagcatattcagctgctgcagaagaatgtgcgcgctcaattggttgatatgaagcgacttgaagtggatatcgacataaagatcagatcgtgtcgcgggtcatgttcgagggccctggctagagaggtggatttgaaagattacgaggaccaacagaagcagcttgaacaagtcatagccaaggatctgttgccctcaagggatagacaacatctcccattgattaagatgaagcccgtgcccgatcttgtgcctggtaactttaagtcccaacttcagaaggtgccgccagagtggaaggctctcaccgacatgccccaaatgagaatggaactggagcgtccaggcgggaatgagattactcgtggaggttcgacctcctacggaaccggatcggaaaccgaatccccacggaatccatcgtcggcaggctcgtggaattcgggaagctcgggacctggttcaacgggaaatcggaaccccggaagctcgggtaccgggggcaccgcaacttggaagccgggttcgtcgggtcctggttcgactggctcttggaactcaggtagctcaggcaccggatctactggaaaccaaaaccctggatcacctcgcccaggttcaactggtacttggaaccctggatcgagcgagcgggggtcagcaggacactggacctcagaaagctcagtttcgggttccacgggccagtggcacagcgaatcaggctccttccgacctgattccccgggctccgggaatgcacggcctaacaatcccgactggggcacttttgaggaagtcagcggaaatgtcagccctggaactagaagagaataccacaccgaaaagctcgtcacctcaaaaggagataaggagctgagaactggcaaagaaaaagtcacctccggttccaccaccacgactaggagaagctgctccaagacggtgactaaaaccgtgatcggaccagacggtcataaggaagtcaccaaagaagtcgtgacttcggaggatggatcggattgtccggaagcgatggacctcggaacccttagcggaattgggacgcttgacggatttcgtcacagacatccagacgaggcagcatttttcgacaccgccagcaccggtaaaacgtttcccgggttcttttcccccatgctgggggaatttgttagcgagactgagtctcgcgggtcggaaagcgggattttcaccaacactaaagaatcctcatcacatcatccaggcatagcagaattcccttcacgggggaagtcgagctcctacagcaagcaattcacttcctcaacttcatacaatcgtggcgattcgacctttgaatcgaagtcctacaagatggcagacgaggccgggagcgaagcggatcatgaaggcactcattcaactaaacggggacacgctaagagcagacccgtgagggactgtgacgatgtgctccagacgcatccttccggtactcagagcggtattttcaacatcaagttgcctggtagcagcaaaatcttctctgtgtattgtgatcaagaaacctcacttggcggatggctgctgattcaacaaaggatggacggatcattgaatttcaatagaacgtggcaagattacaaacgggggttcgggtcccttaatgacgagggcgagggagagttttggctgggcaatgattacctccatcttctcacccaacggggatcagtccttcgggtcgaactggaagattgggcaggtaacgaggcctacgcggagtaccatttccgtgtgggatcggaagcggaaggatacgcgcttcaagtctcatcctacgagggaaccgcgggtgacgcactcattgagggatcggtggaagaaggtgcagaatacacttcgcacaataacatgcagttctcaaccttcgatagagatgcagaccagtgggaagaaaactgtgcagaagtgtacggtggtggatggtggtacaataactgccaagccgcaaacctcaacggcatttactaccctggcgggtcgtatgatccccgtaacaactcgccgtacgagattgagaacggagtggtgtgggtgtcgtttcgtggtgcggactactcgcttcgagctgtgcggatgaaaatcaggccccttgtgacccag

SEQ ID NO: 10325 - DNA, 2598 bp, Artificial Sequence
  derived and/or modified sequence
atgtttagcatgcgtattgtgtgtctggtgctgagcgtagtggggacggcatggactgccgatagcggagaaggggacttcctggccgagggcggaggagtccgagggcctcgcgtggtggagcgacaccagtccgcatgtaaagactctgattggccattttgttcagacgaggattggaactacaaatgcccatccggttgtagaatgaagggattgatcgacgaggtcaaccaagacttcaccaatcgaattaacaaattgaaaaactcgctgttcgagtaccaaaagaataacaaagactcccattcgctgaccaccaacattatggagatcctcagaggcgatttttcgtcggctaacaacagggataacacctataatcgagtttcagaagatcttcggagcagaatagaagtcctcaaacgtaaggtcattgaaaaggtgcagcacattcaactccttcagaagaatgtccgtgcgcaactggtggatatgaagcgcctggaagtcgacatcgatatcaagatcagatcctgccgcggttcctgttcgagagcgcttgctcgcgaagtggacctcaaggactatgaggatcaacaaaagcaactggaacaagttatagccaaggatctgttgccaagccgcgataggcagcatctccctcttatcaagatgaagccagtaccagaccttgtgcctggaaacttcaaatcgcaacttcagaaggtgcccccagaatggaaggcgctgaccgatatgccccaaatgaggatggaattggaacggccgggaggaaacgaaatcacccgaggcggatcaacttcatacggaactggttcggaaaccgaatccccgcggaatccttcctctgcaggctcgtggaatagcggttcctcggggcctggaagcacgggaaacaggaatccgggatcctctggcactggaggtactgccacctggaagcccggatcaagtggtcctggttccactgggtcgtggaactcaggatcctcagggaccggctccaccggtaaccaaaacccggggtccccccgtcccgggagtactggaacttggaaccctggatccagcgaacgcggatcggcaggacattggactagcgaaagttccgtctccgggtccactgggcagtggcattcggagtcgggctcttttagaccagattctccaggatcaggtaacgcacgtccaaacaatcctgattggggtactttcgaggaagtgtcaggaaatgtgagccctggaactcggagagaataccatactgaaaaactggtgacttcgaagggtgacaaggaactcagaaccggaaaggaaaaggtgaccagcggaagcaccaccacgaccagaagaagctgctcaaagaccgtcacgaaaacggtgatcgggcccgacggacataaagaagtcacgaaagaagtggtgacctcagaggacggatccgattgcccagaagcaatggacctcggtactcttagcggaatcggcactcttgatggctttagacaccgccaccctgatgaggcggccttctttgatactgcttcgactggcaaaacttttcccggttttttctcaccaatgcttggagagtttgtgtctgaaaccgaaagccggggatcagaatccggtatattcacgaacactaaagaaagctcgtcacaccatcctggcatagcagagtttcctagtaggggtaagtcgagctcgtactccaagcaattcacctcgtcgaccagctataatcgaggagactcaacctttgaatccaagtcgtacaagatggccgacgaagccggttcagaagcagatcatgaaggtacccactcgaccaagcgtggacatgcaaaatcccgccccgtccgcgactgtgatgatgtgctgcagactcatccttccgggacccagtccgggatctttaacataaagctccccggttcatccaagatctttagcgtgtactgcgatcaggaaacgtctctgggagggtggcttcttattcagcaacgaatggacggttcgctcaatttcaatcgcacctggcaagattacaagcgtggcttcggatcgcttaacgatgagggagaaggcgaattttggctgggtaatgattacctgcatctgctgacccagagaggttcagtgctgagggtggagctcgaggattgggcgggtaacgaggcctacgcagaataccacttcagagtcggatccgaggcagaagggtatgcacttcaggtgtcgagctacgaaggtaccgcaggcgatgcacttatcgaaggctcagtggaggagggagctgagtacactagccataacaatatgcagttttcaacttttgatagagatgccgatcaatgggaggagaactgtgcagaagtgtacggaggaggctggtggtacaacaattgtcaagctgcaaaccttaatgggatatactaccccggcggatcatacgatccgcgaaacaactctccttacgagattgagaacggtgttgtgtgggtttcctttcgcggcgcagactactcattgcgagccgtgaggatgaagatacggccacttgtcactcaa

SEQ ID NO: 10326 - DNA, 2598 bp, Artificial Sequence
  derived and/or modified sequence
atgttttcaatgagaattgtttgtcttgttctttcggttgtgggaactgcctggaccgcagattcgggcgaaggagactttcttgcagaaggtgggggagtgaggggccccagggtagtggaacgtcaccagagcgcctgtaaggactccgactggcctttctgttccgatgaagattggaactacaaatgtccttcgggatgcagaatgaagggattgatcgatgaggtcaaccaagatttcactaatcgcataaacaaacttaagaatagcctgtttgaatatcaaaagaacaacaaggactctcacagcttgacgaccaacattatggaaattctgcgcggtgatttttcatcggctaacaaccgagataatacttacaatcgcgtcagcgaagatcttagatcgagaatcgaagttctgaaaaggaaggtgattgagaaagttcagcatattcaactgctccagaaaaacgtgcgcgcacagctggtcgatatgaagagacttgaagtcgacattgatatcaagatccgctcctgccgcgggtcgtgctcaagagcccttgcgcgagaagtggatctcaaggattacgaagatcaacagaagcagcttgaacaagtcattgcaaaggacttgctccctagccgtgaccgtcagcatcttcctcttatcaaaatgaagccagtgccagatcttgtgccaggaaactttaagagccaacttcaaaaggtgccacctgagtggaaggcactcactgacatgcctcaaatgagaatggaactcgaaaggccgggtggaaacgagattacccgcggcggctccacttcgtacggtaccggttcagaaaccgaaagcccacgaaaccctagcagcgctggatcctggaattccggatcatcaggaccaggttcaacgggaaaccgtaaccccggttcgtcaggaaccggaggaaccgctacttggaagcctggctcttccggacctggttcaaccggtagctggaattcgggtagctcgggtactggtagcactggtaaccaaaacccaggttcccccaggccagggagtactgggacgtggaatcccggatcatccgagaggggatccgcaggacattggacttcggagtccagtgtttccggttcaactggtcaatggcatagcgaatccggatcattcagacccgactcaccgggatctgggaacgccagacctaacaatcctgactggggaactttcgaagaggtgtcaggaaatgtgagccccggcactcgcagggaatatcatactgagaaactggtcacgtctaagggtgataaggaactcaggaccggcaaggagaaggttacgtcgggaagcaccactactactaggcggagctgttcaaagaccgtcacgaaaaccgtgatcggtccggacggacacaaggaagtgactaaagaagtggtgacctcggaagatggttcggactgtcccgaggcaatggatctgggtactctgtcgggtattggtactcttgatggattccgacaccgacatccggatgaagcagccttcttcgacactgcctcgaccggtaagacttttcctggtttcttctcgcctatgcttggtgaatttgtgtctgaaaccgagtcgagaggtagcgagtcgggaattttcaccaataccaaagaatcgagctctcatcatccagggattgcagagttcccttcgaggggtaagtcatcgtcctactcaaaacagttcacctcctcgacttcatacaaccgaggagattccacctttgagtcgaagagctacaagatggcagacgaggcagggtcggaggccgatcatgagggtactcattcgaccaagagaggacacgcaaagagcagacccgtcagagattgcgatgatgtgcttcaaactcacccatcgggaacccagtcgggtatcttcaatatcaaacttcctggaagctccaagatctttagcgtgtactgcgatcaggaaacctcccttggcgggtggcttctgatccaacagcgcatggatggcagcctgaactttaaccgtacttggcaggattacaagagaggatttggttcccttaacgacgaaggggaaggagaattttggctggggaatgactaccttcaccttctgacccaacgcggatccgtgcttcgcgtggaactggaggattgggcaggtaacgaagcatatgccgagtaccattttagggtcggatcggaagcagaaggatatgcacttcaggtgtcatcttacgaaggaaccgccggggatgcgctgattgaggggtccgtggaagaaggagcagaatacacctcccataacaatatgcaattctccacttttgaccgggacgcagatcaatgggaggaaaactgtgcagaagtgtacggtggcggctggtggtacaataactgtcaagcagcaaacctgaatggtatctactacccaggaggatcatatgacccccggaataacagcccatacgagatagagaacggagtcgtgtgggtgtcgttcagaggggcggattattcgctccgggcagtgagaatgaagattcgacctctcgtcacccag

SEQ ID NO: 10327 - DNA, 2598 bp, Artificial Sequence
  derived and/or modified sequence
atgttcagtatgaggatcgtgtgcctggtgctcagcgttgtggggacggcctggaccgcagacagcggagaaggcgactttctggccgaaggaggaggtgtcagaggaccgcgcgtggttgaaagacaccagagcgcctgtaaggactcagactggcctttctgtagcgatgaggattggaattacaaatgcccgtccggctgcaggatgaaaggactgatcgacgaggtgaaccaagacttcaccaatagaatcaataaactgaagaacagcctcttcgaataccagaaaaacaataaggactcccactccctgactactaacatcatggaaattctgcgcggagattttagctcggcgaacaatagagacaatacgtataaccgggtttcagaggacctgcgctcgcgcatcgaggtgctgaaacgcaaggtcatcgaaaaggtgcaacatatccagctcttgcaaaagaacgtgcgggcacaactcgtggatatgaaacgcctggaggtggatatcgacatcaaaatccgatcttgccgcggatcgtgctcgcgggctctggcccgcgaggtcgacctgaaggattacgaggatcagcagaaacaactcgagcaggtcatcgcgaaggatctcctgccctcacgcgatcggcagcatcttccactcatcaaaatgaaaccggtgcctgacctggtgcccggaaacttcaagtcccaactccagaaggtgccaccggaatggaaggccctcactgacatgcctcagatgaggatggaactcgaacgcccgggtggaaatgaaatcacccggggagggtcaacctcctacggaactggttccgaaactgaatccccacgcaaccctagcagcgctggatcctggaactcgggatcgtcaggaccgggaagcactggaaaccggaaccctggaagcagcggaacgggaggcactgccacttggaaaccaggctcgtccggacctggatccaccgggtcgtggaactctggctcgtcgggaaccggctcgactgggaatcagaacccgggtagccctcgcccaggatccactggaacttggaacccaggttcatcggaacgcgggagcgcaggacactggacctcggagagttccgtctcgggatctaccgggcaatggcactccgagtccggatcattcagaccggatagcccgggcagcggaaacgctcgccctaacaacccggactgggggactttcgaggaggtatcaggtaacgtctcaccgggaactcgccgggagtaccatactgaaaaactcgtcacttccaagggagacaaggagttgcgcactggcaaggaaaaggtgacttcgggaagcacgaccaccactcgccggagctgttctaagacggtcacgaaaactgtgatcggaccggacggacataaagaggtgaccaaagaagtggtgacgagcgaagatggaagcgactgcccggaggccatggatctcggaacgctcagcggaattgggaccctggacgggttccggcacagacacccggatgaagccgcattctttgacactgctagcaccggcaagaccttcccaggattcttttccccaatgctgggcgaatttgtctcggaaaccgaaagccggggatcagagtctggcattttcactaacaccaaggagagctcctcgcatcatcctggaatcgccgaattcccgtcgcggggcaaatcctcttcatactccaagcaattcacctcgagcacttcctataatcgcggagattccactttcgaatcgaagtcgtacaagatggcagacgaagccggatccgaagccgaccacgaaggaacccacagcaccaagcggggacacgcaaaaagtagaccagtgagggactgcgatgatgtgttgcagacccaccctagcgggactcagagcggaatcttcaatatcaagctccctggctcatcaaagatcttctcggtctactgtgatcaggagacgtcgctcggtggttggctgctcatccagcagcggatggatggatccctgaacttcaatcgtacctggcaggattacaagagggggttcggatccttgaacgacgaaggcgagggagaattttggctggggaatgactaccttcacctccttactcagcgcggatcagtgttgagagtggaactggaagattgggcgggtaatgaggcgtacgcagaatatcatttccgggtgggatcagaagctgaaggatacgccctccaggtgtcgtcgtatgaagggacggccggagacgccctgatcgagggaagcgtggaagagggcgccgagtatacttcccataacaacatgcaattcagcactttcgaccgagacgccgatcaatgggaagaaaactgtgcagaagtgtatggaggaggctggtggtacaataactgccaggccgcaaatctcaacggtatctactacccaggcggctcctacgacccgcgcaacaattccccgtacgaaatcgagaatggggtcgtctgggtgtcctttagaggagcggactactccctgagggctgtccggatgaaaatccgcccgctggtcacgcag

SEQ ID NO: 10328 - DNA, 2598 bp, Artificial Sequence
  derived and/or modified sequence
atgttctcgatgcggatcgtttgtctcgtcctctcggtggtgggtactgcttggaccgcagactcgggggagggtgattttctggccgaaggtggcggggtcagaggaccgcgagtggtggagcgccatcagtcagcctgtaaagactcggattggccgttctgttcggatgaagattggaattacaagtgtccgtcgggatgcaggatgaagggattgatcgatgaggtgaaccaggatttcaccaatcggatcaataagctgaagaattcgctgttcgagtaccagaaaaacaacaaggattcccactcactcaccactaacatcatggagatcctcaggggcgacttcagctcggccaacaacagggacaacacctacaaccgtgtctcggaggacctcagatcccgaatcgaggtgctgaaaaggaaggtgattgaaaaagtgcagcacatccaactgctgcagaagaatgtgcgcgctcaactggtcgacatgaaaagactggaagtggatatcgacatcaaaatccggtcctgcagaggatcctgctctcgggcactggcaagagaggtggatctgaaagactacgaggatcaacagaagcaattggagcaagtcattgctaaggaccttcttccttcccgcgatcgccagcacctgcctctgatcaagatgaagccagtcccagatctggtgccgggaaatttcaaatcacagctgcaaaaagttccgccggagtggaaagcccttaccgatatgccacagatgagaatggagctggaacgcccgggaggaaatgagatcacccgcggcggatccacctcgtacggtactggctccgaaacggaaagcccaaggaacccttcatcggccggatcctggaactcaggctccagcgggccaggttcaaccggtaaccgcaatccgggaagcagcggaacgggcggaactgcaacttggaagcccggatcatcaggccctggctcgactggatcatggaactcagggtcctcgggaaccggatcgacgggcaatcaaaatcctggcagcccgcgaccaggatcgactggaacgtggaacccggggtcgtctgaacggggatcggccggacattggacttccgagtcgtcggtgtcgggatcaaccggccaatggcactcagagtcgggctccttcagaccggacagcccgggctccggaaacgcccgcccgaataaccccgattggggaactttcgaagaggtgagcggaaatgtgtcgccgggtactcgcagggaataccataccgaaaagctggtgaccagcaagggagacaaagagctgagaactggaaaggaaaaagtgacttcaggaagcaccactactaccagacggagctgcagcaaaaccgtgactaagactgtgatcggaccagacggccacaaggaggtgactaaggaggtggtgacctcggaggacggatcagattgccctgaagccatggaccttggcactttgtcgggtatcggaacccttgacggattccgccatagacatcctgacgaggcggcgttctttgatactgcttccaccggaaagacttttcctggcttcttcagcccgatgctgggagaattcgtctcagaaaccgaatcacgcgggtcggaatctggaatctttactaatactaaggaaagctcgtctcaccacccgggaatagccgagttcccgtcgagaggaaagtcatcatcatactcgaagcaattcactagctcgactagctacaataggggagattcaactttcgagtccaaaagctacaaaatggccgacgaagcgggatcggaagccgaccacgaaggcacccactcaaccaagcggggacacgccaagagccgccctgtgagggattgcgacgatgtgctccagactcatccgtccggaactcagagcggcatcttcaacataaaactgccaggctcttcaaagatctttagcgtttactgcgaccaagagacttcgctcggaggttggctgctcattcagcaacggatggacggatcgctcaacttcaatcgcacctggcaggattacaagcgggggttcggatccctgaatgatgaaggggaaggcgagttctggctcggcaatgactacctgcacctgctcactcagcgcggctccgtcctgagagtcgaacttgaggactgggcaggaaacgaggcatacgcagagtatcacttcagagtgggatcggaggcagaaggctacgcgctgcaggtgtcctcctacgagggaaccgcaggcgatgcattgatcgagggttcggtggaggagggagcggagtacaccagccataacaatatgcaattttcgacgttcgatcgggacgcggaccagtgggaggaaaattgcgccgaggtctatggaggcggttggtggtacaataactgccaggccgcgaacctgaacgggatctactatccaggtggcagctacgacccgcgcaataacagcccatacgaaatcgaaaacggcgtggtctgggtgtccttccgcggagcggactactccctcagggctgtgcgcatgaagattcggccgctggtgactcaa

SEQ ID NO: 10329 - DNA, 2598 bp, Artificial Sequence
  derived and/or modified sequence
atgttctccatgagaatcgtgtgcctggtgctctccgtggtgggcacggcatggactgctgattcaggagagggcgatttcctggccgaaggaggtggggtccgtggtccgcgggtggtggagcggcaccaatctgcatgtaaagacagtgactggcctttttgctccgacgaggattggaactacaagtgcccctcaggttgtcggatgaaaggtttgatcgacgaagtcaatcaggacttcactaatagaatcaataagctcaaaaactcattgttcgaataccagaagaataacaaggattcccactccctgaccacgaatatcatggagatccttaggggcgatttctccagcgcaaacaacagggataatacttacaaccgggtttcagaggacctcaggtcaagaattgaagtcttgaagcggaaggtgatcgaaaaggtccaacatatccagctgctgcagaaaaatgtgagagcccaactggtcgatatgaaacgccttgaagtggatatcgacatcaagattcgctcctgccgggggagctgcagtcgggcactggcccgcgaggtggatctcaaggactatgaagatcagcagaagcaactggagcaagtgatcgcgaaggacctgctgccgagccgcgacagacagcaccttccactcatcaagatgaagccggtgcccgacctggtccctggaaacttcaaatcgcagctccagaaggtgcctccagagtggaaagcgctgaccgacatgccgcaaatgcgcatggagctggaaaggcctggaggaaacgaaatcactaggggaggatccacctcttatggcactggcagcgaaacggagtccccccgaaatccgagctcagcgggaagctggaattccggatcctcgggcccagggtccaccggaaaccggaacccgggctcctcgggaaccggcggcaccgcgacttggaagccgggcagctcggggccgggatccaccggatcttggaactcaggatcgtccggtactgggtcaacggggaaccaaaatccagggtcgccgcgcccgggctccactgggacctggaatcccggttcgtccgaacgcggttcagcaggccattggacgtccgaatcttcggtgagcggcagcactggtcagtggcactcagaaagcggttcttttaggccggacagcccaggaagcggaaatgctcgccccaataatccagattggggaactttcgaagaagtgtcgggaaacgtgtcacccggaactcgccgggaataccacaccgagaaactggtcacttcgaagggagacaaagagctccggaccgggaaagagaaagtcacctcgggctcgaccaccacgacccggcgctcctgtagcaaaacggtgaccaagaccgtgattggacctgatggacataaggaggtcaccaaggaagttgtcacttccgaagatggaagcgactgcccagaggcgatggatctcggaaccctgtctggaatcggcaccctggacggtttccgccatcggcatcccgatgaggcggccttctttgataccgcatcgaccggtaagactttccccggattcttctcgcctatgctgggagaatttgtgagcgaaaccgaaagccgcggatcggagtccggtatattcaccaacaccaaagaatcttccagccaccaccccggaatcgcagaatttccttcacggggtaagtccagttcgtactcgaagcagttcacttcgtcaacctcgtacaaccgcggagacagcacttttgagtcgaagagctacaaaatggcggacgaagccggcagcgaggctgaccatgaggggacgcactcgaccaagcgcggccacgccaaatcacgccctgtgcgcgattgtgacgacgtcctgcagactcacccatccggcactcagtccggaatcttcaacataaagctgcccggcagctccaagatcttcagcgtgtattgcgatcaggaaacttccctgggcgggtggctcctgatccaacaacgcatggacggttcgctgaactttaatcggacttggcaagactacaagcggggttttggaagcctcaacgatgagggggaaggtgaattttggctgggaaatgactacttgcacctcctcacccagcgcgggtctgtgctccgcgtggagctcgaagattgggctggcaacgaagcctacgccgagtaccattttcgcgtaggatcagaagccgaaggctacgcacttcaggtgtccagctacgaaggcactgccggggacgctctcatcgaaggaagcgtggaagagggagctgaatacaccagccataacaacatgcagttcagcacgttcgatcgggacgccgatcaatgggaagaaaactgtgccgaggtttatggaggaggttggtggtacaacaactgtcaagctgcgaacctgaacggtatttactacccggggggttcctacgaccctagaaacaacagcccctacgaaatcgaaaacggagtcgtgtgggtgtcgttcaggggcgccgactattcattgcgggccgtgcggatgaaaattcggccactggtgacccag

SEQ ID NO: 10330 - DNA, 2598 bp, Artificial Sequence
  derived and/or modified sequence
atgttctccatgagaatcgtctgcctggtgctgtcggtggtgggaactgcatggaccgcagactcgggagaaggcgatttcctggcagaaggcggaggggtgcggggaccgagggtcgtcgagagacaccagtcagcatgcaaggactcagactggcccttttgctcagacgaagattggaattacaagtgcccatcagggtgtcgcatgaaaggactgattgacgaagtgaaccaggatttcacgaatagaatcaacaaacttaagaattctctcttcgaataccagaaaaacaacaaagattcacattctttgaccactaacatcatggagatcttgcggggggacttctcctcagcgaacaatcgggacaatacttacaacagagtgtcggaagatctgcgcagcagaattgaagtgctgaaacgaaaggttatcgaaaaggtgcagcatatccagctgctgcagaagaacgtccgtgcccaacttgtcgacatgaagaggctcgaggtggacatcgacatcaagatccgatcatgccgcggatcctgcagcagagcactggcgagagaggtggatcttaaggactacgaagatcaacaaaaacagctcgaacaggttatcgcaaaggatctcctgccatcgagggacaggcagcacctcccattgatcaagatgaagccagtgcccgacctggtcccgggcaacttcaagtcccaattgcaaaaggtcccgcccgaatggaaggctctcacggacatgccgcagatgcggatggagcttgaacggccggggggaaacgaaattactcgcggagggagcacctcctacggaactggaagcgagactgaatcccctcgaaatccatcgtcggccggttcatggaactctggatcgtccggaccggggtccacgggaaatcggaatcctggctcctccggaaccggcgggactgcgacttggaagcctggatcgtcgggccccgggagcaccggctcatggaacagcggatcgagcgggactggatccaccggaaatcagaatccgggatcaccaagacctggatccactggcacctggaacccgggatcatcagaacgcggatccgccggtcattggacctccgaatcttcggtgtcgggttccacgggacaatggcattccgaatcaggatcatttcggccagactcgcctgggtccgggaacgctcgcccaaacaatccagactggggcacgtttgaagaagtctcgggcaatgtgtctccgggaaccagaagagagtaccacactgagaagctcgtcacctctaaaggagataaggagttgcggaccggaaaggaaaaagtgacttccggatccaccaccactactcggcggtcgtgcagcaagaccgtcacgaaaaccgtgatcggtcctgatggacacaaggaagtcacgaaagaggtggtgacctcagaagatgggagcgactgccccgaggcgatggacctgggcactctgagcggaattggaactctcgatggcttccgccatcgccatccggatgaggctgcatttttcgacaccgcttcgaccggaaagaccttccctggattctttagccctatgctcggcgaattcgtgagcgaaaccgagtcccgcggctccgaatcaggtatcttcactaataccaaagaatcctcctcccaccacccgggaatcgccgagtttccgtccagaggcaagtcatccagctactcaaagcagttcactagctcgacttcgtacaacaggggtgactccacctttgaaagcaagtcgtataagatggccgacgaggcaggatcggaagccgaccacgagggcactcactcaactaagcgggggcacgccaagtcgcggcctgtccgcgattgcgacgatgtgctgcagacccacccttcgggcacccaatcgggtatcttcaacatcaaactgccggggtcatcgaagatcttctcggtctactgtgatcaggaaacgagcctgggtggatggcttctgatacagcagcggatggatggatccttgaacttcaaccggacttggcaagattacaagcggggattcggttcactgaacgacgaaggcgagggagagttctggcttggaaatgactacctgcacttgcttactcagagaggatcggtgctccgggtggaacttgaggactgggctggaaacgaggcctacgcagagtaccacttcagagtgggatcggaagcggaaggatacgcgctgcaggtgtcatcgtacgagggtaccgcgggcgacgcgctgatcgaggggtcggtggaggagggagcagaatacacgtcccacaacaacatgcagtttagcacctttgatagagacgcggaccagtgggaggagaattgtgccgaagtgtatggtggtggttggtggtacaacaattgccaggccgcaaacctgaacggaatctactaccctggcggatcatatgaccctcgcaacaattcgccttatgagatcgaaaacggagtggtgtgggtttccttccggggcgctgattactcactgcgcgcggttcgtatgaaaatccgcccgctggtgacgcag

SEQ ID NO: 10331 - DNA, 2598 bp, Artificial Sequence
  derived and/or modified sequence
atgtttagcatgcggattgtgtgcctggtcctgtctgtcgtgggaaccgcctggaccgctgattcaggggagggcgattttcttgctgagggtgggggcgtaagaggcccaagagtcgttgaacgacaccagagcgcctgtaaagactcagattggccattttgttctgatgaggattggaattacaagtgcccttctggttgccgaatgaaagggctgattgatgaggtaaatcaagactttacaaatagaataaataagttgaagaacagcctgttcgagtaccagaagaacaacaaagattctcactctctgacaaccaatatcatggagatcctccggggagatttttcatcggccaataaccgtgacaatacatacaacagagtgtctgaagatctgcgctctcgcatcgaggttttaaagcgcaaggttatagaaaaggtgcagcacatccagctgctgcagaaaaatgtgagggcccaactggttgacatgaagagattggaggtggatatcgatattaaaatcaggtcctgcaggggctcctgctctcgcgccttggcccgagaggtggatctcaaagattatgaggatcagcagaaacagctggagcaggtgatagcaaaggatctgttgcccagtcgggataggcagcatctgcccctgattaagatgaaacccgtgccagatcttgttcccggaaatttcaagtctcaactacaaaaggttccaccagaatggaaggcactgaccgacatgccgcaaatgcggatggaactcgagcggccaggcggaaatgagatcaccagaggggggtctaccagctacggaacaggtagcgagaccgaatcacctaggaatcctagttccgcgggatcttggaattctggatcgtccggacccggttccaccggcaaccggaatcctggttctagcgggactggagggaccgcgacgtggaagcccggttcctcaggccctggctcaaccgggtcctggaactctggcagctcagggaccggtagcacagggaatcagaatcctggctccccaagacctggctcaaccggtacttggaatcctggttccagtgaacgtggatcagcgggccattggacctccgagtctagcgtttctggctctacaggccagtggcactcggaaagcggcagttttaggcccgatagtccaggttctggcaatgcacgccctaacaaccccgattggggcacctttgaggaggtgagtggtaatgtcagtcccggtaccaggcgggaataccacactgaaaagctcgttacgagcaagggcgacaaagagctaaggacagggaaggaaaaggtaaccagtggctcaaccactacgacccggcggtcttgtagtaagaccgtcaccaaaaccgttattggccccgatgggcacaaggaggtcacgaaggaagtggtgactagtgaagacgggagcgattgtcccgaggccatggacctgggaactttatcagggatcgggactctggatggatttaggcatcgccacccagacgaggcggccttttttgacaccgcgtccaccggaaagacattccctggattcttttcacctatgctcggggaattcgtgtccgagactgagagtaggggtagcgaaagcggcatctttaccaacacaaaggaatctagctcgcatcacccaggaatcgccgagttccctagtagaggaaagtcttccagttactcaaagcagttcacttccagcacatcttataataggggtgatagcacgttcgagtctaagtcatacaagatggccgacgaggctggctctgaagctgatcacgagggaactcacagtacgaagcgtgggcacgcaaaatctcggccggtgcgagactgtgacgacgtccttcagacacacccctctggaacacaaagtggcattttcaacatcaaactcccaggctctagcaagatcttcagtgtgtactgcgaccaggaaacatctctagggggatggttgttgatccagcagcgcatggacggcagcctgaactttaacagaacctggcaggattacaaacgaggattcggttcactcaacgatgagggtgagggagaattctggctcggaaacgattatttgcacctgctcactcagagaggctccgtccttcgcgtcgaactggaggactgggccggcaacgaggcatacgccgagtatcatttccgcgttggcagtgaggcggagggctatgcgctgcaggtgtcttcttatgagggaaccgccggtgacgccctaatagagggcagtgtcgaggaaggagccgagtacacaagccataacaatatgcagttttctaccttcgacagggatgccgaccagtgggaggaaaactgcgccgaggtgtacgggggcggttggtggtataacaactgtcaggcagcgaatttaaatggaatttactatccaggagggtcgtatgacccacgcaataacagcccttacgaaatagagaatggagtggtatgggtgagctttcgaggagctgactattccctacgggccgtgcggatgaagatccgcccactcgttacccag

SEQ ID NO: 10332 - DNA, 2598 bp, Artificial Sequence
  derived and/or modified sequence
atgttctcgatgcgcatcgtctgcctggtgctaagtgtcgtggggacagcctggacagcagactccggagaaggagatttcctcgccgaaggcggaggcgtgcgaggcccacgggtggtggaaagacaccagagcgcttgtaaagattcagattggccgttctgctcagatgaggactggaattataagtgtccatccggctgccgaatgaagggcctgatcgatgaggtgaatcaggattttaccaacaggatcaacaagctgaagaatagccttttcgagtatcagaaaaacaataaggattcacatagtctcaccaccaacattatggagattctacgcggcgatttctcatccgccaataatcgggataacacatataatcgcgtgtctgaagacttgcgatcacggattgaagtgctgaaacgcaaagtaatcgaaaaggtgcagcacatacagctcctgcagaagaacgttcgggcccagctggtcgatatgaagaggctcgaggtggatatcgatatcaaaatccgaagctgcagaggctcttgctcacgagccctcgcccgggaggtggatctcaaggactatgaagaccagcaaaagcagcttgaacaggtgatcgccaaagacctgcttcctagtcgcgatcgtcagcacctacctcttatcaaaatgaagcctgtgcctgacctggtcccgggcaacttcaaaagtcaactccagaaggtcccccccgagtggaaggccttgacggacatgccgcagatgagaatggaactcgaaaggccgggtggcaacgaaatcacccgtggtggcagcacatcatatggcacagggtctgagaccgagtcaccccgaaacccgtcatctgcaggatcatggaactccggctcaagcggacctggttccacggggaacaggaatccaggttcaagtggtactggcgggactgctacttggaaaccgggatcatcaggccctggcagcacaggctcttggaactccggttcttccgggacgggctccacaggcaaccagaaccccggctccccaaggcccggcagcacgggcacttggaacccgggcagctccgaaaggggaagtgccgggcactggacatccgaaagttcagtgtctggatccacagggcagtggcatagtgagtctgggagctttcggcctgactcccccggctcaggtaacgcccgtccaaataatcccgactggggaaccttcgaagaagttagcggaaacgtcagccctggcactcggcgagagtaccacactgaaaagttggtgactagcaagggcgacaaagagctgcggacgggcaaggaaaaggtgacaagtgggagcacaactactactcggcgctcctgtagtaagactgtcacgaaaactgtgattggccccgatggacataaggaagtgaccaaagaggtggtcacttcagaggacggctctgactgcccagaggcaatggacttgggcaccctctccggcatcggtacccttgatgggtttcgacaccgccatccggatgaggctgccttttttgacactgcgtcaactggcaaaaccttcccaggctttttcagccctatgctcggcgagttcgtcagtgaaaccgagtcgcgagggtccgagtccggaattttcacaaatactaaagaatcaagcagccatcacccaggcatcgccgaattccccagcaggggcaagtcgtcttcttactccaaacaattcacatcttccacctcctacaaccgcggcgactccacattcgaatccaagagctataagatggccgatgaggcagggagcgaggcagatcatgaagggacacacagcacgaaaagaggacacgcgaaatcaagacctgttcgggactgtgatgacgtcctgcagactcacccatccggcacccagtctggcatcttcaatattaaactgccggggtcgagcaagattttctccgtttattgcgatcaagagacaagcctgggcggatggcttctgattcagcagagaatggatggctccttaaatttcaacaggacatggcaggactacaaacgggggtttggatcactgaacgacgagggagagggagagttctggcttggcaatgactacctgcatttactgacccagcgaggttccgtcctgagggttgagcttgaagactgggcaggtaacgaagcctatgccgaatatcactttcgggtgggctctgaagccgaagggtatgcattacaggtttcatcttatgagggcaccgccggagatgctctcatagaggggtccgtcgaggagggtgcagagtacactagtcataacaacatgcagttcagcactttcgaccgtgacgcagaccaatgggaggagaattgcgcagaggtctatggagggggctggtggtataacaattgccaggctgcgaatctcaacggcatctactatcctggggggtcctacgaccccaggaataacagcccctatgaaatagaaaatggtgttgtgtgggtgtccttcaggggcgcagactactcgctgcgagctgtccgaatgaaaattcgacccctcgtaacgcaa

SEQ ID NO: 10333 - DNA, 2598 bp, Artificial Sequence
  derived and/or modified sequence
atgttctctatgcggattgtgtgtctcgtcttatccgtcgtgggtacagcttggacagctgattctggtgaaggagatttcctggccgagggcgggggcgttagaggtccacgggttgtcgagcggcaccaatcagcttgtaaagactctgactggccattctgttcagatgaggattggaattacaaatgtcccagcgggtgtcgcatgaagggtctgattgatgaagttaaccaggactttaccaaccggattaacaagctcaagaattctctgtttgagtaccagaaaaacaataaagactctcactcactcacgactaacatcatggagattctgagaggtgacttcagctcagctaacaaccgggataacacctataacagagtgagtgaagatctgcgaagcaggatcgaggtgctcaagcggaaggtgattgaaaaggttcagcacattcaactgctacagaaaaatgtacgcgctcagctggtggacatgaaacgcctcgaggtggacattgatatcaagatccgatcttgcagggggtcctgctcccgggcgttagccagggaagtggatcttaaagactacgaagatcagcaaaaacaactcgaacaagtcatcgctaaggacctgcttccatctagggatagacagcacctccctcttatcaagatgaagccggtgcccgatctagtacctggtaatttcaagagccagcttcaaaaagttcctcctgagtggaaagctcttacagatatgccacaaatgagaatggaactggagcggccaggaggtaacgaaatcacacggggagggagtacatcttatggtaccggcagtgagactgaatcacctcgtaacccgagcagcgcaggttcctggaattcagggtctagtggccccgggagcacggggaacaggaatccagggagtagcggaacaggtgggacagccacctggaagcccgggagctccgggccaggtagcaccgggagttggaacagtgggtcttctggcaccggcagtactggcaatcaaaatccaggaagtccaaggcccggcagtaccggcacgtggaaccctggctctagcgagagaggcagcgcaggacactggacatcagaatcttcagtttccggatctactggacagtggcattccgagagtggcagcttcaggcccgacagcccagggagtggcaatgcaaggcctaacaatcctgactggggcacttttgaagaggtttcaggaaacgtgtcccccggcacccggcgcgaatatcacactgaaaagctcgtgactagtaaaggtgataaggagctcaggacaggaaaagaaaaagtgacgtcaggctccactactacaacgagaagaagctgctctaaaacagtaaccaagactgtgattggcccggatgggcataaggaggtgaccaaggaggtcgtcacgtctgaagacggctcagattgccctgaggcaatggatttaggtacactgtccgggataggcacacttgacggatttcgccatcgacatcctgacgaggctgcattttttgataccgcaagcacggggaaaaccttcccaggattcttctctcctatgctcggcgagtttgtctcagaaacagaatctcgaggttcagagagcggcatctttactaacacgaaagagtcatctagccatcatcctggcatagcagagttcccaagcagaggcaagtcctcctcgtactccaagcagtttacctcatccacctcctataatcgtggcgactccacattcgagtccaaatcttacaagatggcagacgaggcaggatctgaagccgaccacgagggcacacacagtactaagagaggacacgctaaatcgcgccctgtgagagattgcgacgatgtgctgcaaacgcaccctagcggaacacagtcagggatttttaacatcaaactcccaggctcaagtaagatttttagcgtgtactgtgaccaggaaacttcccttggcgggtggctgctaattcagcagcgcatggatggcagcctcaatttcaaccgcacttggcaggattataagagaggcttcggatccctcaacgatgagggcgaaggggaattttggctcgggaacgattatcttcatctgctgacccagagaggttcggtgctgagagttgaattggaggattgggctgggaacgaagcctatgcagaatatcacttccgggtgggctccgaagccgaaggatacgcgcttcaggtgtcttcatatgaaggcaccgcgggtgacgccctgattgaggggtccgtggaggaaggggcagaatatacatctcataacaacatgcagttttccacctttgacagagatgccgatcaatgggaggagaattgtgcagaggtctacgggggcggttggtggtacaataactgccaggcggccaacctgaacgggatttactatccaggaggctcatacgaccccagaaacaactccccgtacgagatcgaaaatggagtcgtgtgggtttctttcagaggagctgactattcgcttcgggctgtgcgcatgaagatccggcctttagttacacag

SEQ ID NO: 10334 - DNA, 2598 bp, Artificial Sequence
  derived and/or modified sequence
atgtttagcatgagaatcgtgtgtcttgtactgtctgtggtcggaaccgcttggaccgccgactcgggagaaggcgatttccttgctgaaggcggcggtgttaggggacccagagtggttgagagacaccaaagtgcctgcaaagacagcgattggcccttctgctcggacgaagactggaactataaatgtccaagtggctgtaggatgaaaggacttattgacgaggtgaatcaggacttcacgaaccggatcaataaactcaaaaactctctctttgagtaccaaaagaacaacaaggattcccactcgctgacaacaaatattatggaaattctgagaggcgatttttctagtgcgaataacagagataacacctataatagagtgtcggaagatctgcgctccagaatagaggtgttgaagagaaaggtgatcgagaaggtccagcacatacaacttttgcagaagaacgttcgagcgcagctggtcgacatgaagaggctggaggttgacatcgatattaaaatacgctcatgtcgtggaagctgctctcgcgctctagcacgtgaggtggatctcaaggactacgaagatcagcagaaacaactggagcaggtgattgctaaagacttgctgccctctcgcgatcgtcagcatctcccccttataaagatgaaacctgtccccgacctagtgccaggtaactttaagtctcagctccagaaggtgcctcctgagtggaaagcactaacagatatgcctcaaatgcggatggaattggagcggcccgggggtaacgaaattacccgcggcggttcaacgtcctatggcaccgggagcgagactgagagtcctcgaaacccatccagcgccgggagctggaatagcgggagctctggtcccgggtccaccggaaacaggaatcccgggagcagcggcacaggtggcaccgctacctggaagccagggtccagtgggcctggttccaccgggtcctggaacagcggcagtagcggtacagggtccacgggcaatcaaaacccagggtcacctcggccaggctccactggcacctggaacccagggagcagtgaacggggatccgccggtcactggacatctgaaagtagcgtaagcggctctactgggcagtggcactcagagagtggatccttcagacctgactctcccggaagcggtaatgcccggccaaataaccccgactgggggacctttgaggaggtcagcggcaacgtcagtccgggaactaggcgggaataccacaccgagaaactggtgacttccaagggcgataaggagcttagaactgggaaagagaaagtgacaagcggctccacaaccactacaaggcggtcctgttcgaagaccgtcaccaaaactgttattggtcccgatggacacaaagaggtgaccaaggaagtggtgacttcagaggatgggagtgattgtccagaagctatggatctcggtacgttgtctgggatcggaacactagatggttttagacacagacacccagacgaggccgccttcttcgatacggccagtacaggcaagacctttccaggcttttttagccctatgttgggcgagttcgtctcggagaccgagtctcgcgggtccgagtcaggtatttttactaacaccaaggaaagctccagtcaccatcctggtatcgctgaatttccttcgagaggtaagtccagcagttactctaagcagtttactagcagcacctcatataacaggggcgactctaccttcgaatcaaagtcttacaagatggccgatgaagcaggatccgaagcagatcacgagggtacccactctaccaagagaggacatgccaaaagtcgccccgtgagagactgtgacgatgtgctacaaacacatccttccggaactcagtccgggattttcaatatcaagctgccaggcagcagcaagatattttccgtatattgtgatcaggagacaagcctgggcggctggctgcttattcaacaacggatggacggcagcctgaacttcaaccgaacatggcaggactataaacgtggattcggttccctgaacgatgagggtgagggagagttctggctcgggaacgactacttgcacctccttacccagaggggaagcgtgttaagagtggaactagaggactgggccgggaacgaagcttacgccgagtaccacttccgggtgggtagcgaggccgaggggtacgccctgcaggtgtcctcttatgagggtaccgcaggcgatgcactcattgagggctcggttgaagagggggcagagtacacgagccataacaacatgcagtttagcacatttgacagagatgccgaccaatgggaagaaaactgcgcagaagtgtacggtgggggttggtggtacaacaactgccaggcagccaacctgaacggtatttattatcccgggggcagctatgacccccgcaataattctccttatgaaattgagaacggcgtggtctgggtcagcttccggggcgccgactactccctgagagccgtccgaatgaagatacgccctctcgtcacccag

SEQ ID NO: 10335 - DNA, 2598 bp, Artificial Sequence
  derived and/or modified sequence
atgttttcgatgcgaattgtttgtctggtgctttcagtggtcggtactgcatggaccgcagactcgggagaaggagatttccttgctgaaggaggaggagtgcggggaccgagagtggtggaacgtcatcaatcggcatgtaaggactcagattggcccttttgttcggacgaggattggaattacaagtgtccatcgggatgccggatgaaaggactgattgatgaagtgaatcaagattttactaaccgcattaacaagctgaagaatagcttgtttgaataccagaagaacaataaggactcgcattcgcttactactaatatcatggaaattctgagaggggatttttcaagcgcaaacaacagagataacacctataacagagtgtcagaagatctccggtcgcgcatcgaggtcctgaagcgtaaggtcatcgaaaaggtccaacatattcagcttctgcagaaaaacgtccgcgcacagcttgtcgatatgaagaggctcgaggtagacatcgatatcaaaatccgttcgtgtagaggctcgtgctccagagccctggctagagaggtggatcttaaggattatgaagatcaacaaaagcagcttgagcaggtgattgcaaaggacctgctcccatctcgggatcggcagcacctgccactcattaagatgaagcccgttccagatcttgtgccagggaatttcaagtcgcagcttcagaaagtgccccctgaatggaaagcattgactgatatgcctcagatgcggatggagctggaaagaccgggcgggaatgagatcacccgaggtggatcgacttcgtacggtaccggttccgaaacggagtctcctagaaatccatcgagcgcgggatcctggaacagcggtagctcgggaccaggaagcactggaaaccgcaatccaggttcttcgggtaccggtggcaccgcaacttggaaacccgggtcatcggggcctgggtcgaccggtagctggaattcaggctcttccggcactgggagcaccggcaaccagaacccgggatctccccggcctggatcgactggtacctggaaccccggatcgtcagagcgcggatcagcaggtcactggacttcagagtcctccgtgtcgggctccaccgggcagtggcacagcgagtccggttcgttccgcccagatagcccaggtagcggaaacgcacgcccgaataaccccgattggggaactttcgaggaggtgtccggtaacgtgtccccaggaaccagaagggaatatcataccgaaaaactggttacttcgaagggagataaggaacttcgcactggaaaggagaaggtgacgtccggcagtaccaccactactaggaggagctgttcgaaaaccgtcacgaaaactgtcataggtccagatggacacaaggaagtgaccaaagaggtggtgaccagcgaggacggatcggattgtcccgaggcaatggatctgggaaccctgagcggaataggtaccctcgacggatttcgtcaccggcatccagacgaagcggcgttctttgatactgcgtcaaccggcaaaacttttcctggcttctttagccctatgcttggagaatttgtctccgaaaccgagtcacggggttccgagtcgggaatcttcacgaataccaaggagtcatcctcgcatcatcccgggatcgcagaattccctagccgggggaaatcgtcctcctattccaagcaatttaccagctccacgtcatacaacaggggcgattcgaccttcgagtccaagtcctacaagatggcagatgaagcaggaagcgaggcggatcacgaaggtacccatagcacgaagcggggacatgcaaagtcgaggcccgtgcgggattgcgacgatgtgcttcaaactcacccttcaggtactcagtccggcatctttaacatcaaactgcctggatcctcgaaaatctttagcgtctattgtgaccaagaaacctcactgggtgggtggctgcttattcagcaaagaatggatggatccctgaactttaaccggacctggcaggattacaaacgcggtttcggatcactgaatgatgaaggagagggggagttttggcttggaaacgattaccttcacctgctgacccaaagaggatccgtcttgcgagtggaacttgaagattgggcaggcaacgaagcatacgcagaataccatttccgtgtgggatccgaagccgaaggttacgctcttcaagtctcgagctacgagggcactgcaggggacgctctcattgagggatcggtcgaggaaggggcagaatacacgtcccacaataacatgcagttctcgacgttcgatagagacgccgatcaatgggaagagaattgtgcagaggtgtacggaggcgggtggtggtacaacaattgtcaagcagcgaacctcaatggaatatactacccaggtggatcgtacgacccaagaaacaactcaccatacgagattgagaacggtgtcgtctgggtcagttttcgcggtgcagattacagcctccgggcagtgagaatgaaaatacgaccgctggtgactcaa

SEQ ID NO: 10336 - DNA, 2598 bp, Artificial Sequence
  derived and/or modified sequence
atgttcagcatgaggattgtgtgtctagtcttgtcagtcgttgggacagcttggactgcagactctggagaaggtgatttcttagccgaaggaggtggagttcggggccctcgtgtggttgagaggcaccaatccgcttgcaaggacagtgactggccattctgctctgacgaggactggaattataaatgtccatccggctgccgtatgaagggactcatcgatgaagtgaaccaagatttcaccaaccgcattaacaagttgaagaatagtctgtttgagtatcaaaagaacaacaaggacagccactctttgacaacaaatataatggagatccttaggggcgatttttctagcgcgaataatcgggataatacctataacagagtctccgaagaccttcgcagcaggattgaggtgctgaagcgcaaggtaatcgagaaggtacagcacatacaactgttgcagaagaacgtcagggctcaacttgtcgacatgaaacgcctggaagtggacatcgatattaagattaggtcttgtagaggctcctgttcacgggcattagcacgggaggtcgacctgaaagattacgaggaccagcagaagcagctggagcaggtcatagccaaggacttactccccagtagggatagacagcatcttccactaataaagatgaagcccgttcctgacttggtgccaggcaatttcaagtcacagctccagaaagtccctcctgagtggaaagccctgacagatatgccacagatgcggatggagctggagagacccgggggaaacgagatcactaggggcgggagcacttcctatgggaccgggtcagaaactgaaagtcctaggaacccatcgtctgccggcagctggaattccggctcttctgggccggggagcacaggaaatcggaaccccggaagtagcggcacaggaggaacggcaacatggaagcccgggtctagtgggcctggttccacagggtcctggaattccggttcgagcggtaccggctccaccggaaatcaaaatcccgggtcccccaggcccggatctacaggaacatggaaccctggtagttccgagagaggatctgccggccactggacgtcagagtctagcgtgagcgggagcactggacagtggcacagtgaaagcggctcgtttcgccccgactcacccggaagcggaaacgcacggcccaacaaccccgattggggaacatttgaggaagtgagcggcaacgtgtcccccggcactcggcgcgaataccatacggagaagttggtgacttctaagggtgacaaggagcttagaacggggaaagagaaagtgacttcgggcagtacgacaaccacccgcaggtcttgcagcaaaacggtgacaaaaaccgtgatcggccccgatggacacaaagaggttacaaaggaggtggtcacaagcgaggacggctccgattgcccagaagccatggacctcggcacattgtctggcattggaactctcgatggattccgtcacagacaccctgacgaggccgccttctttgacaccgcttccaccggaaagacatttcccgggttcttcagtccgatgctcggtgaatttgtgtcggaaaccgaatcccgcggatctgagagcggaattttcacaaacaccaaggagtcctcttcccatcacccaggaatcgccgagtttcctagccgcgggaagtccagtagttacagtaagcagtttacctccagtacgtcttacaaccgcggggactccactttcgaatcaaaatcttacaagatggctgatgaggcggggagtgaagccgaccacgaggggacacactccacaaaaaggggacatgctaaatcaagaccggttagagactgcgacgatgtactgcagacacatccctccggcactcagagcggcatattcaacattaagctgcctggctcgtccaaaatattctctgtctattgtgatcaggagacgtcactgggcggatggctcttgattcagcagcggatggatggctcactgaactttaaccgaacttggcaggactataaaaggggattcggtagcttgaacgacgagggagaaggggagttctggctcgggaacgactatctgcacttgttgacgcagaggggctctgtactcagagtcgaactggaggattgggcggggaacgaggcatacgccgagtaccacttcagagtgggttccgaggccgaagggtacgccctgcaggtttctagctacgagggtacagcgggcgacgcgctcatcgaaggttccgtggaagagggggctgagtatactagtcacaataatatgcagttctctacattcgacagagacgcggatcaatgggaggaaaattgcgccgaggtatacggcggaggttggtggtacaacaactgtcaagctgccaacctgaacgggatttactacccaggcggctcttacgatccccgcaacaactccccatacgagattgaaaacggggtcgtgtgggtgagctttcggggagctgactactctttgagggcagtccgcatgaagatacggcctctggtgacccag

SEQ ID NO: 10337 - DNA, 2598 bp, Artificial Sequence
  derived and/or modified sequence
atgttctcaatgagaatcgtatgcctggtcctttccgttgttggcaccgcctggactgcagactcaggggagggcgacttcctggccgagggaggcggcgtgcgtggtccccgcgtggtggaacgccaccagtctgcatgcaaggattctgattggccattctgttccgatgaggactggaactacaagtgtccttccggctgtcgtatgaagggactgatcgatgaggttaaccaggatttcacgaaccgcatcaacaagttgaagaattcacttttcgaataccagaagaataacaaagactcccactcccttactactaatattatggagattttgcgcggtgatttcagctccgcaaataatagggacaacacgtataaccgggtttctgaggatctgcggtcccgcatcgaggtcctcaagcgtaaggtcatcgagaaagtgcaacacatccagctgttgcagaagaatgtcagagcgcagttggtcgatatgaagcgtctcgaggttgatattgatatcaagattcggagctgccgcggcagctgctcacgcgctctggcacgtgaggtggacttgaaagattacgaggaccagcaaaagcagctcgagcaggtcattgctaaggaccttttaccttctcgggacaggcagcatctccccctgattaagatgaagcccgtcccggaccttgtgcccggcaactttaagtcccagctgcaaaaggtcccccccgagtggaaggccctgacggacatgccgcagatgcgtatggagctggagcgtcccggcggtaacgaaataacccgcggtggtagcacctcctacggaactggatcggaaacagagtcaccccgcaaccccagtagcgccggctcctggaactcgggcagttctggacccggtagcactggtaacagaaaccccggatcctcgggaactggaggcaccgctacgtggaagcccggatcctccggaccgggctccaccggctcctggaactccggttcttcgggcaccggcagcactggaaaccagaatcctggcagtcctcgccccggcagcaccggtacctggaatcccggaagctccgagcggggcagcgccggacattggacatctgagagcagcgtctctggctccacgggacaatggcacagcgagtcaggttcctttcgccccgattcccccggttcgggcaatgccagacctaataatcccgattggggtacttttgaggaggtttccggtaacgttagccccggcacacggcgggagtatcacacagagaagttggttacgagcaagggcgacaaggagcttcgtaccggcaaggagaaggtgacctccggtagtaccaccaccacccgtcgatcctgttcgaaaaccgtcaccaaaaccgtcattggaccggacggacacaaggaggttaccaaggaggttgtgacgagtgaggacggctctgactgtcccgaggccatggacctgggtaccttatctggtattgggacgctggatggatttcggcataggcaccctgacgaggccgccttcttcgacacggcttcaacgggtaagacgttccccggcttctttagcccgatgttgggcgaatttgtttctgagaccgagtctcgtgggagcgagtccgggattttcacaaacaccaaggagtcctcttcacatcaccccggcatcgctgagtttccgagccgcggcaaaagcagctcctattcaaagcagttcacctcttccacgtcctacaatcgtggtgacagcacttttgagtcgaagagctacaagatggccgacgaggccgggtcggaggccgaccacgagggcacccactccactaaacgcgggcacgcgaagtcccggcccgtgagagactgtgatgacgtccttcaaacccatcccagcggaactcagagcggaatttttaacatcaagctgccaggatcatccaagatcttttctgtgtactgcgatcaggagacgtctctcggcggctggctgttgatccagcagcgtatggacggatccctcaacttcaaccgcacctggcaggattataagcggggttttgggagccttaacgacgagggcgagggggaattctggctcggtaatgactatctacatctcctcacccagaggggttctgtactacgcgtcgaactcgaggattgggccggcaacgaggcctatgctgaataccacttccgtgtgggttccgaggccgagggctacgcccttcaggtttcctcctacgaggggaccgccggcgacgccttaattgagggttcggttgaggagggcgccgagtatacaagccacaacaacatgcagtttagtaccttcgatcgcgatgctgaccagtgggaggaaaactgcgccgaggtctacgggggcggctggtggtacaataactgccaggccgctaaccttaacggtatctactaccctggtggctcttatgaccctcggaataacagtccgtacgaaatcgaaaatggagtggtctgggtctcgttccgtggcgctgactactccttgcgtgcagtccggatgaaaatcagaccactggtcacgcag

SEQ ID NO: 10338 - DNA, 2598 bp, Artificial Sequence
  derived and/or modified sequence
atgttcagcatgcgcattgtgtgcctggttctctccgtggtagggaccgcctggacagctgatagcggagaaggagatttcttagctgaaggtgggggtgtacgaggcccaagagtggttgagaggcaccagtctgcatgcaaggattccgactggccattttgttctgatgaggattggaactataagtgcccaagcggatgccggatgaaggggctcatcgacgaggtgaaccaagattttacaaacagaatcaacaagctaaaaaatagtctgttcgaatatcagaagaataacaaagacagtcactccctgaccacaaacatcatggaaatactccggggagatttttcaagtgctaataacagggacaacacttataatcgtgtaagtgaggatctaaggtctcgaattgaggtgctaaaaaggaaggtgatcgaaaaagtccagcacattcagcttttacagaaaaatgtgcgggcccaactcgtagatatgaagagactcgaggtggacatcgatatcaagatccgttcctgccggggctcctgcagcagggcattggctcgcgaagtggatctgaaggattacgaagaccagcagaaacagctcgagcaggtaatcgctaaagacttgctgccatctcgggaccggcagcacttgcccctgattaagatgaagccagtgcccgacctggtgccgggtaattttaaatcgcagctccagaaagtacccccagagtggaaagctctgacagatatgccacaaatgagaatggaacttgaacggcccggcggcaacgaaatcacccgaggcggtagtacaagctacggtacgggatccgaaacagagtctcctagaaatccaagctcagcaggctcctggaacagtggctcatcaggaccaggctcaactggcaaccggaatccgggtagtagcggcaccgggggcacagccacctggaaaccaggcagctccggaccaggtagcacaggctcatggaatagcggttcttctggaactggctccacaggaaaccagaaccccggcagccctaggccgggcagcacgggaacctggaatccaggaagctcagaacgaggtagcgctgggcactggacctccgaaagctcagtctcaggctcaacaggccagtggcactctgagtctggatcatttcggcccgacagccctgggtcaggcaacgccagaccaaataaccctgactggggtaccttcgaggaagtctcaggcaatgtctcaccaggcacaagacgtgagtaccacacagaaaaactggtgacctccaaaggagacaaagagctccggaccggcaaggagaaggtcacctccggttcaaccactaccactcggagaagttgctcaaaaaccgtgactaaaaccgtgatcgggccagacggccataaagaggttacaaaggaagtagtgacaagcgaagacggatccgattgtcctgaggctatggacttaggcaccctgtcaggaattgggaccctggacgggtttcgacataggcatccagatgaggccgctttttttgatactgccagcaccgggaagacctttcctggcttttttagtcccatgctcggcgaatttgtgagcgagacagaaagcagaggatcagaaagtggcatatttacaaataccaaggaatcatcctcgcaccaccctggcattgcagaatttccatctcgcggcaagtcctcctcttatagtaagcaattcacttcatcaaccagctacaaccggggagattctacattcgagagcaaatcatataaaatggccgatgaggcaggcagtgaagctgatcacgagggaacccactccaccaaacgtgggcatgccaaatctcggccagtacgtgactgcgacgacgtcctccaaacacacccgtccggaactcagagcggcatttttaacatcaagttgccagggtcgagcaagattttcagcgtctattgcgatcaggaaacctccctgggaggctggttgctcattcagcaacgcatggatggttccctcaatttcaaccgaacatggcaggactataagcgaggttttggttctttgaatgacgagggggaaggcgaattctggctgggtaatgactatctgcacctgctcacgcagagaggaagcgtgcttagagtggaactggaggattgggctggcaacgaggcctacgcagagtaccactttcgcgtcgggtctgaggcagaggggtatgctctccaagtaagctcctatgaaggaacggcgggcgatgccctgatcgagggctccgtggaggagggcgctgagtatacaagtcacaacaacatgcagtttagtacctttgatcgcgacgctgaccaatgggaagagaattgtgccgaagtttacggcggaggatggtggtataataattgtcaggcagctaatctgaacggcatctactaccccggggggtcgtatgacccccggaataattcaccatacgagatcgaaaatggtgttgtgtgggtgtctttccgcggcgcagactacagtctgcgggccgtaagaatgaagatacgtcccctggtgacccag

SEQ ID NO: 10339 - DNA, 2598 bp, Artificial Sequence
  derived and/or modified sequence
atgttttctatgagaatcgtgtgtcttgtcctgagcgtggtgggtacagcgtggacagcagattcaggggagggcgacttcctggccgagggtggaggagtacgagggccacgagtcgttgagagacatcagtctgcttgcaaggatagtgactggccattctgctctgatgaagattggaattataagtgcccctcaggatgcaggatgaaaggattgatcgacgaagtgaaccaagatttcactaaccgcattaacaagcttaaaaacagcctgtttgaataccagaaaaacaacaaggactcccacagtctcacaaccaatattatggagatcctgcgcggtgacttctcatctgctaataaccgtgacaacacttacaacagagtgtccgaagatctcagatctaggattgaggtactgaagcgaaaggttatagagaaggtgcagcacatccagctgctacaaaaaaatgtcagggctcagctggttgatatgaaaagactcgaggtggacatcgatatcaagataagaagttgtcgggggtcttgttcacgggctctggcccgagaagtggatctcaaggattatgaggatcagcagaagcagctggaacaagtgattgccaaggatcttctcccttcacgggacagacaacatttaccactcattaaaatgaagcctgtgcctgatttggtacccggaaacttcaagtcacaactccagaaggtccctcccgaatggaaagcactcacagacatgccccagatgagaatggagctggaaagaccgggaggtaatgaaataaccaggggtgggagcacaagctatggcacgggttccgaaacggagagccccagaaatccgtcaagcgccggctcctggaactccgggtcatcggggccaggaagtaccgggaacaggaaccctgggagttctggcaccggaggaactgctacatggaaaccaggcagttcgggaccaggttcgaccggaagttggaactctggtagcagtggtaccggttctacaggtaaccagaatcctggatctcccaggcctggatccacaggaacttggaatcccggctccagcgagcgcggatccgctggacattggacaagtgaatcctcggtatctggcagcacggggcaatggcactcagagagcgggtctttccggccagactcccccgggtcggggaacgccagacctaacaatcccgactggggcaccttcgaggaggtgagcgggaatgtgtctcccgggacaagacgagagtatcacactgaaaaacttgtgacttccaagggtgataaggaactgcgcacagggaaggaaaaagttacctcaggctcaaccacaactacgcgtcgcagctgttctaagaccgtcaccaagaccgtcatcggaccagatgggcacaaagaggtgaccaaggaggtggtgacctccgaggatgggtccgactgccctgaagccatggacttgggaaccctatcaggtatcgggacattagatggcttcaggcatcgccaccccgatgaggccgccttttttgacactgcttccacgggaaagacgttcccaggttttttctctcctatgcttggtgagtttgtcagcgaaacggaatctcgaggctctgagtccggtattttcacaaataccaaagagtcttcctcacaccacccaggcatcgctgagtttccatcacggggtaaatcatctagctactccaaacaatttacgtcctcgacatcatataaccgtggggatagcacatttgaatccaagtcttacaagatggctgacgaggccggatctgaagccgatcacgaagggactcattccacgaagaggggccacgcgaagtccagaccggttcgcgactgtgatgatgtgctacagacgcatccatccggaacacagagcggcattttcaatatcaaactgcccgggtcctccaagatattctctgtctactgcgaccaggaaacgagcctgggcggctggctgctgatacagcaaaggatggacggctcacttaatttcaatcgcacatggcaagactacaagagaggctttggttcactcaacgacgagggggagggcgagttttggctgggaaatgactacctgcacctgttaacccagcgcggcagtgttctcagggttgagctggaagattgggcgggcaacgaggcatacgccgagtaccactttcgcgtgggatctgaggcagaagggtatgctttgcaggtctcatcttatgaagggactgcaggcgacgccctgatcgagggttccgtggaggagggagctgagtacactagccataataacatgcagtttagcacctttgacagagacgccgatcagtgggaagaaaactgtgctgaagtttacgggggcgggtggtggtataacaattgccaagctgcaaacctcaatggcatctactaccctggcggaagctatgatccgcgcaataattccccctacgaaatagagaatggtgttgtttgggtcagctttcgcggagctgattacagtctgcgggctgtaaggatgaagatcaggcctctggtaacacag

SEQ ID NO: 10340 - DNA, 2598 bp, Artificial Sequence
  derived and/or modified sequence
atgttttccatgaggatcgtgtgtctggtgctgtccgtcgtcggcaccgcttggacagccgactccggagagggggacttccttgcagaggggggcggcgttagaggcccaagagtagtggagcggcatcaatcagcctgtaaggactccgattggcctttttgttccgatgaggactggaactacaaatgcccctccggttgtagaatgaaggggctgattgatgaggtaaaccaggattttacaaaccggataaataaactcaagaactcattgtttgaataccaaaagaacaacaaagactcacattccctcactacgaatatcatggagatccttcgcggtgatttcagctcagcaaacaacagggacaatacctacaaccgcgtgagcgaagacctcaggagccgaatagaggtgctgaaaaggaaggtgattgagaaggtacaacacatccagcttctccagaaaaacgtcagagctcagctggtggacatgaagcgacttgaggtggacattgacatcaaaattcggtcatgccgcggaagctgttcaagggccctggcgagggaggtggacctgaaggactacgaggaccagcagaaacagctggagcaagtgattgctaaagatctgcttccaagccgggaccgccagcatttgcctttgatcaaaatgaagccggtgcctgatctggtgcccgggaactttaagagccagcttcaaaaggtacctccagaatggaaagctctgacagacatgcctcaaatgcggatggagctggagagacctgggggaaatgaaatcacacgcggcggatctacctcctacgggactggctctgaaacagagtcccctcgcaaccccagttccgctgggagttggaacagtggctcctctgggccaggttccacagggaaccgaaaccccggctccagtgggacaggcggaaccgccacctggaagcccgggagttcaggcccggggtctacagggtcctggaactcagggagtagcgggacaggtagcaccggtaaccagaatcccggcagcccccggccggggagtacaggaacttggaacccgggctccagtgagcgaggaagtgcaggacattggacctctgaatcttccgtgagcggatctactggacagtggcacagtgaatctggctctttccggccggattctccgggttccggaaatgctaggcccaacaatccggactggggcacatttgaggaggtctcaggcaatgtctcccccgggactcgccgagagtatcatactgagaagcttgtgaccagcaagggggataaagagctccgcacaggcaaggaaaaggtcacatcaggaagcaccactaccactcgaaggtcttgctccaagactgtaaccaagaccgtcatcgggcctgacggccacaaggaggtcacaaaggaagttgtcacctccgaagatggttccgactgcccagaggcgatggacctcggcacgctgagcgggattgggaccctcgatggtttcaggcacaggcatccagatgaggccgcgttcttcgatactgcaagtaccgggaagacattccctggcttcttctcacctatgctgggggagtttgtttccgaaacagaaagtcgcggatctgaaagcgggatctttaccaacacaaaagaatcttctagccaccatcccggaatcgctgagttcccatcaagagggaagtcttcatcttactctaaacaattcacctctagcacctcttacaataggggggatagtaccttcgagtcaaagagctataagatggcagacgaggccggtagcgaggccgatcacgaaggcacacattccacgaagcggggacatgccaagtccagacccgtgcgggactgcgatgacgtgcttcagacacatcccagtggaacacagtctggtatctttaacataaagttgcctggctccagcaaaatattctctgtctattgcgaccaagagacatctctgggcgggtggttgttgatccaacagcgcatggatggcagtctcaatttcaacaggacctggcaggattataaacggggattcggctctctcaacgacgaaggcgagggagaattctggttggggaacgactatctccacctcttgacccagcgaggcagcgtcctgcgagtcgagctggaagactgggctggtaacgaggcatacgccgaataccacttccgagtcggaagtgaggcagaggggtacgcccttcaagtcagttcatacgaggggaccgctggggatgcgctcatcgagggctctgtggaggaaggcgcagagtatacctctcacaacaatatgcagttttccacatttgatcgggacgctgaccagtgggaggaaaattgcgctgaggtgtatggcggcggatggtggtataataactgccaagcagcgaacttgaatggaatctactatccgggaggctcatatgacccaaggaataattccccctacgagattgagaacggggttgtctgggtgagtttcagaggggctgattactccctgcgcgccgtccgcatgaaaatccgcccactcgtgacccag

SEQ ID NO: 10341 - DNA, 2598 bp, Artificial Sequence
  derived and/or modified sequence
atgtttagcatgaggatcgtgtgtctggtcctgtcagtcgtgggcaccgcctggaccgccgactctggagaaggcgactttctggccgagggcggaggcgtccgcgggccaagagtcgttgaaaggcaccagagcgcctgtaaagacagcgattggcccttctgcagcgacgaagactggaattataagtgtcctagtggctgtagaatgaaggggctgatcgacgaagtaaaccaagacttcaccaatcgaattaacaaattgaaaaactctcttttcgaataccagaaaaataataaggattcgcactcgttaaccacaaatataatggagattctgaggggagacttcagctcagccaataaccgagataacacatacaatcgcgtaagtgaagatttacggagtcgaatcgaggtgcttaagaggaaggtgattgaaaaggtgcagcacattcagttgctccagaagaatgtgcgtgctcagttggtagatatgaaacgcctggaggttgacatcgacatcaaaatccgaagctgtaggggctcatgtagcagggccctagcccgagaggtggatctgaaggattatgaggaccagcaaaagcagctggaacaagtgattgctaaggacttacttcccagtcgggaccgacagcacctgcccctgatcaagatgaagccggttcccgacctcgtgcctggcaacttcaaatctcagttgcagaaagtgcctccagaatggaaggcgctaacagacatgccgcagatgagaatggagctagaacggcccggggggaatgagatcactagagggggatcaaccagctacggcactggtagcgagaccgagagccctcggaacccctcctctgctggatcctggaacagcggaagctcaggccccggatcaacagggaatcgcaaccccgggtcctcaggaacgggcggcactgccacatggaaacccggaagttccggacctgggagcacgggatcttggaactccggctcttctggtacgggctctacgggaaatcaaaacccggggtcccccagaccggggagcacgggtacctggaatcctggcagcagcgaacgtggctccgctggccactggacctcggaatcctccgtaagtggctccacaggacaatggcacagtgagtctggctcttttagacccgactcgccaggttctgggaatgcgaggcctaacaaccccgactggggcacctttgaagaggtcagtgggaatgtgtctcccggcacgcgtcgcgaatatcatacagaaaagctcgtgacatctaagggagacaaggaactccgaactggaaaagagaaggtgacttctgggtccaccactacaacgagaagaagctgctcaaaaacagttaccaagactgtaatcggccccgatggtcataaggaggttacaaaggaggtcgtgacttccgaagatggatcggattgccctgaggcaatggatctgggcacgttgtcagggatcggtacattagatggtttccggcaccggcacccagatgaggccgccttcttcgatactgcatctacggggaaaacattcccagggttcttcagtcccatgctcggggagttcgttagtgagactgagtcccggggatctgaatccggtatcttcactaataccaaagaatcttcctcccatcaccccgggatagctgagttcccttcccggggtaaatcatcctcttactctaaacagttcaccagttccactagttataaccgtggcgacagtaccttcgagagcaagtcatataaaatggcggacgaagctgggtcggaggcagaccacgaaggcactcactcgactaaacgcggccatgctaaatctcgtcctgtgcgggactgcgacgacgtgttgcagacacatccttccgggacccagagcgggatttttaatatcaagctgcctggctcctccaagatctttagtgtctattgcgatcaggaaacatcgctggggggttggctgctcatacaacagcggatggatggatctctaaactttaatcggacctggcaggattacaagcgtggtttcggcagcctcaacgacgagggagagggcgagttttggctcgggaacgattacttgcatttgcttacgcagcggggtagtgtgctccgggttgagctcgaggactgggctgggaacgaggcatatgccgagtatcattttagagtgggctcagaggcggagggatacgccctgcaggtgtcatcctatgaggggacggcaggtgatgccttaattgaaggctctgttgaggaaggggcagaatacacatcacacaataatatgcaattctcaacgttcgatcgcgatgctgaccaatgggaagaaaactgcgcagaggtttacggcggaggttggtggtataataattgccaggctgccaacctcaacggcatctactaccctggaggctcctatgatccacgcaacaacagcccatacgaaatagagaacggagtcgtgtgggtgagtttccgaggagccgattacagcctgagagcagttcggatgaaaatccgacctctagtgactcag

SEQ ID NO: 10342 - DNA, 2598 bp, Artificial Sequence
  derived and/or modified sequence
atgttcagtatgcgaattgtgtgtcttgttctgagtgtggtgggaacagcgtggacagctgactccggagaaggcgatttcctggcagagggagggggagtacgggggccacgggtagtcgagcggcatcaatccgcttgcaaggactcagattggcctttttgctctgatgaggactggaactataagtgcccttcgggatgtcgaatgaagggactcatagacgaagtgaaccaagacttcacgaataggatcaacaaactcaaaaactccctgtttgaataccagaagaataacaaggacagtcacagtcttacgaccaatatcatggaaatactcagaggggacttttcaagcgccaacaatcgggacaacacgtacaatcgcgtgtcggaagatcttcgaagcagaatcgaagtgctgaaacgtaaagtgatcgaaaaggtccagcacatccagctgctccagaagaacgtgcgcgcgcagctggtggatatgaagcggctggaagtggacatcgacatcaaaatcagatcttgccggggctcctgctcaagggccctcgctcgagaggtcgatctcaaagattatgaggatcagcaaaagcaactggaacaggtcattgcaaaggacttgcttccatctcgcgacagacagcacttgccactgattaagatgaagcccgtccccgacttagtccccgggaactttaagtcccagttgcagaaagtccctcccgaatggaaggctctgacagatatgccccagatgagaatggagctcgaaagaccaggtggaaacgagattacaaggggtggatctacatcttacgggaccgggtctgagactgaatctccacggaatccgtcaagtgctgggagctggaattctggcagttcagggccgggttcaacaggtaaccggaaccctggctcttcaggaactggaggcacagcaacctggaagcctggaagcagcggaccaggctctactggctcctggaactcaggctctagcggcacaggctcaaccggcaaccaaaatcccggaagtccccgtcccggcagtactggaacatggaatcctggaagctcagagcgaggctcagcaggccactggacctccgagtcctcagtgagtggatcgactggacaatggcatagcgagagcgggtcatttcgaccagactctccaggatctggcaatgcacgaccaaataatcccgactggggcacttttgaggaggtgtcgggaaacgtgtcgccaggaacgcgccgggagtatcacacagagaaattagtcaccagtaagggggataaagagctcagaacggggaaagaaaaagtgaccagtggatcaactaccacaacaaggcgctcatgttcaaagacagtaaccaagacagtgatcgggccggacgggcacaaagaggtgaccaaagaagttgtgacctccgaagacggttccgactgtcccgaggccatggacctggggacactttctggaatcgggactctggacggctttcggcaccggcacccggacgaggcagcctttttcgacacagccagcaccggcaaaaccttcccgggcttcttttccccgatgcttggggagtttgtgtcagagaccgaatcgcgcgggtcggagagcggaattttcaccaatactaaggagagttcaagccaccaccctgggatcgctgagttcccaagtcgaggtaagtcaagttcctatagcaaacaatttacatcctccacaagttataatcgaggtgattctacattcgagtccaagtcttacaagatggcggatgaggctggttcagaggctgatcacgaaggtacacactctaccaagagggggcatgctaagagccggccggtacgtgattgcgacgatgtgctgcagacccatccaagcgggacccagtcgggcatcttcaacattaaactgcccggatcatccaagattttctctgtatactgtgaccaggagacgtcactggggggatggctcttgattcagcagagaatggatggttctctaaattttaacagaacatggcaggactacaagcggggatttggcagcctgaatgacgagggagagggagaattttggctgggcaatgactatctacacctgcttacccaacgtggatctgtgctgcgcgtcgagctggaagattgggccgggaatgaggcgtacgccgagtatcacttccgcgtggggtccgaggctgaaggctatgctttgcaagtgtcctcctacgagggtaccgccggcgacgctttaatagagggttcggtagaggagggagctgaatatacatctcacaataatatgcagttctcaacctttgatcgtgacgcggatcagtgggaagaaaactgcgcggaggtctacggtggaggttggtggtacaacaactgccaggccgcaaacctgaacgggatctattatccaggggggtcctacgacccgcgcaataactcaccctatgaaatcgaaaacggcgtcgtttgggtcagcttccgtggagctgattatagcttgcgcgctgttcgaatgaagatccggccattggttactcaa

SEQ ID NO: 10343 - DNA, 2598 bp, Artificial Sequence
  derived and/or modified sequence
atgttttctatgcgcatcgtatgcctcgttctgtccgtagtgggaactgcttggacagccgattcaggagaaggagattttttagccgaaggaggaggggtcaggggaccacgggttgtagaaagacaccagtccgcatgcaaagactcagattggcccttctgtagtgatgaagattggaactataaatgcccctccggatgcagaatgaaagggctgatagatgaggtgaatcaggatttcacaaatcggataaacaagctcaaaaactcattattcgaatatcaaaaaaataacaaagattcccacagtctcactactaacataatggaaatacttcgaggagatttctcttctgctaataatagggataacacatacaatcgagtatcagaagacctgaggtcccgaatcgaagtgctcaagaggaaagtaatagaaaaagttcagcacatccagctgctccagaaaaatgtgcgggcccagctagtagatatgaaacgcctggaggtcgacattgacatcaagatacgctcatgtcgggggtcgtgctctagagctttagccagagaagtggatctcaaagactatgaagatcagcagaaacagctcgaacaggtaatcgctaaagatctcctgccttcccgagatcgccagcatctacctctcataaaaatgaaacccgttcccgacctggttccgggaaacttcaaatcacagttacagaaagtgcctcccgagtggaaagccctgactgatatgccacagatgcggatggaactcgagcgaccaggaggaaacgagatcactcggggaggatccacatcgtacggaactgggagtgaaactgaatcacccaggaatccatcttccgctgggtcctggaactccggatcctccggaccaggatcgacaggaaatcggaatccagggtcatcagggactggggggacagcaacatggaaacccgggtcttcagggcctggatccacaggatcttggaactccggaagttcaggaactgggtcgacaggaaaccagaacccagggtcgcctagacccgggagtactggaacttggaaccccggatcatcagaaagggggtcagccgggcactggacttcggaatccagtgtgtctgggtctacaggacagtggcatagtgaaagtggaagttttcggccagatagtcctgggtctggaaacgcccgaccaaacaaccctgattggggaacattcgaagaagtatccggaaatgtctctcctgggactagaagggaatatcacactgaaaaacttgtgactagtaaaggggataaggaactgagaactgggaaagaaaaggtgacatcaggatccactacaacaactaggaggtcctgttctaagactgtcacaaaaactgtgattgggcctgatgggcataaagaagtgacaaaagaagtggtcactagtgaagatggatctgattgtcccgaagccatggatctggggactctctctgggatcggaacacttgatggatttcgccatcggcatcctgatgaagccgcgttttttgatacagcatctacaggaaaaacatttcctggattcttttccccaatgctcggggagtttgtttctgaaacagaaagtaggggatccgaaagtgggatattcacaaacactaaagaatcttcatcccaccatcccgggattgcggaattcccctctagggggaagtcatcaagttactctaaacagtttacatctagtacttcttataacagaggggattccacattcgaatcaaagtcctataaaatggctgacgaagccgggagtgaagccgatcatgaagggactcattccacaaaacggggacacgctaaatcccgcccagtcagggattgtgatgatgttcttcagacacatccctctgggactcaatcaggaatatttaacatcaagctgcctggaagttctaaaattttctccgtgtattgtgatcaggaaacttcactcggagggtggctactcatccagcaaaggatggatggatccttaaattttaaccgaacttggcaggattataaacgggggttcggaagtctcaatgatgaaggagaaggagaattttggcttggaaacgattatcttcatcttttaacacagcgggggtctgtgctgcgagtggaactcgaagattgggccggaaacgaagcatatgctgaatatcatttcagagtagggtccgaggccgaagggtacgctttacaggtttcatcctacgagggaactgctggagatgccctgatagaagggtctgtcgaagagggggccgagtatacttctcataacaatatgcagtttagtacattcgatcgggatgctgatcagtgggaagaaaactgtgccgaggtttacgggggggggtggtggtataacaattgccaggcagccaatcttaacggaatctattaccccggaggatcttatgatcctcgaaacaatagtccatacgaaatcgaaaacggggtcgtgtgggtcagtttccggggggctgattattctctgcgcgctgttagaatgaaaattcggcctctcgtgactcag

SEQ ID NO: 10344 - DNA, 2598 bp, Artificial Sequence
  derived and/or modified sequence
atgttttcaatgcggattgtgtgcctggttttatcagtggtaggtaccgcttggactgccgattctggcgagggagacttcttggccgagggagggggagttcgggggccacgagtggtggagcggcaccagtctgcctgcaaggatagcgattggcccttttgtagtgacgaagactggaattataagtgtccaagtggctgcagaatgaagggtctgattgatgaggtgaaccaggacttcaccaatagaatcaacaaactaaagaattcactattcgagtaccagaagaacaacaaagacagtcactctctcacaaccaacatcatggagattttaaggggcgatttctcatccgcaaataatcgtgacaacacctacaatcgtgtgagtgaggatctacggagccgtatagaagtactgaagcggaaagtgattgaaaaggtgcagcacatccagctgcttcagaaaaacgtgagggcccagctagtcgatatgaaacggctcgaggtcgatatcgacataaaaataaggagttgtcgaggaagctgtagccgagccttagcacgggaagtggatctgaaagactatgaggatcaacagaagcagctggaacaagttattgccaaggaccttctgccgtccagagacaggcaacacctgccgctcatcaagatgaaacccgtcccagatctggtgcccggaaatttcaagagtcagctacagaaggtgcctcctgaatggaaggctttgactgatatgccccaaatgcgcatggaattagaacgacctggtggcaatgaaattacccgtggggggtcgacatcttatggtacaggcagtgaaacggagagtccaaggaaccccagctctgctggatcctggaactctggatccagtggaccgggatcaactggcaatagaaatcccgggagcagtggcacaggggggaccgcaacttggaaacctggctccagtggacctggatcaaccggctcttggaatagcggttcctcaggcaccgggtccaccggcaatcagaaccctgggtcaccgagaccaggaagcactgggacatggaacccaggatcatcagaaaggggctctgctgggcattggacaagcgagtcttcggttagtggctctacggggcagtggcattctgagtcaggttcctttcgcccagactctccaggctctggcaacgctaggccaaacaatcctgattggggtaccttcgaggaagtaagtggcaacgttagccctgggacccgcagagagtatcacactgaaaagctggtaacttcaaaaggcgataaagagctgcgtaccggcaaagagaaggtgaccagcggatctacaacaacaacccgtaggagctgctctaagaccgtgactaaaactgtcataggtccggacggccacaaggaagttacaaaggaagtggtgaccagtgaagacggtagtgattgtcctgaagcaatggatttagggaccctttccggtataggcaccctagacgggttccggcacagacacccagatgaagccgcgttttttgacacagcctccactggcaaaacatttcccggtttcttttctccgatgctcggggaattcgtcagcgagacagaatcccgtggatccgaatcaggaatctttacgaatactaaggagagcagcagccatcatcccggcattgcagagttccccagtagaggcaaatctagtagttatagcaaacagtttaccagttccaccagctacaacaggggggatagtacctttgaatctaaatcctataagatggccgatgaggctgggtccgaagccgatcacgaaggcacacattccacgaaacggggccacgctaagagcagaccagtacgtgattgtgatgacgtgctccagacccacccgtctggcacacagtccgggatattcaatatcaagctgccaggatcaagcaagatttttagcgtgtactgtgatcaggaaacttctttaggaggctggcttctgatccagcaacggatggacgggtccttgaacttcaaccggacctggcaagattacaagcgcggcttcggctccctgaatgacgaaggagagggcgagttctggctggggaacgactacctgcacctgttgacgcaaagggggagtgttttgcgagtggagctggaggattgggctggtaacgaggcatatgccgaataccactttcgcgtggggagcgaagccgagggctatgcactgcaagtctcgtcatatgagggcaccgctggggatgctctcatcgaaggcagtgtggaggaaggggccgagtatacctctcataacaacatgcagttcagtacattcgaccgcgatgccgatcagtgggaggagaactgcgcggaagtctatggcgggggatggtggtataataactgtcaggccgccaatctaaacggtatctactaccctggtggctcgtacgacccccgcaacaattctccatacgaaattgagaacggcgtcgtttgggtgtcttttagaggtgctgactacagcctccgtgcagtccgcatgaagatacggcctcttgtgacccaa

SEQ ID NO: 10345 - DNA, 2598 bp, Artificial Sequence
  derived and/or modified sequence
atgttttcgatgagaatcgtgtgcctcgtgctttccgtggtgggaactgcatggaccgcagactcaggggaaggtgactttctcgcagagggtggtggggttcgtggcccgagagtggtggagcgccatcagagcgcgtgcaaagatagcgattggcctttctgttcggatgaggattggaactacaagtgcccttccgggtgcagaatgaaggggctgatcgatgaagtcaaccaagacttcacgaacagaatcaacaaactgaagaattcactcttcgagtaccagaagaataacaaagattcgcattcgctgactaccaatatcatggagattctgcggggggatttctccagcgcaaataaccgggacaacacctacaacagagtgagcgaggacctgcggagcagaattgaagtgctgaagcgaaaggtcattgagaaagtgcaacacatccagcttttgcagaaaaacgtgagagcccagcttgtcgacatgaagagactggaggtggacatcgacattaagatcaggtcatgtagaggctcctgtagccgtgcgctggcacgcgaagtcgacctgaaagactacgaggaccaacagaagcaacttgagcaggtgatcgccaaggatttgcttcctagccgagatcgccagcatcttcctctgattaagatgaagcctgtcccagatctcgtgccggggaatttcaagtctcagcttcaaaaggtgccacctgaatggaaagccctgactgacatgcctcaaatgcgtatggagttggagaggccaggtggtaacgagattacgagaggtggctcgacgtcatatggcaccggttcggaaacggaatcgcctcggaacccttcctcggcagggtcgtggaactccgggagctccggacccgggtcaactggaaataggaatcccggcagctctggaactggtggaaccgcaacttggaaacccggttcgtcgggaccggggtccactggtagctggaacagcggttcatctggtaccgggtcgaccggtaaccaaaacccaggatcaccaaggcctggatccacgggaacgtggaatcctggttcctccgaacgggggtccgcaggacactggacttcagaatcctcggtgtccggatcgaccggtcagtggcacagcgaaagcggatcatttcggcctgattctccaggttccggtaacgcacggccgaataaccctgactggggtacttttgaagaggtgtcaggtaatgtctctcccggcactcggcgcgagtaccacactgaaaagctggtgacctcaaagggggacaaagaacttcgcaccggtaaggaaaaggtgacctcgggaagcactaccactactagaagatcatgttccaaaaccgtgactaagaccgtcatcggtccagatgggcataaagaagtgaccaaagaagtggtcacctcggaggatggaagcgactgtcctgaggcaatggatcttgggacgctctcgggtattgggacgcttgatggcttccggcatagacatcccgatgaagctgctttcttcgataccgcatcaactggcaagacgtttcctggatttttctcgcctatgctcggtgagtttgttagcgaaactgagtccaggggatcggaatccggcattttcaccaacaccaaagagagctcctcacaccacccgggaatcgccgagtttccatcgaggggtaagtcgagctcgtactcgaaacagtttacgagctctacttcgtacaatcgaggtgattccactttcgaatccaaatcctataagatggccgatgaggcaggttccgaggccgatcacgaaggtactcactcgactaagcgcggacatgccaaatcaagacccgtgagggattgtgatgacgtgctccagactcatccatcaggtacccaatcgggaatattcaatatcaagctgccaggatcgtcgaagatattctcggtgtactgcgatcaagagacttccttggggggctggctgctcatccaacagcggatggacggaagccttaacttcaatagaacgtggcaagattacaagcgtggttttggatcactgaatgacgaaggtgaaggggaattttggcttggaaacgactacctccatcttctgactcagaggggctcagtcctgcgggtcgaactggaagattgggcaggaaacgaagcgtacgcagaataccatttcagagtcgggtcggaagcggaagggtatgcacttcaggtgtctagttacgaggggaccgccggagatgcactgattgaggggtccgtcgaagagggcgcagaatacactagccacaacaatatgcaattctccacttttgatagggatgcagatcaatgggaggaaaattgtgcagaagtctacggagggggttggtggtacaacaactgtcaggccgcaaacctgaacggaatttactaccctggtggaagctacgatcctagaaacaactccccctacgaaatcgagaacggagtggtgtgggtttcgtttcgaggcgcagactactccctgcgagcggtgcgaatgaagatacgcccccttgtcactcag

SEQ ID NO: 10346 - DNA, 2598 bp, Artificial Sequence
  derived and/or modified sequence
atgttcagcatgcgtatagtgtgcctggtgctcagtgtagtgggcaccgcgtggacagcagattcgggagagggcgatttccttgccgaaggcgggggtgttagaggcccaagggtcgtcgagagacaccagagtgcctgtaaggacagtgactggccattctgctccgacgaggattggaactataagtgccctagtggttgccgcatgaaaggcttaatcgacgaggtgaatcaggacttcaccaatcgcattaataagctgaagaactccctgttcgagtaccaaaaaaacaacaaggacagccattcgttgaccactaatataatggagattttgaggggagacttttcttcagccaacaacagagacaatacatacaatcgtgtgagcgaggacctaaggtcacgtatcgaggtcttaaagcgtaaggtcattgaaaaggtgcagcatatccaactcctgcagaagaatgtgagggcacagctggttgatatgaagcggttggaagtcgacattgatataaagattcggtcttgtaggggctcttgtagccgggccctggctagggaagtcgacttgaaggattacgaagaccaacagaaacagcttgagcaggtgatagcgaaagacctcttgccaagccgcgatcgccagcatctgccccttatcaagatgaagcctgttccagatctagtccccggaaacttcaagtcccagcttcagaaggtcccaccggaatggaaagccttgacagatatgccacagatgcgcatggagctagaaaggccgggtgggaacgagattacacgtgggggatcaacgtcttacggcactgggtctgagacagaatctccccgaaacccaagcagcgctggatcctggaacagcggtagcagcggccctggctcgacaggtaataggaatcctggtagttctggtacgggtgggaccgcaacttggaaacctgggtcttccggcccaggctcaaccgggtcctggaatagcggatcttctgggacaggctcaacaggaaatcagaaccctggctccccccgtcctgggtctacgggtacatggaacccgggatcctcggaacgcggttctgctggacactggacaagcgaaagtagcgtgtcaggctcaaccggtcaatggcacagcgaaagtggctcgttccgacctgactcaccagggtccggtaacgctcgtcccaacaatcccgactggggcacctttgaagaagtctctgggaacgtgtccccgggcactcgccgggaataccacacagagaagctcgtgacatcaaagggggacaaagagctgcgcactggtaaagagaaggtaacttcgggctcaactactactacccgccgctcctgcagcaaaacagtaaccaagactgtaatcgggcctgacgggcataaggaggtgaccaaggaggtggtcacctctgaagatggatcggattgtcccgaagctatggacttaggaaccctcagcggcatcgggacactggacggattccgccatagacacccagacgaggcagccttttttgacaccgccagtactgggaagacctttccaggctttttctccccgatgctcggagaattcgtgagcgagacagagtctcgaggttcggagtccggcattttcaccaacacaaaggagtctagcagccatcatcccggcattgccgagttcccaagtcggggaaaatccagctcatattctaaacagtttacatcttcgacttcatacaatcggggcgactcaacctttgagagcaaaagctacaaaatggctgatgaggccggctccgaggcagaccacgaggggacccattcaaccaagcgcggccatgccaaaagcaggcccgtgagggattgcgacgacgtgctccagacgcatccctctggcacacagagtggcatctttaatatcaaattaccgggatctagcaagatatttagtgtgtactgcgatcaggagacatccctggggggatggttgctgatacagcagcgcatggacggctcattgaattttaataggacatggcaggactataaaaggggcttcggctcactcaacgacgagggcgagggcgagttttggttaggcaacgactacttgcatctcttgacacagagagggtccgtcctgcgggtggagctcgaagattgggctggaaacgaagcctacgcggagtaccatttcagagtagggtctgaggcagaagggtatgccctgcaggtctcctcgtatgaagggaccgccggagacgcattaatcgagggaagcgttgaagaaggagcagaatacaccagccacaataacatgcagttttccacctttgacagagatgctgaccaatgggaggagaattgcgccgaggtttatggagggggttggtggtataacaattgccaggccgccaacttaaatgggatctactatccgggaggcagttacgacccacgaaataatagtccctatgaaatcgagaacggagtcgtttgggtcagtttcaggggagccgattattctctgcgcgccgtgcgaatgaaaataagaccccttgtgacccag

SEQ ID NO: 10347 - DNA, 2598 bp, Artificial Sequence
  derived and/or modified sequence
atgttctcaatgagaattgtatgcctggttctctcagtggtcggaaccgcctggactgccgacagcggagaaggggacttcctggctgaaggaggcggagttagaggaccgcgggtcgtcgaacgccaccaatcagcctgtaaagactcggactggccgttctgtagcgacgaagattggaattacaagtgtcccagcggatgcagaatgaaaggactgattgatgaagtgaaccaggattttactaatcgcataaataagctcaaaaactcgctgtttgaataccagaaaaataataaagactcccactcgctgaccaccaacatcatggaaatcctgcgtggagacttctcctccgccaacaaccgcgacaatacctacaacagggtttccgaggatctccgatcgaggatcgaggtgctcaagcggaaggtgatcgagaaggtgcaacatatccagctgctccaaaagaacgtgcgagcgcaactggtggacatgaagcgcctggaagtcgacatcgacatcaagatccgctcgtgccgcggatcctgcagcagagccctggccagagaagtggacctgaaggattacgaagatcagcaaaagcagctcgaacaggtgatcgctaaggaccttcttccgtcacgggaccgccagcacctcccacttatcaaaatgaagcctgtgccggacctggtgccggggaatttcaagtcgcagttgcagaaggtcccgccggagtggaaagcacttaccgatatgccacaaatgcggatggaactggaacgccccggaggcaacgaaatcactcgcggaggcagcactagctacggaactggatcggaaactgagtcgccgcggaacccgtcatcagcagggtcctggaactcgggttcctcgggaccgggaagcactggaaacagaaaccctggatcctcgggaaccgggggaaccgctacttggaagccaggctcgtccggaccgggttcaactggctcgtggaatagcggaagcagcgggaccggctcaaccggtaaccagaatccaggaagcccgcggcccggatcaactgggacttggaatcccggttcatccgagcgcggctcagctggtcactggacttcagaatcgagcgtctcaggctctactggacaatggcattcagagtcaggatcgtttagaccggactcgcctggctctgggaacgcccgcccaaataatcccgactggggaactttcgaggaagtgtccggaaacgtctcccctggtacgcgccgcgaataccatactgagaagttggtgacgagcaagggagacaaggaactgcgcaccggaaaagagaaagtgacttcgggatccaccaccactacccgcagaagctgctcaaagactgtgacgaaaaccgtgattggccctgacggacataaggaggtcactaaggaagtggtcacttccgaagatggatccgattgtccggaggctatggatctgggcactttgtcgggcattggcactctggatggattccggcatcgccacccggacgaagcagcgttcttcgacaccgcttcgactggtaaaaccttcccgggcttcttctcgccaatgctgggagagttcgtgagcgaaaccgaatcgagaggaagcgaatcgggcatcttcaccaacaccaaagaaagctcatcccaccatccaggaatcgccgagttcccttccagagggaaaagtagctcgtactccaagcagttcaccagctcgacctcctataacaggggtgacagcacgtttgagtccaagtcatacaagatggcggatgaagccggatccgaagccgaccatgaaggcacccacagtaccaagaggggacacgcaaagtcgcggccagtgcgcgactgcgacgatgtcctccagacgcaccctagcgggacccaatccggaatcttcaatatcaagttgcccggctcgagcaagatcttctcggtgtattgcgatcaggagacttcgctggggggttggctgctcatccaacagcggatggatggatccttgaacttcaatcggacgtggcaggattataagcggggctttggatccctgaacgacgaaggtgagggcgagttttggctgggtaatgactacctccacctcctgacccagcgggggagcgtgctcagggtcgagcttgaggattgggcgggaaacgaggcgtacgcagagtaccatttcagagtcggctccgaggccgaggggtacgcgctgcaggtgtcctcttacgagggaacggctggagatgccctgatcgaagggagtgtggaagaaggagccgaatacacctcacacaacaacatgcagttttccaccttcgaccgagacgccgatcaatgggaggagaattgcgcagaagtgtacgggggcggttggtggtacaataactgccaagcagcgaacctcaacggaatctactaccctggcggctcttacgatccacggaacaactcaccatacgagattgagaacggcgtcgtgtgggtgtcgtttcggggtgcggactactccctgagggccgtgcgtatgaagatccggccgctcgtgacccag

SEQ ID NO: 10348 - DNA, 2598 bp, Artificial Sequence
  derived and/or modified sequence
atgtttagcatgcgcatcgtctgcctcgtgctctcagtggtcgggacggcatggacggcagactcgggggaaggtgattttctggccgaaggcggaggcgtgcgaggtccccgcgtagtggagcgtcatcagtctgcgtgcaaagactctgactggcccttctgcagcgacgaggactggaactacaagtgtcccagcggctgtagaatgaagggtctcatagatgaggtcaatcaggattttaccaacagaattaacaagttaaaaaattcattattcgagtatcagaagaataacaaagatagccacagtcttactacaaacatcatggaaatcttacgaggcgattttagctcggcaaacaaccgtgataacacctacaacagagtgtcggaggaccttcgtagtagaatagaggtgctcaaacggaaagttatagagaaagttcagcatattcagcttctccaaaaaaatgtgagggcacagctggtggatatgaaaagactcgaagtagatattgatatcaagatcaggagctgccgagggtcttgctctcgagcgctcgcgcgggaagtcgatttgaaagactacgaagaccagcagaagcagctcgagcaggtgatcgctaaggacttgttgccctccagggacaggcagcatctcccgctgatcaagatgaagccagtgccagatttagttccaggtaacttcaaatcacaactgcaaaaagttccccctgagtggaaggcattgacagacatgccgcagatgcgcatggagctggagaggccaggaggaaacgaaattactcggggcggttctacatcctacggtactggttccgagaccgagtccccacggaatccctcttcagcggggtcgtggaacagcggctcgagcggacccgggtcgactggcaaccgcaaccccgggagctctggaaccggcggtaccgccacctggaagcctgggtcctcgggtccgggctctaccggcagctggaacagcggcagctccggaaccggctccacggggaaccaaaaccccggctccccacgccccggcagcacagggacgtggaacccaggtagttccgagcgaggcagtgctggtcactggacgtcggagtcgagtgtgtcaggaagtacgggtcagtggcatagcgagtctggctctttcaggccggactctcctggttctggtaatgcccggcctaataaccccgactggggaacctttgaggaggtgtctggaaatgtaagtccaggcactcgccgtgagtaccacaccgagaaattggtcactagtaagggcgataaggagttgcgtacaggcaaggagaaagtgacttcaggctcaacaactaccactagaagatcttgttcaaagaccgtgacgaagaccgtcatcggacccgacggccacaaggaagtgaccaaggaagtcgtcacttcagaggacggtagcgattgcccagaggctatggacctgggtacgttgagtggtattgggacgctagatggatttcgtcaccggcatcctgatgaagctgcgttcttcgatacggcaagcaccggcaagacgttcccgggattttttagccctatgctcggcgaatttgtgtcggaaaccgagagtcgggggtcggaaagtggaatttttaccaacaccaaagagagctcttcccatcaccctggtatcgccgagttccccagccgaggtaagtccagcagttactccaaacagttcacctcttctacttcttataatcgcggcgattcgacctttgagtctaagtcctacaagatggctgatgaagctggctcggaggcagaccacgagggcacccattctactaagcgtggacatgccaagagcagacctgttcgagattgcgacgacgtgcttcaaacccatccaagcgggactcagtctggcatcttcaacattaagctcccaggttcaagtaaaatattttctgtgtactgtgaccaggagacgtcgttgggggggtggcttcttatccagcaacgcatggacggtagcctgaactttaaccgcacgtggcaggattacaagcgtggtttcgggtccctaaacgatgagggggagggggagttctggctgggtaacgactacctgcatctattaacacagaggggttcagtgttgcgcgtcgaactagaagattgggctgggaatgaagcatacgctgaataccatttccgcgttggatctgaagcggagggttatgcgctccaagtctcaagttatgagggtacagctggcgacgctctcatcgagggctccgttgaagagggagccgagtacacgtcgcacaacaacatgcaattttccacgttcgaccgcgatgctgatcaatgggaggagaactgcgcggaggtttatgggggcgggtggtggtacaacaactgtcaggccgccaacctcaacggaatttattatccgggcgggtcgtatgacccgcgaaataatagcccctacgaaatagaaaacggagtagtctgggtaagttttcggggggcagattactcactgcgtgcagtccgcatgaaaatacgtccactggtgacacaa

SEQ ID NO: 10349 - DNA, 2598 bp, Artificial Sequence
  derived and/or modified sequence
atgtttagcatgcgaattgtatgtctcgtcctgtccgtggtggggactgcatggaccgccgattcgggagaaggtgattttctcgcagaggggggcggtgtccgggggcctagagtggtggagcggcatcaatccgcatgtaaggattcggattggccgttctgttcggacgaggactggaattacaagtgtccatccgggtgccggatgaaaggattgatcgacgaagtgaaccaggattttacgaaccggatcaacaagctgaagaactcgctttttgagtaccaaaagaacaacaaagattcgcactcgctgactaccaacattatggaaatcttgcgaggggatttctcatcggcaaacaacagagacaatacctataacagggtcagtgaagatctccgctctcgaattgaagtccttaagagaaaggtgatcgagaaggtccaacatattcaacttcttcaaaagaacgtgcgcgcacagctcgtggacatgaaacggttggaagtcgacatcgacattaagatcagatcatgcagaggatcgtgcagccgcgctcttgctcgtgaagtggatctcaaggattacgaagatcagcaaaaacaacttgaacaggtcatcgccaaggatctgctgccctcacgcgaccggcagcacctgccactgataaagatgaagcctgtgcctgacctggtgcctggaaactttaagtcccagcttcagaaggtgccacctgaatggaaagcattgaccgacatgcctcaaatgagaatggaactggaacggcctggtggaaacgagattaccaggggcgggagcacctcgtacggaaccggatcagaaaccgagtctcctcgtaatccgagctcggcaggttcatggaactcaggctcgtccggtcctggttccaccgggaacaggaatcctggctcatccggaaccggtggtaccgcgacctggaagcctggatcttccggccctggaagcaccggttcctggaattcgggttccagcggtaccggatcgaccggaaaccagaacccaggttcccccagacctggcagcaccggaacctggaaccctggaagcagcgaaagaggttcggccggacattggacctcggaaagctcggtgtcgggaagcaccggccagtggcattcagaatcaggtagcttcaggcctgattcgccgggctcaggaaacgcaaggcctaataaccccgattggggaacttttgaggaagtgtcaggaaatgtcagccccggaactcgtcgtgaataccataccgaaaagctggtgacctcgaaaggagataaagaactcagaacggggaaggaaaaagtcacctctggaagcactacgaccacccggagatcctgttctaaaaccgttaccaagacggtgatcggacccgatgggcataaagaagtgaccaaagaggtcgtgaccagcgaggacgggtcagattgtcccgaagcaatggacctgggaaccctgtcgggcattggaactctggatgggtttagacaccgacatccggatgaggcggccttttttgatacggcatccactggaaagacgtttccaggattctttagcccgatgcttggtgaatttgtgagcgagactgagtcgagagggtccgagtcaggtatcttcactaacactaaggaatcatcgtcacatcatcctggaatcgctgaatttccttcgcgggggaagtcgtcgtcttactcgaagcagttcacctcctccacgtcctacaataggggagattccacttttgaaagcaagagctacaagatggccgatgaagccggtagcgaagccgaccacgaaggaacccattcaactaagcgtggacatgcgaagtcacgccctgtccgcgattgcgatgatgtgctgcagacgcacccgtcgggcacccaatccggtattttcaacattaagctccctggttcctccaagatattctctgtgtactgcgaccaagaaacctcactcggaggatggctgctcatccagcagcgcatggatggttccctcaactttaacagaacctggcaagactacaagcgaggatttggatcacttaatgacgagggcgaaggtgaattttggctcgggaatgactacctgcatcttcttacccaacgtggatcggtgctgcgggtcgagctcgaggactgggcgggtaacgaagcgtacgccgaataccatttcagagtgggctccgaggcagaaggttacgccctccaggtcagttcgtatgaaggtaccgccggcgatgccctgattgagggcagcgtcgaggagggtgcggagtacacctcccataacaatatgcagttctcgacttttgatcgcgatgcagatcaatgggaggagaactgtgctgaggtctacggtggaggatggtggtataacaactgtcaggcagcaaacctgaacggtatttactacccgggtggttcgtacgatccccgtaacaacagcccatacgaaatcgaaaacggcgtggtgtgggtgtcgttcaggggagcagactattcactgagagcggtccggatgaagattagacccctggttacccag

SEQ ID NO: 10350 - DNA, 2598 bp, Artificial Sequence
  derived and/or modified sequence
atgttttccatgaggattgtgtgccttgtgctgtccgtggtgggtaccgcctggactgctgactccggagagggggacttcctcgcagaaggaggcggagtgcgaggaccgcgggttgtcgagcggcaccaatcggcctgcaaagactcggactggcctttctgctcggacgaagattggaattacaagtgcccgtcgggatgcagaatgaagggcttgattgacgaggttaatcaggacttcaccaaccgcatcaacaagctcaaaaactccttgttcgaataccagaaaaacaacaaagactctcacagcttgaccaccaacatcatggagattctcaggggagatttctcctccgctaacaacagagataatacctacaaccgggtgtcggaggacttgcggtccagaatcgaggtgctcaagcgcaaagtcatcgagaaggtgcagcacatccaactgctgcagaagaacgtgcgcgcgcaactggtcgacatgaagcgccttgaagtggacatcgacattaagatccggtcctgtcgcgggagctgttctcgcgctctggccagggaagtggacctcaaggactatgaggaccaacagaagcagctggaacaagttatcgctaaagacctcctgccgagcagggaccgccagcatctgccgcttatcaagatgaagccggtgccggacctggtgcctggaaactttaagtcccaactccagaaggtgcctcctgaatggaaggccctcaccgacatgccccagatgcgcatggaactggagcgccctggcggaaatgagatcacccggggaggaagcacttcatacggaaccgggtccgaaaccgagagcccacgcaacccgtcctccgccgggagctggaacagcggctcatccggacctggctcgacgggtaaccgcaaccctggctcgtcagggacgggcggaaccgcgacgtggaagcccggcagttcaggacctgggtcaaccggatcatggaactcaggttcctccggaactggatcgaccggaaaccagaacccagggtccccgcggccgggatcgaccggcacttggaacccgggctcgtcagagcggggcagcgccggtcactggacctcagaatcctcggtgtccggctccacgggacaatggcacagcgagtcaggatctttcaggccagattctcctggctcaggaaatgcgcgaccaaacaatccggactggggcaccttcgaagaggtcagcggcaatgtgtcgcccgggactcggcgcgaatatcacactgaaaagctggtgacgtccaagggcgataaggaactgaggactggaaaggagaaggtgaccagcgggtcaactaccactactagaagatcctgctctaagaccgtgactaaaactgtcatcggaccggatggacacaaggaggtcaccaaggaagtggtcacttcagaggatggatcggattgcccagaagctatggatctgggcactctgagcggcatcggcaccctggacggcttcagacacaggcatccagacgaagctgctttcttcgacactgcgtctaccggcaagactttcccgggattcttctcaccaatgctcggcgaattcgtctccgagactgagtcccgggggtcagagagcggaatcttcactaacactaaagaaagctcgagccaccaccccggaatcgccgagtttccttcgcggggtaaatcctcgtcctactcaaagcaatttacctcgtcgacttcgtacaataggggagacagcaccttcgaaagcaaaagctacaaaatggccgacgaagcaggaagcgaggcagaccacgagggcacccactcgaccaagcggggacatgccaagtcgcgcccggtgcgcgattgcgatgacgtgctccagacccacccttcgggaacccagagcggaatattcaacatcaaacttccggggagcagcaagatcttctccgtgtactgcgatcaagaaacttcgctcggagggtggcttcttattcaacagcggatggacggatcgctgaatttcaaccgcacctggcaggactacaagcgggggttcgggtccctgaacgacgaaggagagggagaattctggctgggtaatgattaccttcacctgcttacccaaagaggatcagtgctgagagtggaactggaggactgggctgggaatgaggcatacgccgaataccatttccgggtgggctcagaagcggagggatacgcactgcaggtcagtagctacgaagggaccgccggagatgccctgatcgaaggatccgtggaggaaggagcggaatacacttcgcacaacaacatgcaattttctactttcgatcgcgatgcggaccagtgggaagagaactgcgcggaagtttacggaggtggatggtggtacaacaactgccaggcagccaacctcaatggaatttactacccgggaggctcgtacgacccacgcaacaattctccctacgaaattgaaaacggtgtggtgtgggtgtcattccggggtgccgactattccctgcgggctgtgcggatgaaaatccggcccctggtcactcag

SEQ ID NO: 10351 - DNA, 2598 bp, Artificial Sequence
  derived and/or modified sequence
atgttcagcatgcgaatagtttgtctggttttgtcagtcgttggaacggcctggacagcggattcgggcgagggggactttctcgcagaaggcggcggagtgcgaggccctcgcgttgtcgaaaggcaccagagcgcatgtaaagatagtgattggccgttctgctccgacgaagattggaattataaatgcccctcaggctgcaggatgaaaggacttattgacgaagttaatcaggacttcaccaaccgaatcaataaattgaaaaactccctgtttgagtaccaaaagaataataaggactcacattccctcactacaaacatcatggaaatcctgcgtggggacttcagctctgctaataaccgcgacaacacttacaatcgagtatcggaggatctgaggtctcgcatagaagttttgaaacgaaaagtaatcgagaaagtacaacacatccagttgcttcagaaaaacgtaagggcacagctggtcgacatgaagaggctggaggtggatatcgacataaaaataagatcctgtcgcgggtcctgttctagagcactggcccgagaagtggatctgaaggattatgaagatcaacagaagcagctcgaacaagtaattgcgaaagacctgcttccctctcgagatcggcagcacctgccccttatcaagatgaaaccagtgccagatctagtgcctgggaatttcaagtctcagctccagaaggttcctcctgaatggaaggctctgactgatatgccgcagatgaggatggaattggaaaggcctggcggcaacgagataaccagaggtggttcaacctcatatggcacaggtagcgaaacggagtccccccggaatccaagttctgctgggtcctggaattctggttcttcggggccaggctccaccggcaaccggaatcccggctcctcaggcactgggggtactgctacctggaagccgggatcatcaggccccgggagtacaggttcttggaacagtgggtctagtgggactggatctaccgggaatcagaatcccgggtctcccagaccaggttccacgggtacgtggaatccaggcagctcagagcggggaagcgcaggacactggacatcagagtccagcgtgagtggttccactggacaatggcacagcgagtctggtagttttaggcccgatagtcccggcagtggaaacgcccggcccaataatcccgattgggggaccttcgaggaggtctctgggaatgtctctcccggcacccggagggagtaccacactgagaaactcgtgacttcgaaaggagataaggagctgcgtacaggcaaagaaaaagtcacttccgggtcgacgacgacaactaggagaagctgctccaagactgtgaccaagacagtcataggcccagatggtcacaaagaagttaccaaggaggtagtcaccagtgaagatgggtccgattgccccgaggcaatggaccttggaactttgtccgggatagggacactggacggattccgccaccgtcaccctgatgaggccgctttcttcgacaccgcctcaacaggcaaaacgtttcccggttttttttcgccgatgctaggggagttcgtctctgaaacagaatcgcgggggagcgagagcggcatatttacaaatactaaagagtcatcgtctcaccacccagggatcgccgaatttccttcaaggggaaaatccagcagttactccaagcagttcacatcttccactagctacaacaggggagattcaactttcgaatcaaagtcatataagatggccgacgaagcgggctccgaagccgatcatgaagggacccacagtactaaacggggacatgcgaagtcccggcccgtccgagactgcgacgatgtgctccagacccacccctctggtactcagagcggtatcttcaatataaagctccccggttcatctaagatattttccgtgtactgtgaccaggaaacaagcctgggcggatggcttctgatccaacagaggatggacggatcgctgaatttcaaccggacgtggcaggactataagaggggctttggtagtctcaatgacgagggcgagggggagttttggctgggcaacgattatctgcacctgttgacccagcggggcagtgtcctcagagtggaactggaagattgggccgggaacgaggcttacgccgagtaccacttcagagtaggctcagaagccgagggttacgccctgcaggtgtctagctacgagggaactgcaggagacgctctcatcgaaggctcggtagaagaaggtgccgagtatacttcacacaataacatgcagttcagtacctttgaccgggacgctgatcagtgggaagaaaattgtgcggaagtgtatggtggaggctggtggtataacaactgccaagcagcaaaccttaatggaatatattatccggggggttcatacgacccccggaataatagtccatacgagattgagaatggggtagtgtgggtgtcttttcgcggggccgactactctctacgagcagtgcgcatgaaaatacgccccttagttacacag

SEQ ID NO: 10352 - DNA, 2598 bp, Artificial Sequence
  derived and/or modified sequence
atgtttagcatgcgcatagtttgtctagtgttatcggtggtcgggaccgcctggaccgcagattctggcgaaggggacttcctggctgagggtgggggtgttcgggggccacgggtggtcgagcgccaccaatccgcctgtaaggactcagattggcccttttgtagtgacgaggactggaattataagtgcccttctggttgcaggatgaaagggctgattgatgaagttaatcaggacttcaccaaccgaatcaataagcttaagaatagcctgtttgaatatcaaaaaaataataaggactctcattccctgactaccaatatcatggagatcctgagaggggatttttccagtgcgaataatagggacaatacatacaaccgcgttagcgaagaccttagatctagaatagaggtcttaaaacgaaaagttatagagaaggtccagcatatacagttgctccagaagaacgtaagggctcaactggtggacatgaagagactggaagttgacatcgatatcaagatccgaagttgccgaggctcctgctcccgggctctcgcgcgagaggttgacctcaaagactatgaggatcagcagaagcagttggagcaggtaatcgccaaggatctcttgccttctagggataggcagcatttaccgctcatcaaaatgaaaccagtgcctgacctggtgccagggaatttcaagagccagcttcaaaaagttcctccagagtggaaggcgcttaccgatatgcctcaaatgagaatggaattagagagacccggtggcaatgaaattacacgcggaggttcaactagttacggcaccggatcagagaccgagtctcctagaaatccatcttctgcggggagctggaattccggatcttccggccccggaagtactggtaaccggaatcctggctccagcggaacaggcggaaccgcgacatggaaacctggcagttcaggacccggcagtaccgggagctggaatagtggaagctcaggaaccggcagcaccggaaatcagaaccccggttcaccacggccagggagcacaggaacatggaacccgggttcctccgagagagggtcagccggccactggaccagcgaatctagcgtttctggctctaccggccagtggcattcagaatctgggtcctttcgcccagatagcccggggtccggaaacgcgagaccaaataacccagactggggcaccttcgaagaggtctcagggaatgtctccccaggaacccgacgcgagtaccacaccgaaaagctggtgacttcaaagggcgacaaagagctgcgaacaggcaaggagaaggttacctcaggatctacaaccaccaccaggcgtagctgcagcaagaccgtgacgaagacggttataggtcccgacggccataaagaagtgactaaggaggtggtgacttctgaagacggcagtgactgtcctgaagcgatggatctcgggaccctctcgggtatcggaacattggacgggttcaggcaccgacacccagatgaggccgcatttttcgacacagcttcgacgggcaagactttccctggattcttcagccccatgctgggcgaattcgtttcggagactgaaagtcgagggtccgagagcggcatctttacaaacactaaagagtcatcctcccaccatcccggaattgctgaattcccgagcagagggaagagctctagctatagcaagcagttcaccagtagcacgtcatataatcgaggtgactcaacgttcgagtcaaagagctataaaatggccgatgaggccgggtcagaagcagaccacgagggaacacattctacaaagcgaggacacgcaaaatcccgcccagtcagggattgtgacgatgtgttgcaaacacacccttcaggcacgcaatcagggatttttaatataaagttgccagggtcctccaagatctttagcgtctactgcgaccaagagacaagcctgggtggctggttattaatccagcagcgcatggacgggagtctcaacttcaaccgaacatggcaggattataagcgcggattcggaagcttaaacgacgaaggagagggcgaattctggttggggaatgactatctgcatctgctgacacaaagggggtcagtgctgcgagtagagctggaggattgggccggcaacgaagcatatgctgagtaccatttcagggtggggagcgaggcagaggggtacgctctacaggtaagctcatacgagggcacagccggcgacgcacttatcgaagggagcgtcgaggagggagcggagtatacgagccataataatatgcagtttagcacgttcgaccgcgacgcagaccagtgggaggaaaattgcgcagaggtctacggcggcggctggtggtacaacaattgccaggctgccaatttaaatggaatctactatcccggtggtagttatgacccgaggaacaactcaccctacgaaattgaaaacggcgtggtatgggtcagcttccgtggggcagactattcactgcgggcggtgcgaatgaaaatacgccccttggtgacccag

SEQ ID NO: 10353 - DNA, 2598 bp, Artificial Sequence
  derived and/or modified sequence
atgttcagtatgcgaatcgtttgcctggtcttgtccgttgtcgggaccgcatggacagccgactctggagagggagatttcctggccgaaggcgggggggttcgcggacccagggtggtggagaggcatcagtcagcatgtaaagacagcgattggccgttttgtagcgacgaggactggaattataaatgtccaagtggctgtagaatgaagggcctgatcgacgaggttaaccaggacttcactaaccgaatcaacaaactgaagaacagtttgttcgagtatcaaaagaacaacaaagattcccatagcctgaccaccaacattatggagatattgagaggggacttctcatccgctaataatcgggacaatacttataatagagtgagtgaagacctgcgatctcgcatcgaagtcctgaagaggaaagtgattgagaaggtgcagcacattcagctgctgcagaagaatgtgcgagcccagctggtggatatgaaaaggctcgaagtggatattgatattaaaatcagatcctgtagagggtcctgctctcgggccctggccagagaagtcgatttgaaggattacgaagatcagcaaaagcagttggagcaggtgatcgccaaggacctcctgcctagtagagacaggcagcatctgccactgatcaaaatgaaaccggttcctgatcttgtccccggtaacttcaagtctcagttgcagaaagtaccaccagaatggaaagcactgacagacatgccccaaatgcgaatggaactggaacgccccggcggaaatgagattacccgcggcgggagtacaagttatggaacaggttccgagacggagtcccccagaaatccttcctctgccggctcctggaactctggctcctctggtccagggagcactggcaatagaaaccccggatcaagtggtacaggcgggaccgccacatggaagccaggatcaagcggccctggttctaccggttcatggaacagcggttcctctgggaccggctcaaccggtaatcagaacccggggagtcccaggccaggcagcacaggcacctggaatcctggctcctctgaacgaggcagtgccggccactggacttcagagtcaagcgtgagtggaagtaccggccagtggcacagtgagagcgggagcttcaggcctgatagtccaggctcaggcaacgcgcggccgaacaaccctgactggggcaccttcgaggaggtgtctggcaatgtaagtccagggaccagacgggaataccatacagaaaaattggtgacatccaagggcgataaggaacttaggaccggcaaggagaaagtgaccagcggttctactacaacaacccgaaggagctgttccaagaccgttactaagaccgtgattgggcccgacggtcacaaagaggttaccaaagaagtggtgacttcagaagacggatctgactgtcccgaggccatggacctggggaccttgagcggaataggaactttggacggttttcgccacaggcacccggacgaagcagctttcttcgatactgcttcaaccggaaaaacatttccgggattctttagtccaatgctcggggagtttgtgagtgagacagaatctcgaggcagtgaaagcggtatttttaccaataccaaggaatcctctagtcatcacccggggatcgccgaatttccttctcgcggaaaatcttccagctactcaaaacaatttactagtagtaccagttataaccggggcgactcaacatttgagagcaaaagttacaagatggcggacgaagcgggaagtgaagcagatcacgaaggtactcactccacaaagagaggccacgcaaagagtagaccagtacgcgactgtgatgatgtgctgcaaacacacccttctggcacacagtcaggcatcttcaacatcaaactgccggggtccagcaagatcttctcagtttactgtgatcaggagaccagccttggcggatggctgctcattcagcagcgcatggatgggagcctgaatttcaacagaacttggcaggactataaaagaggatttggctctcttaacgacgagggggagggtgagttctggctcggaaacgactatctgcacctgttgacccaacggggcagtgttctccgagtggagctcgaggattgggcagggaacgaggcatatgcagagtatcattttcgagtggggagtgaagcagagggatatgccctgcaggtgagctcctacgagggtactgctggagacgcattgatcgaggggtcagtagaagagggagctgagtatacgtcccacaataatatgcagttttcaacctttgatagggacgccgatcagtgggaggagaattgtgccgaggtgtacgggggcggctggtggtacaacaactgccaggctgccaatcttaacggtatctactatcccggagggtcttatgacccgcgaaacaatagcccatacgaaatcgagaacggcgttgtgtgggtttctttcagaggggcagattacagcctccgggcagtgcggatgaagatccgccctctcgtgactcag

SEQ ID NO: 10354 - DNA, 2598 bp, Artificial Sequence
  derived and/or modified sequence
atgttctcaatgagaatcgtgtgcctggttctgagcgtagtcggcacggcgtggaccgccgactctggcgaaggtgacttcctagcagagggtgggggcgtgagggggccacgcgttgtagagcgacaccagtcagcttgtaaagattctgattggccgttctgttcagacgaagattggaactataagtgtccatctggttgtagaatgaaaggcctcatagatgaagtcaaccaggactttactaataggattaataagctcaagaacagtctattcgaatatcagaagaacaacaaggactcccattccctgactaccaacattatggagatacttcggggtgatttctcgtccgcaaataatcgagataacacttacaatagagtgtctgaagacctccgcagtcggattgaggtgctcaagaggaaggtaattgagaaggtgcagcatatccagcttctacagaaaaacgttagggcgcagctcgtggatatgaagcggctagaggttgatatcgacatcaaaattcggagctgcagaggcagttgctctcgcgcccttgctcgggaggtggacctcaaggactacgaggaccagcagaagcagctggaacaggtcatcgccaaggaccttctaccctcccgcgaccgtcagcacctgccattaatcaaaatgaagccagtcccagatctggtgcccgggaactttaaaagccagttacagaaggttcctccagagtggaaagccttaactgatatgccgcagatgaggatggaactggaacgccccggcgggaatgagatcactcgaggagggagcacctcttacgggaccggttccgagactgaatctccccggaatccatcatcggccggcagctggaacagtggctcatccggccccggcagcactgggaaccgaaatccaggctctagcggcacagggggaaccgccacctggaagcccggttcctccggcccagggagcacaggcagctggaattccggctcaagcggcactgggagcaccgggaatcagaacccgggcagcccacgtcctggttctactgggacttggaaccctggctctagtgaaagaggttctgcgggtcattggacttctgagtcctcggtctctggttcgacagggcagtggcatagcgaaagcgggtcgttccgccccgacagccctggatctggcaatgcacgtccaaataacccagactggggaaccttcgaggaggtgagtggaaacgtgtctcctggaaccagacgagagtatcacaccgaaaagcttgtcacgtctaaaggggataaggaactccgcaccggcaaggaaaaggtgacatcaggctccaccaccaccactcggaggtcttgttcaaaaacggtgactaaaaccgtgatcgggccagatgggcacaaagaggtgactaaggaggtagtgacctctgaagacggaagcgactgtcctgaggcgatggatttagggacattgtccggaattggaaccctggacggctttagacatcgccatccagacgaggctgctttttttgatactgcttcaacaggcaagacattccctggttttttcagtcccatgctgggtgagtttgtctctgagactgagtctaggggctccgagtcaggtatatttacaaacactaaagagtcctcctcccaccacccaggtattgctgagtttccctctcgcggaaaatcctctagttattcgaaacagttcacttcctctacctcttataacaggggcgacagtacgttcgaatcaaaaagctacaagatggctgacgaagccggttccgaagcggaccatgaagggacccatagcactaaacgtgggcacgccaaatctcggcctgtacgtgattgtgacgatgtcttacagacccatcccagtggtactcagagcggaattttcaacattaagctgcccggcagctctaagatcttcagcgtctattgtgatcaggagacatcgctcggcgggtggctcctgatccaacagagaatggacggcagtttgaattttaaccgcacctggcaggactataagaggggcttcggaagcctgaatgacgagggggagggtgaattttggttaggtaacgattatctccacttacttacgcagaggggatcagtgcttcgcgtcgagctggaagattgggcgggaaacgaagcatatgcagaataccactttcgcgtcggatccgaggcggaagggtatgcgctacaggtgtctagctacgagggcacagcaggggacgcgcttatcgaggggtccgtggaggaaggcgcagagtacacaagccacaacaacatgcagtttagcacgtttgaccgagatgctgaccagtgggaagagaactgcgcagaggtctatgggggagggtggtggtacaacaattgccaggcagccaatctgaatgggatatattacccagggggttcatacgatcctcggaacaactccccgtacgagatagaaaacggggtggtgtgggtgagctttcgaggcgccgactacagtttgcgggcagtccggatgaaaatcagaccactggttacccag

SEQ ID NO: 10355 - DNA, 2598 bp, Artificial Sequence
  derived and/or modified sequence
atgttctccatgagaatcgtgtgtctggtacttagtgtggtggggactgcctggactgctgactctggagaaggagacttcctagcagagggagggggagtgcgggggcctagggttgtagaacgacaccagtccgcctgcaaagattcagattggcccttctgctccgacgaagattggaattataagtgtcccagtggatgtcgaatgaaggggctcatagacgaggtgaaccaggactttacaaataggatcaacaagctaaaaaattctctgtttgaataccagaagaataataaagattctcattctctgacaactaatatcatggaaatcctgagaggagatttttcaagtgccaacaaccgggataatacgtataaccgggtctccgaagacctacgaagtcggatcgaagtgctcaagcgaaaagtcattgaaaaagtccagcacatccaactcctacagaaaaacgttcgagctcagcttgtagacatgaagaggctagaagttgatattgatatcaaaatcagatcatgccgtggaagttgttctagagccctggctagggaagtcgatttgaaagattacgaagatcagcagaaacagctcgagcaggtgatcgctaaagatctgttgccttcacgcgaccgacagcacttacccctgataaaaatgaaaccagtgccagatcttgtccctgggaactttaagtctcagctgcagaaggttccaccagaatggaaagctctgactgatatgccccagatgcgaatggagctcgaaagacccgggggaaacgagataacaaggggagggagtacttcatatggaactggatctgagacagaatcacctcgcaacccctcctcagccgggagttggaactcagggagttcaggacctggatccactgggaatcgcaaccctggatcttcgggaacaggagggactgcgacatggaaacccggatcatcaggacccgggtctactgggagttggaactccgggtccagtggaacaggatcaacaggaaaccagaacccaggatccccccgaccaggatctactgggacgtggaaccccggatcctctgaaagagggagtgctggacattggacatcagaaagttccgtctctgggtcaactggacagtggcatagtgaatcagggtcatttaggcccgattcacccggatcagggaatgcacggcctaacaacccagactggggaacattcgaagaggtgtccggaaacgtgtctcctggaacaaggagggagtatcacacagaaaaactcgtcacttctaaaggggataaagaattgcgcactgggaaggagaaagtcacttctggatcaactacaacaactcggcggtcgtgttccaaaactgtgactaaaactgtaatcgggcccgatggacataaagaagtgacaaaggaagtggtgactagtgaagatgggtcggattgtcccgaagcaatggatctcggaacactgtctggaatagggacactcgacggatttcggcatcggcaccctgatgaggccgcattctttgatacagctagtactggaaaaactttccccggattcttttcccccatgttgggagaatttgtgagtgaaacggaatctagaggatctgaatcagggatcttcacaaacactaaagaatcttcatcccaccaccctgggatcgctgaattcccctctagggggaaaagttcttcctatagtaaacagtttactagttccactagttacaaccgaggggattccacatttgagtcaaaatcttataaaatggcagatgaagcaggatccgaagccgaccatgaagggacacactctacaaaaagggggcatgccaaatccagaccagttcgggattgcgatgatgttcttcagactcatccctctggaacacagtcaggaatatttaatatcaaacttccaggatcctcaaagatttttagtgtgtattgtgatcaggagacttctttgggaggatggctcctgatacagcagaggatggacggatcgctcaattttaataggacgtggcaggattacaaacggggatttgggtcgttaaacgacgagggggagggggaattttggttgggaaatgattatcttcacctgctgacacagagagggtccgttttacgtgtagagcttgaagattgggccgggaacgaagcctacgcggagtatcacttcagggtgggatctgaggccgagggatacgcactacaggtttcctcctatgaaggaactgccggagatgccctaatcgaaggatctgtggaagaaggggccgaatatacttcacacaacaatatgcagttctcaacatttgatcgggacgcagatcagtgggaggaaaattgtgcagaagtttacggaggaggatggtggtataataattgccaggccgctaatctcaacggaatctattaccctggagggtcctacgaccctaggaataatagtccttatgagatagaaaatggggtggtgtgggtgtcattcagaggggcagactattctttgcgggccgttaggatgaaaattaggccactcgttacgcag

SEQ ID NO: 10356 - DNA, 2598 bp, Artificial Sequence
  derived and/or modified sequence
atgttctcaatgcgaatcgtgtgcctggtcctttcggtcgtcggaacggcatggacagctgactcaggcgaaggcgactttctggcggagggcggtggagttagagggcctcgagtggtggaaagacaccaatctgcatgcaaggattctgattggccattttgttcagatgaggattggaactataagtgtccatccggctgccgtatgaaaggattaattgatgaggtgaaccaagattttacaaatcgcatcaacaaacttaaaaatagtctatttgagtatcagaaaaataacaaagattctcactcactaacaaccaacattatggagatcctgagaggtgatttctcgtcggcaaataatagagataacacgtataatcgagtaagcgaagatttacgctctcgtatagaggtacttaaacgtaaggtcattgagaaggtgcaacacattcaacttcttcaaaaaaatgtgcgggcgcaattggtcgatatgaaacgcctggaagtagatatcgatattaaaataagatcatgtagaggttcatgcagccgtgctctcgcccgagaggttgatcttaaagattacgaggaccagcaaaagcagcttgaacaagtaatcgccaaagaccttctaccgtcccgggatcgccaacatttgccattaatcaaaatgaaacctgtacccgacttagtcccaggaaattttaaatcacagttgcagaaagtgcctccggaatggaaagctctgacagacatgccgcagatgcgaatggagcttgaacgtccaggcggaaacgaaatcacgcggggagggtcgacatcctatgggacaggctctgaaaccgagagtccacgaaatcccagctccgctggctcttggaatagcgggtcaagcggaccgggaagtacgggcaatcgaaatcctggtagcagcggaaccggtggtacggcgacatggaaaccagggagctcaggaccaggatctactggcagctggaattctggcagcagcggcacaggatccacaggcaaccaaaatccgggctcgcccagaccaggaagcactggcacctggaatccgggcagctctgaacgggggtcggcgggccactggacatcggagtcaagcgtgtctggttcgaccggccagtggcactcagaatctggctcttttagaccggattctccgggtagcggtaatgcaaggccaaacaatcctgattggggaacatttgaggaagttagtggaaacgtatctcctggtactcgaagagagtatcacacagaaaaattggttacctcaaaaggggacaaagaacttagaacgggaaaagaaaaagtaacttcaggcagtactacgacaacacggcgatcatgctccaaaacggttaccaaaactgtcattggaccggatgggcataaagaagtgacaaaagaagttgtcacaagcgaggatggatctgattgtcctgaagcaatggacctaggaactttgtctggcattggtacattagatggatttcggcaccgacatcctgatgaggcagcgtttttcgataccgccagtacaggaaaaacatttcccggatttttcagcccgatgttaggagaatttgtgtctgaaacagaatcgcgcggttctgaatcgggaatttttactaatacgaaagaaagttcaagccatcatccggggatcgcggaattcccgtcaagaggcaaaagctcctcatatagtaaacagtttacatcttctacaagctataaccgtggagacagcacatttgagtcaaaaagctataagatggcggatgaagctggctctgaagcagaccatgagggaactcattctacaaagagaggccatgcaaaatcccgtccggttcgagattgcgatgatgttcttcaaactcacccgtcgggaacacaatcaggcatttttaacatcaagctgcctggcagttctaaaattttttcagtctattgcgatcaagaaacgagtttaggaggctggttgctcattcagcaaaggatggatggtagcctaaactttaaccgcacatggcaagattacaaacggggcttcggcagtttaaacgatgaaggcgaaggtgagttttggttaggaaatgactatttacatttgcttacgcaaagaggatctgttctgagagtggagcttgaggattgggcggggaacgaagcgtatgctgaataccactttcgtgtgggaagcgaagcggaaggatatgcactccaagtaagtagctacgagggtacagctggggacgccctcattgaggggagcgtcgaagaaggcgcagaatatactagccataataacatgcaattttccacctttgaccgcgatgcggatcagtgggaagaaaattgtgcagaagtgtatggaggaggatggtggtataacaattgtcaggccgcaaatctgaacggtatctactatccgggaggatcatatgatcctcgtaataacagcccgtacgaaatagaaaatggtgtcgtctgggtgagcttccgaggggccgattattctcttagagctgtacgtatgaaaattagaccgttagtcacgcaa

SEQ ID NO: 10357 - DNA, 2598 bp, Artificial Sequence
  derived and/or modified sequence
atgttttcgatgcgtatagtttgtttagttttatcggtagttggtacggcgtggacggcggattcgggtgaaggtgattttttagcggaaggtggtggtgttcgaggtccgcgagttgtagaacgacatcaatcggcgtgtaaagattcggattggccgttttgttcggatgaagattggaattataaatgtccgtcgggttgtcgaatgaaaggtttaatagatgaagtaaatcaagattttacgaatcgaataaataaattaaaaaattcgttatttgaatatcaaaaaaataataaagattcgcattcgctaacgacgaatataatggaaatattacgtggtgatttttcgtcggcgaataatcgagataatacgtataatcgtgtttcggaagatttacgttcgcgaatagaagtactaaaacgtaaagtaatagaaaaagttcaacatatacaactactacaaaaaaatgtacgagcgcaactagtagatatgaaacgtctagaagtagatatagatataaaaatacgttcgtgtcgtggttcgtgttcgcgagcgctagcgcgagaagtagatttaaaagattatgaagatcaacaaaaacaactagaacaagttatagcgaaagatttactaccgtcgcgtgatcgtcaacatttaccgttaataaaaatgaaaccggtaccggatttagttccgggtaattttaaatcgcaattacaaaaagttccgccggaatggaaagcgctaacggatatgccgcaaatgcgtatggaattagaacgtccgggtggtaatgaaataacgcgtggtggttcgacgtcgtatggtacgggttcggaaacggaatcgccgcgaaatccgtcgtcggcgggttcgtggaattcgggttcgtcgggtccgggttcgacgggtaatcgtaatccgggttcgtcgggtacgggtggtacggcgacgtggaaaccgggttcgtcgggtccgggttcgacgggttcgtggaattcgggttcgtcgggtacgggttcgacgggtaatcaaaatccgggttcgccgcgtccgggttcgacgggtacgtggaatccgggttcgtcggaacgtggttcggcgggtcattggacgtcggaatcgtcggtatcgggttcgacgggtcaatggcattcggaatcgggttcgtttcgtccggattcgccgggttcgggtaatgcgcgaccgaataatccggattggggtacgtttgaagaagtatcgggtaatgtatcgccgggtacgcgtcgtgaatatcatacggaaaaactagtaacgtcgaaaggtgataaagaactacgaacgggtaaagaaaaagttacgtcgggttcgacgacgacgacgcgacgttcgtgttcgaaaacggtaacgaaaacggtaataggtccggatggtcataaagaagttacgaaagaagttgtaacgtcggaagatggttcggattgtccggaagcgatggatttaggtacgctatcgggtataggtacgctagatggttttcgtcatcgtcatccggatgaagcggcgttttttgatacggcgtcgacgggtaaaacgtttccgggttttttttcgccgatgttaggtgaatttgtatcggaaacggaatcgcgaggttcggaatcgggtatatttacgaatacgaaagaatcgtcgtcgcatcatccgggtatagcggaatttccgtcgcgtggtaaatcgtcgtcgtattcgaaacaatttacgtcgtcgacgtcgtataatcgtggtgattcgacgtttgaatcgaaatcgtataaaatggcggatgaagcgggttcggaagcggatcatgaaggtacgcattcgacgaaacgaggtcatgcgaaatcgcgaccggtacgtgattgtgatgatgttctacaaacgcatccgtcgggtacgcaatcgggtatatttaatataaaattaccgggttcgtcgaaaatattttcggtatattgtgatcaagaaacgtcgttaggtggttggttactaatacaacaacgtatggatggttcgttaaattttaatcgtacgtggcaagattataaacgaggttttggttcgttaaatgatgaaggtgaaggtgaattttggctaggtaatgattatttacatttattaacgcaacgaggttcggtactacgagttgaattagaagattgggcgggtaatgaagcgtatgcggaatatcattttcgagtaggttcggaagcggaaggttatgcgttacaagtatcgtcgtatgaaggtacggcgggtgatgcgttaatagaaggttcggttgaagaaggtgcggaatatacgtcgcataataatatgcaattttcgacgtttgatcgagatgcggatcaatgggaagaaaattgtgcggaagtatatggtggtggttggtggtataataattgtcaagcggcgaatctaaatggtatatattatccgggtggttcgtatgatccgcgtaataattcgccgtatgaaatagaaaatggtgtagtttgggtatcgtttcgaggtgcggattattcgttacgtgcggtacgaatgaaaatacgaccgttagttacgcaa

SEQ ID NO: 10358 - DNA, 2598 bp, Artificial Sequence
  derived and/or modified sequence
atgttctcgatgcggatcgtgtgcctggtgctgtcggtggtcggaacggcctggaccgccgattctggcgaaggcgatttccttgctgagggcggtggagtccgcggcccgcgcgtggttgagcgccatcagtcggcatgcaaagattccgactggcccttctgctcggacgaagattggaattacaagtgccctagcgggtgcaggatgaaaggcttgatcgacgaggtgaaccaggacttcaccaacagaattaacaaactgaagaatagccttttcgagtaccagaagaacaacaaggattcgcattccctgaccaccaacataatggagattctgcggggcgacttctcgtcagccaataacagagacaatacctacaatcgggtgtcagaagatctgcgctccaggatcgaagtcctcaaacgcaaggttatcgaaaaggtgcagcatatccagctgctgcaaaagaacgtgcgcgcgcaactggtggacatgaagcgcttggaggttgacatcgatatcaagatacgcagctgtcggggaagctgctcacgggcgctcgctcgcgaggtggatctgaaggactacgaagatcaacaaaaacaactggagcaagtgatcgctaaggacctcctgcctagccgcgacagacagcatctgccactcatcaagatgaagccggtcccggacctggtcccaggaaatttcaagtcccagctccagaaggtccccccggagtggaaggccctcacggacatgccacagatgagaatggaacttgaaagaccgggaggcaacgaaatcactcgtggaggttctacgtcgtacgggactgggtccgagactgaatccccgcgaaacccgtcaagcgctggctcatggaactcgggatcgtcgggaccggggtcgactggaaaccgcaaccctgggtcatcaggcacgggcggaactgcgacttggaagccaggaagcagcggaccgggcagcactgggtcgtggaatagcggctcctccggaaccggcagcaccggaaaccagaatccaggatcccctagacccgggtcgactggcacttggaaccctggatcatcggaacggggaagcgccggacactggacttccgagtcctctgtctccggatcgacgggccagtggcattctgaatcaggtagcttcagacccgattcgcccggatcgggtaatgcgcgccctaataaccccgactgggggacgttcgaagaagtttcgggcaatgtgagcccgggcactagacgcgagtaccatactgaaaagctggtgacttccaagggagacaaagaactccggactggaaaagaaaaggtcacttccgggtcaaccaccaccaccagacggtcatgctcgaaaacggtgaccaagaccgtgatcggaccggatgggcacaaggaagtgactaaggaagtggtcaccagcgaagatggctccgattgccccgaggcgatggatctcggtaccctgagcggcattggcaccttggatggatttagacataggcacccggacgaagcggcattcttcgacactgcctcaaccggaaaaaccttcccgggattcttctccccgatgctgggagaattcgtgtcggagactgagtcccggggttcagagagcggaatcttcaccaataccaaggaaagctcgtcacaccaccctggtatcgccgaattcccttcccgcggaaaatcttcatcatactccaaacagttcacttcgtccacctcctataaccgcggagattcgacgttcgaatccaagtcctacaagatggctgacgaggccggctcggaggcggaccacgaaggaacccactcaactaaacgcgggcacgccaaaagccgcccagtgcgcgactgtgacgatgtgctgcaaacccacccgtccggaactcaaagcggaattttcaacatcaagctgccgggatcctctaagatcttttccgtgtactgcgaccaggaaacctcacttggcggttggctcctgattcaacaaaggatggacggatcgctgaacttcaatagaacctggcaggattacaaaagaggattcggatctctgaacgatgagggagagggggaattttggctgggaaatgattatctccacctgctgacccagcgcggatcggtgctcagagtggagctggaggactgggccggcaacgaagcctacgcagagtaccactttagagtcggttcggaggccgaaggatacgcactgcaagtgtcaagctacgaaggcaccgcgggagacgccctcattgaagggtccgtggaagagggagctgaatacacgtcccacaacaatatgcagttctcgactttcgaccgggatgcagatcaatgggaagaaaattgtgccgaagtttacggtggcggatggtggtacaacaattgccaggctgccaacctgaacggtatctactaccctggcgggtcatacgaccctcggaacaattcgccgtacgagatcgagaatggggtcgtgtgggtgtccttccggggggccgactactcactgagagcagtgcggatgaagatccgccctctcgtcacccaa

SEQ ID NO: 10359 - DNA, 2598 bp, Artificial Sequence
  derived and/or modified sequence
atgttctccatgagaatcgtctgtctggtcctttccgtcgtgggaactgcttggacggcagactccggtgaaggagactttttggcagaaggaggaggagtgcgcggcccacgggttgtggaaagacatcaatcggcatgtaaggattccgattggccgttttgcagcgacgaagattggaactacaagtgcccgtcagggtgtagaatgaaggggcttatcgatgaagtcaaccaggacttcaccaacaggataaacaaactgaaaaactccctttttgaatatcaaaagaacaacaaggatagccattccctcactactaacattatggaaatcctgagaggcgattttagctccgcaaataacagagataatacctacaaccgggtgtccgaagatttgcggtcgaggatcgaagtgctcaagcggaaggtgattgagaaggtgcagcatatccagcttcttcagaagaacgtgcgggcacaattggtcgatatgaaacgcctggaagtcgacatagacatcaaaatacgcagctgtaggggttcttgttcgagggcactggcgcgagaagtggatcttaaggactacgaagatcagcaaaaacaactggaacaggtgattgccaaggatctccttccatcgcgggacagacaacatctgcctctcattaagatgaagccagtgcccgatctggtccccgggaatttcaaatcccaacttcagaaggtcccgcccgaatggaaggcactgactgatatgccccaaatgcgcatggaactcgaacgacctggaggaaatgagatcactaggggagggtccacttcctacggaacgggaagcgagactgaatcgcctcgcaatccttccagtgcaggctcgtggaactctggttcctccggcccaggctcgaccggtaatcggaacccaggttcaagcggtactggaggaaccgcaacgtggaagcctgggagttctggtccagggtctaccggtagctggaatagcggaagcagcggaaccggaagcaccggcaatcaaaaccctggttcgccaagacctggaagcacgggaacctggaatccaggttcatcggaacgcggttcggcaggacattggacctcggagtcatcggtgagcgggtccactggccaatggcatagcgaatccggttcgtttcgtcccgactcgcctgggagcggtaatgcgcgtccgaacaatcctgactggggtacttttgaggaagtgtcaggaaatgtttcgcccggaaccagacgggagtaccacactgagaagctggtgacttccaagggagataaggagctgaggaccggaaaggagaaagtcacctcgggatccacgaccactaccagacggtcctgtagcaagaccgtgaccaaaaccgtcataggacctgacggtcataaggaagtgactaaggaggtggtcacttcggaagatggaagcgactgtcctgaggcaatggatttgggtactctttcgggcattggtactctcgatggatttagacaccgacatccggatgaagcagcatttttcgacactgcctcgactggtaagaccttccctgggtttttcagccctatgcttggggaatttgtgtcggaaactgagtcacgtggtagtgagagcggaatctttaccaacaccaaagagtcatcgtcgcatcatccaggtattgcggaatttccttcccggggcaagagcagctcctacagcaaacaatttactagctcaacctcgtacaaccgtggggattccactttcgaatccaagagctacaagatggcggatgaggcgggttcagaagcagaccatgaaggcactcattcaaccaagagaggacatgctaagtccagacccgttagagattgtgatgatgtgcttcaaactcatccttcaggtacccagtcggggatcttcaacataaagctcccaggtagctccaagatcttctccgtgtattgtgatcaagagacttcgttgggaggatggctgttgattcagcaacggatggatggttcactgaactttaatcgcacttggcaggactataaacgagggttcggttcgcttaacgacgagggagagggtgaattttggcttggtaacgattaccttcatctcctcacgcaaaggggttccgtcctgcgtgtcgagctggaggattgggcaggtaacgaggcgtacgcagaataccatttcagggtcggatcggaagcggaaggatacgccctgcaagtgtccagctacgaaggaactgcaggagacgcgctgatcgagggttccgtcgaggaaggggcagagtacacttcgcacaataacatgcagttttcaacttttgatcgcgatgcagaccaatgggaggagaactgtgcagaagtgtacgggggtggttggtggtacaacaactgtcaagcagccaacctcaacggcatctactaccccggtggaagctacgatccgcgtaacaactcaccatacgagatcgaaaacggagtggtgtgggtgtcatttcgaggagctgactactccctccgtgccgtgcggatgaaaatcagaccactggtgactcag

SEQ ID NO: 10360 - DNA, 2598 bp, Artificial Sequence
  derived and/or modified sequence
atgttctctatgagaattgtctgtttggttttgagtgtcgttggaaccgcctggacggctgactcaggtgagggagatttcctagcagaaggaggtggagtgcgaggaccaagagtcgtagagcgacatcaatcggcatgtaaggatagtgattggcctttttgttctgacgaagattggaactataagtgcccatctggttgccgcatgaaaggactaatagatgaagtgaatcaagattttacaaaccggattaacaagcttaagaatagtctcttcgaataccaaaagaataacaaggatagtcatagtctcactacaaatattatggaaattttgagaggggatttcagttcggccaataatcgcgataacacgtataatagagtctcagaggaccttagatctcggatcgaagttctgaaacggaaggtaatagaaaaagtgcaacacattcaactcctacagaagaacgttcgcgcacaattggttgacatgaaacgacttgaagttgacatcgatattaagatccgatcatgcaggggatcttgtagtagggctttggctcgtgaagtggacctgaaggactatgaagatcagcagaaacagctggaacaagtaattgctaaggatttattgccttctagagataggcaacacctgccattgattaaaatgaaaccggtccctgatctcgtgccaggtaacttcaaatcgcaattgcagaaagttccaccagaatggaaggctcttaccgatatgccacaaatgcgaatggaactagagagaccgggcggtaacgagataacgcgaggaggttcaacgagctacggaacaggcagcgagactgaatcgccaaggaacccatcttcggccggctcttggaactccggttcatcagggccaggaagcacaggaaacagaaacccaggatcttctggcacaggaggaacagcaacatggaagccaggatcctcagggccagggtctacaggatcatggaattcaggatctagtggaacaggatcaacaggaaatcaaaatccggggtcgccccgtccaggatcaactggaacatggaatcctggatcgagtgagagaggttcggcaggacattggacatcggaatcgagcgtctcgggatcaacaggacagtggcattctgagtcaggttcctttcgacctgactctccgggttctggcaatgcccgcccaaataatcccgattggggtactttcgaagaagtctctggtaatgttagtccgggaacgcggcgtgaatatcatacagaaaagctagtcacttcaaagggagataaggagctccgtactgggaaggaaaaagtgacttctggctcaactaccacgacgcggagatcttgttcaaaaacagtgaccaaaacagtgattggaccggacggacacaaagaggtgacgaaggaagttgttacctcagaggatggaagtgattgcccagaagcaatggacctgggaacgttgtcaggaattgggacccttgatggtttcagacaccgtcatccggacgaagccgcgtttttcgatacggcgtctaccggtaagactttcccaggcttttttagtccgatgcttggggaattcgtttcggaaacagaaagtagaggaagcgagtccggaatttttacgaatactaaagagtcctcgtctcatcacccaggtatcgctgaatttccgagtcgcggcaaatcttcctcttactctaaacagtttacctcgtctacttcttataatagaggagattcgacttttgaaagcaagtcttacaagatggcagacgaagcgggatccgaggcagatcatgaaggaacgcattccactaaaagaggacatgctaaatcaagaccagtcagagactgcgacgatgttttacaaacccacccatcagggacacagtctggaatattcaatattaaattaccgggatcatcaaaaatcttttctgtttattgtgatcaggaaacatcattgggcggatggcttctcattcaacaacgaatggatggatccttgaacttcaatcgaacatggcaggactacaaaagaggcttcggatcacttaatgatgagggagaaggagaattctggttaggcaatgattaccttcatttactgacgcagaggggatcggttctaagagtggaattggaagactgggcaggtaatgaagcatatgctgagtaccattttagggttggtagcgaagcagaaggttacgctttacaggtatcatcgtatgaaggaactgcgggagacgcgttgattgagggttcagttgaagaaggagcagagtacacatcccataataatatgcaattttcaactttcgaccgagatgcggatcaatgggaggaaaattgcgcagaagtctacggaggagggtggtggtacaataattgtcaagccgcgaatcttaacggtatttattacccaggaggatcctacgatccacgaaataattctccatatgaaattgaaaatggagtggtttgggtctcttttagaggcgcggattattctttgcgggccgtacggatgaagatacgaccgctagtgacacaa

SEQ ID NO: 10361 - DNA, 2598 bp, Artificial Sequence
  derived and/or modified sequence
atgttctccatgagaatagtgtgcctggttctgtctgtggtgggcaccgcctggacagctgacagcggagagggggacttcttagctgaaggcggcggggttcggggcccccgggtggtcgaaagacaccagagcgcctgcaaggattctgattggcccttctgctcagatgaagactggaactacaagtgtccatccggatgtcggatgaagggccttattgatgaagtcaatcaagattttaccaataggataaacaaattaaaaaattctctgtttgaataccaaaaaaacaacaaggatagccactccctgacaactaatattatggaaatcctacggggcgactttagcagtgctaacaacagggacaacacctacaacagggtgagcgaagacttaaggagccggatagaggttttaaaacgcaaggttatagaaaaggtgcaacatatacaattactgcagaagaacgttcgggcccaactcgtagacatgaaacgtctagaggtggatattgatatcaaaattcgtagctgtcggggtagttgcagcagggccctggcccgagaggtggatctcaaagattatgaagatcagcagaagcagctcgaacaggttatcgccaaagatctgctgccaagccgagaccgccagcatttacctctcatcaagatgaaacctgtgcccgacctggttccagggaactttaagtctcagctgcaaaaggtccctcctgagtggaaggccctgactgatatgccacagatgcggatggaactggaaagacccggcggcaacgagatcacccgaggggggtccacatcctacggaacaggatccgagaccgagagtcctagaaatccaagctctgccggctcttggaactccgggtcctctgggcctggcagcaccgggaaccggaatcctggatcctcaggaaccggcggaaccgccacctggaagcctggctcttctggccctgggtccactggtagttggaactccggatcctccggtaccggtagtacaggtaatcagaaccccgggagcccccgtcctgggtcaactgggacttggaaccccggcagcagtgaaagaggatccgctggacactggacatctgaaagcagcgtatctgggtccaccggccagtggcattcagagtcaggcagctttcggcccgactctccaggatcaggcaacgcaagacccaacaatccagactggggcacattcgaggaggtgtctggtaacgtgtccccaggcacacggagagaataccatactgagaaactggtgacctccaaaggcgataaggaactgcggacaggcaaggagaaagtgacctctggctctacaacaactactcgtcgttcctgcagcaaaaccgtgaccaagactgtgatcgggccagatggccacaaggaggtcacaaaggaggtggtaacttccgaggatggtagcgattgtcctgaggccatggacctgggaactctgtctggaatagggaccctcgacggcttcagacatagacatcctgatgaggcagctttctttgataccgctagcacaggcaaaaccttccccggcttcttttccccgatgctaggggagttcgtcagcgagactgagtctcggggctcagagagtgggatattcacaaacacaaaggagtccagtagccatcatccaggcattgctgagtttccctccagaggtaaatcttcatcctattctaaacaattcaccagctctacctcatataatcgtggtgactcaacattcgaaagtaagagttataaaatggccgacgaggccggaagcgaagcagatcatgagggcactcactcaacaaaacgtggtcatgccaaaagccgaccagtgcgcgactgtgacgatgtgcttcagactcatcctagtggcactcagagcgggatcttcaatataaaactgcccgggtcttccaaaatattcagtgtctactgcgaccaggagacttcactggggggttggttactcattcagcagagaatggatgggagcctgaacttcaacagaacctggcaggactacaaacgggggtttggcagcctgaacgacgagggagaaggcgaattttggctgggcaacgactacctgcatcttttaacccaaaggggatccgtactgcgggttgagctggaggattgggccgggaatgaggcttatgccgagtatcatttcagggtcggcagcgaggctgaagggtatgctcttcaggtttcttcctatgagggaaccgcaggagatgctctgattgaaggctcagtagaggagggggccgagtacacctctcacaacaacatgcaattttccacctttgaccgggacgctgaccagtgggaagaaaattgcgctgaagtatatggcgggggctggtggtacaacaattgtcaagcagccaatctgaatggcatctattacccagggggttcctacgacccccgaaacaatagtccatacgagatcgagaatggggttgtgtgggtgtcattcaggggggccgattacagcctaagagctgttcgtatgaagattagacccctagtgactcaa

SEQ ID NO: 10362 - DNA, 2598 bp, Artificial Sequence
  derived and/or modified sequence
atgttctctatgcgcatagtatgccttgttctgtccgtggtgggtaccgcctggactgctgactctggtgaaggtgatttcttggcagagggtggaggagtcagaggcccccgcgttgttgagcgtcaccagtctgcctgtaaggacagcgattggcccttttgctccgatgaggactggaattacaagtgccccagtggatgcagaatgaagggcctgatcgatgaggtcaatcaagattttactaacaggatcaacaaactgaaaaactccttgttcgaatatcagaagaacaataaggacagtcattctcttaccacaaacattatggagatcctgcgcggagatttcagtagtgccaacaaccgcgacaatacatacaacagggtcagtgaagatctcaggagtaggattgaagttctcaaaagaaaagtaatcgagaaagtccaacatatccagctgctgcagaaaaacgtaagagcccaattggtcgatatgaaaagattggaagtggacatcgatattaaaatcagatcatgccgtggctcatgttctagagcattggcaagagaagtggacctgaaggactatgaggatcaacaaaagcagctggagcaggtgatagctaaggatctgctcccatctcgtgatagacaacatctgccacttatcaaaatgaagcccgtgcccgatcttgtgcctggcaactttaagagtcaattgcagaaggtacctcctgagtggaaggctctgaccgatatgcctcagatgaggatggaattggaacgccctggcggaaacgaaatcactagaggtggatcaacttcctacggtactggtagcgaaactgaatcccctaggaatccaagcagtgccggaagctggaattcaggctcatctggcccaggttccaccggaaacagaaacccaggctcctctggtacaggcggaactgcaacttggaaacctggatcttctggtcctggctctactggatcttggaatagtggtagctctggcactggttcaaccggaaaccaaaatcctggtagccctcgtcctggatccaccggcacatggaatcccggatcaagcgagaggggttccgccggccactggacaagtgagtcttcagttagcggctctaccggacagtggcatagcgagtctggctctttccgtcccgactcccctggttccggaaacgcaaggcccaataaccctgactggggtactttcgaggaagttagtggcaatgtatcccctggaactaggcgcgaataccacacagaaaagttggtgactagtaagggagataaggagctcaggacaggaaaggagaaggtgacatcaggttctactacaactacacgtagaagctgctctaaaaccgtgaccaaaactgtcatcggtccagatggtcataaggaagtcacaaaggaggtggtgacctccgaagacggctcagactgccctgaggcaatggaccttggaactctgtctggcatcggtactcttgatggattccgtcacagacatccagatgaggcagccttttttgacaccgcatcaacaggtaaaacctttcctggctttttctccccaatgttgggagaattcgtttctgaaaccgaatctagaggttctgagtccggcatttttacaaatactaaggagtccagctcccaccatcccggcatagcagaatttccatccaggggtaagagtagcagttattccaagcagttcaccagttccactagctataacaggggagattccactttcgagtctaagtcttataagatggccgatgaagctggatctgaagcagaccatgagggtacacactcaactaaacgtggtcatgccaagtccaggcctgtgcgtgactgtgacgacgttctccagacccacccttccggtactcaatccggaatcttcaacatcaagctgcctggcagtagtaagatcttttccgtctactgcgaccaagagaccagccttggaggctggctgctgatccagcagcgcatggacggaagcctcaacttcaaccgtacttggcaggactataagcgtggtttcggatcactcaacgacgagggagaaggagagttctggttgggtaacgattacctgcaccttttgacacaaaggggatccgtgctcagagtggagttggaagattgggcaggaaatgaggcttacgccgagtaccacttcagagtgggctccgaagctgagggatacgctttgcaggtttcatcctacgagggtacagccggcgatgctctcattgagggatccgtcgaggagggagctgaatacactagtcataacaacatgcagttctcaacctttgaccgtgatgctgatcagtgggaggaaaattgtgcagaggtgtacggtggcggatggtggtataataactgtcaagccgcaaatttgaatggcatttactatcccggcggctcctacgatcctagaaataactctccatatgagatcgagaatggagtcgtgtgggtatccttccgtggcgccgactattccctgcgcgcagttaggatgaagatccgcccactggtgacccag

SEQ ID NO: 10363 - DNA, 2598 bp, Artificial Sequence
  derived and/or modified sequence
atgttcagcatgcgaattgtctgcctcgtgctgtcagtagttggaacggcttggacagcagattccggcgaaggggattttctagccgaaggggggggggtgcgcggtcccagagttgttgaacgccaccagtcagcctgtaaagattccgattggcctttctgcagtgacgaagattggaactacaaatgcccaagcggctgccgtatgaaaggactcattgatgaggtgaaccaagatttcacgaatcgaatcaataaactgaagaatagtttgtttgagtaccaaaagaataacaaggatagccactccctcacaaccaacatcatggaaattctgagaggggacttctcttccgcaaacaatagagacaatacttataatagagtttccgaagatttacgtagccgaattgaggtgctgaagcggaaagtcattgaaaaagtgcagcatatccagttgctgcaaaaaaatgttcgcgcacagttagtggatatgaagcgacttgaggtagatatagacatcaaaatcagatcatgccgagggagctgttccagggccctggctagggaagtcgacctaaaggactatgaggatcaacagaaacagttagaacaagtgattgccaaggacctcctaccatcacgagaccgtcagcatttgcctttgatcaaaatgaagccagtgccagacttggtgccaggtaattttaagagccagctgcaaaaggtgcccccagagtggaaggccctgactgatatgccgcagatgcgaatggagttagagagacccggcgggaacgagatcacgagaggaggctccacgtcttatgggactggatctgaaaccgagtccccacgaaatccaagctctgctggcagctggaatagtggctcttcggggcccggctcgacgggaaatagaaatccagggtcatcgggcaccggcggaacagctacctggaaacccggctcgtcaggccccggatctactgggtcctggaattctgggtctagtgggaccgggtcgacagggaatcaaaacccgggatcaccgcgacccggaagcacaggaacatggaaccccggctcttctgaaaggggtagcgcaggacattggaccagcgaaagttcggtgtccggatcaacagggcagtggcattccgagagtgggtcttttagacccgactcccccggatcgggtaatgccagaccgaataatcccgattggggtacctttgaggaggtatcgggcaatgtctcgccgggaacccgcagggagtatcacactgaaaagttggttacaagcaagggcgataaggaactgcgaaccggaaaggaaaaggttacctctgggagcaccacaacaaccaggaggtcctgttctaagactgtcacaaaaaccgtaatcgggccggatggccacaaggaggtgactaaagaggtcgttacgagcgaggacggttccgattgcccagaagccatggacctgggcacactgtccggaattggcaccctggatggattcagacacaggcacccggacgaagccgctttcttcgacactgcctctaccggtaaaaccttccctgggttcttctctccaatgctgggcgagtttgtgtccgaaactgagtcaagggggtctgaaagcggcattttcaccaacaccaaagagtcctccagtcatcaccccggaatagccgaattcccttcacgaggcaaaagctcctcctactccaagcagtttacaagctcaactagctacaacaggggtgatagtacattcgaaagcaagtcttacaagatggctgacgaagctggtagcgaagcagaccacgagggaactcattcaacaaaacgaggccacgctaaaagtcggcccgtgcgagattgcgatgatgtgctgcagacccaccccagtgggacacagagcggtatctttaatatcaagcttccggggagctccaagattttctcagtgtactgtgaccaggaaacctctttgggtgggtggttactgatccaacagagaatggatggctcactgaattttaataggacttggcaggattacaagaggggtttcggatccctgaatgacgagggagaaggagaattttggctgggcaacgactatctccaccttttaacccagagagggtcagtactcagagtggaacttgaggattgggcgggtaacgaagcttacgcagaatatcacttccgagtaggtagtgaagcggagggatacgcgctgcaggtctcgtcatatgaggggaccgctggagatgccctgatagaagggtctgttgaagaaggagccgagtacacgagtcacaataacatgcaattctccacgttcgatcgtgatgccgaccagtgggaggaaaactgtgctgaagtttacggaggcggctggtggtacaacaactgtcaagcagctaacctgaatgggatatattatccaggaggttcctatgatccacgaaacaattctccctacgaaatcgaaaatggagtcgtctgggtttccttcagaggggctgattactccctgagagctgtaagaatgaagatccggccactagtcactcaa

SEQ ID NO: 10364 - DNA, 2598 bp, Artificial Sequence
  derived and/or modified sequence
atgttctccatgcgtatcgtgtgtctggtccttagcgtggtgggaaccgcatggactgcagactcaggggagggtgacttccttgccgaaggtgggggcgtgagaggacctcgggtcgtcgagcgtcaccagtccgcctgtaaggactcggactggcccttttgttccgacgaggattggaactacaagtgtccttcgggttgtaggatgaaagggctcattgatgaggtcaaccaggacttcactaacagaattaacaaacttaagaattccctgttcgaatatcagaagaacaataaggattcgcactcacttaccaccaacattatggaaatcctgcgaggggacttctcctccgctaacaacagggataacacctacaatcgggtttcagaagatcttagatcaagaatcgaagtgctgaagcgcaaggtcatcgagaaggtgcaacatatccagcttctccaaaagaatgtccgcgcacagttggtggatatgaagcgcctggaagtcgatattgacattaagatccggtcatgtcgagggtcctgttcgcgggcgctggcgagggaagtggatctgaaagattacgaagatcaacaaaagcagttggaacaggtgatagcgaaagaccttctgccttcgcgggacagacagcatctgcccctgattaagatgaagcccgttccggacttggtgcctggtaatttcaagtcgcaacttcagaaggtgcctccagaatggaaggcactgaccgacatgccgcagatgagaatggaattggaacgtcctggtggaaacgagattactagaggaggttccacctcgtacggaaccggttctgaaactgaatcgcctcggaacccttcctccgcaggatcgtggaacagcggctcgtcaggacctggtagcactgggaaccgcaacccagggtcctccggaactggaggaaccgcaacgtggaagccaggttcgtcgggccccggatctacgggatcctggaattccgggagcagcggaaccggctcgaccggaaaccaaaatcccggatcacctcggcccggatcaactgggacgtggaacccgggctcgtcggaacgaggctcggccggtcattggacttccgaatcctcggtatcaggttcgaccgggcaatggcattccgaaagcggcagcttcagaccagacagccccggatcaggaaacgcacgaccaaacaatccagattggggaaccttcgaagaagtgtcaggtaacgtgtcacctggcacccgcagggaataccatacggagaaactggtgacctcaaagggagataaagaactgagaactggcaaggaaaaagtgacttcgggaagcacgactaccaccaggagatcatgttccaagactgtgaccaagaccgtcataggacctgatggccacaaggaggtgactaaggaagtcgtgacctcagaagatgggtccgactgtcctgaggcaatggatctgggtaccctgtccggaattggtacgcttgatggattcagacacagacacccagacgaggccgcgttttttgataccgccagcactggtaagacctttcctggctttttcagtccaatgctgggagaattcgtgtccgaaaccgagtcgcgcggaagcgaaagtggaatctttaccaacacgaaggagtcgtcgtcgcaccaccctggaattgcagaatttccatcccgaggaaagtcctcatcctactcgaagcagttcacgtcgtcgacctcctacaaccgaggggactccacctttgagagcaagtcctacaagatggcagacgaggcgggttcagaggctgaccatgaaggaactcattccaccaagagaggacatgcaaagagcagaccagtgagggattgcgatgatgtccttcaaacccatccttccggaactcaaagtgggatctttaacattaagttgcctggatccagcaagatcttcagcgtgtactgcgatcaagaaacttcactcggaggctggctcctgatacaacagcgcatggatggaagcctcaatttcaacaggacttggcaagactacaaacgcgggtttggaagcctgaacgacgaaggcgagggcgagttctggcttgggaatgattacctgcatctcctgacccagagaggttcggttctccgtgtggaacttgaggattgggcaggcaacgaggcgtacgctgaataccattttagggtgggtagcgaagcagagggttacgccctccaggtgtcatcctacgagggaactgcaggtgatgcgcttatcgaaggttcagtggaagaaggagccgagtacacctcgcataacaacatgcaattttcgacgtttgatagagatgcagatcaatgggaagaaaactgtgcagaagtgtacggcggaggatggtggtacaataactgccaagccgcaaatcttaatgggatttactacccaggtggatcctacgatcctcggaacaattcgccttacgaaatagaaaacggagtggtgtgggtgtcgttccgtggcgcagattactcactgagagcagtgcggatgaagattcgacctctggtgactcaa

SEQ ID NO: 10365 - DNA, 2598 bp, Artificial Sequence
  derived and/or modified sequence
atgttctctatgcggattgtgtgccttgtgctttctgtggtcggcaccgcatggacggccgacagcggcgagggggactttctcgccgagggagggggcgtgcgcgggcctcgtgtggtcgaacgacaccagtctgcgtgtaaggactccgattggcctttctgctctgacgaagactggaactataagtgtccgagtggctgcaggatgaagggcctgattgatgaggtgaatcaggacttcacgaatcgcatcaataagcttaagaatagcttatttgaataccagaaaaacaacaaggattcccactcactgacaacgaatatcatggagatattgcggggcgacttttctagcgccaataaccgcgacaacacctacaaccgagtttccgaggatctgcggtctaggattgaggtcctcaaacggaaggtgattgagaaggtgcagcatatccagctgctccagaaaaatgtcagagcccagctggtagacatgaagagactagaagttgacattgatataaaaattaggagttgtcgaggatcttgctctcgagctctagcacgcgaagtggacctgaaggattatgaggaccagcagaagcagcttgaacaggtcatagctaaagacctccttccttcacgcgatagacaacatctgccccttattaagatgaaacctgttcccgatctcgtccctgggaattttaaaagccagcttcagaaggtaccgcctgagtggaaagcgttaacggacatgccacagatgcgcatggagctggagaggcctggcggcaacgagatcactaggggcggaagcaccagctacggcacaggatccgagactgagagtcctcgtaatccctcgtccgctggtagctggaactccggctcctccgggcccgggtctaccgggaacagaaatccaggctcatcaggaaccggcgggaccgccacatggaaacccggaagctctggccccggaagcaccggtagctggaatagcggtagttcaggtacagggagcactggaaatcagaacccgggaagcccacggccaggttctactggtacctggaatcccggctctagtgagcgggggtctgccgggcattggacttccgagtcctcagtgtctggctccaccggacagtggcatagcgagtccgggtcgttcagaccggactctccaggttcagggaatgctcgcccgaacaaccccgattgggggacgtttgaagaggtaagtggaaacgtatcccccgggacacgccgcgaatatcatacggagaagctggtgacttccaagggcgacaaggaattgaggactgggaaggagaaggtgaccagtggctcaaccacaaccaccagaaggagctgttcaaaaactgtgaccaagaccgtcatcgggcctgacgggcacaaggaagtgactaaagaagttgtgacttcagaagacggatccgattgtcctgaagcaatggacttgggcacactttccggaataggaacgctggacggatttaggcatcggcaccctgatgaggctgcatttttcgacacagcatccacaggaaaaacctttccagggtttttctcccccatgttgggagagtttgtttcagaaactgagagtcggggttcagagagtggaatttttaccaatactaaagaaagcagtagccaccacccgggaatagccgaatttccgtcaagaggaaaatctagctcgtactctaagcaattcacatcgagcacgtcatataatcggggagactccacattcgaaagcaagtcttataagatggcagatgaggccggcagcgaagcagaccatgagggaacgcacagcacgaaacgcggacacgctaaaagtagacccgtccgtgattgtgatgatgttctgcaaacacatccctccgggacccagtccggcatttttaacattaaactgcctgggagcagcaagattttctccgtttactgtgaccaggagacttccttaggaggctggctgcttattcagcaaagaatggacggaagcctgaactttaacagaacatggcaggactacaagcggggatttggaagcctgaacgacgagggcgagggggagttctggctgggcaacgattaccttcatctcctgacacagcgggggtctgtcctcagagttgagttggaagattgggccgggaacgaggcatatgcagaataccatttcagagtgggcagcgaagccgaaggctatgcactccaggtatcgtcctacgaaggaacagccggggacgccttgattgaggggagtgtggaggaaggggccgaatacaccagccacaataatatgcagttttcaactttcgatcgagatgcagatcagtgggaagagaattgcgcggaagtttatggaggcggctggtggtacaacaattgccaagccgccaatctgaatggcatttactatcctgggggttcctatgaccctagaaacaacagcccctacgagatcgagaatggggttgtttgggtatcctttcgcggagctgactattctctgcgtgcagtgcggatgaagattcgcccactggtcacacag

SEQ ID NO: 10366 - DNA, 2598 bp, Artificial Sequence
  derived and/or modified sequence
atgttcagcatgagaatagtctgtctggtgctctcggtggtcggcactgcgtggacggccgattcgggtgagggagattttctggccgaaggcggaggagtgagaggtccacgcgtggtggagaggcatcaaagcgcatgtaaggactccgattggccattctgctcggatgaggattggaactacaagtgcccgtcggggtgtcgtatgaaggggctgattgatgaggtcaatcaagattttaccaaccgcataaacaagctgaagaattcactcttcgagtaccagaagaacaataaggacagccattcccttactaccaacattatggaaatcctgcgaggagatttttcctcggccaataatcgggacaatacctacaacagagtgtcagaagatctgcgatcaaggatagaagtcctgaagcgcaaggtgattgagaaggtgcagcatatccagctgcttcagaagaatgtgagagcccagctggtggacatgaagcggcttgaagtggatattgacattaagatcagaagctgtcgcggctcctgctcgagggcacttgcaagagaagtggaccttaaagattacgaggaccagcagaagcaattggagcaagtgatagcaaaggacctcctgccatcgcgcgatcgccaacatttgccactcatcaaaatgaagcctgtgccggatctggtgcctggtaacttcaaatcacaacttcaaaaggtgccccctgaatggaaggcgctgactgatatgccacaaatgaggatggagctggaacgcccagggggtaacgaaattaccagaggaggaagcacctcgtacgggactggaagtgagactgaatcccctcgcaacccttcatcagctggaagctggaactccggttcgtccggacctggatctactggcaacaggaacccaggctcgtctggtaccggtggaactgccacttggaaacctggatcgtcgggaccaggctcgaccggatcatggaattcagggtcgtccggaaccgggtctaccggtaaccagaaccctggctcgccccgccctggatcgaccggcacctggaacccaggttcaagcgaaagagggtccgcaggtcattggacctcggagagctcggtgagcggatcaacgggccagtggcacagcgaatccggctcgtttcggccggactcaccaggttcgggaaacgctagacctaacaaccctgattggggaacctttgaggaagtctccggtaatgtctcccccgggacccgtcgtgaataccatactgaaaaacttgtgacttccaaaggcgacaaagagctgcggaccggtaaggaaaaggtcacctccggaagcaccaccacgacccgtagatcctgttccaaaaccgtgaccaagaccgtcataggtccggacggtcacaaggaagtgactaaggaggtggtgacttcagaagatggatccgactgtcctgaagcaatggacttgggaactctttccggaattgggacccttgacggatttaggcatagacaccctgatgaagccgcctttttcgataccgcatccactggaaagaccttccccggtttcttctcacctatgctcggtgagtttgtgagcgaaaccgagagcagaggaagcgagtcgggaatcttcaccaatactaaggaaagctcctcccatcatcctggaattgctgagttcccatctcgcggtaagtcatcatcttacagcaagcagttcacctcgtctactagctacaacagaggagattcgacctttgagtctaagtcgtacaagatggccgatgaggcaggctccgaagcagatcatgaaggtactcattccactaaacgggggcacgcgaaatcgcgacctgtgagggattgtgatgatgtccttcaaactcaccctagcggaacccagtccggaattttcaacatcaaactgccgggtagctcgaagattttctcggtgtactgtgatcaagaaactagccttggagggtggcttcttatccagcaacgcatggacggatcactcaatttcaatcggacttggcaggactacaagaggggctttggatcgctgaacgatgaaggggagggggaattctggctgggtaacgattacctccatctgctgactcagagaggctcagtgcttagagtagaactcgaagattgggcaggaaatgaagcatacgctgagtaccattttcgggtcggatcagaagcagaaggatacgcccttcaagtctcctcgtacgaaggcacggcaggggatgcacttattgaaggatctgtcgaggagggagcagaatacacctcccacaacaacatgcaattctccacctttgaccgggacgccgatcaatgggaagaaaactgtgcagaagtgtacggaggcggatggtggtacaacaactgccaagccgcaaaccttaatggcatctactatcctggtggtagctacgaccctagaaacaactcaccctacgagattgaaaatggtgtcgtgtgggtgtcgtttcggggagcagattactctcttcgagcagtgagaatgaagattaggcctctcgtgactcaa

SEQ ID NO: 10367 - DNA, 2598 bp, Artificial Sequence
  derived and/or modified sequence
atgtttagtatgcgtatcgtttgccttgttctgagcgtggtaggcacggcctggacagccgattccggcgaaggagattttctcgcagaggggggaggggttcgcggtccacgggtagtggaaagacaccagagcgcctgtaaggattccgattggccgttttgcagcgatgaggactggaattataagtgtccatcagggtgtaggatgaaggggttgatcgacgaggtcaaccaggactttaccaacagaatcaacaagctgaagaactctttgttcgaataccagaagaacaataaggattcccacagtctaaccaccaacatcatggagattttacggggcgacttttctagtgctaataatcgggataacacttataatcgcgtgtccgaggacctccgcagccggattgaagtcctcaagcggaaagtaatcgaaaaagtccagcatattcagctgctccaaaagaacgtgcgagctcagctcgtggatatgaagagactggaggtagatattgatataaagatccgtagctgtcggggatcatgttccagggcgctcgcgagagaggtagacctgaaagattacgaagatcagcagaagcagcttgagcaggtgatagcaaaagacctgctgccgagccgcgaccggcagcacctcccactgatcaaaatgaagccggtgcccgatcttgtccctgggaattttaagagccagttgcagaaggtgcccccggaatggaaggctctgactgacatgcctcagatgaggatggaattagagaggccgggaggaaatgagattacacgcggtggctccacctcttatgggaccggctctgagaccgagtccccccgcaacccatccagtgccggctcctggaattctggctcttcggggcctggaagtaccgggaatcgaaaccctggcagcagtgggaccggaggcactgcaacctggaagcccggaagctcaggccccgggtctactggatcgtggaacagcggctccagtgggaccggctcaaccggaaatcagaaccctgggagtcctaggccagggagcacaggcacatggaatcctgggtcatctgaacgggggtctgccggacattggacatcagagagttccgtgtcggggagtacagggcagtggcacagcgagagcgggagcttccggccagactcgcctggctccgggaacgcccgacctaacaaccctgactggggaactttcgaggaagtgtcaggaaacgtgtcacccggcacgcggcgggagtaccacactgagaaactggtaacttccaaaggcgacaaggagctcagaactggcaaggagaaagtcacaagcggtagcaccactacaactaggcgcagctgctccaagacagtgaccaagacagtgataggcccagatggccataaagaggtgaccaaagaggtggtgaccagcgaggatgggtctgactgtcccgaggcaatggacctgggcaccctgagtgggattggcaccttggacggattccgacatcggcaccccgatgaggcggccttctttgataccgctagcaccgggaagacattccctgggttttttagccccatgcttggcgaatttgtcagcgaaactgagtcccgcgggagcgaatccggcatctttaccaataccaaggaaagctcctctcaccaccccggaatagctgagttcccttcacggggcaagagctcaagttactcaaaacagtttacaagtagcaccagctacaacagaggtgacagcacatttgaaagcaagtcatacaagatggcagatgaagctggatccgaggcggaccacgaagggacccacagtacaaaaagagggcacgccaaatctcggcctgtacgcgactgtgatgatgtcctccaaacgcacccttccgggactcagagcggaatcttcaacatcaaattgcctgggtccagcaagattttctctgtgtactgcgaccaggagaccagcttagggggatggctgctcatccagcaaaggatggacggatcgctgaactttaataggacttggcaggattacaaacgaggatttggcagcctaaatgatgagggagagggcgaattctggttaggcaatgactacttgcatctgttgacccagagaggatctgtgctccgagtggaattagaagactgggccggaaacgaggcatatgcagagtaccatttccgggtgggaagtgaggcagaaggttatgcactacaggtcagctcttatgaagggacggccggggacgcgctgattgagggctcggtagaggaaggggccgagtatacctcccataataacatgcaattttccacattcgacagagatgcagatcagtgggaggagaattgcgcagaggtgtacggggggggctggtggtataataattgtcaggctgcgaacctgaatggcatctattaccctggcgggtcctacgaccctagaaataattctccgtatgaaatcgagaatggggtcgtttgggtgagttttcgaggtgccgattattctcttagagcagtccgcatgaaaatcagaccactagttactcag

SEQ ID NO: 10368 - DNA, 2598 bp, Artificial Sequence
  derived and/or modified sequence
atgttctcaatgcgcatcgtgtgcctcgtgctcagcgtggtgggcaccgcgtggaccgctgactccggagaaggggacttcctggccgaaggtggcggggtccggggccctcgagtcgtggagagacatcagtccgcctgtaaggattccgattggccgttctgctcggacgaggactggaactacaagtgcccctcggggtgtaggatgaagggactgattgacgaggtgaaccaggacttcaccaacagaatcaacaaattgaaaaacagcctgtttgagtatcagaagaacaataaggatagccattcgctgactaccaacattatggagattcttcggggggacttctcaagcgccaataatcgcgataacacctacaatcgcgtgtccgaagatctgagaagccggatcgaagtgttgaagaggaaagtgatcgaaaaagttcagcatattcaactgctccagaagaatgtgagagcacagctggtggacatgaagcgactggaggtggatatcgacatcaagataagaagctgccgtggttcctgttctcgcgcactggcccgggaggtggatctgaaggactacgaagatcaacagaagcagcttgaacaggtgatcgctaaggatctgctgccgagccgcgaccggcagcacctccctttgatcaagatgaaaccggtgcctgatctggtcccaggaaactttaagtctcagttgcagaaggtgccgccggagtggaaggctctgacggatatgccccaaatgcggatggaactggaacggccgggcggcaacgagatcacccgcggaggatcaacttcctacggcactggcagcgagactgaatcaccgcggaatccgtcatccgccggttcctggaactcggggtcgtccggaccgggttccaccggaaataggaatccaggatcgagcggtaccggaggaacggcgacgtggaagcctggatcctcaggccctggctcgaccgggagttggaactcgggaagctcaggaacgggatccactggaaatcagaaccccggcagcccgcggcccgggtcgactggtacctggaaccccgggtcctcggaacggggaagcgccggacactggacctcggaaagcagcgtgagcggaagcactggtcaatggcactcggagagcggttcctttaggccggactctccgggcagcggcaacgcccgccctaacaaccccgactggggcactttcgaagaggtcagcggcaatgtgtccccgggaactcgacgggaataccacacggaaaaactggtcacctccaagggtgataaagagttgcggacgggaaaggagaaggttacttcggggtcaacgaccactactcggcgctcatgctccaagaccgtgaccaagactgtcattggtcctgatggacacaaggaggtgaccaaggaagtggtgaccagcgaggacggcagcgactgccctgaagccatggacctgggaacccttagcggcatcggtacgttggatggattccgccatagacacccggatgaggctgcgttcttcgatactgcctctacgggaaaaaccttcccaggttttttctctccaatgcttggggaatttgtgagcgaaaccgaaagcaggggatccgaatcaggtattttcactaacactaaggaatcttcctcccaccacccggggattgccgagttcccatcccgaggaaagtcatcgtcatactcgaagcagttcacgtcgtccacctcctataacagaggggattcgaccttcgaatccaagtcctacaaaatggcggacgaagcggggtcggaagcagaccatgaaggtacccacagcactaaacggggacacgccaagagcaggccagtccgcgattgcgacgacgtgctccagactcacccgtccgggactcaatccggaatctttaacatcaagttgccgggctcctccaaaatcttctccgtctactgcgaccaagaaacttccctgggagggtggctccttatccaacagaggatggacggttccctgaatttcaatcggacttggcaggactataaacggggattcggatcgctcaacgacgagggggagggagaattctggctgggaaacgactacctgcatctgctcacccaacggggatcggttctgagagtcgaactggaggattgggctggaaacgaggcctacgccgagtaccactttcgcgtaggatccgaagcagagggatacgcactgcaagtctcatcgtacgagggtactgctggagacgcgttgatcgaaggttccgtggaagagggagcggaatacacctcccataacaacatgcaattctcgacttttgacagggacgctgaccagtgggaagagaactgtgcagaagtgtacggtggaggctggtggtacaacaattgtcaagctgcaaacctgaacgggatctactatcctggaggaagctacgacccgcggaacaacagcccttacgaaatcgagaacggagtcgtctgggtcagcttccggggtgctgactacagcttgagagctgtcaggatgaagatcagaccactggtgacccag

SEQ ID NO: 10369 - DNA, 2598 bp, Artificial Sequence
  derived and/or modified sequence
atgtttagcatgcggatagtgtgccttgtgcttagcgtggtgggaaccgcgtggaccgctgattcgggagaaggagatttcctcgcagaaggaggaggtgtgaggggtcctcgcgtggtcgaacgacatcagtctgcctgcaaagatagcgattggcccttttgcagcgacgaggactggaattacaagtgccctagcggatgtagaatgaagggtctgattgatgaggtaaaccaggactttactaacaggatcaataagctcaagaactcgctttttgaataccagaagaacaataaagattcccacagcttgaccaccaacattatggagattctgagaggcgatttttcatcagcaaacaacagagacaatacttacaaccgggtgtcggaagatctgcgcagccgtattgaggtcctcaagcgcaaggtcattgagaaggtgcaacatatccaactcctgcagaagaacgtgcgcgcacagctcgtggatatgaaacgtttggaggtggatattgatatcaagatccgctcgtgtcgagggtcatgttcacgcgcacttgcaagggaagtggatttgaaggactacgaggaccagcaaaagcaactcgagcaggttatcgcaaaggatttgctgccgagcagggacagacagcacctgcccttgataaagatgaaacctgtacctgatcttgtgcccggaaatttcaagagtcagttgcagaaggtgcctccagaatggaaggcactgactgatatgcctcaaatgaggatggaactcgaaagacctgggggaaacgaaattactcgaggcggaagcacgtcctatggtactgggagcgagactgaatctcctcgcaatccatcgtcagctggatcttggaatagcggttcatccggcccaggatcgactggaaaccgcaaccctggttcctctgggactggggggactgcaacctggaagcctggttcgtcaggccctggatcgacgggatcgtggaacagcgggtcgagcggcacgggatccaccggaaaccaaaatccaggatcccctagaccaggatcaactggcacgtggaatcccgggtcctcggagcgtggctcagcagggcattggaccagcgaatcctccgtgtcgggatcaaccggacaatggcatagcgaatcggggtccttccgcccagactcccccgggtcgggtaatgcccgcccgaataatcctgattggggtacttttgaagaggtcagcggaaacgtgtcccctggcacgaggcgggagtaccatactgagaagctcgtcacttctaagggggataaagagctccggactggaaaggaaaaggtcacctcaggttccactaccactactcggcgctcgtgttcaaaaacggtgactaaaactgtgatcggacctgatggtcataaagaagtgaccaaggaagtggtcacctccgaggatggctccgattgtcccgaagccatggatctggggaccctcagcgggattggaaccctggacggtttcagacacagacaccccgatgaggccgctttcttcgacaccgcatcaaccggaaagaccttcccaggttttttctccccaatgctgggtgaattcgtgtccgagactgagtcaaggggtagcgagtcaggtattttcaccaacacgaaggaatcttcctctcaccatccaggaatcgcagagtttccatcgagggggaaatcgtcatcgtacagcaagcaattcacttcaagcacctcgtacaaccgcggggattccacttttgaatcaaaatcctacaagatggccgatgaagcaggatcggaagcagaccatgaaggaacccattcaacgaaacgcggacacgccaaaagtagacctgtccgggactgtgatgatgtgctgcaaacccacccatcaggaacccagtcgggcattttcaacatcaaacttccgggatcctccaaaatcttctccgtgtactgtgaccaggaaacttcgcttgggggatggttgctgatccagcagagaatggatggaagcctgaactttaatcggacctggcaggattacaagagagggtttggaagcctcaacgacgaaggtgaaggagagttttggctcggcaacgactaccttcatctgttgacccagcgaggtagcgtcctgagggtggaactcgaggattgggcaggaaatgaagcctatgccgaataccattttcgggtcggctcagaggcggaaggttacgcattgcaagtttcctcgtacgaaggaactgctggggacgcgcttatcgagggttcagtggaagagggagcagaatacaccagccacaataacatgcaattcagtaccttcgacagagacgcggatcaatgggaagaaaactgcgccgaagtgtacggaggaggttggtggtacaacaattgtcaagcagcaaacctgaatggaatttactatcccgggggctcgtacgatccgcggaacaattccccatacgaaatcgaaaatggagtcgtctgggtgtcatttcgcggcgcagactacagcctcagagcggtccgcatgaagattagacctctggtgacccag

SEQ ID NO: 10370 - DNA, 2598 bp, Artificial Sequence
  derived and/or modified sequence
atgttttctatgcggatcgtgtgcctggtcctgtcagtggttggaaccgcttggacagccgacagtggcgagggggattttctagccgaggggggcggcgtcagagggccacgggtggttgagaggcaccaatccgcctgcaaggatagcgattggccgttttgctctgacgaggattggaattacaagtgtccctccggatgtaggatgaaaggccttatcgatgaggtgaaccaagattttacaaacaggattaataaactcaagaatagcctcttcgagtaccaaaaaaataataaagactcacactctctaacaacaaatataatggagatcctccggggggatttttcaagcgccaacaaccgcgacaatacctataaccgtgtgtccgaagacctgagaagccggatcgaagtgctgaagaggaaggtcatagagaaggtgcaacacattcagctgctacagaagaatgtcagagcccagctggtcgatatgaaaaggctggaagtggatatagacatcaagattaggagttgtagggggtcttgtagtcgggcccttgcccgggaagtggatctaaaagactacgaggaccagcagaagcaacttgaacaggtgattgctaaggatctcttgccctcacgcgacagacaacacctgccgctgatcaaaatgaaacctgtgcctgatttggtgcccgggaactttaagtcacagctacagaaggttccccctgagtggaaggcccttaccgatatgccccagatgaggatggagctagaaagacctggagggaacgagattacccggggggggagtacctcttatggtacaggctcagagaccgaatctcctagaaatccttcgtctgctggctcctggaactccggttcttctggccccggtagcaccggcaatagaaatccaggcagctctgggacaggaggaaccgcaacgtggaagcccggatcctctggccccggcagtaccggatcctggaacagtggaagtagtggcacaggatccacaggaaaccagaacccaggctctccccgccccggctcaactggaacatggaatcccggtagtagcgagcgagggtccgctggtcactggacctccgaatcaagcgtctccggaagcacgggccaatggcactccgaatctgggtccttcaggccagactcccctggaagtggcaatgcccgcccaaacaacccggactgggggacgtttgaagaggtaagtggaaacgtgagtccaggaacacgacgagagtaccataccgaaaagctggtgaccagcaaaggtgataaagaactgcggaccggcaaagagaaggtgaccagcggcagcacgacaacaacccgaaggtcctgtagcaagaccgttactaagaccgtcatcggccccgatgggcataaggaggttaccaaggaggtggttacttccgaggacggatccgactgtccggaagccatggatctcggtaccctgtcgggaatcggcacactagacggttttagacatagacaccccgacgaggccgcattcttcgataccgcatccactggcaagacctttcctggatttttctctccaatgttgggagaattcgtgtcagaaacagagtccaggggtagcgagagcggcatctttaccaacactaaggagagctcatcacaccatcctggcatagccgagttcccatcacggggcaagagcagcagctatagtaagcagtttacctcgtcgactagttacaaccggggggatagcaccttcgagagcaagtcatataaaatggcagatgaggcgggcagcgaggcggatcacgaagggacccactcaaccaagagggggcacgccaaatctcggcctgtgagagactgcgacgacgtactgcagactcacccctcaggcactcagtcagggatttttaatattaagctgccagggtcttccaaaattttctcagtttactgtgaccaggagacatccttaggtgggtggctgctgatccagcagcggatggacggtagcctgaattttaatcggacatggcaggactacaaacgcggctttggcagccttaacgatgaaggagagggcgaattctggttaggaaacgactacctgcacctgctcacgcagcgcggaagtgtcctgagggtggagcttgaggattgggcggggaatgaggcatacgctgaataccatttccgtgtagggagtgaggcggagggatacgcacttcaggtgtctagctacgaaggtaccgcaggagacgccctcattgaaggatcagtggaagaaggcgcagaatacacttcccataataatatgcagtttagtactttcgacagagatgcggaccagtgggaggaaaactgtgcagaggtgtacgggggcggttggtggtataacaattgccaggcggcaaacctgaacggtatctactatcctggagggtcttacgacccccgtaacaacagtccgtacgagattgagaatggtgtagtgtgggtgtcgttcaggggcgctgactatagcctgagagccgtgcgaatgaaaattcggccactggtgacgcag

SEQ ID NO: 10371 - DNA, 2598 bp, Artificial Sequence
  derived and/or modified sequence
atgttctcgatgcggatcgtgtgccttgtgctctcagtggtgggcactgcctggaccgcggactccggcgaaggagactttctggccgaaggaggtggcgtgagaggcccgcgcgtcgtcgaacgccaccagtcagcatgcaaggattccgactggccgttctgctccgacgaggattggaattacaagtgcccgagcgggtgcaggatgaaagggctgattgatgaagtgaatcaagattttaccaatcggattaacaaattgaagaactcgctgttcgagtaccagaagaacaacaaggacagccactcactcaccactaacattatggagatcctgcggggagatttctcatccgcgaataacagggacaacacttacaacagagtcagcgaggacctgcggtcaagaatcgaagtgctgaagcgcaaggtgatcgagaaggtgcagcatatccagctgcttcaaaagaacgttagggctcagctcgtggacatgaaaagacttgaagtggacatcgatatcaagatcaggtcgtgccgggggtcgtgcagcagggctctggcccgggaagtcgacctcaaggattatgaggaccagcaaaagcaacttgaacaagtgatcgcgaaagatttgctcccgtccagagatcggcagcacctgcctctgatcaagatgaagcctgtgccagacctggtgcccggcaatttcaagtcgcaactgcagaaagtgccgccagagtggaaggctctgaccgacatgccacagatgaggatggagctggaacggcctggagggaatgaaatcactcgcggaggctcgacttcgtacggcactggctccgaaaccgaatcaccacgtaaccctagcagcgccggttcctggaacagtggctcatcgggcccgggatcaactggcaatagaaacccagggtcgtcaggaaccggaggaactgccacctggaaacccggctcgtcaggacccggatctacggggtcatggaactcgggaagctccgggaccggatcgacgggtaaccagaaccctggatcaccgcgtccgggaagcactgggacttggaatccgggatcgtccgaacggggatcagccggacactggacgtcggaaagctcggtttctggatccaccggtcagtggcattcggaatcgggctccttccgcccggattcccccggaagcggaaatgctcggccaaacaacccggattgggggaccttcgaagaagtgtcgggtaacgtgtcccccggaacccgcagagagtaccacaccgaaaagctggtcacgagcaagggagataaggaactccggaccgggaaggaaaaggtcacttccggctcaactaccactactcgccgctcgtgttcgaaaaccgttaccaagactgtgatcggaccggacggacacaaggaagtcaccaaggaagtagtgaccagcgaggacggttccgattgtccggaagccatggatttgggaacgctctcaggaatcggaacgcttgacggattccggcacaggcaccctgatgaggccgccttctttgataccgcctcaactggaaaaaccttcccaggattcttctcgccgatgctgggagaattcgtctccgagactgaatcccggggctcggagagcggaatctttactaacactaaggagtcgtcgtcacaccatccaggcatcgcagagttcccgtcccggggaaaatcctcctcatactcgaagcagtttacctcgagcacctcatacaatcgcggagactcgactttcgaaagcaaaagctacaagatggctgacgaagccggctcggaagccgaccatgaggggacccatagcacgaaacgcggacacgctaagtcgaggccggtccgggactgcgatgacgtcttgcagacccacccctcaggaactcagtcgggtattttcaacatcaagctgccgggatcgtcgaagattttcagcgtctactgcgatcaagaaacctccctgggaggatggcttcttatccagcagcggatggacggctcgttgaatttcaaccgcacctggcaggactacaagcggggtttcgggtcgttgaacgatgaaggcgagggtgagttctggcttggcaacgactacttgcacttgcttacccagcggggttcggtgttgagagtggagctggaggactgggctggaaacgaggcatacgccgaataccactttagggtgggatcggaggccgaaggttacgccttgcaagtctcctcctacgagggaacggctggagacgcgctgatcgaagggtcggttgaggaaggagcagagtacacctcccacaacaacatgcagttctcaaccttcgatagggatgcagaccaatgggaagaaaattgcgctgaggtgtacggaggcggctggtggtacaacaactgccaagcggcaaatctgaacggtatctactatccaggtggatcctacgacccgagaaacaattccccgtacgagatcgagaatggagtcgtgtgggtcagtttccggggcgcagactactcactgcgcgccgtgcggatgaagatcagaccactggtgactcag

SEQ ID NO: 10372 - DNA, 2598 bp, Artificial Sequence
  derived and/or modified sequence
atgttctctatgcgcatcgtatgtctggtgctgtcagtggttggaactgcctggacagctgactcaggcgaaggtgacttcctggcagagggaggtggagttaggggacctagggtggtcgagcgccatcagagtgcctgtaaagactccgactggcctttttgctctgacgaggactggaactacaaatgcccctccggttgccgcatgaagggcctgatcgatgaagtgaaccaagactttaccaacaggattaataagctcaagaatagcttgtttgaataccagaagaacaacaaagattcacattctctgactacgaacatcatggaaatcctgcgcggcgacttctcatccgccaataatagagacaacacttataacagggtgtccgaggacctgcgcagtagaatcgaggtgttgaagaggaaggtcatagagaaggtacagcatatccagctccttcagaagaatgtcagagctcaactggtcgacatgaagagactggaagttgacattgacatcaaaattcgctcatgtagaggaagttgctcaagagcgctggcaagagaggtagaccttaaggattatgaagaccagcagaagcaactggagcaggtgattgctaaggacttgctccccagccgcgatagacagcacttgcctctgataaagatgaagcctgtcccggatctcgtgcctggcaactttaagtcccaactccagaaggttccacctgagtggaaagccctgaccgacatgccccagatgagaatggaactggaaagaccaggaggaaacgagataacacgcggaggtagcacatcatacggaaccggctccgaaaccgagtctcctagaaacccttctagtgcaggcagctggaacagcggtagtagcggaccaggctccaccggaaatagaaaccccggctcctctggtaccggaggtacggccacgtggaagccaggttcttctggacccggatccactggttcctggaactccggttcttccggtaccggatctacgggcaaccagaacccaggttcaccaaggcctggttcaaccggaacatggaaccctggctcttctgaacgcggttccgcgggtcattggacttcagagtcttccgtatccggatctaccggccaatggcacagcgagagcggttccttccgcccagactcaccaggatccggaaacgctagacccaacaatcctgattggggcactttcgaggaggtatcaggcaacgtgtccccaggcacacgcagggaataccataccgagaagctggttacatcaaagggagacaaggaactgagaacgggaaaggaaaaagtgacatcaggttcaactacgacaactaggcgcagctgctccaagaccgtgactaagacagtcatcggccccgatggtcacaaggaagtgaccaaagaggtggttacctctgaggacggcagcgattgccctgaggccatggatctgggaaccttgtctggcataggcaccctcgacggctttaggcacaggcaccccgacgaggccgccttttttgataccgcgagcactggcaagaccttcccaggctttttttctcctatgctcggtgagttcgtcagtgagacagagtcccgcggtagcgaaagcggaatctttactaacactaaggaatcatcttcccatcaccccggtatcgcggagtttccttcccgcggtaagagctccagctacagcaagcagttcacatcatctacttcttacaacagaggtgatagtactttcgagtcaaagtcctacaagatggccgacgaagcgggttcagaggccgatcacgagggaacacattccacaaagaggggtcacgctaaaagcagaccagtgcgcgattgcgatgacgtgttgcagacccacccaagtggaacgcaatccggcatcttcaacatcaaacttcctggctcttctaagatattttctgtgtactgtgatcaggaaacttctcttggtggctggctgctgatacagcagaggatggatggttcactgaacttcaaccgcacctggcaagactataaaagaggctttggttccttgaacgatgaaggcgagggtgaattttggttgggtaacgactacttgcacctgctgacacagaggggctccgtcctgagggtggagctggaagactgggccggtaacgaggcttatgccgaataccacttcagggtcggatccgaagctgaaggttacgcactccaggtttcatcctacgagggaacggctggcgacgcattgattgagggatcagtcgaagagggagccgaatacacgtctcataacaacatgcagttctccacctttgatagagacgcggaccagtgggaggaaaattgcgcagaagtgtatggcggcggatggtggtataacaactgccaagctgctaacctgaatggcatttactaccccggaggtagttacgacccaagaaataactccccctacgaaatcgaaaacggtgttgtctgggtgagcttccgcggagctgactatagtctgcgcgctgttaggatgaagattcgccccctggtcactcag

SEQ ID NO: 10373 - DNA, 2598 bp, Artificial Sequence
  derived and/or modified sequence
atgttcagcatgaggatcgtgtgcctagtattgtctgtagtgggcactgcatggacagcggactctggagagggcgacttcctcgcggaaggaggcggggttagaggaccccgggtggtagaaaggcatcagtccgcctgtaaggacagcgattggccgttttgcagtgacgaagactggaactacaagtgtccatccggttgtaggatgaaaggcctgattgatgaagtcaatcaggactttaccaaccggattaacaagctcaaaaactccctatttgagtaccagaagaataacaaagactctcacagcctgaccactaatattatggagattttacgcggcgacttcagtagcgccaataatcgtgacaatacttacaatagagtgagtgaggaccttaggtcccggatcgaagtgttaaagcgcaaagtgatcgaaaaggtccagcacattcagcttcttcagaagaatgtgagggcccagcttgtagatatgaaacggctcgaagtggacatcgacataaaaatccgatcctgtcgcggctcatgtagtcgggccctcgccagagaggtggatctgaaagattacgaggaccagcaaaaacagctggagcaggtgatcgctaaggacctcctgccttcgcgcgacaggcaacatctgcctttgatcaagatgaaacccgtgcccgatctcgtgccaggcaactttaaaagccagttgcagaaggtaccacctgaatggaaagccctgaccgatatgccacaaatgcgcatggaactggaaaggccagggggaaatgagatcacaagaggtggatcaacctcgtatgggaccggctcagagaccgaaagtcctcgcaatccgagtagcgccgggtcatggaattcaggatcatctggccctggcagcacagggaatcgaaacccggggtcatcaggcactggtggcaccgccacttggaaaccgggcagttcaggccctggctctaccggttcatggaatagcgggtcttcaggaactgggtctaccgggaaccagaacccaggttccccccgaccagggagcactggcacctggaaccccggcagtagtgagcgcggctctgcaggacactggacctctgagtcgtccgtctccggctctaccgggcaatggcactctgagtcggggtccttcaggcccgacagccccggcagcggcaatgctcgtcccaataacccagactgggggacgttcgaagaagtctccggtaatgtgtccccagggacccggcgcgagtaccatacagagaagcttgtgacctctaaaggtgataaggaattgagaaccgggaaggagaaggtgacatctggctccacaacaacaacgcgccgctcatgtagtaaaaccgtcacaaaaacagtgatagggcccgacggccataaggaagtgaccaaggaagtggtaacctctgaagatggatccgactgtccagaggccatggacttggggacactgtctggcatcggcactctggatggcttcagacatcggcaccctgacgaggccgctttcttcgacaccgcgtcaaccgggaagactttcccaggtttcttttctccaatgctcggtgagttcgtcagtgagacagaatctcgggggagtgagtccgggattttcacaaacaccaaggagtcttcttctcaccaccccggtattgcagagtttccctctcgcggaaagagctctagctactccaagcagttcacttcgtccacctcatataacagaggagattccaccttcgagagcaaaagctataagatggcagacgaggctggctcggaggccgatcatgaagggacacattccaccaagcgcggacacgccaagtccagaccagtccgtgattgcgatgacgtgctgcagactcacccttccggtacccagtcaggcatttttaacatcaagctgccggggtctagtaaaatcttcagtgtgtactgcgatcaggagaccagtcttggaggatggcttctgatccagcagagaatggatggcagtctgaatttcaaccgcacatggcaggactataaacgagggtttggatcactgaatgacgagggcgagggagaattttggctgggtaacgattacctccatctgctcacacagcgtggttctgtcctccgcgtggagctggaggactgggccggcaacgaggcatacgcggagtaccatttcagggtcggttccgaggccgagggctacgccctgcaggtgagtagttacgagggaactgcaggagatgctctgatcgaaggttccgtagaggagggggctgaatacacctcccataacaatatgcagttcagcaccttcgatcgggacgccgaccagtgggaggaaaattgcgccgaggtgtatgggggcggctggtggtacaacaactgccaggcagcaaacctcaatggaatttattatcccggaggcagctacgatccccgcaacaactctccatatgaaatcgagaatggagtggtgtgggtttccttccgcggcgctgattacagcctgcgggccgtgcgaatgaaaatcagaccactggtcacacag

SEQ ID NO: 10374 - DNA, 2598 bp, Artificial Sequence
  derived and/or modified sequence
atgttcagcatgagaatcgtatgcttggttctctcagtagttgggacagcatggaccgccgattccggtgaaggcgactttcttgcggaagggggcggggtgaggggccctcgcgtggtggagagacatcagagtgcctgcaaagatagcgactggcctttctgctctgatgaggattggaactataagtgcccaagtggctgcagaatgaagggtctgatcgacgaggttaatcaggatttcacaaatagaattaataaactgaagaatagcctgttcgagtaccagaaaaacaataaagactcccacagtttgactactaacattatggagatcctgcgcggcgacttttcctcggccaacaacagagacaatacctacaatagggtttcagaagacctgcgctcgcggatcgaagtgttaaagcgcaaagtaattgaaaaggttcagcacatccagctgctgcagaaaaacgtcagggcccagttggtggatatgaaaaggctggaagtggatatcgacattaagattcgctcttgccgggggtcttgttctcgcgcattggcgagggaagtggatctaaaggattacgaagatcagcaaaaacaactagagcaggtaatcgcgaaagacctcttgccttcacgggaccgacagcacctccccttgattaagatgaagccagtgcctgacctcgttcccggcaacttcaaatcacagttgcagaaggttccacctgaatggaaggctctcactgacatgccccaaatgcgaatggaactcgagcgccccggaggcaatgaaattactaggggagggtcgaccagttacggaactggtagtgaaaccgaatctccacgcaacccatcaagtgccgggagctggaacagcgggtcttctggccctggatccacaggtaaccgcaatcctggtagtagcggcaccgggggcaccgctacctggaagcccgggagctcaggacccggctcaactggatcgtggaatagcggatcctcaggaaccggctcaaccggtaaccaaaatcctggaagcccacgtccagggagtacagggacatggaatccgggatccagtgaacgggggagcgctggtcactggacaagcgagtcaagcgtgtcaggctctaccggccaatggcatagtgagtcagggagcttcaggcccgattctcctggcagcggcaacgcccgccctaataacccagattggggtaccttcgaagaagttagcggaaatgtcagccctggcacccgacgagagtatcatactgagaaactggtcacgagcaagggcgataaggagcttagaactgggaaggagaaagtaactagcggttcgacgactacaacccgccgcagttgtagcaaaactgtcacgaaaacggtgattggtccagatggacacaaagaggtcaccaaggaagtggtcacaagcgaggatggttcggattgccccgaggcaatggaccttggaactttgtccggaataggaaccctcgatggatttcggcacagacatcccgatgaggccgctttttttgataccgcttcgaccgggaagacatttcctggattcttctctccgatgttaggcgagttcgtcagcgagaccgaatcacgcggttcagagagcggcatttttaccaacacgaaggagtctagcagtcaccaccccggaatagcagagtttccctctcgcggcaagagctcgtcctattccaagcagtttacttcctcaacgtcctataaccgcggcgacagcaccttcgaaagcaagtcctataagatggctgacgaagccggatccgaggcagaccatgaggggactcattccaccaaaagagggcatgccaagtcccggcccgtccgagattgcgatgatgtgctgcagacccatcctagcgggacccagtcaggaatattcaatattaaactacccggatcctctaagatcttcagcgtttattgcgatcaggagaccagtctcggcggttggctcttgatccagcagcgaatggatggctcactgaattttaacaggacgtggcaggattacaaaaggggattcgggagcttgaacgacgaaggtgagggcgaattttggctcggaaacgactatctgcatctacttacccagagaggaagcgtgttgcgggtcgagctcgaagactgggccggtaatgaggcttatgcggagtaccacttccgcgtgggttcagaggcagagggctatgcgctgcaggtaagctcatacgaaggcacagccggggacgccctgatcgaaggctccgtcgaggaaggcgccgagtacaccagccataacaatatgcagttcagcacattcgaccgagatgccgatcaatgggaggagaactgtgctgaagtatatggaggcggctggtggtataacaattgtcaggccgctaatctcaacggcatctactacccaggcggctcgtatgatcctcgcaataattcaccatacgagatagaaaatggggtagtttgggtcagctttcggggcgctgattactcgctacgggcagtgcgaatgaagatacgtcctttggtaacccaa

SEQ ID NO: 10375 - DNA, 2598 bp, Artificial Sequence
  derived and/or modified sequence
atgttttcgatgcgcattgtgtgtcttgtcttgtccgtggtgggcaccgcctggactgctgactccggagaaggcgactttcttgccgaaggtgggggcgtcagaggtccacgagtggtcgagagacaccagagcgcgtgtaaagattccgactggccattttgttccgacgaagattggaactacaagtgtccatccggatgtcgtatgaaaggactgattgacgaagtgaaccaagactttactaaccgcattaacaaacttaagaactcactttttgaataccaaaagaacaacaaagattcccattcgcttactaccaacataatggaaatcctgagaggcgatttctcctccgcaaataaccgtgacaatacgtacaatcgagtgtccgaagatctgaggtcgcgcatagaagtgctcaagcggaaagtcattgagaaagtccaacatatccaactgctccaaaagaacgtcagggcccaattggtggatatgaagcgccttgaggtggatattgatatcaagatccgttcatgtcgaggctcatgttcgagagcactcgcgagagaagtggatctgaaagattacgaggaccagcaaaagcagctcgaacaagtgatagcaaaggacctgctcccatcccgtgaccggcaacatcttcctctgattaagatgaagccagtgcccgatctggttccaggtaatttcaagtcccagcttcagaaggtgcccccagaatggaaagcactgaccgatatgccgcagatgcgcatggaacttgagaggcctgggggaaacgagattacgcgaggaggaagcacctcatacggaaccgggtccgaaactgaaagccctcgaaacccaagctccgcaggttcgtggaattcagggtcgtctggaccaggaagcacgggcaaccggaatccaggctcgtcgggcaccggtggcaccgccacttggaagccgggttcgtcaggtcctggaagcactgggagctggaattcgggttcttccggcactggtagcaccggaaaccaaaaccccggatcaccacgacctggatccaccggaacctggaacccagggtcatctgagcggggttcagcgggtcattggaccagcgaatcatccgtgtcggggtccaccggtcagtggcacagcgagtccgggtcgtttcgtcccgattcccctgggtcaggaaatgctcggcctaataaccctgattggggaacctttgaagaagtatccggaaacgtgtcacctggaactcggagagagtaccataccgagaaacttgtcacctcgaaaggggataaagaattgcgtaccggaaaagaaaaggtgacctcgggctcgactaccactactcgacggagctgttccaagacggtgaccaagacggtcatcgggcctgacggacataaggaagtcaccaaggaagtggtgacttcagaggacgggtccgattgtcctgaagccatggacctgggcactttgtccggtataggcaccttggatggttttagacacaggcaccctgatgaagccgcattctttgataccgcctcgaccggaaagaccttccccggttttttctcaccaatgctcggagaatttgtgtcggaaaccgagtcaagaggaagcgaatcaggaattttcactaacacgaaggagtcgtcctcccatcaccctggcatcgccgaatttccgtcgaggggtaaatcgtcgtcatactccaagcagttcacttcatctacttcgtacaaccggggtgactcgacgtttgagagcaagtcctacaaaatggcagatgaggcggggtccgaggcggatcatgaaggcacccatagcaccaagaggggacacgccaaatcaaggccggtgcgcgattgtgacgacgtgcttcagactcatccttcaggcactcagtcggggatctttaacatcaagctccccgggtcctccaaaatcttctctgtgtactgtgatcaggagacttctctgggtgggtggctgcttattcaacaacgtatggatgggtcactgaatttcaacaggacctggcaagactacaagagggggtttggatcgctcaatgatgagggagaaggcgaattttggttgggaaatgattacctccatttgcttactcagagagggtcggtgctgcgcgtcgaactggaagattgggctggtaacgaggcctacgcagaataccatttccgagtcgggtcggaagcagagggctacgctctgcaagtctcgtcatatgagggaactgccggcgacgccttgattgagggatcggttgaagagggagctgagtacacttcgcacaataacatgcagttctcgaccttcgacagggatgcagatcaatgggaggaaaactgtgcagaggtgtatggaggaggttggtggtataacaattgtcaagcagcaaacctgaacggtatttactatccgggcggatcatacgaccctagaaacaattcgccatacgaaatcgaaaacggggttgtgtgggtgagcttccgcggagccgattactcacttagggcagtgcggatgaagattcggccccttgtgacccaa

SEQ ID NO: 10376 - DNA, 2598 bp, Artificial Sequence
  derived and/or modified sequence
atgtttagcatgagaattgtttgcctggtgctcagcgtggtcggcactgcttggaccgccgatagcggcgaaggagatttcttggccgagggaggtggcgtgaggggcccgagagtcgtggaacgccaccagtcagcctgcaaagattcagattggcctttttgcagtgatgaagactggaattacaaatgcccaagcggatgtaggatgaagggcttaatcgatgaggttaatcaggactttacaaacagaattaacaagctgaaaaacagcctgttcgagtaccaaaaaaacaacaaagattcccacagtttgactactaacattatggagatcctgcgcggagacttcagctctgcgaacaatagagacaacacatacaacagggtgagcgaggacttgaggtctagaatcgaagtgctcaaaagaaaggtaatcgaaaaagtgcaacacatccagcttctacaaaaaaacgtccgtgcacaactagttgatatgaagcggctagaagttgatattgacatcaagatcaggtcttgcagggggtcctgctcccgggcactggcacgcgaagtcgatctgaaagactacgaagaccagcaaaagcagctggaacaagtaattgcaaaagatcttttaccgtccagggacagacagcatctgcccctgatcaaaatgaagcctgtaccggacctggtgcccggaaactttaagtcgcagcttcagaaagtgccacctgaatggaaggctttaactgatatgcctcaaatgagaatggagcttgaacgaccagggggtaatgagatcacacggggaggaagtacctcctatggcaccggtagtgaaaccgagagccccaggaacccctcctccgccgggagctggaacagcggatcaagcgggccagggtctacaggaaacaggaaccctgggtcaagtgggaccggaggcacagctacctggaaacctggatcaagcggccctggtagcaccggaagttggaacagtggctccagcgggaccgggtccaccggaaaccagaacccgggatccccaagacccggaagcacagggacctggaaccctggatccagcgagagagggagcgctggccactggacaagcgagtccagtgttagcgggagcaccggccagtggcactccgagtcagggtcattcagacctgattcgcctggaagtggcaacgctcgcccaaacaacccagactggggcacctttgaggaggtctcaggcaatgttagccctggcaccaggcgagaataccatacagagaaactggtcacctctaagggagataaagaactcagaaccggtaaggaaaaagtgacctcagggtcaactactaccacgaggcgcagttgctccaaaactgtgactaagaccgtcattgggcccgatggccacaaagaggtcacaaaggaggtggttactagcgaagacggatcagattgccccgaagcaatggaccttggtacactcagcggcatcggaaccctcgatggtttccggcacagacatcccgatgaagcagccttcttcgataccgcctctacaggcaagacctttcccggtttcttcagtcccatgcttggggaatttgtttccgaaactgaatccaggggcagtgaaagcggcatatttaccaatacaaaggagtctagctcacaccaccccggaatcgctgaatttccaagccgaggaaaaagtagcagctacagtaaacaatttacgagttcgacaagctacaatcgcggagacagcacatttgaaagcaagtcttacaagatggcagatgaggcgggaagcgaggctgatcacgagggaactcacagcactaagagaggacacgctaagagccgccccgtgagagattgcgatgatgtcctgcagactcatccctccggcacacaaagcggcatcttcaacattaagcttcccggcagctccaagatattttcagtctactgtgaccaggagacgtcactcggtgggtggctcctgattcagcagagaatggacggctccctgaactttaacaggacttggcaggattacaagagaggattcggatcactgaatgatgagggcgaaggcgagttttggcttggcaacgactacttgcatcttctgacgcaaaggggcagtgtgctgcgcgtcgaactggaggactgggcaggcaatgaagcctatgccgagtaccactttcgagttggcagtgaagctgagggatacgccctccaggttagttcatacgaaggaactgctggagacgcgttgattgaagggtcagtagaagaaggagcagagtataccagccacaacaacatgcaatttagcaccttcgacagggatgccgaccagtgggaggaaaactgtgcggaagtgtacggtggaggatggtggtacaacaattgtcaagcagcaaatctcaacggcatttactatcccggtggcagctacgacccccgaaacaacagcccttatgaaatagaaaacggtgtggtgtgggttagctttagaggcgcagactactcgctccgggctgttagaatgaagatcaggccccttgtaacacag

SEQ ID NO: 10377 - DNA, 2598 bp, Artificial Sequence
  derived and/or modified sequence
atgttttcaatgagaattgtctgtctggttctgtccgttgtgggaactgcttggactgcagattcaggtgagggcgatttccttgcggaaggtggaggagtgagaggaccccgcgtcgtggaacgccaccaatcagcatgtaaggattcagattggcccttctgctcggatgaagattggaattacaagtgcccttcaggctgtagaatgaagggtttgattgacgaagtgaatcaagactttacgaaccgaattaacaagttgaaaaacagcctctttgaataccagaaaaacaacaaggattcccactcccttactaccaacattatggagattcttaggggagatttttcctccgcgaataaccgagacaatacctacaaccgggtcagcgaggatctgcggagccgaattgaggtgctgaagagaaaggtgatagagaaggtgcagcatattcaattgctgcaaaagaacgtgagggcccaactggtcgacatgaagagactcgaagtggatattgacataaagatccgttcctgtagaggatcctgcagccgggcgctggcacgcgaggtagatcttaaggattacgaggatcaacagaagcagctggaacaagtgatcgcaaaagacctccttccttctagggatcggcagcatcttccccttatcaaaatgaagcccgtcccagaccttgtgccaggaaactttaagtcccaactccagaaagtgccacccgaatggaaggcactgacggatatgcctcaaatgcggatggaattggaacgcccaggcgggaacgaaattactagaggtggaagcacttcgtacgggactggctcggaaaccgagtcaccgagaaatccaagctcggcaggaagctggaattctggaagctcggggcccggatcgactggaaatcggaacccgggatcgtccggtactggcggtacggcaacctggaagccaggctcgtcaggtcctgggagcaccggttcatggaactcgggctcctccggcaccggttccactggaaaccaaaacccaggttccccgaggcctgggtccacgggaacttggaatcctggatcttccgaacgtgggtcagcgggacactggacctctgaaagctcagtgtcgggttcaacgggccaatggcatagcgaatcaggatcctttcggcccgatagcccaggaagcggcaatgcgcggccaaacaatcccgactggggaaccttcgaagaagtgtccggcaacgtgtcacctgggacccgcagggaataccacactgaaaagctggtgacttctaagggtgacaaagaattgaggaccggtaaagagaaagtgacttcgggatcgaccaccactactagaaggtcatgttcaaagaccgtgactaagaccgtgatcggacctgatgggcacaaggaagtgacgaaggaagtggtcacttccgaagatggcagcgattgtcctgaagccatggatctgggaactctctcaggtattggcactctggatggcttcaggcatcggcaccctgacgaagccgcgttttttgataccgcatccaccggtaaaacttttcctgggtttttctcaccaatgctgggagaatttgtgtccgaaaccgaatcccgtgggtccgaatcgggcatctttactaacaccaaagagagctcttcgcatcatccgggtattgctgagttcccatccagaggaaagtctagtagctattccaagcagtttacgagcagcactagctacaatcgcggagattcaacttttgaatcgaagagctataagatggcagacgaagcaggttctgaggcagatcatgagggaacccattcaaccaagcggggtcatgcaaagtcgcgacctgtgcgcgactgtgatgacgttcttcagacccatccgagcggtactcagagcggaatctttaacattaagctgcccggatcctccaagattttctccgtgtactgtgatcaagagacttctcttgggggttggcttctgattcagcagcggatggacggttccttgaactttaaccgcacctggcaagattacaaacgtggatttggaagccttaacgatgaaggagaaggagaattttggctgggtaatgactacctgcatctcctcactcaacgcggttcggtgctgagagtggaactggaggactgggcaggaaacgaggcatacgcggagtatcacttcagagtgggttccgaggcggaaggatacgcactgcaagtgagctcatacgaaggcactgccggagatgcacttatcgagggttcagtggaagaaggtgcggaatacacgtcacacaataacatgcagttctcaaccttcgatagagacgcagatcagtgggaagaaaactgcgcagaagtctacggtgggggatggtggtacaacaactgtcaagcagcaaatctgaatggcatctactaccctggtggctcgtacgaccccagaaacaactccccttacgaaatcgaaaatggggtcgtctgggtgagcttcagaggagcggattattcacttcgggcggtgaggatgaaaattcggcctctggtgactcag

SEQ ID NO: 10378 - DNA, 2598 bp, Artificial Sequence
  derived and/or modified sequence
atgtttagcatgcgaatcgtgtgcctcgtactgtccgtagtgggtacggcctggactgccgacagtggagaaggagactttctggcggaagggggcggcgttcgcgggccccgagtcgtcgagaggcaccagtctgcttgtaaggacagcgactggccattttgttccgacgaagattggaattacaagtgcccgtcgggatgccgcatgaaaggcctcatagatgaggttaaccaggactttaccaatagaataaataagctgaagaattccctctttgagtatcagaagaataacaaggactcgcacagtctcaccacaaatatcatggagatactgcggggtgatttttcatccgccaataatcgcgacaacacctacaatagagtcagcgaagatctgcgttcccggattgaagtacttaagcgaaaagtcatcgagaaggtacaacatatccagctcctccagaagaatgtacgggcgcaactggtagatatgaaacgcttggaggtagatattgatatcaagattcgaagttgcaggggcagctgttctagggctctggctagggaggtggacctgaaggattacgaggatcagcagaagcaactggagcaggtaattgccaaggatttgctccccagcagagataggcaacacctccccctcataaagatgaaacctgtgccagaccttgtgcccgggaattttaagagtcagctacagaaagtcccaccagagtggaaagccctaacagacatgccccagatgcggatggagctggagagacccggtgggaacgaaatcacacgcggcggttctaccagttatgggactggctccgagactgaatctcctcggaatccttcgtccgcagggtcctggaacagcggctcaagtggcccaggcagcacaggaaacagaaatcctggcagctccggcactggtggtacagctacatggaagccaggaagctctggccctggtagcactggatcttggaatagtggctccagcggtacgggctccacgggtaatcagaacccagggtctcctcgccctgggtccacagggacgtggaaccctggtagcagcgagagagggagtgcagggcactggacatctgagtctagtgtttccggttctactggccaatggcatagtgagtcaggtagcttccggccagactctcccggaagtggaaatgctcggccgaacaaccccgattggggaactttcgaagaggtgtctgggaacgtatcacccggtactcggcgggagtatcataccgagaagctcgtcacgagtaagggggacaaagaacttcgtactgggaaggagaaggtgacttctggcagtacaacaactacccgcaggagctgctcaaagacagtcaccaagaccgtaatcggtcctgacggacacaaagaagtcactaaggaagtggtcacctctgaagacggaagtgactgccctgaggcaatggatttgggtacgttatctggaatcggaaccctggacggctttcgccatcgccaccccgacgaggcggctttcttcgatactgcaagtacaggaaagacttttccaggcttcttcagtcccatgctgggagaattcgtgagtgaaaccgaatcacgcggaagcgagagcggcatctttaccaacacgaaggaatcctcctcccatcacccaggaattgcagaatttccatccaggggcaagtcaagcagctactcaaagcagttcacctcatcaacgtcgtacaatcgcggtgattctacattcgagtctaaaagttacaaaatggcggatgaggccggtagtgaagccgaccacgaggggacccactctacgaaacggggacacgcgaagtctcgcccggtaagggactgcgatgacgtgctacagacgcatccttctggcacacagagcgggatattcaacatcaaactgcctgggagtagcaaaattttcagtgtttattgcgatcaggagacctccctgggtgggtggctgttgattcaacaacgcatggacggttccctaaacttcaaccggacctggcaagactataagaggggcttcggcagcctcaacgacgaaggcgagggcgagttctggctaggcaatgattacttgcacctgctgacacagaggggcagtgtgttgcgagtagaactggaggactgggccggcaacgaggcctacgcggagtaccatttcagagtggggagcgaggctgaggggtacgccctgcaggtatctagctatgagggcactgcgggcgacgctcttattgagggtagcgttgaggagggcgccgaatatacttctcacaacaatatgcagttctccacattcgaccgagatgctgaccagtgggaagagaattgcgcggaggtctatggtggggggtggtggtacaacaactgccaggcagctaatcttaacggaatatattacccagggggatcatacgaccctcgcaacaattctccatatgaaattgaaaacggcgttgtctgggtgagctttaggggtgcagactactcgctgagagcagtccgaatgaagataagacccttggtaacccag

SEQ ID NO: 10379 - DNA, 2598 bp, Artificial Sequence
  derived and/or modified sequence
atgttcagcatgagaattgtgtgccttgtgctttccgtggtcggtaccgcgtggaccgcagattcgggagaaggcgactttctcgcagagggagggggagtgaggggaccccgtgtggtggaaagacatcagagcgcatgtaaggattctgattggcctttttgttcagacgaagattggaactacaaatgtccatccgggtgtagaatgaagggactgatagacgaggtgaaccaggacttcacgaacagaattaacaaacttaagaactcgctctttgaataccagaagaacaacaaagattcccattcgctcacgaccaatatcatggaaatcctgcgtggtgacttttcgtccgcaaacaatagggataacacttacaaccgagtctcggaggaccttagatcccggatagaagtgctcaaaaggaaagtgattgagaaggtgcagcacattcaattgcttcaaaagaacgttcgcgcacagttggtggacatgaaaagattggaggtcgacatcgatatcaagattagatcatgtagaggatcctgttctcgggctctcgccagggaagtcgatctgaaagattacgaagatcaacagaagcagcttgagcaagtgattgcgaaggaccttctgccgtcacgggatcgccagcacctgccgctgattaagatgaagccagtgcctgatctggtcccgggtaatttcaagtcccaattgcaaaaggtcccccctgagtggaaggcacttaccgatatgcctcagatgcggatggagctggaacgtcctggggggaacgaaatcaccagaggcggttcgaccagctacgggactggatcggagacggagagcccaagaaaccctagctcggcaggttcttggaattccggcagctcaggacccggatctaccggaaatagaaacccaggctcctccggaactggtggcacggcaacctggaaacctggttcaagcgggcccggctcaactgggtcgtggaactccggatcatcagggactggtagcaccggaaaccaaaatccaggatctcctaggcctgggtcaacgggtacctggaaccccggttcatccgaaagaggttcggccggccattggacgtccgagtcatcggtgtccggttcgactggtcaatggcactccgagtcaggatcctttcgccctgattcgcctggtagtggtaatgcgcggcctaataaccctgattggggtacctttgaagaagtgagcgggaatgttagccctggtaccagaagagaataccatactgaaaagctggtgacctcgaagggagataaggagctgagaaccgggaaagaaaaggtgacctcgggatcgaccacgacgactcgaaggtcctgtagcaagactgtgactaagactgttattggtccagatggtcataaagaagtgacgaaggaagtggtgacttccgaggacggttcggactgtccagaagccatggacctgggcaccctttccggaattggaactcttgatggttttagacatcggcaccctgacgaagcagcgtttttcgatactgcgtccaccggtaagacgtttcctggcttcttttctccaatgctcggagaatttgtgtccgagactgaatctaggggatccgagtccggcatattcactaacaccaaagaatcaagctcacatcatccagggattgccgaatttccatcccgcggtaagtcatcatcatactccaagcaatttacgtcctcaaccagctacaacaggggggactcaacgtttgaatctaagtcgtacaagatggcagatgaggctgggtcagaagctgaccacgaaggcactcattcaactaagagaggccatgcaaagtcacgaccggtgagagactgtgacgatgttctgcaaactcacccttccggaacccaatccggtatcttcaacattaaactgcctggatcgtcaaagatattctcggtgtactgcgatcaggaaacctcgctgggcggatggctgctgatccagcaaaggatggacggaagcctcaactttaaccgcacctggcaagattacaagcgtggatttggctcactcaacgatgaaggtgagggtgagttctggctgggcaatgattacctgcacctgcttactcaacggggatcggtccttcgggtcgaactggaggattgggcaggaaatgaagcatacgcggagtaccatttcagagtgggaagcgaagcagaaggatacgccctgcaagtctcgtcctacgagggaactgcgggggacgcactcattgaaggatcagtcgaagaaggggcagagtatacctcccataacaacatgcaattcagcacttttgaccgggatgcggaccaatgggaagaaaattgtgcagaggtgtacggtggcggctggtggtacaataactgtcaggccgcaaatcttaacggtatctactatcctggaggttcctacgaccctcggaacaattctccctacgagattgagaatggcgtggtctgggtgtccttccgcggtgcagactactcgcttcgggctgtcagaatgaaaattcggcctctggtgacccag

SEQ ID NO: 10380 - DNA, 2598 bp, Artificial Sequence
  derived and/or modified sequence
atgttctccatgaggattgtctgtttggtgcttagcgtagtgggcactgcgtggaccgccgattccggtgagggcgactttttagctgaaggggggggggtgagaggccctcgagtggttgagcgacaccaaagtgcctgcaaagacagcgactggcctttctgctcagacgaagactggaattataaatgcccttcaggatgcaggatgaagggattaattgacgaagtcaatcaggacttcactaatcgtatcaacaaacttaagaattcattatttgagtatcaaaaaaataataaggactctcatagcctcacgacgaatatcatggaaatacttagaggggatttctcttctgcaaataaccgtgataatacttataatcgggtttctgaagatctccgctcacggatcgaggtcctcaagcgtaaagttattgaaaaggttcaacatatccagttattgcaaaagaatgtgcgggcccagctcgttgatatgaaacgtctagaagtggatattgatattaaaataaggagttgtaggggttcttgctcccgagccttggcccgagaggtggatttaaaagattacgaagaccaacagaagcaattagaacaagttattgctaaagatctgcttccctctagggatagacaacatctcccacttatcaaaatgaagccagtccctgatctggtgccaggaaattttaagtcccaattgcaaaaagtgccacctgaatggaaggctttaactgatatgccgcagatgcggatggagttggaacgtccagggggcaatgagataactagaggaggatcgacatcgtatggaactggcagtgagacggagtccccccgtaatccttcatcagctggctcatggaattcaggcagctctggtccaggatccaccggtaataggaacccaggatcttccggaacaggtggtaccgctacttggaaaccaggttcttccggacctggttctacaggtagttggaactccggatccagtggaacaggaagtaccggcaatcagaaccctggaagcccgcgtccaggtagcactggaacttggaacccgggttcatcagagaggggaagtgctgggcattggactagtgaatcatctgtctctggttctacgggacagtggcactcagaaagcggtagtttccgaccagatagtccgggtagcggaaacgcacgtcccaacaatccagattggggtacgttcgaggaagttagcgggaatgtgagtccaggcaccagaagagaatatcataccgagaaacttgttacaagcaagggagataaagagttgaggaccggcaaggaaaaggtcaccagcggatctacgactactactaggagatcttgttcaaagactgttacaaaaactgttatcggtccagacggacataaagaggtaacgaaggaagtagttacctctgaagatggttcagattgccctgaagctatggatttgggtactctttcaggtattggaacattggacggctttaggcatagacacccagatgaggcagctttctttgataccgcttcaaccggcaagactttccctggatttttttcacctatgctgggagaatttgtttccgagactgagtcaagaggttctgagagcggcattttcaccaatactaaagagtcttcctctcatcacccaggcattgctgagttcccttctaggggcaagtctagttcgtactctaagcaattcacatcaagcacgtcgtacaatcgaggagactccacattcgagtcaaagagttacaagatggcggatgaggccgggtccgaggccgatcatgagggaacacattccacaaagagaggtcatgcaaagtctcgtcctgttagagactgtgatgacgtgttacaaacacacccttcaggaacccaatcaggcattttcaatattaagttgccgggtagttctaagatcttttctgtttattgtgaccaagagacttctttgggggggtggctcctcattcaacagcgtatggacggctctcttaactttaatcggacttggcaggattataaaagaggatttggatcgctgaacgatgaaggagagggtgagttctggttaggtaatgattatttgcatctgttgactcagaggggcagcgttctgagggtggagcttgaagattgggcaggaaatgaggcgtatgccgagtatcatttcagggtgggaagcgaggctgaaggctacgcattgcaagtgtcgtcctacgaaggtacggctggcgatgccctcattgagggatctgttgaggaaggagcggaatacactagccacaataatatgcaattcagtacttttgacagagatgcagaccagtgggaagaaaactgtgccgaagtgtacggagggggatggtggtataacaactgtcaagctgccaacttgaacggcatatattaccctggaggttcatacgatccccgtaacaacagtccttacgagatagaaaatggtgttgtatgggtgagctttagaggcgctgattatagtttgagggctgtcaggatgaaaattagaccactcgttacccag

SEQ ID NO: 10381 - DNA, 2598 bp, Artificial Sequence
  derived and/or modified sequence
atgttcagcatgcgcattgtctgtctggtgttgtccgtggtgggaaccgcctggactgccgactcgggcgaaggagacttcctcgctgagggcggaggggtccggggaccacgtgtcgtggaaagacaccagtcggcatgcaaggactcagactggccattctgcagcgacgaagattggaactacaagtgcccatctgggtgccgcatgaagggcctcatcgacgaagtcaaccaggacttcactaatcggatcaataaactgaagaactcgctgttcgagtatcagaagaataacaaggactcgcactccctcaccactaacatcatggagatcctcaggggcgattttagctcagccaacaaccgtgataacacctacaatcgagtctccgaagatttgcgctcgcggatcgaggtgctgaagagaaaggtcatcgagaaggtccaacacatccagctcctgcaaaagaacgtgcgggctcagctggtggatatgaagaggctggaggtggacattgatatcaagatcaggtcgtgccgcgggtcgtgtagcagagctttggcgcgggaagtcgacctcaaggactacgaggaccagcagaagcagctcgagcaggtgatcgcaaaggatctcttgccctcgagagataggcagcacctgccgttgattaagatgaaaccagtcccagaccttgtaccagggaacttcaagtcacaactccagaaagtgcccccagagtggaaggcactgactgacatgccacaaatgcgcatggagcttgagcgtccaggcgggaatgagatcacccgcggcggctcgacttcctacggaaccggcagcgaaaccgagtccccgcgcaacccgtcgtcggcggggtcatggaactcgggatcatcgggtccgggatcgaccggcaaccggaacccgggctcgagtggaaccggcgggaccgccacctggaagccaggctcatcaggacctggaagcaccgggtcgtggaacagcgggtcatccgggaccggatcgactggaaaccagaatccgggatcccctagacctggatccactggaacctggaacccggggagcagcgaaagaggctctgcgggacactggacttccgaatcctcagtctcgggctcgactggacaatggcactccgagtccgggtcattcagaccagactcgccgggatccggcaacgcacggccgaataatccggactggggaactttcgaagaggtgtcgggaaacgtgagccccggcaccagacgcgagtaccacaccgagaagctggtgacctccaagggagataaggagctccgcactggaaaggagaaagtcacctcaggatccaccactaccacccggcggtcatgctcgaaaaccgtgactaagacggtgattgggccagacgggcacaaggaagtgaccaaggaggtggtgacctccgaggacggaagcgattgcccggaggctatggaccttggaactttgtccggcatcggcaccctggacggttttaggcacagacacccggacgaagcggcgtttttcgacaccgcgagcaccggtaagactttcccgggatttttcagcccgatgctcggtgaattcgtttcggaaaccgagtcgcgaggatcggagtccggaatcttcaccaacaccaaagaaagcagctcgcatcatccaggaatcgctgaattcccgtcccgcggcaagtcgtcctcctacagcaagcagtttacctcgtcgacgtcctacaacagaggtgactcaacctttgaatccaagagctacaaaatggccgacgaagctgggtcggaggcggaccatgaaggaacccactcgactaagcgcggacatgcaaagtcacgcccagtcagagattgcgacgacgtgctccagacccatcctagcggcacgcaatcgggtatcttcaatatcaaactcccgggatctagcaaaatcttttcggtttactgcgatcaagaaacctccctcggtggttggcttctgatccagcaacgtatggacggatcgctgaacttcaataggacttggcaggattacaagcgcggcttcgggagcctgaatgacgaaggagaaggagaattctggctgggcaatgactacctgcacctcttgacccagcgcggctcggtgctgcgggtggaactggaagattgggccggaaacgaagcatacgccgaataccacttcagagtcggtagcgaagccgaaggatacgctcttcaagtctcatcgtacgaaggcacggccggagatgcgctgatcgaaggctcggttgaggagggcgccgaatacacctcccacaacaatatgcaattctcaaccttcgatcgggatgccgatcagtgggaagaaaattgtgccgaagtgtatggcggagggtggtggtacaacaactgtcaagcggccaaccttaatggaatctactatccaggaggatcatacgacccgcgcaacaactccccgtacgaaatcgagaatggagtggtgtgggtgtctttccggggagcggactactcgctccgcgcagtccggatgaagattcgcccccttgttactcag

SEQ ID NO: 10382 - DNA, 2598 bp, Artificial Sequence
  derived and/or modified sequence
atgttttccatgaggatcgtgtgtctagtgctgtctgttgtaggcacagcttggacggctgatagcggagagggagatttccttgccgagggagggggagttcgggggccgcgggtagtggaacgtcaccagtcagcatgtaaagactcagactggccattttgcagtgacgaggactggaactataagtgcccatctggatgtcgaatgaaaggcctgatagatgaggtgaaccaggacttcacaaatcggatcaataaattgaagaacagcctgttcgaatatcagaaaaacaacaaagattcacacagtctgactacgaatatcatggagattctccgcggcgacttctccagcgccaataaccgggacaatacctacaacagggtctcagaggacctgaggtctcggattgaggttcttaaacgaaaggtgatcgaaaaggtgcagcatatacaattgttacaaaagaacgtgcgggcacagctcgtggacatgaaaaggctggaggtggatatcgacattaagatccggagctgtcgcggaagttgctctagggccctagcccgcgaagtggatctgaaagactacgaagatcagcagaagcagctggaacaggtgattgcaaaagacttgcttccatcccgagataggcaacacctgcccctgatcaaaatgaaacccgtgcctgacctcgtgcccggcaacttcaagagtcagctccagaaagtgccccccgagtggaaagccttaaccgacatgcctcaaatgcggatggaactcgagaggcctgggggcaatgagatcacacggggcggttcgacttcgtatggaacaggctcggaaaccgagagccctaggaaccctagctcagccgggtcttggaattccggcagcagcggcccaggatctacaggcaaccgaaaccccggctcttccggaacgggcggaactgccacatggaaaccaggaagctcagggccgggctcaaccggttcctggaacagcggctccagcggtaccggaagcactggcaaccagaatcccggcagtcccagacctgggagtaccgggacctggaatccgggatctagcgagaggggatcagcagggcattggacatccgagtcctccgtgtccgggtccaccggccaatggcattcagagtccggatcatttaggcccgatagtcccggatcaggaaacgctagacctaataaccccgactggggaaccttcgaggaagtgtctggcaacgtgagtcccgggacgagaagagagtaccataccgagaagctggttacttctaaaggggacaaggagctccggaccggtaaggaaaaggttacatctggaagcacaactaccacaagaagatcatgcagtaagactgttaccaaaactgttattggtcccgacgggcacaaagaagtcacaaaagaggtggtcacaagcgaggacggttctgactgtccagaagcgatggacctgggtacactgagcgggattggaaccctggacgggtttcgtcatcgtcatccagatgaggctgccttcttcgacactgcatccactggaaagacctttcctggcttcttttccccgatgctcggtgaattcgtctccgagaccgaaagcagagggtctgagtcggggatcttcaccaacaccaaagaaagcagctcacatcatcccggaattgccgaatttccctctagggggaaatccagtagttactctaaacagtttactagctcgaccagctacaaccgaggggacagcacgtttgaaagtaagtcttataagatggccgacgaggcgggaagcgaggcagatcacgagggcactcattcgacgaagcgtggacatgcgaaatctcggccagtccgggactgcgacgatgtgctgcagacgcaccctagtggcactcagagcgggatttttaacatcaaattgcctggctcctccaagatattttcagtatattgcgatcaggagacttccctggggggttggctgctcattcaacaaagaatggacgggtctttgaactttaatcgaacatggcaggactacaagagaggcttcggatctctcaatgacgagggagaaggcgaattctggctgggcaacgactacctgcacctcctaacacaaagaggaagcgtgctgcgagtggaactggaagactgggccggaaacgaagcatacgccgaataccacttcagggtggggtctgaagccgaagggtatgctttacaggtctctagctacgagggcaccgctggagatgcattgattgagggtagcgtggaagagggcgcagagtatacatcccacaacaacatgcagttttccacatttgatcgcgacgctgaccagtgggaggagaactgcgccgaggtctacgggggagggtggtggtacaataactgtcaggccgccaatctcaatggcatctattacccgggggggagctacgaccctagaaacaattccccttacgaaatcgagaacggagttgtatgggtgtcattcaggggggctgactatagcctccgagccgtccgtatgaagatcaggcccctcgtcacccaa

SEQ ID NO: 10383 - DNA, 2598 bp, Artificial Sequence
  derived and/or modified sequence
atgttcagcatgcgcatcgtgtgccttgtgctgtctgttgtcggaactgcatggaccgcagattcgggtgaaggtgacttcctggcggagggtggtggtgtgaggggaccaagggtggttgaacggcatcaatcggcttgtaaggattcagactggcctttctgctcggacgaggactggaactacaagtgccctagcggatgtcggatgaaggggctgatcgatgaggtgaaccaagacttcaccaaccgcattaacaaactgaagaattccctgttcgaataccagaagaacaacaaggattcacattccctgaccaccaacatcatggaaatcttgcggggcgacttctcatccgcgaacaaccgggataatacctataatcgggttagcgaggatctccgctcgcgcattgaagtcctgaagaggaaggtcatcgaaaaagtacagcatatccaactgctccagaagaatgtccgggctcaacttgtggacatgaagcgccttgaagtggacatcgacatcaagatcaggtcctgccgcggatcgtgctccagagctttggcaagagaagtggacttgaaggactacgaggaccagcagaaacagcttgaacaagtaattgccaaagatctgctgccatcccgcgaccggcagcaccttccgttgattaagatgaagccggtgccggacctcgtgcctggaaatttcaagtctcaactgcagaaagtccccccagagtggaaagcgctgaccgatatgccgcaaatgcgcatggaactggagcgtcctggaggaaacgagatcacgcgaggaggctcaacctcatacggaacgggttctgagactgagtcaccgcgcaacccgtcgtccgccggatcctggaatagcgggtcctccggacctgggtcaacggggaaccgcaatcctggctcgtcgggaaccggaggaactgcgacctggaaaccggggtcctcgggcccgggctcgaccggctcatggaattctggaagcagcggtaccggaagcaccggaaaccagaacccaggcagcccaagaccgggaagcactggaacgtggaaccctggatcgtccgaacggggctcggctggacactggacttcggagtctagcgtatcggggtcgactggacagtggcactcggaatcgggtagctttcgccccgattccccaggaagtggcaatgcacgcccgaacaatccagactggggcacgttcgaagaggtgtcagggaacgtgtcaccgggaacgcgccgagaataccacactgagaagctggtcacgagtaagggtgataaggaactgcggaccggcaaagagaaggtgacctcgggcagcactacgaccactcgaagaagctgctcaaaaactgtgaccaagactgtgatcgggcccgacgggcacaaagaggtgactaaagaggtggtcacttccgaggacggaagcgactgcccggaagcaatggacctggggaccctgtcaggcatcggaactctcgatggcttccgccatcggcacccggacgaggccgccttttttgatactgcctctactggcaagactttcccgggcttcttctcgccgatgctcggcgaattcgtttccgaaaccgaatcgagaggaagtgaatcgggcatctttaccaacaccaaggagtcatcgtcacatcacccgggaattgctgagttcccaagccggggtaagtcatccagctacagcaaacagtttacttccagcacttcgtacaataggggcgactccaccttcgaatccaagtcctacaaaatggccgacgaagccggctcggaagccgaccacgaaggtacgcatagcactaagcggggacacgcgaaatcaagaccagtgcgggactgtgatgatgtcctccagacccatccgtcgggcactcagtccggaatcttcaacattaagctgcccggttcctctaagatcttttccgtgtactgcgatcaagaaacctctctcggaggttggctgctcatacaacagagaatggacggaagcctcaactttaatcggacctggcaggattacaagcgcggcttcggatcgctgaacgacgaaggcgagggagaattttggctgggtaacgattatctgcatcttctcacccaaaggggatcggtgctcagagtcgaactggaggactgggcgggaaacgaagcctacgcagagtaccacttccgagtaggcagcgaagccgagggttacgccctccaagtgtcctcatacgaggggaccgcgggagatgccctcatcgaggggtcggttgaagaaggcgctgaatatacttcgcacaacaatatgcaattctccactttcgacagggatgcggatcagtgggaggaaaactgcgcagaggtgtacgggggaggatggtggtacaacaattgtcaggccgccaacctcaatggaatctactaccctggaggaagctacgacccacggaataactcaccctacgaaatcgagaacggagtcgtctgggtgagcttcaggggagctgactactccctgagagcagtgagaatgaagatccgcccattggtgacccag

SEQ ID NO: 10384 - DNA, 2598 bp, Artificial Sequence
  derived and/or modified sequence
atgttttcaatgcggatagtgtgcctggtcctttcagtggtgggtactgcctggaccgctgacagcggagaaggggacttcctcgctgaaggcggtggcgtacgaggcccccgtgtggttgagcggcaccagtctgcctgcaaggactctgattggccattttgttctgacgaagactggaactacaagtgcccatcaggctgtcggatgaagggcttgatcgacgaggttaaccaggacttcactaaccggataaacaagttgaaaaactcgctttttgaataccagaaaaacaacaaagatagtcactcactgacaaccaatattatggagatactgaggggagacttctcaagtgccaacaaccgcgataatacttataatcgggtgtccgaggatctgcgcagtagaattgaagtgctcaagcgaaaggtgatcgagaaagttcagcacatacagctgctgcagaagaacgttcgtgcacagctcgtggacatgaaaagactggaggttgatattgacattaagatccggtcctgccgggggtcatgtagtagagccctcgcgcgcgaggtggatctgaaggattacgaagaccagcagaaacagctcgagcaggtgatcgccaaagacttgttgccatctcgggaccgccaacatcttccgttgatcaagatgaagccagtcccagacctcgtgcctgggaacttcaaaagccagctgcaaaaggtcccccccgaatggaaagctctaacagatatgccccagatgcggatggagcttgagcggccaggtggaaatgaaatcacacggggcggtagcacatcatacgggacaggtagcgaaacggagtccccgcgtaatccttccagtgcaggctcctggaatagcggttcatcaggaccaggatcaacagggaatcgcaatcccggaagttctggaacaggcgggactgcaacctggaaacccggtagctctggacctggctcaacaggatcctggaacagcggatcttcaggcacagggtcaaccggaaatcagaaccctggcagtccaaggccggggagtacagggacatggaaccccggctcatctgagagggggtccgccggtcattggaccagtgagtcttccgtttctggcagcacaggccagtggcactccgagagcggcagctttcggccggattccccgggatctggtaacgcgcggcctaacaaccctgattggggaacattcgaggaagtgagtggcaacgtatcccccggcacacgcagggagtatcacacagagaaactagttaccagtaaaggcgataaagaattgcggaccggcaaggagaaggtgacctctgggagtactaccaccactaggagatcgtgtagcaaaactgtaactaagacggtcatcggtcccgatggccacaaagaggttacaaaagaggtggttacttcagaagatggcagtgattgtcccgaggctatggacttggggacgctgagtggcattggtacgctggacggcttccggcatcgccaccccgatgaagccgcattcttcgacacggcatccacaggcaagacgtttccaggcttcttctccccgatgctgggtgaattcgtaagcgaaactgagtcccgcggttccgagtcgggaattttcacaaacaccaaggaaagcagctctcaccaccctgggatcgccgaattcccctcccgcggcaagtcttcaagctactcaaagcagtttacctctagcacttcttataaccgtggggattcaacctttgagtcaaagagctacaaaatggctgacgaagccggctctgaggccgaccacgaaggcacccatagtaccaagcgtggtcacgccaaatccagacctgtacgcgactgtgacgatgtgctacagacacatcccagcgggactcagagcggcattttcaatatcaagctgcccggtagctcaaagatcttctcagtttattgcgaccaggaaacctcacttggagggtggctgcttatacagcagagaatggacgggtccttgaattttaaccgaacctggcaggactacaagcgcggatttggttcactcaatgatgagggggagggagaattttggttggggaatgattacctgcatctgctcacccagcgcgggagtgtcctgcgggtggagctggaagactgggctggaaacgaggcttatgcggagtaccattttcgagtgggctctgaggcggagggttacgccctgcaggtgagctcctacgaaggcaccgcaggcgacgccttgatcgagggcagcgtagaggaaggcgccgagtatacctctcacaataatatgcaattctccacttttgatagagacgccgaccagtgggaagagaactgtgcagaggtgtatgggggtggctggtggtacaacaattgtcaggccgcgaatttgaacgggatatactatccggggggctcctatgacccacggaacaactctccgtacgaaatcgagaatggtgtggtttgggtaagttttagaggcgccgattattccctaagggcagtaaggatgaagattcgccccctcgtaacccaa

SEQ ID NO: 10385 - DNA, 2598 bp, Artificial Sequence
  derived and/or modified sequence
atgttttccatgcgtatagtgtgtctggtgctcagtgttgttggcaccgcctggacagctgactcaggggagggggactttttagccgaggggggcggagtgcgaggccctagggtggttgagcggcaccagagtgcctgtaaggactctgattggcccttctgctccgatgaggattggaactacaagtgtccgagcggatgtagaatgaagggcctgatcgatgaagtcaaccaggacttcactaaccgtatcaataagctgaagaattcattgtttgagtaccaaaagaataacaaggactcacactcgctgaccacaaacatcatggaaatcctccgtggtgacttttctagtgccaacaaccgggataacacttacaatcgcgtctcagaagatctgcgcagccggattgaggtcttgaaacgtaaagtgatcgagaaagtccaacacatccaactcctgcaaaagaatgtccgcgctcagctggtagacatgaaaagactggaggtggacattgatatcaaaattagaagttgtcgagggtcctgttccagagccctcgccagagaggtcgacttgaaggactatgaggaccagcagaagcaacttgagcaggttatcgctaaggatttactcccttctagggatagacagcatctgccactgatcaagatgaaacctgtcccagatctggtgccgggcaactttaaatcacagttacagaaagtgcctcccgagtggaaggctctgaccgacatgccccagatgagaatggagcttgaacggcctgggggcaacgaaataaccaggggcgggagtacgtcctatggaacgggctctgagactgagtctccccggaacccatccagtgcgggatcttggaactccggcagttccggccccggctctacaggcaacagaaaccctggatcatcagggacgggaggcaccgccacttggaagcctggatcttctggtcctggcagcactgggtcttggaacagcgggtcttccggcactgggagtactgggaaccagaatcccggatcacccaggcccggtagtaccgggacctggaacccaggctcaagcgagcggggcagtgccgggcactggacgtccgagtcttcagtgtcaggtagcactggtcaatggcatagtgagagcggctctttcagacctgacagccccggtagcgggaatgccaggccaaataaccccgactggggcacttttgaggaagtgtccgggaatgtgtctcccgggaccaggcgtgagtaccacacagaaaagctggtgacatcgaagggggataaggaactccgaactggcaaagagaaggtgacaagcgggagcacgaccaccacacggcggtcgtgctcaaagacagttacaaagactgtaatagggccagatggtcataaagaggtaactaaggaagtagtgacttccgaagacgggtcggattgtcctgaggccatggacctggggaccctcagcggcataggaacgctggatggtttccgccatagacatccagatgaggctgcttttttcgacaccgccagcaccggtaaaacctttccaggctttttcagtccgatgctgggagagtttgtgagcgagacagaaagccgcggaagcgagtcgggtatatttacaaataccaaagagtcttcaagccaccatccagggatagccgagtttcccagccgtggaaaaagttcctcatactcaaagcagtttacttcatctacctcctacaatcggggcgacagcaccttcgaaagtaaatcttataaaatggctgacgaggcaggaagcgaggctgaccacgaaggtacccactccactaaaagggggcatgccaaatcgagaccagtaagggattgtgacgacgttctgcagacccatccctcgggcacccagagcgggatctttaacatcaagctgccgggatcatctaaaatattcagtgtgtactgcgatcaggaaacaagtttggggggatggctgttaatccaacaaagaatggacggcagcctgaattttaatcgtacctggcaagactacaagcgggggtttgggtctctcaatgatgagggagaaggtgagttttggttagggaacgactatctgcatttgcttacgcagcgggggtccgtgctccgtgtggagttggaggactgggccgggaatgaggcttacgcggaataccacttcagggtggggtccgaggcagaggggtacgctttgcaggtttctagttacgaaggaaccgcgggcgacgctctcattgagggctccgtcgaagagggtgccgaatatacctcccacaacaatatgcagttctccacattcgacagagacgccgaccagtgggaagagaattgcgcggaggtttatggcggcggttggtggtacaataactgtcaggcggcaaacctgaatggaatatattatcctggaggcagttatgaccccaggaataacagcccctatgaaatagaaaacggagtggtttgggtttcttttaggggagctgactactcactgcgcgcagtgcgtatgaaaatcaggcctctggttacacag

SEQ ID NO: 10386 - DNA, 2598 bp, Artificial Sequence
  derived and/or modified sequence
atgttctctatgaggatcgtgtgcctggtgctttctgtcgtcggaaccgcatggaccgcagactctggagagggagacttcctggctgagggagggggggtccggggtccccgggttgttgaaagacatcagtctgcttgcaaagacagcgactggcccttctgttctgacgaggattggaattacaaatgcccaagtggatgccgcatgaaggggctgattgatgaagttaaccaggacttcacgaacaggatcaataaattgaagaactccctgtttgagtatcagaaaaacaacaaagatagccacagcctgaccaccaatataatggagattctgcgaggtgacttcagctccgccaacaacagggacaatacctacaaccgcgtaagcgaggatctcaggtccaggatcgaggtgctgaagcggaaggtgatagaaaaggtgcaacatatccaactcctgcagaagaacgtccgagcgcagttggtggacatgaaacgacttgaggtagacattgacatcaaaatccgctcttgtcgcggtagctgttccagagcccttgccagggaagttgatctcaaggactacgaagaccagcagaagcaacttgaacaggtcattgccaaggacctcctgccgagtcgggacagacagcacttgcctctcatcaagatgaagccagttcccgacctcgttccaggaaactttaaatctcagctccagaaggtgcctcccgagtggaaggcgctgactgacatgccgcagatgaggatggaactggagagaccgggaggaaatgaaatcacccggggaggttcaacctcttacggcaccggctccgagaccgagtcccctagaaatccctcttcagcaggatcatggaactcagggagttctgggccaggatcaaccggcaatcggaatcccggaagcagtggcactggtgggactgccacttggaagccaggaagttcaggacccggctccactgggtcatggaactcaggatccagtggcaccggtagtactggcaatcagaacccgggaagcccaagacctggatctactgggacttggaacccaggatcaagcgagcgaggttcagccggtcattggacaagtgaatcctctgtttccggctccacaggacagtggcattctgagtccggttcattccgccccgactccccaggctccggcaacgcaagacctaacaatcctgactgggggaccttcgaggaagtatcagggaacgtgagccccggcactaggagagaataccatactgagaaactggtaacctcaaagggggacaaggagttgcgaaccggaaaggaaaaggtgacgagcggtagcactacaacgacccgaaggtcatgttcaaagactgtgaccaaaacagtcatcgggccagacggccacaaagaagtgaccaaagaggtggtgacttccgaagacggctctgactgcccagaagcgatggatttgggcacattgagcggaatcggcacactcgatgggttccgccatagacatcccgacgaagccgccttcttcgacaccgcttccaccggaaaaacttttcctggctttttctcacccatgctgggcgagttcgtgagtgagaccgaaagccggggcagcgagagcggaattttcactaacaccaaagaatcttcaagtcatcaccccgggattgctgaatttccgtctagaggaaaaagttctagttacagtaagcaatttacaagcagtacgagctataaccgaggcgattcaacattcgagtccaagtcttacaaaatggctgacgaagctgggtctgaagccgaccacgaggggacacactctacgaaaagaggtcacgccaaatcccgccccgtcagggactgtgacgacgtgctgcagacccacccctccggaactcagtccggcatttttaatatcaagctgccgggaagctctaaaatattctccgtgtactgtgatcaagagacgtcactcggtggctggctgttgattcagcagagaatggatggaagcttgaatttcaatcgcacctggcaagattacaagcgggggtttggaagtctgaatgacgaaggtgaaggagagttctggcttggcaatgattacctgcatctgctgacacaaagagggagcgtcctccgcgtcgagctggaggactgggcaggaaacgaggcctatgccgagtaccactttcgggtcggcagtgaagcggagggatacgccctccaggtcagcagttatgaaggcactgccggcgacgcactgatcgagggcagtgttgaggagggggccgagtatacaagtcacaacaacatgcagttctccactttcgaccgagatgctgaccagtgggaagagaactgcgctgaggtctacggagggggatggtggtacaacaattgtcaagctgcgaatctgaatggaatctattatcccgggggttcttatgatccccgcaacaactctccctacgagatcgaaaacggggttgtctgggtaagttttaggggtgcagactactctctgcgcgccgtgcggatgaaaataagaccccttgttacccag

SEQ ID NO: 10387 - DNA, 2598 bp, Artificial Sequence
  derived and/or modified sequence
atgttctctatgcggatcgtgtgtctagtgctgagcgtcgtcggtactgcgtggaccgctgacagcggagagggcgactttctcgctgagggagggggtgtccgcggccccagagtcgttgagaggcaccagtctgcttgtaaagattccgactggccattttgctcagacgaggattggaactacaaatgccctagcggctgcaggatgaaaggtcttatcgacgaggtgaaccaggatttcaccaacaggatcaacaagcttaaaaacagtctgtttgagtatcagaagaacaataaagattcccactccttgactacaaatatcatggagatccttaggggagatttctcaagtgccaacaaccgcgacaatacatataacagggtgagcgaagacctgagatcacgcattgaggtcctcaagcgtaaagttatagagaaagtgcagcatatccagctgctgcaaaaaaacgttcgggctcaactggttgacatgaagaggttggaagtggacatcgacatcaaaatacggtcctgcagaggcagctgcagccgtgctcttgcgcgcgaagtggatttaaaagattacgaagaccagcagaaacaactagagcaggtcatcgcaaaagacctgctgccgtccagggacaggcaacatcttcctctcatcaagatgaagcccgtgccagatcttgtacctgggaacttcaaaagtcagctgcaaaaagtccctcctgagtggaaagctttgacagacatgccacagatgagaatggagctcgagaggcccggtgggaacgagattacccgcggagggagcacatcctatgggaccggaagcgaaaccgaatcaccaaggaacccgagtagcgctgggtcttggaactcaggaagcagcggaccaggctctaccggcaacaggaatcctggcagcagtggcaccggaggtaccgctacttggaagcccggatcatccggaccaggcagcactggtagttggaatagcggaagcagtgggactggatcaactgggaaccagaatccagggagccctagaccaggcagcacaggaacctggaatccagggtctagcgagcgaggctcagcaggccactggaccagtgagagttccgtctctggatctaccgggcagtggcacagcgaaagcgggtcattcaggccggattccccagggtcagggaacgctaggcccaataaccctgattggggcacattcgaagaagtaagtggcaacgtgtcccccgggactcgtcgcgagtaccacaccgagaaactggtgacttctaaaggggacaaagaacttagaactggaaaggaaaaagttaccagcggaagcaccaccaccactcgcaggagctgcagcaaaacggtgaccaagactgtgatagggcccgatggtcacaaagaggtgaccaaggaggtcgtgacaagcgaggatggtagcgactgcccagaagctatggatctgggaacacttagcggaatcggcaccctggatggctttcgtcatagacatccagacgaggctgcattctttgataccgccagcacaggcaaaacctttccgggattcttttcaccaatgctgggggagtttgtgagcgagactgagagcagaggctccgaatccggtatctttactaacaccaaggagagctcatcccaccaccctggcatcgccgaattcccctctagaggaaagagttcctcctattctaaacagttcacaagtagtacctcttataaccgcggggacagcaccttcgaaagtaagagctacaagatggcggatgaggctggatccgaggctgatcacgaaggcacacatagtaccaaaagaggccacgcgaagtccaggcccgtcagagactgcgatgacgtgctccaaacacatccgagcggcacccaatccggaatctttaacatcaagttacccggcagtagcaagatctttagtgtttactgtgatcaggaaacttcgttgggcgggtggctgttgatacagcaacgcatggatggctcattgaactttaacagaacatggcaagattacaaacggggctttggcagcctgaacgacgagggggaaggtgaattttggcttggaaacgattatcttcaccttctaacacagcgtggatcagttctccgagttgaattggaggactgggcaggcaacgaggcttacgccgagtatcactttcgtgttggctccgaagccgagggttacgctttgcaagtgtccagctacgagggaaccgctggcgatgcgttgatcgagggaagcgtcgaggaaggagctgagtacaccagtcataacaacatgcagttttccaccttcgatagagacgcagatcaatgggaggagaactgcgccgaggtatacggcggaggctggtggtacaataactgccaggcagcgaacctaaatggaatctactacccaggtggcagctacgaccccagaaacaacagcccctatgaaatcgaaaacggcgttgtgtgggtctctttcaggggagctgactattcattgagggccgtgcgtatgaaaattcgcccgcttgttacacag

SEQ ID NO: 10388 - DNA, 2598 bp, Artificial Sequence
  derived and/or modified sequence
atgttcagcatgagaattgtctgtttggtgctgtcagtcgtggggacggcgtggaccgcggattccggtgaaggcgactttcttgcagagggaggaggagtcagagggcctcgggtggtggaaagacaccagtccgcatgcaaagatagcgattggcccttctgctcggatgaagattggaactacaaatgcccttctgggtgtcgtatgaaaggtctgattgacgaagttaaccaagactttaccaaccgcataaacaagctcaagaactcacttttcgaatatcaaaagaacaacaaagactcacactcactcaccacgaacattatggagattttgcggggagacttcagctccgctaacaatcgcgacaacacttacaatcgtgtgtcagaagatctgcgctcccggatcgaggtgctgaagcgcaaggtgattgaaaaagtccaacatatccagcttcttcagaagaatgtgcgggcccaactggtcgatatgaaacgccttgaagtcgatattgatatcaagatacgtagctgtagaggaagttgcagcagggccctggcgcgtgaggtcgatcttaaggattacgaggatcagcagaagcaacttgagcaagtgatcgcaaaagatctcctgccttctagggacagacagcatcttccacttatcaaaatgaagccggtgcccgatctcgtgcccggcaactttaagtcgcaactgcagaaggttccaccggagtggaaagcacttaccgatatgccacaaatgcggatggaacttgagaggccaggagggaacgaaatcacgaggggcggatcgacgtcatacggcaccgggtcagaaactgagtcgccccggaatccatcttcggcaggaagttggaattccggttcgagcggtcccggaagcactgggaaccgtaacccaggaagttcggggactggcggaactgcaacttggaagcctggcagttcgggccctggttccaccgggagctggaattccggatcttccggtacgggttccactggcaaccagaacccggggtcgccacgccctggatccacgggtacctggaatcctggtagcagcgaacgcggatcggcagggcattggacttcggaatcctccgtgtcagggtctaccgggcagtggcattccgaatccggatcctttagacctgattctcccggctccggcaacgcacgacccaataaccctgattgggggactttcgaggaagtgtcaggcaatgtttcccccggcactagacgggagtaccacaccgagaaactggtgacctccaagggtgacaaggagttgcggactggtaaggaaaaggtgacctcaggcagcaccactaccaccagacgatcgtgtagcaagactgtcactaagacggtgataggaccggatggacacaaggaggtcacgaaggaagtggtaacttcggaagatgggtcggattgtccagaagcgatggatctgggtacgctcagcggaattggaacccttgatgggtttcggcatagacaccctgatgaggctgccttttttgatactgcctctactggaaagacttttcctggatttttctcacccatgctcggagaatttgtgagcgaaaccgaatcccgcggatcggaatcgggtattttcactaatactaaggaaagctcatcccaccatcccgggattgcagaatttccgtcaaggggtaagagcagttcctactcgaaacaatttacctcttcgacctcttacaacagaggggactcgaccttcgagtcaaagtcatataagatggcagacgaggcaggcagcgaagcagatcatgaaggtacccatagcaccaagagagggcatgcgaagagcagaccagtgagggattgtgatgacgtgttgcagacccatccgtcggggacccagtcaggcattttcaatatcaaacttccaggatcgtccaagatcttttccgtctactgtgaccaagaaacctcattggggggttggttgctgattcagcaacgtatggatggatccctgaatttcaacaggacttggcaagactacaagcgcggctttggatcacttaacgacgaaggtgagggtgagttttggctggggaatgactaccttcatctgctgacgcagagaggttccgtcctgagggtggaactggaggactgggcaggtaacgaggcatacgcggagtatcatttccgtgtcggtagcgaggctgaggggtacgcacttcaagtgtcgtcgtacgaaggcactgctggagacgccctcatagaaggctccgtcgaggaaggtgccgaatacacctcccacaacaatatgcagttctcgacctttgacagagacgcagaccaatgggaagaaaactgtgccgaagtctacggcggtggttggtggtacaacaattgccaagccgcaaaccttaatggaatttactatccaggaggtagttacgacccaaggaacaactccccttacgagatcgaaaatggtgtggtgtgggtgtcctttcgcggagccgattactcgcttcgagcagtgcggatgaaaatcagaccacttgtgacccaa

SEQ ID NO: 10389 - DNA, 2598 bp, Artificial Sequence
  derived and/or modified sequence
atgttttcaatgagaatcgtgtgcctcgtgctgtcagtggtgggaaccgcctggactgctgattcaggagagggagatttcctggcagaaggaggtggagtgcggggaccacgggtcgtggagaggcaccagtcagcctgcaaggactccgattggccgttttgctcggacgaggactggaactacaagtgtcctagcggatgccgcatgaagggtctgatcgacgaggtcaaccaggacttcacgaatagaattaacaagctgaaaaactctctcttcgaataccaaaagaataacaaggactcgcattcactgactactaacatcatggaaatcctcaggggagatttctccagcgccaataacagagacaacacttacaatagagtttcagaagatctccgctcccgcattgaagttctgaagcggaaggtcatcgagaaggtgcagcacatccagctgctgcagaagaacgttcgggcacaactggtggacatgaagcggctggaagtggacattgatatcaagattagatcctgccggggctcctgctcaagggctctggcccgggaagtggacttgaaggattacgaggatcagcaaaagcaactggagcaagtgattgccaaggacctcttgccaagccgggatcgccagcacctgccgctcatcaaaatgaaaccggtgccggacctggtgcctgggaacttcaagtcgcaactgcagaaggtgcccccagaatggaaggccctgaccgacatgccgcagatgcggatggaactggaacgccccggtggaaacgagatcactagagggggttcgacttcctacgggaccggatccgaaactgagagcccgcgcaacccctcaagcgctggaagctggaactccggatcctccggacctggatcgaccggaaacaggaaccctggatcttccggcaccgggggaaccgccacttggaagccgggtagctcaggcccgggaagcactggctcctggaacagcgggtccagcggtaccggatcgactggaaaccagaacccagggtcgccgcgcccggggagcactggaacctggaacccaggctcctcagagagggggtccgctggacattggacgtcagaaagctctgtctccgggtcgactgggcagtggcattcggaaagcggatctttccgcccggatagcccgggatcgggaaacgctcgccccaataatcccgattggggaacctttgaagaagtgtccgggaatgtcagcccaggaacgcgcagggaataccacacggaaaagttggtgaccagtaagggagacaaggaactccgcactgggaaggaaaaggtgaccagcggatccaccactactactcgccgctcatgttcaaagaccgtgacgaaaacggtgattggcccggacggacacaaggaggttaccaaggaagtcgtcacgtcagaggatgggtccgattgtccggaagctatggacctcggaaccctgagcgggatcggcactctggatggattccgccaccggcatcctgatgaagcagcgtttttcgacactgcttcgactggaaaaacctttccgggcttcttctcgccaatgctcggagaattcgtgtcagaaactgagtcgaggggatcggaatcgggaatctttacgaacacgaaggaatcatcctcgcaccacccgggaattgcagagtttccatcccggggtaaatcaagctcctactcgaaacagttcacttcgtctacgagctacaataggggagactccaccttcgagtccaaatcctacaagatggcagacgaggcgggatcggaggccgaccacgaaggaacccactcaacgaaaagagggcacgccaagagcagaccagtgcgagactgcgatgacgtcctccaaactcacccttccggcacccaatcagggatcttcaatatcaagctgccaggttcctcgaagattttctcggtgtactgcgaccaagaaaccagcctcggaggatggttgctgatccagcaacggatggatggctctctgaactttaatcggacttggcaggactacaaaagaggattcggctccctgaatgacgaaggcgagggcgaattttggctcggcaatgactacctccatttgctcacgcaacggggctcagtgttgagagtggaacttgaggactgggctggtaacgaagcatacgccgagtaccattttcgcgtgggaagcgaggccgagggatatgcactgcaagtgtcgtcgtacgaaggcactgcaggcgacgccctgatcgaaggatcagtcgaagagggagccgagtacaccagccacaacaacatgcagttcagcaccttcgacagggatgccgaccaatgggaagaaaattgcgcggaggtttacggcggcggatggtggtacaataactgccaggcagcgaatctcaacgggatctactaccctggcggtagctacgaccctcgcaacaactcgccctacgaaatcgaaaatggagtggtctgggtttcatttaggggagccgattactctttgcgcgccgtgcgcatgaagatcagacccctggtgacccag

SEQ ID NO: 10390 - DNA, 2598 bp, Artificial Sequence
  derived and/or modified sequence
atgttctccatgcgaatagtatgtcttgttttgagcgtggttggcactgcatggaccgcggatagcggagaaggagatttcctggcagaagggggaggggtccgtggtcccagagtggtagaacgtcatcagagtgcgtgtaaagacagcgattggcccttttgttcggatgaagactggaattacaagtgcccatctggctgcaggatgaagggcctcatcgacgaggtcaatcaagacttcaccaaccgcataaacaagttgaaaaattccctgttcgaataccagaagaacaacaaggattcgcactccctgacaacgaacataatggagatactgagaggagacttctcttctgcaaacaaccgcgataacacatataaccgggtgagtgaagacctaaggagtaggatcgaagtcttgaagcggaaagtcatcgagaaggttcagcacatccagctactacagaagaatgtccgcgcccaactggtggatatgaaaaggctcgaggtggacatcgacatcaaaatccggtcgtgcaggggaagctgctcacgcgccttggccagggaggttgacctcaaagattatgaggaccaacaaaaacagttggaacaggtcatcgctaaggaccttctcccttcccgagacagacagcacctcccactaataaaaatgaagcccgtcccagacttggtgccaggcaactttaagtctcagttgcagaaggtgccacccgagtggaaggctttgacagatatgccgcagatgaggatggagttagaaagacccggtgggaacgagatcacaaggggggggagcacttcttatggaaccgggtccgagacagagtcgcctcgaaacccatcatctgccggatcttggaatagcgggagtagcggccctgggtccactggcaataggaatccagggtcttcaggcaccggaggaactgccacctggaagcccggcagcagtggtcccggatcaaccgggtcatggaactccggcagtagcggcacgggttctacaggtaaccagaatccagggagcccacgacccggttccactggcacatggaacccgggatcaagcgagagggggagcgccggccattggaccagtgagagcagcgtgtctgggtctactggccagtggcacagcgagtccggatcattcagaccagatagccccggttccggaaatgcacgacccaacaaccctgattgggggactttcgaggaagtgtccgggaacgtgtctcctgggacccggcgggaatatcacaccgagaagctcgtgacaagcaaaggagacaaggagttacgaaccggcaaagagaaggtgacatcgggatccacgactacaactcgtagaagttgctccaaaactgtgaccaaaaccgtcattggtcctgacggacacaaggaggtgacaaaagaggtggtcacttccgaggacgggtcagactgccccgaggcaatggatttaggaaccctgtcaggcatcgggactctggacggctttcgtcatagacatccagatgaggcagcgtttttcgacactgccagcacaggcaagaccttccccggttttttctcacctatgttgggggagtttgtcagtgaaaccgagagcaggggaagcgaatctggaattttcaccaatactaaggaatcctctagccatcaccctgggattgcggaatttccctctcgggggaagagttcctcttactcaaagcagttcacgtcgtcaacctcttacaaccgcggagattcgacgtttgaaagtaagtcatacaagatggctgacgaggccggtagtgaggctgatcacgaggggactcactcgaccaaacgggggcatgccaaaagtcggcccgtgcgggattgcgacgacgtgttacagactcatccatctgggacccaatccgggatcttcaatatcaaacttcctggatcttctaaaattttttctgtttactgtgaccaggagacaagcctgggggggtggctcctcatccagcagcggatggacggtagcttgaacttcaatcgcacatggcaggattacaagcggggctttggatccctgaatgatgaaggcgagggtgaattttggctgggcaacgattatctgcatctgctgacgcagagaggtagtgtgttacgggtggagctcgaggattgggcagggaacgaagcatacgctgagtaccactttcgggtaggcagcgaggccgaaggctatgccctgcaagtgagctcgtatgaagggactgctggggatgctcttatcgaaggaagcgtggaggaaggagctgagtatacttcccataacaatatgcagttttcaaccttcgacagagatgcagaccaatgggaggagaactgtgccgaagtgtacggcggaggttggtggtacaacaactgtcaggctgccaacctgaacgggatttactacccaggaggaagctatgacccaaggaacaattccccgtacgaaatcgaaaacggtgtagtttgggtaagcttcagaggcgctgactattcacttcgagcagtcaggatgaagattcgccctttggtcactcag

SEQ ID NO: 10391 - DNA, 2598 bp, Artificial Sequence
  derived and/or modified sequence
atgtttagcatgcgcattgtttgtttggtgctgtctgtggttggtaccgcttggactgccgatagcggggagggtgattttcttgctgaaggtggtggggttcgaggaccgcgggtggttgagcgccatcaatcagcctgtaaggacagcgactggccattctgttccgacgaggattggaactataagtgcccgtctgggtgtcgtatgaaagggctgatcgacgaggttaatcaggattttaccaatcggattaataagctcaaaaatagcctgttcgagtatcagaaaaacaacaaggactcgcacagcctgaccactaatattatggaaatcctgcgcggggatttcagcagcgccaacaatcgggataatacttacaatcgggttagcgaagaccttagatcacgtatcgaagttttgaaacgcaaagtaatcgaaaaggtacaacacatacagttgctgcaaaaaaatgtccgcgcccaattggtcgatatgaaacgccttgaggtggatatcgatatcaaaatacgcagttgcagaggtagttgctcccgcgcactggcccgcgaagtggacctgaaagactatgaggatcagcaaaagcaactggagcaggtgattgccaaagatctgctgccgtcacgcgaccgccaacatctgccgctaatcaagatgaagccggttcctgatctggtaccgggtaatttcaagtctcagctgcagaaagtgcctccagagtggaaggcactgacggatatgccccagatgcgcatggagctggaaaggcctggaggtaatgagatcactcgcggcggctcgaccagctacggtacaggatccgaaaccgagtcccctcgcaatccaagttctgcggggtcctggaatagcggctcctctggtcctggttctaccggaaacagaaatcctggtagcagcggcacgggcgggaccgcgacctggaaacctggctcatctggtccgggatccacaggcagctggaactccggatctagcggcaccgggagcaccggtaaccagaaccccggcagccctcgccccggtagcaccggtacttggaacccgggcagctctgaacgaggcagcgcgggccattggacctccgagagttcagttagcggtagcactggtcagtggcacagcgagtccggctcctttcgtccagattctccgggctcaggtaacgcccgccctaataatccagattggggcaccttcgaggaggtgtcgggtaacgtttctccgggaactcgccgagaataccacacagagaaactggttactagcaagggtgacaaggagctgcgcaccggaaaggaaaaagtcaccagtggtagcaccacaacaactcgccgcagctgtagtaagacggtcaccaagacggtcatcggtccggacggccataaggaggtaaccaaggaggttgttaccagcgaagacggcagcgattgtccagaagcaatggacctgggcactttgtccggcataggcaccttggatggtttcagacatcgccacccggacgaagccgcgttctttgacaccgcaagtaccggtaaaacgttcccaggcttcttttctccaatgctgggtgagtttgtgtccgagacagagtcccgaggatccgaatcgggtatctttacgaacactaaggagagttcatctcatcaccctggcattgcagagttcccaagccgcggtaagtcctctagctattccaagcagttcacgagcagtacatcttacaacaggggtgactctacgttcgagtctaagtcctacaaaatggcggacgaggctggtagcgaggccgaccatgagggaacccactcaacgaagagaggtcatgccaaaagccgtccagtccgcgactgcgatgacgttctgcagactcatccatcaggaactcagagcgggatattcaatatcaaacttcctggcagcagcaagattttttcggtctattgtgatcaggagacgtcactgggtggttggcttcttatccagcagcgtatggatggctctctgaacttcaaccggacctggcaagattataagcgcggcttcggcagcctgaacgacgagggggagggtgagttctggctcggcaacgactacttgcatctgctcactcaaaggggctccgttctgcgtgtggaactggaggattgggcaggtaatgaagcctatgcggaataccactttcgtgtcggtagcgaggccgagggctatgcgctgcaggtctcgagctacgagggtactgcaggcgatgcactgatcgagggttctgtagaagagggggcagagtataccagccacaataatatgcagttttctaccttcgaccgagatgccgaccaatgggaggaaaattgcgcggaagtgtacggtggaggctggtggtacaataactgtcaagctgcaaatctgaatggtatctattatccaggaggctcatatgatccacgcaacaactctccgtacgagatcgagaacggtgtggtgtgggtctccttccgcggcgccgattattctctgcgcgcggtgcgcatgaagattcgaccactggttacgcag

SEQ ID NO: 10392 - DNA, 2598 bp, Artificial Sequence
  derived and/or modified sequence
atgtttagcatgcgaattgtctgcctcgtgctctcggtggtgggcactgcctggactgctgattcgggtgaaggagatttcctggccgaaggcggcggcgtgcgcggtccgcgcgtggtggaacgccaccagtcggcctgcaaagacagcgactggccgttttgctccgacgaagattggaattacaagtgcccatccggatgcagaatgaagggcctgatcgatgaggtcaaccaggacttcacgaatcgcatcaacaaactcaaaaactcacttttcgaataccaaaagaataacaaagacagccattcgctgaccaccaacatcatggaaatcctgcgcggcgacttctcctccgcaaacaatcgggataatacttacaaccgggtgtcggaagatctgcggtcccggatcgaggtcctcaagcgcaaggtcattgaaaaggtgcagcacatccagctcctccagaagaatgttcgcgcgcagctggtggatatgaagagactggaggtggatattgatatcaagattagatcctgccgcgggagctgctcccgcgcgctggcacgagaagtggatctgaaggactacgaagatcagcagaagcaactcgagcaggtcatcgctaaggacctgctgccgtcccgcgatcggcagcacctcccactgatcaagatgaagcccgtgccggatctggtgccgggaaatttcaagtcccaactccagaaggttcctcctgagtggaaggccctcaccgatatgccgcagatgcggatggagctggaacgcccgggaggaaatgaaatcacgcgcggaggctcaaccagctacggaactggaagcgagacggagtcgccgcgaaatccctcctcggcagggtcgtggaactcgggaagctcaggacctggaagtaccgggaacaggaatccgggctcctccggaactggcgggaccgcgacttggaagcctggatcgtcggggccaggttcaaccggttcatggaactcaggttcgtcgggcactggcagcactggtaaccaaaatccaggatcgcccagacctggatcgactggaacctggaatccggggagctcggaaaggggatccgccggtcattggacttcggagtcgtccgtgtcgggcagcaccggacagtggcattccgaatcgggatcgttcagaccggattcacccggatctggcaacgcgcggcccaacaacccggactggggcacttttgaagaggtgtcggggaacgtgtcgccgggtaccaggagagagtaccacaccgaaaagctggtgacctcaaagggagacaaagaactgcgcaccggaaaggagaaggtgacctccggttcgactactaccacccgcagaagctgctcaaagacggttactaagactgtgataggtccggacggacacaaggaagtcactaaagaggtcgtgacgagcgaggacgggtcggactgcccggaagcgatggacctcggcaccctctcgggaattggcactcttgacgggttcaggcatcgccacccagacgaagcggcctttttcgatactgcatcgactggcaagactttcccgggattcttttccccaatgctcggagaatttgtgtcggaaactgaatctcgcgggtcggaatcgggaatcttcacgaatactaaggagagctcatctcaccaccctgggatcgctgagttcccatccaggggaaaatcctcgtcttactccaagcaattcacttcatctacctcctacaacagaggcgactccaccttcgaatcgaagagctacaagatggccgacgaagccggttcagaagccgatcatgaaggcacccacagcaccaaaagagggcatgcaaaatcccggccagtgcgggattgcgacgatgtgctccagactcacccatcagggacccagtcgggtatctttaacatcaagctgcctggaagctcaaagatcttctccgtgtactgtgaccaggaaacctcactgggaggttggctgctcatccagcaaagaatggacggatcactgaatttcaaccggacctggcaggactacaagcgcggattcggtagcttgaatgacgagggcgaaggggagttctggctgggcaatgattacctgcacctccttacgcagaggggttccgtgctgcgcgtggaactcgaagattgggcaggaaacgaggcttacgccgagtaccacttccgggtgggatcggaagctgagggatacgcgctccaggtgagcagctacgaaggaacggcgggggatgcactcatcgaggggtcagtcgaggagggagccgaatatacctcacacaacaatatgcaattctcaaccttcgaccgcgatgccgaccagtgggaggaaaactgtgcagaagtgtacgggggaggctggtggtacaataactgccaagcggccaatctcaatggaatctactacccaggcggatcctacgatccgaggaataactcaccctatgaaatcgaaaacggcgtggtgtgggtcagcttccgcggagcagactactcgctccgcgcggtgcgcatgaagatccggccgctggtgacccag

SEQ ID NO: 10393 - DNA, 2598 bp, Artificial Sequence
  derived and/or modified sequence
atgttctcaatgagaatagtttgtcttgttcttagtgttgtcggaaccgcatggacagcagattctggagaaggagattttttagctgaaggtggaggagttagaggtccaagagttgttgaacgtcatcaatctgcttgtaaggatagtgattggccattttgttctgatgaagattggaattataaatgtccatctggttgtagaatgaaaggtttaattgatgaagttaatcaagatttcactaatagaataaataaattaaaaaattcattgttcgaatatcaaaagaataataaagattcccattccttaacgactaatataatggaaattttaagaggagatttttcatcagctaataatagagacaatacttataatcgagtttcagaagatttaagatctaggattgaagttcttaagagaaaagttattgaaaaagttcaacatattcaattattacaaaaaaacgttagagcacaacttgttgatatgaaaagacttgaagtagatattgacattaaaattaggtcatgtcgaggttcttgtagtagagcattagcaagagaagttgatttaaaagattatgaagatcaacaaaaacaacttgaacaagttatcgccaaagatttattaccatcaagagatagacaacatttaccattaataaagatgaaaccagtacctgatttagtaccaggaaattttaagagtcaactacaaaaagtacctccagaatggaaagcattaactgatatgccacaaatgagaatggaacttgaaagaccaggaggaaatgaaattacaagagggggatcaacttcatatggaacaggatctgaaacagaatcaccaagaaatccatcatcagcaggaagttggaactcaggaagtagtggtccaggaagtactggaaatagaaacccaggaagttcaggtactggtggaactgctacctggaaaccaggttcttcaggaccaggatctacaggttcttggaatagtggaagttcaggaacaggttctactgggaatcagaatccaggttcaccaagacctggaagtacaggaacatggaatccaggatcttcagaaaggggatcagctggacattggacaagtgaatctagtgtatctggttctacaggtcaatggcatagtgaatctggtagttttcgtcctgattcaccaggatcaggaaatgctagacctaataatccagattggggaacatttgaagaagttagtggtaatgttagtccaggaacaagaagggaatatcatacagaaaaacttgtaacttcaaagggagacaaagaacttcgaacaggaaaagaaaaagtaaccagtggatctacaactacaacaagaagaagttgttcaaaaacggtaactaaaacagttattggtccagatggacataaggaagttacaaaagaagttgttacttcagaagatggatctgattgtccagaagctatggatttaggtacactaagtggaattggtacattagatggatttagacatagacatccagatgaagcagcatttttcgatacagccagtactggtaagacttttccaggttttttttcgccaatgttaggagaatttgtttcagaaacagaaagtagaggatcagaatcaggaattttcactaatactaaggaatcttcatcccatcacccaggaattgccgaatttccatcaagagggaaatcatcttcatattcaaagcaatttactagttcaacttcatataataggggggattcaacatttgaatcaaagtcatataagatggcagatgaagcaggttctgaagctgatcatgaaggaacacattctactaaaagaggacatgcaaagtcaagaccagttagagattgtgatgatgttttacaaacacatccatctggaactcaatctggtattttcaatattaaacttcctggttcaagtaaaatattttcagtatattgcgatcaagaaacttctttaggaggttggcttttgattcaacagcgaatggatggttcacttaattttaatagaacttggcaagattataaaagaggttttggatcattaaatgacgaaggagaaggtgaattctggcttggaaatgattatttacatcttcttacacaacgaggatctgtgcttagagtagaattagaggattgggctgggaatgaagcatatgcagaatatcatttcagagtaggatctgaagctgaaggatatgctttacaagtaagttcttatgaaggaaccgctggagatgcattaatagaagggagtgttgaagaaggagctgaatatacatctcataacaatatgcaattttctacttttgatagagatgcagatcagtgggaagaaaattgtgctgaagtatatggaggtggatggtggtataataattgccaagcagctaatttaaatggaatttattatcctggtggaagttatgatccacgtaataattcaccttatgaaattgaaaacggtgttgtttgggtttcttttcgaggtgctgattattcattaagagctgtacgtatgaagattagacctctagttacacaa

SEQ ID NO: 10394 - DNA, 2598 bp, Artificial Sequence
  derived and/or modified sequence
atgttctccatgaggatcgtgtgcttggtgttgagcgtcgtaggcaccgcctggaccgctgacagcggtgagggcgatttcctggctgaaggtggtggtgtgaggggtcccagggtggtggaaagacatcagagcgcttgcaaagattccgactggcctttttgttctgatgaggattggaattacaaatgccccagtggctgcagaatgaagggactgatcgacgaggtcaaccaggattttactaacagaatcaataaactgaagaactcactcttcgagtatcagaagaataataaggactctcactccttgaccactaacatcatggagattctccgcggtgatttctcctcagcaaataatcgtgacaacacatataatcgtgtttcagaggacctccgttctaggatcgaagtgctcaaacgcaaggtcatcgagaaggtgcaacacattcagttgctgcagaagaacgtgcgtgcacaattggtggacatgaagaggttggaagtcgatattgacattaagatacgtagttgccgcggttcatgctctcgtgcactcgctcgtgaggtcgacctcaaggattatgaggatcaacagaaacaactcgagcaggtgatcgctaaagaccttctccctagcagggaccgccagcacttgccactgataaagatgaagccagtgcctgatctggtacctggtaattttaaatctcaactgcagaaagtgccccctgagtggaaggccttgactgacatgccacaaatgaggatggaactcgagcgccctggcggcaatgagatcactaggggtggaagtacttcctacggtacaggatctgagaccgagtctcccaggaacccttcaagtgctggatcatggaattccggctccagcggcccaggcagtactggaaatagaaacccaggctccagtggcactggcggcaccgccacttggaagcccggttcttctggtcccggttcaaccggctcctggaactcaggaagttctggtaccggttccacaggaaatcagaaccctggctccccacgtccaggatcaaccggaacttggaaccccggttctagcgagcgcggttctgcaggtcactggacttccgagagcagtgtgagcggatccacaggtcaatggcactcagagagcggttctttccgccctgatagccctggtagtggaaacgcccgtccaaataaccccgactggggcacattcgaggaggtcagcggaaacgtctcccctggaactaggcgtgagtaccatacagaaaaactggtgacatctaagggtgacaaggagttgaggacaggtaaggagaaggttacttccggttctaccactacaaccagaaggtcttgttctaagacagtgactaaaaccgtgattggcccagatggacacaaggaggtcactaaggaggtagtcacatctgaggatggatcagattgtcccgaagccatggacctgggcaccctgagtggcatcggtaccctggacggatttagacaccgccatccagacgaagccgcattcttcgacactgcaagcacaggtaaaacttttcccggtttttttagcccaatgctgggagagtttgtgtctgaaaccgagagtaggggcagcgagtctggcatttttacaaacactaaagaaagttcctcccaccacccaggaatcgctgagtttccatcaagaggcaagagttcttcatattcaaagcagttcacatcctctacaagttacaataggggtgacagcacatttgaatcaaagtcttataaaatggctgatgaagctggtagtgaagctgaccacgaaggaacacacagcaccaagcgtggacatgccaagtctagacctgtcagagattgtgacgacgttcttcaaacccatccctccggaacccagagcggaatctttaatatcaagctgccaggaagctccaaaatattctctgtgtattgcgatcaagagacttctttgggcggatggctcctgattcagcagcgtatggacggaagtctcaatttcaacagaacctggcaagattataaaaggggatttggcagccttaacgacgagggcgagggcgagttctggcttggtaatgattatctgcatctgctcactcagcgcggcagcgttctcagagtggagttggaagattgggctggtaacgaggcttacgccgaatatcatttccgtgtgggctctgaggctgaaggctacgcattgcaagtcagttcttacgagggcaccgccggtgacgccctgatcgaaggttccgtagaggagggtgctgagtatacaagccacaataatatgcagtttagcacttttgaccgcgacgctgatcaatgggaagaaaactgcgctgaggtgtacggaggtggctggtggtataacaactgccaggctgccaatctgaacggtatctactatcctggtggctcttacgaccccaggaataacagcccctatgaaattgaaaatggcgtggtgtgggtcagctttaggggagcagactacagtctgagggccgtcagaatgaaaattcgcccactggtgactcag

SEQ ID NO: 10395 - DNA, 2598 bp, Artificial Sequence
  derived and/or modified sequence
atgtttagtatgcgcatcgtgtgcctagtgttgtcagtcgtgggcaccgcctggacagctgactctggtgagggcgactttctggctgagggcgggggtgtgcgtgggccgcgggtggtggaacgtcatcaaagtgcctgtaaggacagcgattggccattctgctcagacgaggactggaactacaagtgtccaagcggatgccgcatgaagggactgatcgacgaagttaatcaggactttactaaccgtattaacaaacttaagaattctctgttcgaatatcagaagaataacaaggactcacattccctgaccacaaacatcatggagatccttcgaggtgacttcagctccgccaataaccgagacaacacctacaatagggtgtccgaagacctccgatctagaatcgaggtgctcaagcgcaaggtgatcgagaaagtacaacatatccagctcttgcagaagaatgtgagggcccagttagtagatatgaaaagattggaggtagatattgacatcaagatacgatcttgccggggatcttgtagtagggcgctggcccgtgaggtggatttgaaagattatgaagatcagcagaaacaactagaacaggtcattgccaaagatttattgccatcgagagataggcagcacctgcccctcataaagatgaagcccgtgcccgacctcgtaccaggcaatttcaaatcccagctacaaaaggtgcctcccgaatggaaggcgctcacagacatgccacagatgcgcatggagctggagcgtcccggaggaaacgaaatcacccgaggagggtcaacatcttacggtactggctcagaaaccgaaagtcccagaaatccgagctctgccggtagctggaactcaggctcctcagggcctggttctacaggtaacaggaatcctgggtcgagcggcactggggggaccgccacctggaaacccgggtcttctggcccaggaagtacaggttcatggaacagtggatcgtctgggacagggagcaccggcaatcagaatccggggagtcccagacctggaagcacagggacatggaacccaggctcatctgagaggggaagtgccgggcactggacatccgaatcctctgtctcagggagcactggccagtggcattcagagtctggctcttttcgccccgattcccctgggtccggtaatgctcgacctaacaatccggactgggggacgttcgaagaggtttctggaaatgtgagccccggcactaggcgcgaatatcatactgagaagctcgtgacgagcaagggggacaaagagcttcggacagggaaagagaaagtcacgtcaggcagcactacaacgactaggcgatcgtgttctaagactgtcacaaagactgttatcgggcctgatggacataaagaggtcacaaaggaggtggtgacatccgaggacggctcggattgtcccgaagccatggatttgggcacactgtcagggatagggaccctggacggatttagacataggcatccagacgaggcggcctttttcgatactgcctcaactggcaaaacgtttccgggcttcttctctcccatgctgggagaattcgtttccgagactgaaagcagaggtagtgagtcaggtattttcaccaatactaaagaatcttcctctcaccatccggggattgctgagtttccatcccgcgggaagtccagctcctacagcaagcagttcacatctagtacgtcgtacaaccgaggcgatagtacctttgagagtaagagttataagatggcggacgaagcagggagcgaagccgaccacgaaggtactcactcaaccaaaagagggcatgcaaagtcccggccagtgagagactgcgatgacgtgctccaaacacacccttccggaactcagtccgggatctttaacataaaactccccggatcgtctaaaattttcagcgtttattgtgatcaggagactagcctcgggggatggctcctgatacaacagagaatggacggctccctgaattttaaccggacctggcaggactacaagagaggttttggaagcctgaacgacgagggggagggtgaattttggttgggcaacgactatctacacctactcactcagcgcggcagcgtcctgcgggtcgagctcgaagactgggccggaaatgaggcctacgcagagtaccactttcgcgttggttccgaggccgaggggtacgcactgcaggtttctagttatgagggcaccgctggcgacgcacttattgagggaagcgtagaagagggagccgagtatacatctcacaacaatatgcagttttccacattcgaccgggacgcagatcagtgggaggagaactgtgcagaggtgtatgggggcgggtggtggtataacaactgtcaagccgcaaatctaaacggcatttactacccaggagggtcatacgacccgcgcaacaattccccctatgagattgagaacggcgtggtctgggtttctttccgcggagccgactattccctgagggccgtaaggatgaagataaggcctcttgttacacag

SEQ ID NO: 10396 - DNA, 2598 bp, Artificial Sequence
  derived and/or modified sequence
atgttctcgatgcgcatcgtgtgcttggtcttatccgtggtcgggaccgcatggacagctgactccggtgagggcgatttcctcgctgagggtggcggcgtgaggggccctcgcgtcgttgaacgtcatcagtccgcatgtaaggattcggattggccattctgttcggatgaggactggaactataagtgcccctctggctgcagaatgaaagggttgatagacgaagtcaatcaggacttcacaaatcggattaacaaactgaagaactctttgttcgaatatcagaagaataataaggactctcatagtctcactaccaatatcatggagatcctaagaggggacttcagctccgctaacaatcgcgacaatacgtataaccgcgtcagtgaagacctgagaagtcgtatagaggtcctgaagcgaaaagtcatagagaaagtgcaacacattcaactgctccagaagaatgttagagcgcaactggttgatatgaaaagacttgaagttgatatagacatcaaaatcagatcttgtcgtggctcgtgcagtagagccttggctcgtgaagtcgatctcaaggactacgaagaccagcaaaagcaattggagcaggtcatagctaaagatctgttaccgagtcgagaccgacaacatctacctttgataaagatgaagccggttcctgatctcgtgccgggaaattttaagagccaacttcaaaaggtcccaccagagtggaaggccttgaccgatatgcctcagatgcgaatggaacttgagcggccaggaggtaatgaaattactcgtggtggctctacctcgtacggcaccggttcagagacggagtcacctcggaaccccagcagtgccggtagctggaactcgggttctagtggcccaggcagcacgggaaaccggaaccctggttccagtggtacgggaggcaccgcaacttggaagcctgggtcttccggacccggttctactgggtcctggaatagtggctcttcaggaaccgggtccacggggaatcagaatccggggtctccacgccctggatccacggggacatggaatccgggttcgtctgagagaggtagtgcgggtcattggacgtcagagagcagcgtatcggggtctactggccagtggcatagcgagtctggcagtttccgtcctgattctccgggaagcggcaatgcccggcccaacaatccagattggggaacttttgaggaagtctcgggcaacgtaagtccgggcacacgtcgtgaatatcatacagagaaacttgtgacatctaaaggtgataaagagcttcggaccggtaaggagaaggttacgtccggctcaacaacgacgactaggcgctcgtgttcgaagacagttacgaagaccgtcataggccccgatgggcataaggaggtaacaaaggaggtggttacgtccgaggatggcagcgactgcccagaggcgatggaccttggcacgctgtcaggaattgggaccctggatggctttcgtcaccgacacccggatgaagcagcatttttcgataccgcttcaacaggcaagaccttccccggtttctttagcccgatgctaggggagttcgtatcggagacagagtcgcgagggtcggagtccggaatcttcacgaacacgaaagagtcttcatcacatcaccccggcattgcagagtttccctctaggggaaagagcagtagttactctaagcaattcacgagctcaacttcttataacaggggagacagcacgttcgaaagcaagagttacaagatggccgatgaggcaggaagcgaggcagatcatgaaggcactcactctacgaagcgcggtcatgcgaagtcacgaccggttcgcgactgtgatgacgtattgcagacccacccaagcggcacacaaagtggaatctttaacattaagcttccggggtcttctaaaatcttttcagtctattgtgatcaggagacttccctcggcggatggcttttaatacagcaacgtatggatggctcccttaattttaatcggacatggcaggactataagcgtgggtttggctctttgaatgatgaaggtgaaggtgaattttggctggggaacgattatctacatctgcttacccaacgtggatcggttttgagagtggagcttgaggactgggctggtaatgaagcatacgctgagtaccactttcgtgtcggctctgaagcagagggctatgcgctgcaggtctcgtcttatgaaggaactgctggggacgcgcttatcgagggctctgtcgaggagggagcagagtacacttcccataacaacatgcaattttccacattcgatcgcgatgctgaccaatgggaggaaaactgcgcggaagtctacggcggcggatggtggtataacaattgccaagccgccaaccttaacggaatctactaccctggcggttcctatgatccaagaaataattcgccctacgagatagagaacggggtagtttgggtctctttccgtggagccgattactcactgcgtgcggtgcgaatgaaaatacgaccactcgttacccaa

SEQ ID NO: 10397 - DNA, 2598 bp, Artificial Sequence
  derived and/or modified sequence
atgttttcgatgaggattgtctgcttggtcctttcggtcgtgggtactgcatggaccgccgactctggcgagggtgacttcctcgccgagggaggcggggtgcggggtcccagggtggtggaacgccatcagagtgcatgcaaggactctgattggccattctgttcggacgaagactggaattacaagtgcccgtccggctgtcgcatgaagggacttatcgatgaggtgaaccaagattttaccaaccgaattaacaagctaaagaactcacttttcgaatatcagaaaaataataaggatagtcactccttaaccaccaacattatggaaatcttaagaggcgattttagttccgccaataaccgcgataatacctataatagagtgagcgaagacctcaggtctcggatcgaagtgttgaagaggaaggtgatcgagaaggtccagcacatacagctgctgcaaaaaaacgtgcgagctcaactggtcgacatgaagcgcctggaagtagatattgatatcaagattaggtcttgccgcggctcgtgctccagagccctggctcgggaggtggacctgaaggattacgaagatcaacaaaagcagctcgaacaggttatcgccaaggatctgcttccatctagagatcgccagcatctgcctttaattaagatgaagccagtgccagacctggttccaggaaatttcaagtcccagttgcagaaagttcccccagaatggaaggccctcactgatatgccgcagatgcggatggaactcgaaagacctggaggcaacgagattacaaggggtggcagtaccagctatggcaccggatctgaaacagaatcccctcggaaccccagtagtgcaggaagctggaacagcgggagttccggaccgggttccacagggaacagaaatcccggctcttccggcaccgggggcacagccacatggaagcccggatcctctggtccgggttctactggtagttggaacagcggctcatcaggaaccgggtcaaccggtaatcagaatcccggcagcccacgacctggctccactggcacgtggaatccaggttcatctgagcggggaagtgcagggcactggactagcgagagttccgtaagcggctcaactggacagtggcacagcgagtcaggctcattcaggcctgacagtccgggctcaggtaacgctcgcccgaacaaccctgactggggcacatttgaggaggttagcgggaatgtttcaccggggacgcgcagagaataccatactgaaaaactggtgacttctaagggggataaggagctgcgcacaggcaaagaaaaggtaactagtggctcaactactaccacacgtcgatcttgttcaaagacagtgacgaaaaccgtgataggtcccgacggtcacaaggaggtcacaaaggaggtagttacaagcgaagatgggtcagattgccccgaggctatggaccttggaacactttcaggcatcggtacgctcgacgggtttaggcatagacatccagatgaggctgcttttttcgacactgcctctactggcaagaccttcccaggcttctttagtcccatgctgggggagtttgtgagtgagaccgaatcaaggggcagcgagagtggaatcttcactaacactaaggagtcctctagccaccaccctggcatcgccgaattcccctccaggggaaagagttcgtcatattccaagcagttcacgtcaagtacatcatacaaccgcggagattccactttcgaatcaaagtcctataaaatggccgatgaggccgggtctgaggccgatcacgaagggacacattcaaccaaaagaggtcacgccaaaagtcgtcctgtgagagactgcgatgacgtgctccagacacatcctagcgggacacagagtggcattttcaatattaagcttccagggtctagtaagatattttccgtctactgcgaccaggagacaagccttggtgggtggctcctaatccaacagaggatggacggaagtctaaacttcaataggacttggcaggactacaagcggggctttggcagcctcaatgacgaaggggaaggagagttctggctgggcaacgactatctccacctgctgactcagcgcgggtcagtgttgcgcgtggagttggaggactgggcgggaaatgaagcctacgcggagtatcatttccgtgtcggcagtgaggcagaggggtatgctttgcaggtaagtagttatgagggaaccgctggtgatgcgctcattgagggatccgtggaagagggcgcggaatacacaagccacaataatatgcagtttagcacgttcgacagagatgcagaccagtgggaagagaattgcgctgaagtgtatggaggcggatggtggtacaacaactgccaggctgccaacctgaacggaatctattaccccggaggctcatatgacccgaggaataactctccgtatgagatcgagaacggcgtggtgtgggtttccttcagaggagcagattactcccttcgcgctgtgcgaatgaagatccgcccactggtcacacag

SEQ ID NO: 10398 - DNA, 2598 bp, Artificial Sequence
  derived and/or modified sequence
atgttctcaatgaggatagtttgcttggtcctcagcgtggtgggtactgcctggacagctgacagcggagaaggagattttctggctgaaggcggtggtgtgcggggcccgagagtcgtcgaacggcaccaatctgcctgcaaggattctgattggcctttttgttcagatgaagactggaattacaaatgcccaagtggatgcagaatgaagggcctgatcgacgaagtgaatcaggacttcactaatcgaatcaataagctgaagaatagtttatttgaataccagaaaaacaacaaagatagccactccctgaccaccaacataatggaaatccttaggggcgacttttccagtgccaacaatcgtgataacacctacaaccgcgtgagcgaagatctgagaagccggatagaagtgctgaagcggaaagtaatagagaaagtgcagcatatccagctcctacagaagaacgtgagagcgcagttagtcgatatgaagaggctcgaggtggacatcgacattaagattcggtcttgtcggggcagttgcagccgggctctcgcaagagaagttgatctgaaggattacgaagaccagcagaaacaactggagcaggtcatcgccaaggacctcctgccctcaagggataggcagcatcttcctctgatcaaaatgaagcctgtcccagatctggttccaggaaatttcaaatcacagttgcagaaggtaccacccgaatggaaagctctcactgatatgcctcagatgaggatggagctcgaacgccccggaggcaacgagatcacccgcggcggatccacctcatacgggacaggtagcgagactgagagccctcgcaacccttcatcagctggcagctggaacagcggatccagcggccctggctcaaccggcaaccgaaaccccggtagtagtggcacagggggaacagcaacttggaaacctgggagctcaggccctggctccacaggctcctggaacagcggatccagcggcaccgggagcaccggaaaccagaacccaggcagtcccaggccaggctccaccgggacctggaaccctggcagtagcgagaggggcagcgcaggccattggacatcggaatcgtccgtcagtggcagcactggacaatggcacagcgagagcggcagctttcgacctgactctccaggatctggtaacgcacgccctaacaaccctgattggggtacctttgaggaagtctccggcaatgtctctcccgggacaagaagagaataccacactgagaagttagtcactagcaaaggggacaaagagctccgcacaggaaaggaaaaagtcacctcaggttccacaaccaccacccggcggagctgttctaaaacagtgaccaaaaccgtcatcgggcctgatggccacaaagaagtgaccaaggaagtggtgacttctgaagatggttcggattgcccagaggctatggatctgggcacactcagcggcatcggaactctggatggcttccgtcacagacatccggatgaggccgccttcttcgacaccgcatctaccggaaagacatttccaggttttttttccccgatgttgggcgaatttgtcagtgagaccgagtcacggggatccgagtctggcatcttcactaacacaaaggaaagttccagccaccacccaggcatcgcggaatttccaagtcgaggaaagagcagcagttattcaaagcagtttacctcctcaactagctacaacaggggggacagcactttcgaaagcaagagctacaagatggccgacgaagccggcagtgaggccgaccacgaaggaacacattcaacaaagagaggtcatgctaaatctaggcctgtccgggattgtgacgatgtactacaaacccacccctctggcacccagagtggcatttttaacattaagctcccaggaagttccaaaatcttctccgtttattgcgatcaggaaaccagcttagggggctggctgttgatccagcagagaatggatggaagcctcaattttaacagaacatggcaggattataaaagaggctttggaagcctcaacgacgaaggggaaggcgagttttggttggggaacgattatttgcatctcctgacccagcgggggagcgtccttagggttgaattggaggactgggcgggtaacgaagcttatgccgaataccacttcagggtcggcagcgaagctgagggctatgcactccaggtatcaagctacgagggaacagcaggcgacgctctgatcgagggatccgtcgaagaaggtgccgaatacacctcccacaataatatgcagttcagtacctttgaccgggatgccgatcagtgggaggaaaactgtgctgaggtgtatggaggaggctggtggtataacaactgccaggcagctaacctcaacggaatttattatccaggaggaagttatgacccccgaaataactccccgtatgaaattgagaacggagtcgtctgggttagttttagaggagctgactattctcttcgagccgttagaatgaagatcaggcccctggtgactcaa

SEQ ID NO: 10399 - DNA, 2598 bp, Artificial Sequence
  derived and/or modified sequence
atgttcagtatgcggattgtctgcctggtgttatctgtcgtcggaacagcgtggaccgctgattctggagagggagattttttagcggaaggcggtggagtgagagggcctcgagtggtcgagaggcaccagtcagcctgtaaggattcagactggcctttttgttctgacgaggattggaactacaagtgcccttccggctgccggatgaaggggcttattgatgaggtgaatcaagatttcacgaatcgaatcaataagctcaaaaacagtctgttcgaataccaaaagaacaataaggactctcatagccttactaccaatatcatggagatcttgaggggcgactttagctcagccaacaatcgagataatacgtataaccgcgtgagtgaggatctcaggtccagaatagaggtgcttaaaaggaaggtgattgagaaggtgcagcatatccagctgttgcagaagaatgtgagagctcaacttgtggatatgaagcgcctggaagtggatatagatattaagattcggagctgccgggggagctgttcacgggccttggccagagaagtggatctgaaagactatgaagaccagcagaagcaactcgaacaggtgatcgcaaaagatctgctgccgtcgagagatcgtcagcacctgcctttaatcaaaatgaagccagtgccggatcttgttccaggtaactttaagagccagctccagaaagtgcctcctgagtggaaagccctgactgacatgcctcagatgaggatggagctggaaagacccgggggtaatgagattactagggggggctccaccagttatggcactggttctgagacagaaagcccccgcaatccctccagtgccggttcttggaattccgggagctccggccctggttccacagggaatagaaacccaggatcctcaggaacgggaggaacagccacctggaaacctggatccagtggacctggcagtacgggatcatggaacagcggctcctccggaaccgggagcaccggaaaccagaatcccggctctcctagaccggggtccactggaacatggaaccctggatcttcggagagaggatctgctggccattggacaagcgagagctctgtatccggcagtaccggacagtggcactctgagtcagggagctttcggcccgattcccctggctcaggcaacgcacgtcccaataatcctgattggggaacttttgaggaggtatcgggaaacgtctctcctgggacccgcagagaatatcacacggaaaaactagtgactagcaaaggggataaggagttgcggacgggcaaggagaaagtgacgagtggatctaccactaccacgaggcgtagttgttcaaagacagtaaccaagactgtgatcggaccggacggccataaagaggtaacgaaggaagttgttaccagcgaggacggctccgattgccccgaggccatggacctcggaaccctcagtggcattggaaccctggatggattcaggcataggcacccagatgaggctgcattcttcgataccgcatctactggcaagaccttccctggcttcttcagccccatgctgggtgaatttgtgtcggagaccgaatccaggggttctgagtcaggaattttcacaaacacaaaggaaagctcgtcccatcaccctgggatcgccgagttcccaagccgtggtaagtcttcaagctattcaaagcagttcacctcctccactagctataaccgaggagattcaacttttgagtctaaaagctataagatggcagatgaagccgggtcagaggctgatcacgaaggcactcactccacaaaaagagggcacgcaaaaagtaggccagtgcgggattgtgatgacgttctgcagacgcatccctctggaacccagtctggaatattcaatatcaagctacctggctcgagcaagatctttagtgtgtactgtgaccaggagacctccctgggtgggtggttgctgatccagcagcgtatggatggctctctgaatttcaatcgaacctggcaggactacaagagaggtttcgggtctttaaatgacgagggcgagggagagttttggctcgggaacgactacctccatctgctcacccagcgcgggtctgtcctcagggtggagttggaagattgggccgggaacgaggcgtacgccgagtaccactttcgggttggttctgaggctgaaggttacgccctgcaggtaagctcatatgagggcaccgccggggacgccctgatcgaaggctcagtcgaggagggggccgagtatacgtcccacaataatatgcagtttagcaccttcgatagggacgccgatcagtgggaggaaaattgtgctgaggtctacggaggaggatggtggtataacaactgccaggccgccaacctcaacggaatttattacccgggcggatcctacgatccccggaacaacagcccatatgaaatcgagaacggagtggtgtgggtgtcctttcgcggcgccgattattccttgagagccgtgcgtatgaagatcaggcctctagtgacacag

SEQ ID NO: 10400 - DNA, 2598 bp, Artificial Sequence
  derived and/or modified sequence
atgttctccatgaggatcgtgtgcctcgttctgtccgtggtcggaactgcgtggactgcggatagcggagagggggactttctcgccgagggtggcggcgtgaggggacctcgagtggtggagagacaccagagcgcctgcaaggactcagactggccgttttgtagcgacgaggactggaattacaagtgcccgagcggctgccggatgaaggggctgatcgacgaagtgaaccaggacttcaccaatcgcatcaacaagttgaagaactccctgttcgaataccagaagaacaataaggactcgcactcgctcaccaccaacatcatggaaatactgcggggagacttcagctcggcgaataaccgcgacaacacctacaatcgcgtgtcggaggatcttcgctcccggatcgaagtgctgaagagaaaggtgatcgagaaggtccagcatatccaactgctgcaaaagaacgttagagcgcaactcgtggatatgaagagactggaagtggatatcgacatcaaaatccgcagctgtagaggttcatgttcgcgggcgctggcccgcgaggtggacctgaaagattacgaggaccagcagaaacagctggaacaagtgatcgctaaggatttgctcccgagccgcgaccggcagcatctgccgttgatcaaaatgaaacctgtgccggacctcgtcccgggcaacttcaagtcccagctgcaaaaagtgccgccagaatggaaggcactgaccgatatgccacagatgagaatggagctggaacgccctggcggcaatgaaatcacccgcggcggatcaacttcttacggtactggctctgagactgaatcgccgcgaaatccatcgtccgctggctcgtggaactccggctccagcgggcccgggtctacgggaaaccgcaatccgggatcctcgggaacgggaggaaccgctacttggaaaccgggaagcagcggcccagggtcaaccggatcgtggaattcgggatcgtccggcactggatcaactggaaaccaaaacccgggatcacctagaccaggaagcactggaacctggaacccaggttcgtcggagcgtggatcggccggacattggacttcggaatcctccgtgtcgggctctacggggcagtggcatagcgagtcaggcagctttcgccccgattcgcctggatcgggtaatgcgcgcccgaacaatcccgactggggtacgttcgaggaagtctcgggaaacgtgtcccccggcacccggagagagtaccacactgaaaagctggtcaccagtaaaggtgacaaggagttgagaaccggaaaggagaaggtcactagcggttcaaccacgaccactcggcggtcgtgttcaaagactgtgaccaaaaccgtgattggaccggacggacataaggaagtgaccaaggaggtggtgacctccgaggatggaagcgactgcccagaggcaatggacctggggaccttgagcggaatcggcaccctggatggcttccggcaccgacaccccgatgaggcagcattctttgacaccgcttcgactggaaaaaccttcccaggatttttctcgcccatgcttggagaattcgtgagcgaaaccgaatcacgtggttccgaatccggaattttcactaacacgaaggaatcatcgtcccaccatccggggatcgcagaattcccgtcccggggcaagtccagctcatactcaaagcagttcacctcatccacctcatacaataggggggactccacctttgaaagcaagagctacaaaatggcggacgaggccgggtccgaggcagaccacgagggaactcactccactaagcggggacatgcgaaatcacggccggtgcgggattgcgatgacgtcctccagactcacccatcggggactcagtctggaatcttcaatatcaagctccctggcagctccaaaattttctccgtctattgcgaccaggaaacttcgctgggaggctggctgctcatccaacaacgcatggacggaagtctgaacttcaataggacttggcaggattataagcggggctttggctccctcaatgatgaaggtgaaggagaattctggctggggaacgactacctgcacctccttactcaacgcggatcggttcttagagttgaactcgaagattgggccgggaacgaggcttacgccgagtaccacttccgcgtcggatcggaagcagagggatacgcgctgcaagtgtcaagctacgaagggactgccggagacgccctcattgaaggatcagtcgaggaaggagcagaatacacctcccataataacatgcaattctccacgtttgaccgcgatgccgatcagtgggaagaaaactgcgccgaagtctatggcggaggttggtggtacaacaactgccaggctgccaaccttaacggaatctactaccctggtggtagctacgatccacggaacaacagtccgtacgagattgagaatggggtcgtctgggtgtcattcagaggcgccgattactcgctgagggccgtgcgcatgaagatcaggcctctcgtgacccag

SEQ ID NO: 10401 - DNA, 2598 bp, Artificial Sequence
  derived and/or modified sequence
atgttttcaatgcgcatagtgtgcctcgtccttagcgttgtggggaccgcttggactgctgactctggagagggcgatttccttgccgagggcgggggcgttcgcggcccccgcgtagtcgagcgacaccaatccgcctgtaaggatagtgattggcctttttgctccgacgaggattggaactataagtgcccaagtggctgcagaatgaaggggttgatcgatgaggttaatcaggattttactaatagaatcaataagttgaaaaatagcctgttcgagtatcagaaaaataacaaagactcccactcactgaccaccaatattatggagattctacggggtgatttctcttccgcaaataaccgggataacacatataatcgcgtaagtgaagatctacggtctaggatcgaagtgcttaaaagaaaagttatcgagaaagttcagcacatccagctgctgcagaagaatgttcgtgcacagctggtggacatgaagcggctggaggtggatatagacattaagataaggagctgtcgcgggagttgttctcgcgcccttgcaagagaggtggacctgaaagactacgaagatcaacagaaacagcttgagcaggttatagctaaggacctgttaccaagccgagaccgccagcatctacccctgattaagatgaagcccgtgccagacctcgtgcccgggaacttcaaaagccagttacagaaggtgccaccagaatggaaagcccttaccgacatgccacagatgcggatggaactggagagaccaggaggtaatgaaattactagggggggatccacttcttacggtacagggtctgaaactgagtctccacggaacccatcctccgcaggctcatggaatagtggctccagtggtcccgggagtaccggcaaccgcaatcctggatcaagcggaacaggcggcaccgcaacttggaaacccgggtccagtggacccggctccactggctcttggaattctggatccagtggaactggctctaccggcaaccagaaccctgggtccccacgacccggctccacaggcacatggaaccccggatcatcagaaagggggtctgctggccattggacctccgagtcttccgtgtccgggtccaccgggcagtggcactctgaatccggctcttttcggccagactctcctggcagcggcaacgcccggccaaacaatccagactggggcaccttcgaagaagtgtccgggaacgtgtctcccgggacacgccgggagtaccacactgagaaactggtgaccagtaaaggcgacaaggaactgcgcactggcaaggagaaggttacctctggctctacaactactacccggcgatcctgttcaaagactgtcacaaaaacagtgataggtcctgacggacataaagaggtgactaaggaggttgtgacttccgaagacgggagcgactgtccagaagctatggatttaggcactctatccggtattggcaccctagacggtttccgccaccgccatccagatgaagctgcattcttcgacaccgcttctacaggaaagacatttcctggctttttctcacccatgttaggcgagttcgtcagcgaaaccgaaagcagaggctctgagagtggcatattcaccaacaccaaggaatctagttctcaccacccaggaattgctgaatttccttccagaggaaaatcctcttcttattcaaagcagttcaccagctccacctcatacaacagaggcgatagtaccttcgaatctaaatcctataaaatggctgacgaggccgggtccgaggcagatcatgaaggaacacattccactaagcgcgggcacgctaagtcacgcccagtgagggactgcgatgatgtgctgcaaacccacccttctggcactcagagcggaattttcaatataaaactacctggctcctctaagatatttagtgtgtattgtgatcaagagaccagcttgggaggatggctactgatccagcaacgtatggacggcagtctaaactttaataggacctggcaggactacaaacggggtttcggcagtctgaatgatgagggcgagggcgaattttggcttggcaacgattacctccatctactgacacagaggggaagcgtccttcgagtggaactggaggactgggccggcaacgaggcctacgccgagtatcatttcagggtaggcagtgaggctgaaggttacgccctgcaggtttcctcatatgaagggactgctggagacgccctaatagaggggtccgtggaagagggagctgaatatacctctcacaacaacatgcagttcagcaccttcgaccgcgacgccgatcagtgggaggagaactgtgcagaagtctatggcggcggttggtggtataataattgtcaggctgctaacctgaacggtatttattatccaggcgggagctacgatccaaggaataactctccttacgagatagaaaacggtgtggtttgggtgtcctttcgtggggccgactactctctacgggcagtacgcatgaaaatcagacctctggtgacccag

SEQ ID NO: 10402 - DNA, 2598 bp, Artificial Sequence
  derived and/or modified sequence
atgttctctatgcggatcgtgtgtctggttttgtccgtagtcgggacagcatggaccgccgatagtggggagggagacttcttagccgagggtggaggcgttcggggtccccgcgtggtggaaaggcatcagtcagcttgcaaagattccgactggccattctgctccgacgaggattggaactacaagtgccctagcggctgtcgcatgaagggcctcatcgacgaagtgaaccaggatttcaccaaccggatcaataagctgaaaaattccctgtttgagtaccagaagaacaacaaagacagtcacagcctcaccactaatatcatggaaatattacgaggcgatttctctagcgcgaacaacagggacaatacatataatcgggtgtcggaggatctgcgatcacgaatcgaggtcctgaaaagaaaggtgatcgaaaaagtgcagcacatccaactgctccagaaaaatgtgcgagctcagttggttgacatgaaaagattagaggtggatatcgatattaaaattcgctcctgtagaggcagttgctcccgcgctctcgcaagggaggtcgaccttaaagattacgaagatcagcagaaacagctggagcaggttatcgccaaagacctgcttccatcgagagaccgccagcatctgccacttattaagatgaagcctgttcctgatctggtgcctggcaattttaagagccagctccagaaggtgcccccagagtggaaggcacttaccgacatgccccagatgagaatggaactcgaacgacctggaggaaacgaaattacgcggggaggcagcacgtcctacggcacaggaagcgagactgaaagcccgagaaaccctagctccgctgggagctggaatagcggaagcagcgggcctggttctacggggaacagaaacccggggtcatccggtacggggggcactgccacatggaagccaggctcttcgggtcccggatcaaccggctcatggaactccggttccagcgggaccggcagcacagggaaccagaaccccgggtctccacgccccggtagcacaggaacctggaatcccgggagctctgaacggggctcagcaggtcattggacaagcgagtcctctgtgtctgggagtacagggcagtggcacagcgaatccggaagcttcagacctgattctcctggttcgggaaatgctaggccaaacaatcccgattggggaactttcgaggaagtcagcggaaacgtgagtcccggtacacgtagagaatatcacaccgaaaaactggttacatcaaagggggataaagaacttcgcaccgggaaggagaaagttaccagtggaagcacaaccacaacccgcagaagctgcagtaaaaccgtaacaaagacagtgattggtcccgacggccacaaagaggtcacaaaagaggtggtcacatccgaagacggatcagactgtcctgaggccatggacctgggaaccctgtccggaatcggaacactcgacggattcaggcacagacatcctgacgaggcagcctttttcgatacagccagtacaggcaaaacgtttcctggattcttcagccctatgctcggtgagtttgtgtctgaaacggaaagtcgcggcagcgagtcaggcatcttcacaaatactaaggaatcctcatctcaccatccgggcatcgcggagtttccatccagaggcaaaagctctagttacagcaagcagtttacgagtagcacatcgtataacaggggagactctacgttcgaaagtaaatcatataaaatggctgatgaggccggttcagaggccgatcacgaaggtacgcattccacaaagagggggcacgctaaaagtcggcccgtgagggactgtgacgatgtactgcagactcatccttctgggactcaaagtggaatattcaatatcaagctaccaggatcctctaagatttttagcgtgtactgtgatcaggaaaccagcctcggagggtggctgcttattcagcagcggatggacggttccctcaactttaaccgcacatggcaggactataagcgtggctttgggtccctaaatgacgaaggggagggggaattctggctgggcaacgattatcttcacctgctgacacagagagggagcgtgcttagagtggagctggaggactgggcgggtaacgaggcttacgctgagtatcatttcagggttggaagtgaggcagaggggtatgctctgcaggtaagtagctacgaaggaactgccggggacgcccttatcgagggtagcgtcgaagaaggcgcagagtatacaagtcacaacaacatgcagttctctacctttgacagagatgcggaccagtgggaagagaactgcgccgaggtctatggtggggggtggtggtataacaattgccaggcggccaatctgaacggtatatactacccaggtgggtcttacgatccgcgaaataacagcccttacgaaatagaaaacggtgtggtttgggtgtcatttcgtggggctgactatagtttgagagccgtgcggatgaagatccgacccctcgtcacacag

SEQ ID NO: 10403 - DNA, 2598 bp, Artificial Sequence
  derived and/or modified sequence
atgttctcaatgcggattgtctgcctggtcctgtccgtggtgggaaccgcatggacggcagactcaggcgagggcgactttctggccgaaggcggaggtgtcagggggcctcgcgtagtagaacgtcaccagagcgcctgtaaagacagcgactggcctttctgcagtgatgaggactggaattacaaatgccccagcggctgtaggatgaagggactcatcgacgaagtgaaccaagactttacaaaccggattaataagttaaagaactctttgtttgaataccaaaagaacaataaagattctcattcactgacaactaacattatggagattctgagaggggactttagcagtgcaaataacagggacaacacctacaaccgtgtttcagaagacttgcggagccgcatcgaagttctgaagcggaaggtgatcgaaaaggtgcaacacattcagctattacaaaaaaatgtgagggcccagctggtcgatatgaagagactggaggtggacatagatatcaagatacggtcttgtcggggtagttgcagtcgggcactcgccagggaggtggatttaaaggattatgaggaccaacaaaagcagctggagcaggtcatcgctaaggatctgctgccctcaagggacagacagcacctcccgctcatcaagatgaaaccggtcccagatttagttcccggcaactttaaatcacaactccagaaggtgcctcccgagtggaaagcgctcaccgacatgccccaaatgcggatggagctggagaggcccggggggaatgaaatcacccgtgggggctccactagttatgggactggcagcgagaccgaatccccccgtaatccctcttcagccggtagttggaacagcggcagctctggtccagggtctacgggaaatagaaatcctggttcatcaggcaccgggggtaccgctacatggaaacccgggagcagtggtcccggtagcacgggctcctggaatagtggttctagcggtaccgggtccactggcaatcagaatcccggctctccaagacctgggtcaaccggaacatggaaccctggatcttctgaacggggctctgcaggccactggacctccgagtctagtgtcagtggttccaccgggcagtggcactctgagtccggatcctttcgaccagactcgccaggctccgggaacgcccgacccaacaaccctgactgggggaccttcgaagaggttagcgggaacgtgagtccaggtacgcgtagagaatatcatacggaaaagctggtaaccagtaaaggagacaaagaattacgaaccggcaaggagaaagttacatcggggagcacgaccacaaccaggcgctcctgttcaaagacagtgacaaagacggttatcggtcccgacgggcacaaagaggttacgaaggaggtggtgacctcggaggatggaagcgactgccctgaagccatggacctgggcactttgagtgggattggcacactggacggattcaggcatcggcaccctgacgaggctgcattcttcgacactgcctctaccgggaaaacctttccaggcttctttagcccgatgttgggtgaattcgtgagtgagaccgaaagccgaggaagcgaatccggaatcttcacgaacactaaagagtcttctagtcatcaccctggaatcgcagaatttccgtcacgcgggaagagttcttcctattcaaagcagttcacgtccagcacctcttacaatcggggcgatagcacattcgaatctaagagctacaaaatggccgatgaagctggttccgaggctgaccacgagggtactcactcgacaaaacgcggccacgctaagagcagaccagttcgagattgtgacgatgtgctgcagacccatcccagcggcacccagtccggcatctttaacatcaagctccccggatcttccaaaatattttccgtgtactgcgaccaagagacctccctcggaggttggctgcttattcagcagaggatggacgggagcctgaattttaaccgcacttggcaggattacaagcgggggttcggatcactaaatgacgagggtgaaggggaattctggttaggcaatgattatctccatctgctgacgcagcggggcagtgtgctgagagtggagctcgaggactgggcaggcaatgaagcttacgccgagtatcacttccgggtgggttctgaagccgagggctatgcgttgcaggtctccagttatgaaggtaccgctggcgacgccctgatcgaaggctcagtagaggaaggtgcagagtacaccagccacaacaatatgcaattctctacatttgaccgcgacgccgaccagtgggaggagaactgcgcagaagtctatggcggggggtggtggtataataactgtcaggccgccaacctaaacggtatctactaccctggtggttcatacgatccaaggaacaacagcccctacgagattgagaacggtgtggtgtgggtctcctttagaggagctgactatagtctaagggcagtgcgcatgaagatccgccccctagtgacccag

SEQ ID NO: 10404 - DNA, 2598 bp, Artificial Sequence
  derived and/or modified sequence
atgttctcgatgcgaattgtctgcctggtattgtccgtagtaggtactgcttggacagctgacagtggtgaaggtgattttttggctgagggaggcggagtgagggggccacgcgttgttgagcggcaccagagcgcctgtaaggacagtgactggcctttttgcagtgatgaagactggaactataagtgcccatcaggatgtaggatgaaaggtctcatcgatgaagtgaatcaggatttcacaaaccgtatcaacaaactgaagaactcactatttgagtatcagaagaataataaggacagtcacagcttaactaccaatatcatggagattcttagaggtgatttctccagcgctaacaatagggataacacttataatagggtgagcgaagatttaagatctaggattgaggtccttaagagaaaggtcattgaaaaagtgcaacacattcaattgcttcaaaagaatgttcgggcccagcttgttgatatgaagcgtttggaggttgatatcgatattaagatccggtcttgcaggggaagttgcagtagggcattggctcgtgaagttgatcttaaagattatgaagatcaacaaaaacaactcgagcaagtgatcgctaaggatttattgccatctcgtgatcgccaacatctgccgttaattaaaatgaagcctgttcctgatctggtgccaggcaactttaagtctcaacttcagaaggtcccacctgaatggaaagcactcaccgatatgccacaaatgagaatggagctcgagaggcctggaggtaacgaaattactaggggaggcagtaccagttatggaaccggaagtgagaccgagtctccaagaaatccaagttctgcgggttcttggaattcaggttcctcgggtcctgggagtactgggaacagaaaccccggatcttctggtactggtgggacggcaacatggaagcccggaagtagcggaccgggaagcactggatcatggaatagcggatccagtggaactggcagcactggcaatcaaaatcctggatcccctcgtcctggatctacaggtacatggaaccccggatcttcagaaagggggagcgcaggccattggacatcggagtcctcagtttcagggtcaaccggccaatggcattccgagagtggctcattccggccagattctcctggttctgggaacgcaaggcctaataatcctgattggggcacttttgaggaagtatctggaaatgtttcgccaggaacaaggagggagtaccacactgagaagctagttacatcaaagggtgataaggaacttcgcaccggtaaagaaaaagtgacatccggctcaactactactactcggaggtcttgtagcaagaccgttactaagactgtcattggtccagatggacataaagaagtgactaaggaggttgtaacgagcgaggatgggtcagattgcccagaggccatggatttagggaccctgtcaggcattggtaccttggatggttttaggcaccgtcatcctgatgaggctgcatttttcgacactgcctccaccgggaaaacatttcctggctttttttctcctatgctgggagagtttgttagtgaaaccgagtctagaggttcggaatcaggaatcttcacaaacaccaaggagtcctcttctcatcatccaggtattgccgaattccctagtagaggaaaatcatcttcatatagtaaacaatttacaagttctacatcctataatagaggtgactcgactttcgagtccaaaagctataaaatggctgatgaagcagggtctgaggcagatcatgaaggaactcattctaccaagcggggacatgcaaaatcacgtccagttagagactgcgatgacgttctacaaacccatccgagtggcactcagagcggaattttcaacattaagcttcctggttcatcaaaaatcttctccgtttattgcgatcaggaaacttcacttggaggatggcttctcattcaacagaggatggacggaagtctcaacttcaaccgaacctggcaagactacaaacggggattcggatcactaaacgatgaaggagagggagagttctggctcggtaatgattatcttcatttgcttacgcaaagaggatctgtcctgcgagtggaattggaggactgggcaggcaacgaagcatatgctgaataccattttagggtcgggtccgaagcggagggatacgctctccaggtcagctcctatgagggaactgctggtgatgcacttatcgaaggttctgttgaggaaggggctgaatacacctcacataacaatatgcagttcagtactttcgatagggatgccgaccaatgggaggagaactgtgctgaagtttacggtgggggatggtggtacaacaattgccaggctgccaacctgaatggtatttactatcccggggggagctatgaccccaggaataacagcccttatgaaattgagaatggggtcgtatgggtgtctttcaggggtgccgattattcattgcgggccgtgcgtatgaaaattcgtccacttgttacgcag

SEQ ID NO: 10405 - DNA, 2598 bp, Artificial Sequence
  derived and/or modified sequence
atgtttagtatgagaattgtgtgccttgtgctgagtgtggtgggtaccgcttggactgctgattctggagagggtgactttctcgctgagggaggtggtgtacgcggcccacgcgtggttgaaaggcaccagagcgcttgtaaagactcagactggccattttgcagtgatgaggactggaactacaagtgcccaagtggatgcagaatgaaaggactgatcgacgaggtcaatcaggacttcacaaacagaatcaataaattgaagaactctctcttcgaataccagaagaacaacaaggacagtcactcccttaccaccaatatcatggaaatcctcagaggcgacttctcctccgctaataatcgcgacaatacttacaatcgcgtcagcgaggatcttcgctcaagaatagaggtgttgaagaggaaggtgatcgagaaagtccagcacatacaactgcttcaaaagaacgtcagggcacagttggtggatatgaagagacttgaggtggatattgacatcaagattaggtcttgcaggggttcttgcagtagagccctggcaagggaggttgacctgaaggattacgaggaccagcaaaagcaactggagcaggttatcgctaaggatcttcttccaagccgcgaccgccagcatctgcctctcatcaagatgaaaccagttccagacctggttccaggaaacttcaaatcacaactgcagaaagtcccacccgagtggaaagccctcacggatatgcctcagatgcgcatggagctggagaggcctggaggtaacgagattaccagaggtggatccacctcttacggtaccggaagcgaaactgagagccccaggaatccaagtagtgcgggtagctggaactccggatcctcaggaccaggcagcaccggcaacaggaatccaggttccagcggcactggcggtacagcgacatggaagcccggttctagcggtccaggaagtactggctcctggaattccggatcaagcggcacaggctccactggcaatcagaaccccggatcacctagaccaggctctacaggaacctggaatccaggatccagcgagagaggatcagcgggccattggactagtgagtcttcagtgagcggatctacaggccaatggcactccgagtccggctctttccgccctgacagcccaggctcaggaaatgccagacctaataacccagactggggtaccttcgaagaggtgagcggaaatgtgtccccaggcactcgcagggaataccacaccgagaagctggtcaccagtaagggagataaagaactgcgcacgggtaaggaaaaggtaaccagcggaagtaccacaactaccaggagatcctgctctaaaactgttactaagaccgtgattggaccagatggacacaaggaggtgactaaggaggttgtcacaagcgaagacggtagtgattgcccggaggccatggacctgggcacactttccggaatcggtacgctggatggattccgccacaggcatcctgatgaagctgcattcttcgacaccgcatcaaccggtaagacattcccaggttttttctcacctatgctgggtgagtttgtgtcagagacggaaagtaggggatccgagagtggtattttcactaacaccaaggagagtagttctcaccatccaggtatcgccgaatttccatcaagaggcaaatctagctcttatagtaaacagttcacttcatctactagctacaaccgcggcgactccacgttcgaaagcaagagctacaaaatggccgatgaagcaggctccgaagccgaccatgagggaacccacagcacaaagaggggacacgcaaagagtcgccctgtgagagactgcgacgatgtgttgcagacccacccctctggaacccagtctggtattttcaacatcaagcttccaggatcttcaaagatatttagcgtgtactgcgaccaggagactagcctcggaggatggctgctgattcaacagcgcatggacggctctctcaacttcaatcgcacatggcaggactacaagcgcggttttggctctctgaacgacgagggagaaggcgagttctggttgggaaacgattatctccaccttctcacccaaaggggatctgtccttagagtggaactcgaagactgggctggcaacgaagcttatgccgagtaccacttcagagtcggatctgaagccgaaggttacgcactccaagtcagctcctacgagggtacggctggtgacgctttgatcgagggatcagtcgaagaaggtgcagaatacacttcacacaataatatgcagttttccacattcgaccgcgatgctgaccagtgggaagagaattgcgcagaggtttatggaggcggttggtggtacaataactgccaggcagccaacctcaacggcatttattacccaggcggttcatatgatccgcgcaacaactccccttatgagattgagaacggcgtggtctgggtatcctttcgcggagccgactactccttgcgcgcagtgaggatgaagatccgccctctcgtgactcag

SEQ ID NO: 10406 - DNA, 2598 bp, Artificial Sequence
  derived and/or modified sequence
atgttttccatgcgaattgtgtgtctcgtgctatcagtggtgggtaccgcatggacagcggactctggagaaggtgattttctcgctgagggcgggggcgtaagggggccccgagttgtggagagacaccagagtgcttgcaaggacagtgattggccattttgttctgatgaggactggaactataaatgcccctcaggctgccgcatgaagggtctgattgacgaagttaatcaagactttacaaaccgcatcaataagctgaaaaattcacttttcgagtaccagaagaataataaggactcccactcattgacaacgaatatcatggagatactccgcggagacttctcaagcgccaacaaccgggacaatacctataatagggtctccgaagacttacgcagccggattgaagtccttaagcgaaaggtgattgagaaagtgcagcacatccaactgctgcagaagaatgttagagcccagctagtggacatgaaacggttggaagtcgatattgatataaagatccgcagctgtcggggatcctgtagtcgggcgttggcaagggaggtcgacctaaaagactacgaggaccagcagaaacagttggagcaggtgatcgccaaggacttacttccctcacgcgacaggcaacatctacccctgatcaaaatgaagcccgtgccagacctagttccaggcaactttaagagccagcttcagaaggtcccgccagagtggaaggccctcacagacatgccgcagatgaggatggagctggaacggccagggggcaacgagatcacccggggagggtcaacgtcctatggcactgggagcgagactgagagtccgcggaaccccagctctgctgggagctggaactctggcagttctggtccggggtccacagggaaccgcaatcctggatcaagtggcactggaggcaccgctacctggaaaccggggtcatcaggcccaggcagcaccggttcctggaattcaggcagctctggtacaggaagtaccggcaatcagaaccccggcagccccagaccgggatcaaccggaacctggaacccagggtcgagcgagagagggagtgctggtcattggacatcggagtcttcagtgtcgggttcaactggccagtggcatagcgaatcagggagctttcggcccgattcacccggtagcggtaatgctaggcctaacaaccccgattggggcacttttgaagaggtatccgggaacgtttctcctggcaccagacgcgaataccacactgagaagctggttacgtccaagggagacaaagagcttcggaccgggaaagagaaagtgaccagtggctcaaccaccacaacacgtcgatcatgttccaagacagtaactaaaaccgtgattggtccagacggtcacaaggaggtgaccaaagaggttgtgacatcggaggacggcagcgactgtcccgaagcaatggatctcggaacactctccggtattggcaccctggatggatttcgccataggcacccggacgaggccgcatttttcgacaccgcgtccacggggaaaactttccccggcttcttttctccaatgttgggggaattcgtttcagagaccgagagccggggaagcgaatccggaatattcaccaacacaaaggagagcagcagccaccatcctggcatcgctgagtttccttcaaggggcaagtcgtcctcttatagtaaacaattcacatcatccacttcctacaaccgaggtgactccacttttgagagtaagagctacaagatggcagatgaagccggctcggaagccgatcatgagggaactcactcgactaaaagggggcatgccaagtctcggcccgttcgggactgcgatgacgtactacagacgcatccttccgggacccagtccggaattttcaatataaaactccctggcagttccaagatcttctccgtgtactgcgaccaggaaacatctctcggcggctggctgctgatacaacaacggatggatggctcactcaactttaatcgaacatggcaagactataaacggggcttcgggtcattgaacgatgaaggcgagggcgagttttggctcggaaacgactatctgcatctgctcacacaaagggggtcagtgttgcgggtcgagctagaagactgggctggaaacgaggcatatgcggagtaccacttcagggtgggttcagaagctgagggatatgccctgcaggtgtcttcatatgaaggaaccgcaggcgacgcattgatcgagggatccgttgaagaaggcgccgagtatacgtcacacaataacatgcagttttccactttcgaccgggatgctgatcagtgggaggaaaactgcgcggaagtgtacggcggcggctggtggtacaataactgccaagccgcgaacctcaatggcatctactatcccggcggtagctatgaccctcggaacaactctccctacgagatcgaaaacggtgtggtctgggtttcctttcgaggcgctgactactctttacgggcagtgagaatgaaaatccgtcctctcgttacccag

SEQ ID NO: 10407 - DNA, 2598 bp, Artificial Sequence
  derived and/or modified sequence
atgttttcaatgcggatagtatgtctcgtgttgtctgtagtcggaacagcttggacagcggatagtggggaaggggattttcttgctgaaggggggggagtcaggggacccagagtggttgaacggcatcagtcagcctgtaaagattcggattggccattttgctcagatgaagattggaactataaatgtccctccggatgtcggatgaaaggacttatagacgaggtcaatcaggattttactaaccggataaataaactcaaaaattccctgtttgaataccagaagaacaacaaggattcacactcgttaactacaaacataatggagattctgcggggagatttttcatcggcaaataacagggataatacttataatcgggtgtcagaggatctaagatctcgaattgaagtgctcaaaagaaaggtcatcgaaaaagtgcagcatatccagctgctccagaaaaacgttagagctcagttagtcgatatgaaaagattggaggttgatattgatataaaaatccgttcatgcagaggatcatgctcccgcgcccttgcccgtgaagtggaccttaaagattatgaagatcagcagaaacagttagaacaggtgatcgccaaagatttgttaccctctcgcgatcgccagcatcttcccctgattaaaatgaaaccagttcccgatctagtgcccgggaactttaagtctcagttgcagaaagtgcctcccgagtggaaagctcttactgatatgccacagatgcggatggagcttgagcgcccaggagggaacgaaataacacggggagggtctactagttatgggacaggatctgaaactgaatcaccccgaaacccttcgtccgctggatcctggaattccggaagttccggacctggatctacaggaaatcgcaatcctgggtcttctggaacaggaggaacagcaacttggaaacccgggtcttcagggccaggatccacggggtcttggaatagtgggtcctccggaactggaagtacaggaaaccagaatccaggatctcctaggccaggatcaactggaacttggaatccgggatcctccgaacgagggtctgctgggcactggacttcagaatcctcagtgtcagggagtactgggcagtggcatagtgagtctggatcctttcggccggattctcccgggtcaggaaacgccagacccaataatcctgattggggaacttttgaagaagttagtggaaacgtgtcccccgggactcggcgagaataccatactgagaaactagttacttcaaaaggagataaagaattgcggacaggaaaagaaaaagtgacttctgggtccacaacaacaacacggaggtcatgttctaaaacagtcacaaaaacagttatcggacccgatggacacaaagaagtcactaaagaagtggtcacaagtgaagacggaagtgattgtcccgaggctatggatctaggaactttgtctggaatcgggacactagatgggtttagacatcggcatccagacgaagctgctttttttgacactgcttccactggaaagactttcccaggatttttctcccctatgcttggggaattcgtgtctgaaactgaatcccgaggatctgaaagtggaatattcactaatactaaagaatcatcttcccatcatcccgggatagccgaatttccaagtcgcggaaaaagttctagttattcaaagcagtttacatccagtacatcctataacagaggggatagtacatttgaaagtaaaagttataaaatggctgatgaagctggatcagaagctgatcacgaagggactcactccactaaacgtgggcacgccaagtccaggcccgtaagggattgcgatgatgttctgcagacacatccttctgggacacagagtgggatattcaatattaaactaccaggatcatctaaaatcttctctgtgtattgtgatcaagagacttctttgggggggtggttgctgatccagcagcggatggatgggtcattgaatttcaatcggacatggcaggattacaaacggggattcgggtccctcaacgatgagggggaaggagaattctggctgggaaacgattacctccatctattaacacagcgcgggtccgtgcttagggtggagctcgaagattgggccgggaacgaagcttatgccgagtatcatttccgggtggggtcagaggcggaggggtacgctttacaggtaagttcttacgaagggactgctggagatgcacttatagaaggaagtgtggaagaaggagccgagtatactagtcacaataacatgcagttttcaacatttgacagggacgccgatcaatgggaagaaaactgcgccgaagtttatggaggaggatggtggtataataattgtcaggccgcaaacttaaacggaatatattaccctggaggatcttatgatccacgaaacaatagtccttacgaaatagaaaatggggtggtgtgggttagttttaggggagccgattactcacttagagctgttcgcatgaagataagaccactggtgacacag

SEQ ID NO: 10408 - DNA, 2598 bp, Artificial Sequence
  derived and/or modified sequence
atgttttccatgagaattgtttgtcttgtgctcagcgtggtcggcacagcctggacggccgatagtggtgagggggacttcttggctgaaggtggcggcgtgcggggaccgcgagtcgtcgaacggcaccagtcagcctgcaaggattctgactggcccttttgctccgacgaggactggaactacaaatgtccaagtggctgtcgcatgaagggcctcatagacgaggtgaaccaggattttaccaatcgcattaacaagctgaagaacagtctctttgagtatcagaaaaataataaagactcccattccctgactactaacattatggaaatccttcgcggtgacttttcctcggccaataacagagataatacgtacaatcgggtttcagaggatctccgctccaggatagaggtgttaaagcgaaaagtaattgagaaggtccagcacattcaactgttgcaaaagaacgtgagggcccagctcgtggatatgaaaagactggaagtggatattgacattaaaattaggagttgccgaggaagctgcagcagggccctggcacgagaagtagacttgaaggactatgaggaccaacaaaagcagcttgagcaggtcatcgcaaaggatctgcttccctcacgggatagacagcatctgcccttgattaagatgaagcctgtccccgatctcgttccagggaatttcaagtctcaactccagaaagttcccccagagtggaaagctttgacagatatgccccagatgagaatggaacttgagcggcccggaggcaacgagatcactaggggaggcagcaccagttatggcactggctcagagaccgagagcccacgcaatccctcatctgccggaagttggaactctggttccagcggcccggggagcactgggaatcgaaatccagggtcttctggaacagggggtacggctacttggaaaccaggatcctctggtcctgggagcacggggtcctggaactcaggctcttcggggaccggaagcacaggaaatcagaacccagggtcccctcgtccaggatctacaggcacatggaacccaggatcctccgagcgaggaagcgcaggtcattggacttcggaatctagcgtttcaggctccacagggcagtggcacagcgaatcaggctcgttcagacccgactcccctgggagcggcaacgcgcggccgaacaaccctgactggggaacattcgaggaagtttctggtaacgttagtccggggaccagaagagagtatcacaccgagaagctggtgacatctaaaggcgataaggaattgaggactggaaaggaaaaggtgacatcaggcagtactacgacaacgagaaggagttgttctaagacggtgaccaaaactgtcatcggccctgatgggcacaaggaggtaaccaaagaggtagtgacgagtgaggatggatccgactgcccagaggcaatggatcttgggacactctctggaatcggcacactcgacggatttaggcaccggcaccctgatgaagctgcctttttcgatactgcaagtactggaaagacttttccaggcttcttttctcccatgctgggcgagtttgtgtcagaaacagagagccgtgggtcagaaagtggcatcttcacaaatacgaaagagagttctagtcaccacccgggaatcgcagagttcccttcccggggtaagtcatccagttatagcaagcaattcacgtccagcacctcttataatcgtggtgactcaacgttcgagtccaagtcctataagatggcagatgaggccggtagcgaagctgatcatgaaggaacccacagcacaaaaagaggtcatgcaaagagtagaccagtacgggattgcgacgacgtactccagacccacccatctggcacgcaatcggggatctttaacataaagcttcccgggagtagtaagattttctctgtatattgcgaccaggaaacaagtctgggcggctggctcttgatccaacagcggatggacgggtctctaaattttaacagaacgtggcaggactacaagcggggctttggttccctgaatgacgagggggagggtgagttttggttgggcaacgactatttacacctgttgactcagaggggcagcgttcttcgtgtggaactggaggattgggccggaaacgaggcatacgccgagtatcatttcagagtcggctctgaagccgagggttacgccctgcaggtctctagttacgaaggaaccgctggagacgccctcattgagggcagcgtggaggagggcgctgagtatacaagtcataacaatatgcaatttagcactttcgaccgggacgccgatcagtgggaggaaaattgcgctgaggtgtacggtggtggatggtggtataataactgtcaggctgccaatcttaacgggatatactacccaggtggatcctatgacccgcgcaacaacagcccttatgaaattgaaaacggagtagtatgggtgagcttccggggtgccgactatagtttgagggcggtgaggatgaagatccgtccgctggtaacccag

SEQ ID NO: 10409 - DNA, 2598 bp, Artificial Sequence
  derived and/or modified sequence
atgttctctatgcgtattgtctgcctggtcctttcggtcgtcggcaccgcctggaccgcggactccggcgagggtgattttctcgcagagggcggaggtgtcagaggcccccgtgtcgtcgagcgtcatcagtcagcctgcaaggacagcgattggcctttctgctcggacgaggactggaactataagtgcccttccggatgccggatgaagggtcttattgacgaggtcaatcaggactttaccaatcgtatcaacaagctaaaaaactccctgtttgagtaccaaaaaaacaacaaggattctcacagtcttacaacgaacatcatggagattctgcgaggcgacttctcgagcgccaacaaccgtgacaatacgtacaaccgagtgagcgaggacctgcgatctagaattgaggtcctgaagcgcaaggtcatcgagaaggtgcaacatatccaacttctgcagaagaacgtccgcgcgcagttggtcgacatgaagagactagaagtcgacattgacatcaaaatacgctcttgccgcggctcttgctcccgcgcattggcgcgtgaggtcgacttgaaggattatgaggatcagcagaagcaattggaacaagtcatcgccaaggacctgctccccagccgtgatcgccagcatctccctttgattaagatgaagcccgtccccgatttggttccgggtaactttaagagccagttgcagaaggtgcccccagaatggaaagccctgaccgacatgcctcagatgcgcatggagttggaacgcccagggggcaacgaaatcacccgtggcggctccacgtcctacgggacgggctccgagacggagagcccgcggaacccgtcctccgcgggaagctggaactcaggctcgagcggtccgggttccaccggcaaccgcaaccctggctccagtggcaccggcggcactgcaacctggaagcccggttcctctggtcctggaagtacggggagctggaactctggttcttccggcaccggttcgaccggtaatcagaaccccggctcgcctcgtcccggcagcacaggtacttggaaccccggttcatctgagcgagggtctgctggccactggacttccgaatcctccgtttcgggtagcactggccagtggcacagcgagtcgggtagtttccgccccgattcccctggatccggaaacgcccgccccaataacccagactggggaaccttcgaagaggtctcgggaaacgtcagtccgggaacccgacgtgagtaccatactgagaagcttgtgaccagtaagggagacaaggagctccggaccggtaaggaaaaggtgacctcaggtagcaccacgacgacgcgaaggtcgtgcagcaagaccgtgacgaagaccgtcatcgggcccgatggccacaaagaggtcaccaaggaggtcgtcacttcagaggatggcagtgattgccccgaggcaatggatcttgggaccctgagcggtatcggtaccctcgatggcttccgacacagacatcccgatgaagctgcttttttcgatactgcatccacgggcaagacgtttccaggtttcttcagccccatgcttggtgaatttgtttccgagacggaatcgcgcggttcagaatctggcatcttcactaacaccaaagagagttccagtcaccatcctgggattgccgagtttccctcccgtggaaaaagcagcagttactccaagcagttcactagttctaccagctataaccgcggcgacagtaccttcgaatccaagtcctacaaaatggcggatgaggccggaagcgaggccgatcacgaaggtacccactccaccaagcgcggtcatgcgaagtcgcgaccggtgcgagactgcgatgacgtccttcagacccatcccagtggtacccagtcgggaattttcaatatcaagctccctggaagttccaagatctttagcgtctactgcgaccaggagactagcctaggcggctggctgctcatccagcaacgtatggacggttcgctgaacttcaaccgcacttggcaggactacaagcgcggttttggttctctgaatgacgagggcgaaggtgagttctggctggggaacgattacctgcatctcctcacccagagaggctctgtgctccgcgtggagcttgaggactgggccggcaacgaggcatatgccgagtaccatttccgcgtcggaagtgaggctgagggttatgctctccaggtcagctcctatgaaggtaccgctggtgacgcactgatcgagggttccgtggaagagggggctgagtacacctcgcacaacaacatgcagttttcgacgtttgatagagacgcggaccaatgggaagaaaactgcgccgaagtctacggtggcggttggtggtacaataactgccaagcggcaaacctcaatggcatttattaccccggtggcagctatgaccccagaaataactccccctacgagatcgagaacggagttgtttgggtcagtttccgtggagctgactactccttgcgggccgtccgcatgaagatcaggcccctcgtcactcag

SEQ ID NO: 10410 - DNA, 2598 bp, Artificial Sequence
  derived and/or modified sequence
atgttcagcatgaggatcgtgtgcctcgtgttgtctgtggtgggcacagcctggaccgcagattctggagaaggcgacttccttgcggaggggggcggggtgagaggacccagagtggtggaaaggcaccaatccgcttgcaaggattccgattggcccttctgttctgacgaagattggaattataagtgccctagtgggtgccgaatgaagggccttatcgatgaggtcaatcaggacttcactaatcggataaataaactgaagaactcactgttcgagtatcagaagaacaacaaagacagccacagtctgacgactaacatcatggagatcctgagaggcgatttcagctccgccaataacagagacaacacctacaacagagtgtccgaagacctgagaagccggattgaagttctgaaacggaaagtgattgagaaagtgcaacacatccagctgctccagaagaacgtcagggcacagcttgtggacatgaaaaggctcgaagtagacatcgatatcaaaattcgcagctgcagagggagctgtagtagagccttggccagggaagtggatctgaaagattacgaagaccagcaaaaacagctcgaacaagtaattgcgaaggaccttctgccgtccagagatagacagcatctgccactgattaagatgaagccagtccccgatctcgtgccgggcaatttcaagagccaactgcaaaaagtgccaccggaatggaaggctctgaccgatatgccccagatgcgcatggagctcgaacgcccggggggtaatgagattactagaggcggcagtacctcctatggaacgggctcagaaaccgagtccccgaggaatccgtcatccgcaggaagctggaatagcggaagtagcggaccgggctccacagggaacaggaaccccggctcatctgggacaggtggaaccgccacatggaagccgggctcctccgggccaggatctactgggtcctggaactccggatcctccggtactgggagcacagggaatcaaaacccggggtctccgagacctggctccactggaacctggaatccaggaagttccgagcgggggagtgcggggcattggaccagtgagtcctctgtgagtggttcaaccggccagtggcactcagaatctggcagctttcggccagactctcctgggtctggcaacgcccgacccaataaccctgactggggcacttttgaagaggtctccggaaacgttagcccaggcactaggagggaatatcacaccgagaagcttgtcaccagcaagggcgataaagagctgaggacagggaaggaaaaggtgacatctggctccactacaacaactcgacggagctgttcaaagaccgtgacgaagacggtgatcggccccgacggtcacaaagaggtcacgaaggaagtggtgacaagtgaggatggttctgattgtccggaggcaatggacctgggaaccctctctggcatcggcaccctggacggatttcgacatcggcaccctgacgaagcggcctttttcgataccgcatccaccggaaagacttttcccgggttcttctcccccatgctgggcgaattcgtttcagaaactgaaagtcgaggaagcgagtccggtatcttcaccaacacaaaggaaagctcaagtcaccatccgggaatcgccgagtttccctcaaggggtaagagtagttcctattccaaacagtttacctcctccacttcatataatagaggagattcaacctttgagtctaagtcctacaagatggccgacgaagccggctctgaagccgatcacgaggggacgcactctactaaacgaggccacgcaaagtctcgcccagtacgcgactgcgatgacgtgctgcagacacatcccagcggcactcagagcggcatcttcaacatcaagctgccggggtcatctaagattttcagtgtgtattgcgaccaggaaacgtctctcgggggatggctccttattcagcagaggatggacggaagcctcaattttaataggacgtggcaagactacaagcgcggatttggtagcttgaacgatgagggcgagggagaattttggctgggaaatgattatctccacctcctgacccaacggggatctgttctccgggtggagctggaagattgggctggaaatgaagcttatgctgaatatcacttccgggttgggagtgaggcagaaggctatgcgctgcaggtgtcttcatatgaggggacagcaggtgacgctctgatcgagggaagcgtggaagaaggcgccgaatataccagtcacaataacatgcagttcagtaccttcgacagagacgcagaccaatgggaggagaactgcgcagaggtgtacgggggtggttggtggtacaacaactgccaggccgcaaatcttaacggtatctactacccaggtggttcatacgatccgagaaacaattccccctatgagattgaaaatggagtggtctgggtgagcttccggggcgccgactacagcctgcgagccgtgaggatgaaaatccgaccgctcgttactcag

SEQ ID NO: 10411 - DNA, 2598 bp, Artificial Sequence
  derived and/or modified sequence
atgttcagtatgaggatcgtgtgcctagtcctgtccgtcgtggggacagcatggaccgctgattccggggaaggcgacttcctggctgaaggcggcggggttcggggtccacgcgttgtggagcgacaccagtccgcttgcaaggacagtgactggcctttttgctcggacgaggattggaactataagtgcccctctggttgccgcatgaaagggctaatcgacgaggtgaaccaggatttcactaaccgaatcaacaaattgaagaactctttattcgagtaccagaaaaacaataaagactcccacagtctgactactaatattatggagatcctgagaggtgacttttctagcgctaacaacagggacaacacctacaacagggtttctgaggacctacgctcacgcatagaagtgcttaaacgtaaagtaattgaaaaggtccaacacatccagcttcttcagaaaaatgtaagagcgcagctcgtggacatgaagagactggaggtggacatcgacattaagatccgctcctgccggggctcctgcagtcgggccctggccagggaggtggacctcaaagattatgaagaccagcagaaacagctcgagcaggtgatcgccaaggacctgttgccaagtcgcgacaggcagcacctcccactcatcaaaatgaagccagtgccagacttggtgcctgggaacttcaagtctcagctgcagaaagtgcccccagaatggaaagccctgaccgacatgccccagatgaggatggagctcgagagaccaggggggaacgagattacacgcggcggttccacaagttatggcaccggatccgaaactgaatccccacgcaacccgtcctcagctggcagctggaactccggaagcagtggacccgggtccacaggtaatcggaatccgggatcaagcggaaccgggggaactgccacctggaaacctggctcatctggtcctggcagcaccggaagttggaatagcggctctagtggtactggctccacgggcaatcagaatcccgggtcccccaggccaggctccacgggtacctggaacccaggttcctccgaacgggggtccgccgggcattggactagcgagagttcagtcagtgggtccactggacagtggcattcagaaagcgggtcttttagacccgactccccaggctccggcaacgcgcgtccaaataaccccgactggggaacatttgaagaggttagcggaaacgtgagtcctggcacgaggagagaatatcacactgagaagctagtcacctctaaaggggacaaggagttacgcacagggaaagagaaagtgactagcgggtcaaccacaaccacccgacgtagctgctctaagactgtgaccaagaccgtgataggaccagatgggcacaaagaggttaccaaggaggtcgtgacatccgaagacggaagtgattgccccgaggccatggaccttggcaccctctccggtatcggcacactggatggcttccgacacaggcacccggacgaggccgcttttttcgacaccgctagcactggaaagaccttccccgggttcttttcccccatgctgggcgaattcgtgtctgaaaccgagtcccgaggatcagagtctggcatttttacgaatactaaggagagtagcagccaccacccaggaatagctgagtttccttcgcggggcaagagttcgagctactcgaagcagtttactagcagcactagctacaataggggcgacagcaccttcgaaagtaagtcttacaagatggctgatgaggccgggagtgaggctgaccacgagggaacacactctacgaagcgagggcacgcaaagtcgcgccccgtgagagactgcgatgacgtgctgcagactcatccaagcggtacgcagtccgggattttcaacattaaactcccgggctcctcaaagatcttcagcgtgtactgtgatcaagagacctctctgggcggctggctgctgatccagcagcgcatggatgggagcctaaatttcaaccgaacctggcaggattacaaaaggggttttggcagccttaacgatgaaggcgagggtgagttctggctggggaatgattaccttcacctgctgactcagcgcggctccgtgcttcgagtggagctcgaggattgggccgggaacgaggcctatgctgagtatcattttagagtcgggagtgaagctgagggttacgccctgcaggtctcttcgtacgagggtaccgccggggatgcacttatcgaaggatcagtggaagagggggcagaatacactagccacaacaacatgcaattcagtacattcgacagggatgctgatcaatgggaggagaattgcgctgaggtttatgggggcggctggtggtacaacaattgtcaggcagcgaacctgaacggcatttactaccctggcggttcctacgatccccgtaataacagtccgtatgagattgaaaacggtgtcgtctgggtgtctttcaggggagccgactattccctgagagccgtccggatgaagataagacccttagtcacacag

SEQ ID NO: 10412 - DNA, 2598 bp, Artificial Sequence
  derived and/or modified sequence
atgttttcgatgcgtattgtctgcctcgtcctttcagtagtcgggacagcgtggacagcggacagcggtgaaggggactttctggctgaaggcggaggagtccgcggcccccgagttgtcgagcggcaccagagcgcctgtaaagactctgattggcctttttgctccgatgaggattggaactataaatgtcctagcggctgtaggatgaagggcctcattgatgaagtaaaccaggatttcaccaacaggattaataaactgaaaaatagtctctttgagtaccaaaaaaacaataaagattcccactcactgaccacgaacatcatggagattctgcggggcgatttctcgtccgcgaacaatcgagacaacacatataacagagtctctgaagacctgcgcagtcgtatagaagtccttaagcgcaaagtaattgagaaggtgcagcacatccagctactgcaaaagaatgtccgagctcagctggtggacatgaaacgcctcgaggtggatatcgacatcaaaattcgttcctgtcgtggatcctgttcaagggcgctggcgagggaagtcgacttaaaggactacgaggaccaacagaagcaactggagcaggttatcgctaaggatctccttccatctcgagaccgccaacacctacccctgattaaaatgaaaccggtgccagatctggtaccaggcaattttaaatcccagttgcagaaagtacccccagagtggaaggcccttacagacatgccgcagatgcggatggagttggaaagacctggtggtaacgagatcacacgaggaggaagcacctcttatggaacgggctcagagactgaatcaccccgcaatccatccagcgccggcagctggaacagcggctcaagtggccctggttccacaggaaaccgtaatcctggttccagtggcaccggtggcaccgccacttggaagccagggtccagcggccccggaagcaccgggtcttggaattctggatcctcaggaaccggcagcacaggcaaccagaatcctgggtccccgagaccgggttcaacaggaacctggaaccctggttccagcgaacgtggatcagcaggtcactggacctcagagagttccgtcagcggtagcaccgggcagtggcactctgaatccggctcatttagacccgacagcccaggcagcggcaatgccagaccaaataaccccgattggggtacgttcgaggaagtaagtgggaacgtttcacctggcacacgccgggagtatcacaccgagaaacttgttacgtccaaaggcgataaggaactacgcacaggcaaggaaaaagtgacaagcggaagcaccaccacaactaggcggagctgttccaagacggtcactaagaccgtgataggccctgacgggcataaagaggtcacaaaggaagtggtgacaagtgaagatgggtcagattgtccagaggctatggacctgggcaccctgtcaggcatcggcactctggacggatttcgccaccgccaccccgacgaggctgccttctttgacacagcctcaactggtaagaccttccccggatttttttcccctatgctcggcgagttcgtgagcgagaccgaaagccgaggcagcgagtccggaatctttacaaatacaaaagaatccagttcccaccaccctggtattgcagagttccctagtagggggaagagcagctcgtattcaaaacagttcacgtcctctacttcttacaaccgcggagattcaacctttgagtcaaaatcctacaaaatggccgacgaggctgggtccgaagccgaccacgaggggacccactccaccaaaagggggcacgcgaagtccaggcccgtacgggactgcgacgacgtcctccaaactcatccgagcgggacccagtctgggatatttaatatcaagctaccaggaagcagcaagatcttcagcgtatattgtgatcaggagacaagcctgggtggctggcttctgattcagcagcgcatggatggatctctgaatttcaacagaacctggcaggactacaagcgggggttcgggagcttgaatgatgagggcgaaggtgaattctggttgggaaatgattatctgcatttgctgacacagcgaggttccgtgcttcgcgtggagttggaagactgggctgggaacgaggcgtatgcagagtatcattttcgggtgggctccgaggctgagggttacgctctgcaagtctcttcttacgagggaaccgcaggggatgccttgattgagggctctgtggaggagggcgccgaatacacctcccacaataacatgcagttctctacctttgaccgggacgcagaccaatgggaggaaaattgcgccgaagtttatggtggcggttggtggtataacaactgccaggcggctaacctaaatggcatctattaccccggaggaagctatgatccgagaaataattctccttacgagatagagaacggcgtcgtttgggtctcctttcgaggcgcagactactcgcttagggccgtcaggatgaaaatccgaccccttgtgacacag

SEQ ID NO: 10413 - DNA, 2598 bp, Artificial Sequence
  derived and/or modified sequence
atgttctccatgcggatcgtgtgtcttgtgcttagcgtggttggaaccgcatggacagcagactcgggagagggagactttctagctgaaggtggaggagttcgtggaccacgagttgtagagcgacatcagtcggcttgtaaagattcagactggccattttgctctgacgaagattggaactataaatgtcctagcggttgtaggatgaaagggctcatagatgaagttaatcaagactttacaaaccgaatcaacaagttaaaaaattcactgtttgagtaccagaagaataataaagattcacattccctcacaactaacattatggaaatattgaggggagatttctcctccgctaacaatcgagacaatacatacaacagagtgtccgaagatctcagatcacgaatcgaagtgctaaagagaaaagtgattgaaaaagttcaacatattcaacttctccaaaaaaatgtacgagctcaacttgttgatatgaagagacttgaagtcgacatagatattaaaattagatcttgtcgtggctcatgctcacgtgcacttgcaagagaggtcgatctcaaagactacgaggatcagcaaaagcaacttgaacaggttattgctaaagacctgctgccgtcacgtgatcgtcaacatttgcctttgatcaaaatgaaacctgttccagaccttgtaccgggtaattttaaatcacagttgcaaaaagtcccaccagagtggaaggctttaacagatatgcctcaaatgcgaatggaactcgagaggcctggtggaaacgaaataactagaggaggaagcacctcatatggaactggatcagaaactgagtctccacgtaatccgtcatcagccggttcatggaatagcggctcgtcaggcccaggatcgacaggtaacagaaatccaggatcatctggaaccggaggcacagccacgtggaagccaggatctagtggaccgggttccacaggatcctggaactcaggatcatcgggaactggcagtacaggaaaccaaaacccaggaagcccacgtcccggatccaccggaacttggaatccgggctcttcggagcgtggatcagccggacattggacgtcagaatcgtcggttagtggatccacaggtcagtggcattcagaatctggatcttttcgaccagactcacccggatccgggaatgctcggccaaataatcctgactggggaacttttgaagaagtgagcggaaacgtttccccaggaacgagacgtgaatatcataccgaaaagcttgttacgtcaaagggagataaagaactgagaactggaaaagaaaaggttacgtcgggatcaacgaccacaacgcgtcgttcttgcagtaagacagttaccaagacagtcattggaccggacggacacaaggaggttaccaaagaggttgtcacatcggaagatggaagtgattgtccagaagctatggacttagggactctctccggaattggaactctagacggcttccgtcaccgtcacccggatgaagctgcatttttcgatacagcctctacgggaaaaacttttccaggatttttctctccaatgctcggagaattcgtttctgagacagaatcgcgtggctcagagtctggaatttttactaataccaaagaatcctcgagtcaccacccaggaatagcggaatttccatcgcgtggaaaaagttcatcctattctaagcaattcacaagttcaacctcgtacaatcgaggagattcaacgtttgaatcaaaaagctataaaatggctgatgaggcaggatccgaggctgaccatgagggcactcacagtactaagcgcggtcatgcaaagtcgcgcccagtgcgtgattgcgatgatgtcctacagacccacccaagcggaactcaatccggaatttttaacataaagctcccagggtctagcaagattttttcagtatattgcgatcaagagacctctcttggaggatggctactcatacagcagcgaatggacggatcactaaactttaatcggacttggcaagattataagaggggatttggaagtctcaacgatgaaggagaaggagaattctggcttgggaatgattatcttcatctgctaactcaaagagggagcgttctgagagtggaattagaagattgggctggaaacgaggcttatgcagagtaccatttcagagttggaagtgaagctgaaggttatgctctacaggtatcctcatatgagggaacggctggagatgcattgattgaaggatccgttgaagaaggtgctgaatacacgtcacacaataatatgcagttcagcacgtttgacagagatgcagatcaatgggaggaaaattgcgcggaagtgtacggaggaggatggtggtataataactgccaagctgctaatctaaacggaatttactatcctggaggaagttacgacccaagaaataactctccttatgaaatcgagaatggggtcgtgtgggtgtctttccgcggtgctgattattcattgagagctgtacgtatgaagatcagacctttagttactcag

SEQ ID NO: 10414 - DNA, 2598 bp, Artificial Sequence
  derived and/or modified sequence
atgttcagtatgcgaattgtttgtctcgttttatctgtggtcggaactgcgtggacagccgatagcggcgagggggactttttagcggaaggaggcggagtacgcgggccgagggtcgttgaacgccatcagtcggcgtgtaaagactccgactggccgttttgttctgatgaagactggaattataaatgtccgagcggctgtagaatgaaagggctgatcgacgaggttaaccaagattttacaaaccgtattaacaaactgaagaattctttatttgagtaccaaaaaaacaacaaggatagccattcgctcacaactaacattatggaaatcttaaggggagacttctcttcggccaacaaccgcgataacacctataatagagttagcgaagatctgcgctcgaggatagaagtattaaagcgaaaagtaatcgaaaaagtgcagcatatccaattattgcaaaagaacgttcgtgcacaacttgtcgacatgaagcggctggaggtcgacattgatataaagatccggagctgtcgtggaagctgctcacgcgcactcgccagagaggtagacctgaaagattacgaagatcaacaaaaacagttagagcaggtcatcgctaaagaccttttgcctagcagagatcgccagcatctaccgttgattaaaatgaagcccgttcctgatcttgtgccgggaaactttaaatcacaactgcagaaagtccctccagaatggaaagcacttactgatatgcctcaaatgcgtatggaattagagcgacctgggggaaatgagattacacgaggaggctctacttcatacgggacaggaagtgagacagaaagtccgagaaatccgtctagcgctggatcatggaattccggatcttctggcccgggctcaactggaaatagaaaccctgggagcagcggcacagggggcaccgctacatggaagccaggctcatctggcccgggctctacgggatcatggaattccggatcatccggcaccggaagcacaggaaaccagaatcctggttctcctcggcctgggtcaactgggacgtggaaccccggttcaagcgaacgagggtctgccggacactggacaagcgaatcatcagtgtctggctctacaggacaatggcattccgaatcaggatcatttaggccggatagcccgggcagcggtaacgcgcggcctaataatccggattgggggacctttgaagaggtttcaggtaacgtttcaccgggtacgcgcagagagtatcatacagaaaagttagtgacaagtaaaggagacaaagagcttcggacggggaaagagaaagtcacatcaggaagtacgaccacgacgaggaggtcgtgttctaaaactgtgacgaaaacagtcattgggcctgatgggcacaaggaggttacaaaggaagttgtcacgtctgaggacggctctgactgtccggaagcaatggatttaggcacactgtctggcattggtacgctggatggattcagacacagacatcctgatgaagcggcattcttcgacacggcatccacaggtaaaacgtttccgggattcttttcaccgatgctgggagaatttgtttcagagacagaatcacgtggctctgaaagcggaatctttacgaatacaaaagaatcctcctcacatcatccaggtatagccgagtttccgagccgcggcaaaagctcaagctattccaaacaatttacgtcatcaacgagctataacagaggggactcaacatttgagagcaaatcttataaaatggcggacgaggcgggtagcgaggcagaccacgagggtacgcatagcacgaaacgcggtcatgcgaagtctagaccagtcagagattgtgatgatgttttacagacacacccatccggaacccagagtggtatttttaatattaaactgccaggcagcagcaaaattttttctgtctattgcgatcaggagacctctttgggaggttggcttctaattcaacaaagaatggatggcagcttaaattttaacaggacatggcaagattataagaggggttttggtagccttaacgacgaaggtgaaggcgagttttggttgggcaatgactatcttcatttgctgacgcaaagaggcagtgtcctacgagttgaactggaggattgggctggcaatgaggcctatgccgaatatcattttcgcgtaggctcagaagccgaaggatatgcccttcaagtttcatcttatgagggcaccgcaggagacgcgttgattgaagggtctgtagaggaaggggcagaatacacatcgcataataatatgcagttctctacatttgatcgtgatgcagatcaatgggaagagaattgcgctgaggtttatggtggcggctggtggtacaacaattgccaagccgcaaatttgaatggaatctattatccgggtggatcctatgacccaagaaataatagcccatatgaaatcgaaaatggggtagtctgggtcagctttcgaggcgcagattattctcttcgggcagttaggatgaaaattcgccctttagtaacccaa

SEQ ID NO: 10415 - DNA, 2598 bp, Artificial Sequence
  derived and/or modified sequence
atgttctcaatgcggatcgtgtgtctggtgttgagtgtggtgggcacagcctggaccgctgatagtggcgagggcgattttctcgctgagggcggaggcgtgagaggcccaagggtcgttgaaaggcaccagtccgcctgcaaggactctgattggccattctgttcggacgaggactggaactacaagtgtcctagcggctgtcgaatgaagggactgatcgatgaggtgaaccaggatttcaccaaccggatcaacaaactgaagaatagcttattcgagtaccagaagaacaataaggactcccactcactcactaccaatattatggagatactccggggtgattttagttccgcgaataacagagacaacacctacaatcgggtgtcggaggacctgaggagtcgaatcgaagtgttaaagcgcaaggtgatagagaaagttcagcatattcaactgttgcagaagaatgtccgcgcgcaattggtggacatgaagcgacttgaggtggatatcgacattaagatcaggtcttgccgggggtcttgctctcgggcattggcccgagaggtggacctaaaagactatgaggatcaacagaagcagctggaacaagtcattgctaaggatttactgccgagcagggataggcagcatttacccctcatcaagatgaaacctgttcctgacctggtacccggtaacttcaagtcacagcttcaaaaggtgccccctgaatggaaggccttgacggacatgccacagatgagaatggagttggaacgaccaggtggcaacgagatcactaggggagggtcaacatcctatggcaccggcagcgagaccgaaagcccccgcaaccccagtagcgctgggtcttggaactctgggtcttcggggcctggatctaccggtaacaggaatcctggttcctccggcacgggcggcacagcaacatggaagcctgggagttccgggcccgggagtacaggcagctggaatagcggcagttcaggcaccggctctaccggtaaccagaaccccggatcaccacgcccaggatccacggggacttggaaccctggttccagcgaacgtggctccgctggacactggacctcggagtcttcagtgagcggttcaaccggacagtggcactcagagtctgggagctttaggccagattctccaggatctgggaatgcaaggcctaacaacccagattggggaacatttgaggaagtttccggcaacgtgtcgccaggcacgcgacgcgagtaccatactgaaaagctcgtgactagcaaaggcgacaaggagctcaggacaggcaaagaaaaggttacaagcggaagcaccacaacgacccggcggtcttgctctaaaactgtgactaaaacagttattggaccagatggacataaggaggttaccaaagaagttgtcacaagcgaggacggctccgactgtcccgaggctatggacctgggcaccctgagcggcataggtacattggacgggttccgccacaggcacccagacgaggccgcctttttcgacacggcatccaccgggaagaccttcccagggtttttcagcccaatgctgggtgaattcgtctctgagactgagagtagagggtccgaaagcggaatctttacgaacactaaagagtcaagctcccatcatccggggattgctgagtttccatcaagaggtaaatcttcctcatacagcaagcagtttacctcttcgacatcatacaaccgcggggatagcacctttgaatctaagtcttataagatggctgatgaggcaggctccgaagcagatcatgaaggcacacacagtaccaagagggggcacgctaaatcaagaccagtgagagattgcgatgacgtgctgcagacgcatccttcagggacacagagtggcatattcaatatcaagctccctggctcatccaaaatcttcagtgtctactgtgaccaagagacttccttaggtggttggttactgatccaacagagaatggatggcagtctcaattttaaccgcacctggcaagactataagaggggctttgggtcgctgaacgatgagggtgagggggaattttggctcggcaatgattatctccaccttctcacccaaaggggcagtgtgctgagagtggagctggaagattgggccggtaacgaagcgtatgccgagtaccattttcgagtgggctcagaagccgaaggatatgcgttacaggtgtcttcctacgaggggacagccggggacgccctcatcgagggatcggtggaagagggcgcggagtatacaagccacaataacatgcaattcagcacctttgatagagacgccgaccagtgggaagaaaactgtgctgaggtttacggaggtggatggtggtacaacaactgtcaggcagcgaacttaaatggcatctactatcctgggggctcttatgacccaaggaataactccccttatgaaattgaaaatggagtagtgtgggtgtcttttcgcggcgcggattactctttgagagctgtgcggatgaagatccgacctctcgtaactcag

SEQ ID NO: 10416 - DNA, 2598 bp, Artificial Sequence
  derived and/or modified sequence
atgttctccatgcggattgtctgcttagttctgtccgtagtgggaaccgcttggacagctgactctggtgaaggcgatttcttagcggagggcggcggcgtacgtggaccgcgggtggtggagagacatcaatcagcatgcaaggactcagactggcctttctgctcagatgaagattggaattacaaatgtcctagcgggtgcaggatgaaggggcttattgatgaggtgaatcaggacttcaccaaccggatcaataagctaaagaattctctgttcgagtatcaaaagaacaataaagactcacatagtttgacgacaaatatcatggaaattctcagaggcgacttctcatccgcaaataatcgggataacacatacaaccgcgtgtcagaagatttgcgctctaggattgaagtgcttaaacgtaaagtaatcgagaaagtgcagcatatccagctgctgcagaagaatgtgagagcccaactagtcgatatgaagaggctggaggtggatattgatatcaagattcggagttgtcggggttcttgcagcagagctctggctagggaggttgatctaaaagactacgaggaccagcaaaagcagctcgaacaggtgatcgcaaaggaccttttgccgagtcgggataggcagcatttacctttgatcaaaatgaagccggttcccgaccttgtgccggggaatttcaagtctcagctgcagaaggtcccaccagagtggaaagccctgaccgacatgccccagatgagaatggaactggaaaggcctggggggaacgagataaccagaggcggtagcacttcatacgggactggaagtgagacagagtcaccacgcaatccttcttccgccgggtcgtggaactctggatcctcaggacccggttccaccggaaatcgcaatccaggttcaagtggcaccggcggcactgctacctggaagcctggaagtagcggaccagggagcactgggtcctggaactccggaagctcaggaacaggttcaaccgggaaccagaatcctggaagtcccaggccgggttcaactggcacttggaatccgggctcctccgagcggggttcagccggacattggacttccgagagcagcgtaagtggttctacagggcagtggcatagcgagtccggatcattccgacccgatagccccggaagcggaaacgctcgcccaaacaaccctgattggggtacattcgaggaagtctcgggtaacgtgtcacccggaacacggcgtgaataccacacggagaaactagtaacgtcaaagggagacaaagagctcagaactggtaaggagaaagtcacgtcgggctctactacaacgactcgaagatcttgctccaaaaccgtgaccaaaactgtgatagggccggacggacacaaggaagtgactaaggaggtagtgacctccgaggacggatctgattgccccgaggcaatggatctgggtacattaagcggcatcgggacactggatgggtttcgacatagacatcccgacgaggctgcctttttcgacactgcgagcactggaaagacctttccggggtttttttccccaatgttgggtgagttcgtcagtgagacggagagtcggggttctgagtcaggtatctttacaaataccaaggagtcctcctcccaccaccccggcatcgccgaattccccagcaggggaaagagctccagctattcaaaacagttcacatccagtacttcctacaaccggggtgattctacttttgaaagcaaatcatacaaaatggccgatgaagccggcagtgaggccgaccacgagggtactcattctaccaaacgcggtcacgctaaaagtaggccagtgcgcgattgcgatgacgtcctgcagacgcacccctcaggaacccaatccggcatctttaacatcaagcttccgggcagtagcaagatcttctctgtttactgcgatcaggagacatctctgggagggtggctactgatccagcaaagaatggacgggtctctcaattttaataggacttggcaggattacaaacgcggctttggttcactcaatgatgagggggagggggagttttggttgggaaacgactatcttcacctgttgacccagaggggatccgtgcttcgggttgaactcgaagactgggcgggaaacgaggcttatgccgagtaccactttcgggtgggttctgaagccgagggctacgctttgcaggtctcaagttacgaaggaacagccggtgatgcactaattgaggggtcggtcgaagagggagctgagtatacaagccacaacaatatgcagttcagcacgtttgatcgggatgccgatcagtgggaggaaaattgtgccgaggtctacgggggaggttggtggtataataactgtcaggcggctaacttgaacggaatctactacccagggggcagctatgatccgaggaacaatagcccatatgaaattgagaatggcgtcgtgtgggtctcctttcgcggtgcagactacagcctgcgtgcagtcagaatgaagattagacctcttgtaactcag

SEQ ID NO: 10417 - DNA, 2598 bp, Artificial Sequence
  derived and/or modified sequence
atgttctcaatgcgcattgtgtgcctagttctgagcgtagttggtacggcttggacggccgactccggggagggcgactttctcgcggaaggcggcggcgtccgtggcccccgtgtggtggagcgacatcagagtgcctgtaaggacagcgattggccgttttgctcagatgaggactggaattacaaatgtccatcagggtgcagaatgaaaggcctgattgacgaggtcaatcaggacttcacaaatagaattaacaaactcaagaatagtctgtttgaatatcaaaagaataacaaggattcccactctctcactacaaacattatggaaatcctcaggggcgattttagtagcgctaacaaccgggacaacacctacaaccgtgtcagtgaggatctcagatctaggattgaggttttgaagaggaaggtgattgaaaaagtgcagcacatccaattgttgcagaagaatgtacgggcacaattagtggacatgaagagactggaggtggacattgatatcaagattaggtcatgtaggggtagctgtagccgggctctggctagagaagtggatctgaaggactatgaagatcaacagaagcagttggaacaagtcatagcaaaggaccttctgccatcacgagaccgtcagcatctcccactgattaagatgaaacctgtccctgatctcgtgcctggcaactttaagtcacagctgcaaaaagtgcccccagaatggaaggccctaactgatatgccccagatgagaatggagctcgagagacctggaggtaatgaaataactagggggggcagcacgagttacgggactgggagcgagacagaatcccccaggaatccctcttctgcaggttcctggaacagcggtagctctggacctggatctactggcaatcgtaacccggggagctcagggaccggggggactgccacatggaagcccgggtcgagcggacctgggtcgactgggtcttggaactccgggagctctggaaccgggagtacaggaaaccagaaccccggcagcccccggccaggaagcactggcacttggaacccgggctcaagcgagcgggggtctgcgggacactggacttcagaatcttccgtttccggatccactgggcaatggcacagtgaatccggaagcttcagacctgactcgcctggcagtggaaacgctagacctaataatccggattgggggacattcgaggaggtgagtggcaatgttagtcccggcaccaggcgggaataccacaccgagaaactagtaacctctaaaggcgacaaggaattaagaacgggcaaagaaaaggtaaccagtggcagtactacaactacacggagaagttgtagcaaaacagttactaagaccgtgataggaccggacgggcacaaagaagtgactaaggaggtcgtcacttccgaggatggctctgattgcccagaagcgatggacctggggacactttccggaatcggcacactggatgggtttaggcaccggcacccagacgaggccgccttctttgacacggcgtcgacgggcaagacatttcccggattcttctccccaatgctgggggagttcgtgtcagaaacggaatcccgcggatcagagtcggggatcttcaccaacactaaagagtccagcagccaccaccccggaattgctgagttcccctctcgaggtaagtcttcatcatactctaaacagttcacatctagtaccagttacaatcgaggcgattccacttttgaaagtaagtcatacaagatggcagacgaagccggctcagaggcagaccatgaggggacccatagcaccaaaaggggccatgccaagtcacgaccagttcgggattgtgacgatgtgttacagacgcatccatctggcacacagagcggcatctttaatataaaattacctgggtcatctaagatctttagtgtctactgtgatcaggaaacttctcttggcggttggttgttaatccagcaacgtatggatggcagcctgaactttaatcgaacgtggcaggactacaaaagagggttcggttctctaaacgacgaaggcgagggcgagttttggctggggaacgattatcttcatctgcttacacagagagggtccgtgctgcgcgtagagctggaagactgggcgggtaacgaggcctacgcagaataccattttagggtgggctctgaggccgagggttatgccctgcaggtgagctcgtacgagggcactgccggcgatgcactcatcgagggctcggtggaggaaggggcagaatatacaagtcataacaacatgcagttttccacgttcgaccgagatgcagaccagtgggaggagaactgcgctgaggtctacggaggaggctggtggtataacaattgccaggccgcgaacctgaatgggatctactacccaggaggatcctatgatcccagaaacaacagtccttacgaaatcgagaacggtgtggtctgggtgtcatttcgaggagccgattacagcctgagggccgtcagaatgaagattcgcccactcgtaacacag

SEQ ID NO: 10418 - DNA, 2598 bp, Artificial Sequence
  derived and/or modified sequence
atgttttcaatgagaatcgtgtgtctcgtcctctccgttgtaggtactgcatggaccgcagactcaggcgaaggtgacttcttagctgaaggcggaggcgtgcggggacccagggtggttgaacgccaccaatctgcttgtaaagacagcgactggcctttttgttcagatgaagattggaactataaatgtccgtctggctgcaggatgaagggcctgatagatgaggttaatcaagactttacgaaccgtatcaacaaactgaagaactccctgttcgagtaccaaaaaaataataaagactctcatagccttaccacaaacattatggaaattctccggggcgactttagctctgctaacaaccgagacaatacgtataaccgagtcagtgaggatctgaggagtaggatcgaggtgctgaagaggaaggtaattgagaaggtacaacatatccagctgctccagaaaaacgtgagggcccaattggtggatatgaagaggctggaagtggacattgacatcaagatacgcagttgccgcggatcctgctctcgggcgctagccagagaggttgatttgaaagattatgaagaccagcagaagcagttagaacaagttatcgcaaaggacctccttccgagccgcgatcgtcagcacctgcctttaattaagatgaaacccgtgcccgacttggtccctggtaatttcaaatcccagctgcagaaggtgcccccagaatggaaggcactgaccgacatgcctcaaatgcgcatggagctcgagaggccagggggcaacgaaattacaagagggggcagtacatcttacgggacaggttcagagactgaaagccctcggaatcctagctccgccggttcctggaactcgggtagctccggccccgggagtactgggaatagaaacccgggttctagcggcacaggggggacagccacatggaagcctggaagcagtggccccgggagcaccggaagctggaattctggctccagcggtaccggctccacgggtaatcagaatcctggatcccccagaccaggctccactgggacttggaaccctggatcttccgagcggggatccgccggccattggacatcagagagctctgtgtcaggctcgacaggccaatggcactcagaatcgggctcctttcggccagattctccagggtcggggaacgcacgtcctaacaatcccgattgggggacatttgaagaagtcagtggaaatgtgagtccaggcacccgaagagagtaccatactgagaaattggttacctctaaaggggataaggagctccggacaggcaaggagaaggtaacatccggcagcactacgaccactaggcggtcttgtagcaaaacagtaacgaagaccgtcataggtccggatggtcacaaggaggttacaaaagaagttgtgacttcagaggatggtagcgactgcccggaggcaatggatctaggcacacttagcgggattggaaccctcgacggattcaggcaccggcaccctgacgaggcggctttcttcgataccgccagtaccgggaaaaccttccctgggtttttttcccccatgctgggcgagtttgtcagcgagaccgagagtcgcgggagtgagtccggaatctttacaaacaccaaggagtcgtcttcccatcatcctggtatcgctgagttccccagtagagggaagagctcaagctactccaagcagttcacttcctccacttcatacaaccgcggagattctacttttgagagtaaatcttacaagatggccgacgaggccggttccgaagcagatcatgagggcacccatagtacgaagagaggccacgcgaaaagccgccccgtgagagattgcgacgatgtgttgcagacccatccctctggtactcagtctggaatcttcaatatcaagttgccgggctcttccaaaatcttctctgtgtattgtgaccaggaaacttcactaggtggttggctgctgattcaacaacgtatggacggttccctaaactttaatcggacctggcaggactacaagcgcgggtttggctccctgaatgatgaaggagaaggcgagttctggctcgggaatgactacttgcacctgcttactcagagaggtagcgtcctgagggtcgaactggaagattgggctggaaacgaggcttacgccgagtatcacttccgcgtggggagcgaagccgaaggatacgccctccaagtgagctcctatgaaggaactgccggtgatgccttgattgaagggtcagtggaagagggagcagagtacacaagccacaacaacatgcaattctcaacattcgacagagatgccgaccagtgggaagaaaactgcgctgaggtatacggtggaggctggtggtacaacaactgccaggccgcaaatctgaatggaatctattaccccggcggctcctacgaccctcgaaacaacagcccttacgaaatcgaaaatggggtggtctgggtcagtttcaggggggcggactacagccttagagccgttcgcatgaagattcggcccttagtgacacaa

SEQ ID NO: 10419 - DNA, 2598 bp, Artificial Sequence
  derived and/or modified sequence
atgttttctatgcggatcgtgtgcctcgtcttgtcggtagtgggaaccgcttggaccgccgactccggggagggagacttcctcgccgagggcggcggcgttaggggcccaagggtagttgagcgtcatcaatccgcatgcaaggactctgactggcccttttgctctgatgaggactggaattacaaatgtccttcaggatgccgcatgaaagggcttatcgacgaggtcaaccaggacttcacaaataggattaataagctgaagaactcactgttcgaatatcagaaaaacaataaggactcccattctctgaccactaacatcatggaaattctgagaggcgacttttccagtgctaacaatagagacaatacatataacagggtgtcagaggatctgcgtagcaggattgaagtccttaagcgcaaagtaatcgagaaggtgcaacatatccaactgttgcaaaagaatgtgagagcgcaactggtagacatgaagcgactggaggtggatatcgacatcaaaatcaggtcatgcagaggctcctgttctagggcattagctagggaggtggacctgaaagactacgaggatcaacagaaacagctggaacaggttatcgccaaggatctactcccgtcaagagaccgacagcacctgcctctgatcaagatgaagccggtaccagacctcgtccctggcaattttaaatcacagctccagaaggtaccgcccgaatggaaggccctgaccgatatgccgcagatgcgaatggaacttgaaaggccaggaggcaatgagataacaaggggcggctccacaagttatgggacagggtccgagacagaatctccaagaaacccctcaagtgcaggatcttggaactccggctcatctggcccaggctctacagggaatcgaaaccccggctcctcgggcacaggcggaacggccacatggaagcccggtagttccggccccggctccaccggctcctggaatagcggatctagcggaaccggctcgacgggtaatcagaacccgggcagtcctagacctggctctaccggtacctggaaccccggatcgtcagaacgaggctccgctggccattggactagcgaaagctctgtgtcgggcagcacgggccaatggcactctgaaagcggttcctttaggccagattcaccaggatctggaaatgcaaggcccaacaacccagactggggcacatttgaggaagtctccggaaatgtgtcgcctgggaccaggagggagtatcacacggaaaaactggtgacatctaaaggagataaggaattgagaacgggaaaagaaaaggttacctctggatccacaaccaccactaggagatcctgtagcaagaccgtcactaaaaccgttataggccctgacggtcataaagaagtgaccaaggaagtcgtcacctctgaggatggcagtgattgccccgaggccatggatctcggcacgctgtcgggaataggtactctggatggttttagacaccgccaccccgacgaagccgcattttttgacaccgcgtccacagggaaaaccttccctggtttcttcagccccatgctcggggagtttgtgtcagaaactgagtctagaggatcggaaagcgggatcttcactaacaccaaggagtccagctcccaccacccggggattgccgaatttccatccaggggcaaatctagctcctactccaaacaattcacctcttccacctcctacaaccgaggagactcaacttttgaaagtaagtcctacaaaatggccgatgaagccggaagcgaagctgatcacgaaggaacccacagcacaaagcgaggccacgccaagagcaggccggttagagattgcgatgatgtactgcagacacacccttcgggaacgcagtccggaatcttcaatatcaagctgcctggctcttctaaaatcttttccgtgtactgcgatcaggaaacttctttgggaggctggctgttgattcagcagcgaatggatggttctcttaactttaatcgaacctggcaggactataagcgaggattcggctccttaaatgacgagggggaaggggaattctggttaggtaacgactacctgcacctcctaactcagagaggctcagtgctgagggttgagttggaggactgggcagggaacgaggcgtatgcagagtaccatttccgcgtcggctctgaagccgagggctatgcgctgcaggtaagttcttacgaaggcacagcaggtgacgcattgatcgagggaagcgttgaagaaggggctgagtatacttcacacaataacatgcaattctctacctttgatagggacgcagaccagtgggaagagaattgcgccgaggtgtatggtgggggctggtggtacaacaactgccaggcagccaatttgaacgggatttactatcccggtggatcttacgatccaagaaacaattctccatacgaaatcgagaatggcgtggtgtgggtttcattccgtggagcggattattcgctgcgggctgtcagaatgaagattcgcccactggtgacacag

SEQ ID NO: 10420 - DNA, 2598 bp, Artificial Sequence
  derived and/or modified sequence
atgttttcaatgagaatagtttgcctggtgctgagtgttgtcggcaccgcctggactgcagacagcggcgagggtgatttcctggcagaggggggcggggtccgtggccctagagttgttgaacggcatcaatcagcctgcaaggattctgactggcctttttgctctgatgaagattggaactataaatgcccaagcgggtgccgcatgaaaggcttaattgacgaggttaaccaagacttcacaaaccggataaacaagctgaagaattctctctttgagtaccagaagaacaataaagactctcattctctgaccaccaatattatggaaatcttgaggggagatttcagtagtgcaaacaatcgcgataatacatacaacagagtctcagaagacttgaggtccagaattgaagttctgaaacggaaagttatagagaaagtgcagcacatccagctgttgcaaaaaaacgtgcgagcccaacttgtggatatgaaacgtttggaagtggacattgatattaaaatcagatcatgccgcggaagctgctcacgagcactggcgagagaagtcgacctcaaagattatgaggatcaacagaaacagctggagcaggtgattgccaaggatttactaccctcaagggacaggcagcatctaccactaattaaaatgaaacctgtcccagacttagtgcccggcaatttcaaatcccagcttcagaaggtgcctccagagtggaaagccctgaccgacatgccccagatgcggatggagttggaacggccaggggggaatgagatcaccaggggcggttctacaagctatggcactggctctgaaacagagtcgccccgcaaccctagtagtgcgggatcttggaatagcggaagctctggccccggctctaccggcaatcggaaccctggcagcagcggcacgggcggaaccgcaacctggaagcccggctccagcggtcccgggagtactgggagttggaactctggaagcagcggtacaggttctacaggcaatcagaacccaggctcgccgaggccaggctccactggaacttggaacccaggctcctcagagcgcggttcagccggccactggacctccgagagcagcgttagcggcagtacaggacaatggcatagcgagtccggtagcttcaggccagactcccccggctccggtaatgcgcgcccaaataaccctgactgggggacgtttgaggaagtaagtggtaatgtgagccctggaacccggcgcgagtaccatactgagaagctagtgacatctaagggcgacaaggagttgaggaccggaaaggagaaagttacctccggtagcactacgaccacccgccgatcctgcagtaaaaccgtcactaaaaccgtgatcgggccggacgggcataaggaggtgactaaggaggtggtaacctctgaggatggctcggattgtccagaagccatggacctaggcacactgtcgggcatcggcaccttggacggatttcggcacagacaccctgatgaggccgcctttttcgacacagcctccaccggaaagacgtttcccggtttcttttcacctatgcttggcgagtttgtgtccgaaacagagtctcggggaagcgagtccggcatcttcacgaacacaaaggagtcctcctcacaccaccccggaatcgctgagtttcctagtagaggcaagtcaagttcctacagtaaacaatttaccagttccacatcatacaaccgcggtgactccactttcgagtctaaaagttataagatggctgatgaggccggttccgaggctgatcatgaaggaacacactctacaaagcgtggccacgctaagtcgcggccagttagggactgtgacgacgtgctccagacacacccttccgggacccaaagcggcattttcaacatcaaattgccaggaagctctaaaatctttagcgtgtactgcgaccaggaaacgtcactcggcggctggcttctgatccaacagcggatggacggctctcttaatttcaatcgaacatggcaggattacaagcgggggttcgggtctctgaatgatgaaggagaaggcgagttttggctgggcaacgattatcttcatcttctgacccagcgaggaagcgtcctgcgagtggagctggaggactgggctggaaatgaggcctatgcggaataccacttccgagtcggatccgaagccgagggctatgccctgcaggtcagtagctacgagggaaccgccggggatgcccttatcgagggaagcgtggaagagggggcggagtatacatctcataacaatatgcagttttctacatttgaccgcgatgcagaccagtgggaggagaactgtgctgaagtgtacggcggtgggtggtggtataataactgccaagcagccaacctgaacggtatctattatccaggaggctcctatgacccgcgcaacaattcgccatacgagatagagaatggggtggtgtgggtaagttttagaggtgctgattatagcttgagggccgttcgcatgaaaattagacccttagtgactcaa

SEQ ID NO: 10421 - DNA, 2598 bp, Artificial Sequence
  derived and/or modified sequence
atgttcagcatgcgaatcgtgtgtctagtgctgagtgtggtcggaacggcctggactgctgatagtggcgagggcgacttcttggcggaggggggcggcgtgaggggaccgcgcgtagtggagcgacaccagtcagcatgcaaagactccgactggcctttctgtagcgacgaggactggaactacaaatgcccttcaggctgccgtatgaaagggctcatagacgaagtaaaccaggacttcaccaaccgcatcaacaaacttaagaactcactttttgagtaccagaaaaacaataaagacagccacagtctaaccaccaatattatggaaattctgagaggtgacttctccagcgccaataaccgcgataacacctataatcgcgtctctgaagacctccgaagtaggatcgaggtgctgaaaagaaaggtgatcgagaaggtgcagcatatccagctgcttcagaagaacgtgcgggcccagctcgttgatatgaaacgcctggaggtcgacattgatatcaaaatcaggagctgcagggggagttgctctagagctctggccagagaagtcgacctcaaagactatgaggaccagcagaaacagctggagcaggtaatcgccaaagacctcctgccctccagggaccggcagcacctaccacttatcaagatgaaaccggttccggacttagtgccagggaatttcaagagtcaacttcagaaagtgcccccagagtggaaggccttgactgacatgccacagatgagaatggaactagagagacccggcggaaacgagataacaagaggcggttctactagttacggcacagggtccgagaccgaaagtccacgtaacccgagtagcgccggtagctggaattctgggtcctcggggccaggttctactggcaatcggaaccctggctcttctggtactggcggaacagctacatggaagccaggctcttccggccccggctccactgggtcatggaactccgggtccagtggcactgggtccactggcaatcagaacccaggctcaccaagacctggctccacaggaacctggaaccctgggagctctgaaaggggatccgctggtcactggacatccgagtcaagcgtgtctggatctactggacagtggcattccgaaagtgggagttttcgccccgactctcctggtagtggaaacgcacgtccaaataatccagactggggaacctttgaagaggtttccggcaatgtctcacctgggactagaagggaatatcacaccgagaagcttgtcacgtccaagggtgataaagagctgaggaccggtaaggaaaaggtgacaagcggcagtacaaccactaccaggaggtcttgttccaagaccgttactaagacagtaattgggccagatggacacaaagaggtcactaaagaggtcgtcacttcggaagacgggagtgactgtcccgaagcgatggacttggggactctgagtggcataggaacattggatggttttcggcatcgacacccagatgaagccgccttctttgacactgcgtcaacgggtaaaacgtttcctggattcttctcacctatgctcggagagtttgtaagcgaaacagagagtcgggggtccgaatctggcattttcactaatacaaaagaatcgagctcccatcaccccggaattgccgagtttcctagtagaggcaagagcagttcttactccaagcaattcactagtagtacttcatacaacaggggcgattccacattcgaatccaagtcctataaaatggccgatgaggctgggagtgaagccgaccacgagggtacccacagcactaagagaggccacgctaagagcagacccgtgcgggactgtgatgatgtgcttcagacacacccatctggaactcagagcggaatcttcaatatcaagctgccggggagttcaaagatatttagtgtctattgtgaccaagagacctcactgggtgggtggctcctcatccagcaacgaatggacggaagtttgaacttcaacaggacctggcaggactataagagggggttcgggtcactgaatgacgagggggaaggggagttctggctgggtaacgactatctgcatctcctcactcagagaggtagcgtgctgagggtggaactcgaggattgggccggcaatgaagcttacgccgaatatcacttccgggtggggtctgaggcggaggggtatgctttacaggtgtcttcttatgagggaaccgccggagatgccctcatagaaggatcagtggaggagggtgccgaatacacgtcccacaacaatatgcaatttagcacgttcgaccgcgacgccgaccagtgggaggagaattgcgccgaggtctacggcggtggatggtggtacaacaattgccaggcagcaaatctgaatggaatatactacccaggcggctcatatgatcctcgaaacaacagcccttatgagatagagaatggcgtcgtgtgggtgtccttcagaggagctgactattccctgagggctgtccggatgaaaatcaggcccttggttactcaa

SEQ ID NO: 10422 - DNA, 2598 bp, Artificial Sequence
  derived and/or modified sequence
atgttctcaatgcgaatcgtgtgcctggtcctatcggtagtgggaacagcctggacagccgattctggggaaggagatttcctcgctgagggagggggggtaagagggcctcgggtagttgaacggcatcagtctgcttgtaaagattcagattggccattttgcagtgatgaagattggaactataagtgtccctcaggatgtaggatgaaagggcttatagatgaagtcaatcaggactttactaaccgaataaacaaactcaaaaacagtctgtttgaataccagaaaaataataaagattcccatagtctcacaactaacatcatggaaatattacggggggatttttcatcagcaaacaacagggataacacgtataacagggtgtctgaagatctgagatctcggatagaagtgctgaaacgcaaagtgatagaaaaagtacaacatattcagctgcttcagaagaacgtgcgggcccagctagtcgatatgaaaaggctagaagttgacattgatataaaaatccggtcgtgtcgcgggagttgctctagggccttagcacgggaagtcgatctcaaagattacgaagatcagcagaaacagctagagcaggtcatagcaaaggatttactcccttcacgagatagacagcacctacccctgattaagatgaagccagtgcctgatctcgtgcctggaaattttaaatctcaacttcagaaggtacccccagaatggaaagccttgactgatatgccacagatgcggatggagctggaaagacccgggggaaacgagataactcgcggagggtccacatcctatggaacagggtcggaaacagagagtccacgaaatccctcatccgcaggatcatggaattctgggtcctccggaccaggatccacagggaatcgaaaccctgggagttcagggactggggggacagccacttggaaaccaggatcttccgggcctggatccacaggaagttggaactccgggagttctgggactgggtctactgggaatcagaaccctgggtccccccgacctggatccacaggaacatggaaccccggaagttctgaaaggggaagtgcgggacactggacttccgagtcatctgttagtggatcaacaggacagtggcactctgaatcaggatctttcagaccagattcccccgggtccggaaatgcccgacccaacaatcccgattggggaacatttgaggaagtctcggggaatgtgtcacctggaacaaggcgcgaatatcacacagaaaaactagtcactagtaaaggggataaagagctacgcactgggaaagagaaagtcacttctggatctacaacaactactaggcggagttgttctaaaacagtgactaagactgtaattggaccagatgggcacaaagaagtgacaaaagaagttgttacatccgaagacgggtccgattgtcctgaagctatggatctcggaactctctcgggaatagggactttggatgggttcagacatcgacacccagatgaagccgcgttctttgatacagcatcaacagggaaaacattccctgggttcttttcccctatgctgggggaattcgtgtcagaaactgaatctcggggatctgaatcagggatatttactaatactaaagaatccagttcccaccaccctggaatagctgagttcccctctcgcgggaaaagtagtagttattcgaaacagtttacatcctcaacttcatataataggggagatagtacatttgagagtaaatcttataagatggctgatgaagctggatctgaagctgatcacgaaggaactcattcgactaaacggggacatgctaaatcccgcccagttcgggattgtgatgatgtcctccagacacacccatccgggactcagtccgggatctttaacatcaaactgcccgggtcctcgaaaatattttccgtatattgcgatcaggaaacttctttaggagggtggttacttatacagcagaggatggatgggtcgctgaattttaaccgaacatggcaggattacaaaaggggattcgggtccctcaacgatgaaggagaaggagaattttggttaggaaacgattatctgcaccttctgactcagcgggggtctgtcctcagagtggagcttgaagattgggccggaaatgaagcctatgcagaatatcatttccgagtcgggtcagaagctgaggggtatgcactacaggtatcaagttacgagggaacagcaggggatgcccttattgaggggtctgttgaagaaggggctgaatatacatcccacaataatatgcagttttccacttttgatcgggatgcagatcagtgggaagagaactgcgcagaagtttacgggggagggtggtggtataacaactgccaggcggccaatctaaacgggatctattacccagggggatcttacgatccacggaataattcaccttatgaaatcgagaatggggtggtatgggtgtctttcaggggagccgactattccctccgcgccgtacgaatgaaaataaggccactggtgacacag

SEQ ID NO: 10423 - DNA, 2598 bp, Artificial Sequence
  derived and/or modified sequence
atgttcagtatgcgtatcgtctgtctagtgctctctgtggtgggaactgcatggaccgcagattcaggcgaaggagactttttagctgagggaggaggcgtgaggggacctcgggtcgtagaaaggcaccagagcgcatgcaaagactctgactggccattttgcagtgatgaagactggaattataagtgcccatcagggtgccggatgaagggactaattgacgaagtcaatcaggattttacgaatcgaataaacaagttgaagaacagcctgttcgagtaccagaaaaacaataaagacagtcatagcctgaccactaacatcatggagattttgcgtggagatttttcctccgcaaataacagggacaacacatacaacagggtttccgaagatctgcgctcaaggatagaggtgctgaagcgcaaggtcatcgagaaggtccagcacatccagctactccaaaagaacgtcagggcacaactggtggacatgaaaaggttggaggtcgatattgatataaaaatccgctcatgcagaggctcttgctcaagagctctggcccgtgaggttgatctcaaggattacgaggaccagcagaagcagttagaacaggtcatcgctaaagacttgctaccaagccgtgaccgccagcacctgccactgataaagatgaagcctgtccccgaccttgtaccagggaattttaagtcccagcttcagaaagtgccgcccgaatggaaagcattgactgatatgcctcagatgcgtatggagctggaacggccgggtggtaacgagattaccagaggaggctccacctcttatggcacaggatccgaaacagagtccccaaggaatcctagcagcgcagggtcctggaactctggctctagcggcccgggttccacaggaaatcgtaacccagggtcctccggaactggcggcacggcaacctggaagcccggctctagcgggcccggatctactggttcctggaactctggcagctccggcactggaagcaccggcaaccagaaccctggcagccccagacccggctccaccgggacctggaatccaggtagttccgagcgaggcagtgctggccactggacatccgaatctagcgtctccggctcaaccggtcagtggcactccgagtcaggcagtttccggcctgacagcccaggctcagggaacgctcggccaaataaccctgattggggaacgtttgaggaggtctccgggaatgttagccctggcacacggcgcgagtatcatacagagaaactcgtcacgtctaaaggcgataaagaacttcggacgggaaaggagaaggttacgtctggctcaactactaccaccagacgtagctgttccaagaccgttactaagaccgtgattggacctgatggtcacaaggaagtcaccaaagaagtggtgacctcagaggatgggtccgactgcccagaggcaatggatctcggaaccctgagcggaattgggacgctagacggctttcgtcaccggcacccagacgaggctgcgttttttgacactgccagcacaggaaaaactttccccggcttctttagccccatgctgggagagtttgtgtcagaaacggagtcgagggggtcagaatcaggcatcttcacaaacactaaggaatcctcatctcatcatcccgggattgctgaattccctagccgaggcaagtcttcctcctattccaaacagttcacgtcctcaactagttataatcgtggtgacagtacattcgaaagcaagtcctacaaaatggcagacgaggcgggctcagaggcagaccacgagggcacccacagtacaaaaagaggtcacgctaaatcacggcccgttagggactgtgacgacgtactgcagacccacccaagcggcacccaaagtgggatcttcaacattaagctgccaggtagttccaagattttttcagtatattgtgatcaggaaacctccctgggagggtggctgctaattcagcagcggatggatggtagtttgaatttcaaccgtacttggcaggattacaaacgagggtttgggagtctaaacgatgaaggcgaaggagagttttggctggggaacgattacctgcacctgctgacacagagaggatctgtgctgagggtggagcttgaggattgggctgggaatgaagcttatgccgagtaccatttcagagtgggcagcgaagccgagggctatgctttacaagtgagttcttatgaggggactgctggggatgcactgatcgaaggctcagtcgaggaaggcgcagagtacacctctcacaacaacatgcagttcagcacttttgacagggacgcagaccagtgggaggagaattgtgctgaggtgtacggcggcggctggtggtacaataattgccaggctgcgaatctgaatggtatatattatcccggcggaagctatgatcctcgaaataacagtccgtatgagatagagaacggagtggtttgggtgtctttccggggcgctgattattctctgagagcagtccgaatgaaaatcaggcctctcgtcacacag

SEQ ID NO: 10424 - DNA, 2598 bp, Artificial Sequence
  derived and/or modified sequence
atgttcagcatgaggatcgtgtgcctcgtcctgagcgtggtgggaacagcttggacagctgacagcggggaaggagactttttagctgaaggaggcggcgtaaggggtcctagggtagtggagaggcatcaatcggcatgcaaggattcagactggcccttctgcagtgatgaggactggaactacaagtgccccagcggctgtcgcatgaaagggctgatcgacgaagtgaatcaagactttacaaatcgtatcaataagctgaagaactcgctgtttgagtatcaaaagaataacaaagatagtcactcccttaccactaacatcatggagatcctccgcggtgacttttcgagtgcaaataaccgagacaatacatacaaccgtgtgtccgaggatctcagatcacggattgaggtattgaagcgcaaggtcatcgagaaagtacagcatatccagttattgcagaaaaacgtgcgcgcccagctggtcgatatgaaacgacttgaagttgacatagacataaagattagatcttgccgcggctcctgtagtcgggccctcgcccgcgaggtggatttaaaagactacgaagaccagcagaagcagctggaacaagttatcgccaaggatcttctgccaagtcgagataggcagcacctccctctgattaaaatgaagcccgtgcctgatcttgtgccaggtaatttcaaaagccaactccagaaagttcctccagagtggaaagcattgactgacatgccacagatgcgaatggagctggagcgacccggaggaaacgagataaccaggggtggtagtacgtcctatggcaccggcagcgagacagaaagcccgcgcaatccctcttcagccggctcatggaacagtggcagtagcggacccggctccactggaaaccgtaaccccgggagttccggcaccggcgggacagctacatggaagccaggatcttccggacccggctccaccgggtcctggaattccgggtcatcggggactggctcgacagggaaccagaatcccggatcccctcgtcccgggtctaccggaacatggaacccaggctcttcggagcgcggaagtgcaggtcactggacaagcgagagtagtgtgagcgggagtacaggtcagtggcattccgaaagcggctcttttcgccccgattccccaggctcaggcaacgcccgtccgaacaatccagactggggcacgttcgaggaagtcagcgggaatgtgtccccagggacccgcagagaataccacacagagaagctggtgaccagcaaaggggacaaagagcttcgcacaggcaaagaaaaagtgacgagtgggtcaacgacgacgaccaggcggagttgtagcaagacagtcaccaaaaccgtgataggacctgatggtcataaagaggtcacaaaagaagtagtcaccagtgaggatggaagtgactgccctgaggcaatggatctcggtaccttatcaggaattggtaccctggatggcttcagacaccggcatcccgatgaagccgctttctttgacacagcctcaaccggaaagactttccctggttttttttctcctatgctgggcgaattcgtctccgagacagagtcaagaggttccgaatccggaatatttacaaacaccaaagagtccagtagtcatcatccgggaattgcagagtttccgtctcgcggtaagtcgagttcgtactcaaagcagttcactagtagtacctcatataaccgtggcgactccacatttgagtcaaaatcttacaaaatggctgacgaggccgggtcggaagctgaccatgaggggacccattcgacaaaaagaggacatgctaagtctcgaccagtgagggattgcgacgacgtgcttcagacgcacccttccggaacccagagtggcatcttcaacataaagctgccagggtcctcaaaaatcttctctgtgtactgcgatcaggaaacgtcattgggcggctggttgctcatccagcagaggatggatgggtccctgaactttaaccgcacttggcaggactataagcggggctttggctctctaaacgatgaaggggagggagagttctggctagggaacgattatctccatctccttactcagcgcgggtcagtcttgcgagttgaactcgaggactgggccggcaatgaggcgtatgccgagtatcattttcgggtcggctcagaagctgaaggctacgccttacaggtgagcagctatgagggaaccgccggagatgccctaattgaaggctcagtagaggaaggggccgaatacacatctcataacaacatgcagttttcaacctttgacagggacgccgaccagtgggaagagaattgtgccgaagtctacggagggggatggtggtataataattgtcaagccgcaaatctgaacggaatatattatccgggtggttcctatgatcctcgcaacaattccccctacgagatcgaaaacggagtggtgtgggtatcatttcgtggagccgactactcattgagagcagttcggatgaaaattcggcccctagtgacccag

SEQ ID NO: 10425 - DNA, 2598 bp, Artificial Sequence
  derived and/or modified sequence
atgttcagcatgcgcatcgtatgtctagtgctgtcggtcgtcggcactgcttggaccgccgactcaggtgaaggagattttctggcggagggcggcggcgttagggggccacgtgttgtcgaacgacaccagtccgcctgcaaagattcagactggcccttctgcagcgatgaggattggaattacaagtgccctagtggctgtcggatgaaagggctcattgacgaggtgaatcaggattttaccaaccggatcaataagctaaagaattctttatttgaataccagaaaaacaataaagattcgcacagtttgaccactaacattatggaaattctgcgtggcgatttttcaagtgccaataatcgagataacacgtacaaccgagttagcgaggatttacgatccagaattgaggtgcttaaacggaaggtcatcgagaaagttcagcacatccagctcctgcagaaaaatgtgcgtgcccaactggttgacatgaagaggctggaggtcgatattgatatcaagatccgctcctgcaggggctcttgctctagagcactcgcccgcgaggttgacctgaaagactacgaagatcaacagaaacaactagagcaggtgatcgcaaaggatctactcccgtccagagatcgacagcacctgcccctgattaaaatgaaaccagttccggatcttgtccccggcaacttcaaatcccagctacagaaggtgcccccggagtggaaggcactgaccgacatgccccaaatgaggatggagttggagcgcccagggggaaacgagatcacacgtggtggcagtacctcctatggaactggatccgagaccgaatctcccagaaacccgtcctctgctggcagctggaattcgggctcaagcggacctggttccactgggaaccgcaaccctggtagctctgggacagggggtactgcaacctggaagccagggagcagcggtccaggctccaccgggtcatggaacagcggttcaagcggaaccgggagtacaggcaaccaaaatcctgggagccctagacccgggagtacgggcacatggaatcccggtagttctgaaagggggtcggccggccactggaccagcgagtcgagcgtaagtgggagtactggccagtggcatagtgaaagcggctctttcaggccggactctccaggttcggggaatgcaaggcctaacaaccccgactggggcactttcgaggaagtaagcgggaacgtgtcccctggtacccgtcgtgagtatcacaccgaaaaactggttacgtctaagggcgacaaagagctaaggacaggtaaagagaaggtgacctcaggcagtacaacgaccacgaggagaagttgttctaagactgtcaccaagaccgtgatcggccccgacggccacaaagaagttacaaaggaggttgtgacatcagaggatggaagtgactgccctgaagctatggatctaggcactctgtccggcattggcaccttggatggattccggcacaggcaccccgacgaggctgcctttttcgatactgcatctactggtaaaacctttcccgggtttttttcccctatgctcggggagttcgtgagcgagacagagagtcgaggctcagaatcgggaatcttcaccaacaccaaggagtcttcttctcatcacccaggtatcgctgaatttccatcacgcggcaagtctagctcttattcgaagcagtttacaagctcaacctcatacaatagaggcgacagcaccttcgagtccaaaagctacaagatggctgacgaggcgggctcggaagcggatcacgaaggtactcatagtacaaagaggggtcacgccaagtccagaccagtgagagattgcgatgatgttctgcagacacacccaagcgggactcagagcggcatcttcaacattaaattgcctggtagtagcaaaattttttcagtgtattgtgatcaggaaacttctctgggaggctggctgctgattcagcagcgcatggacggcagccttaatttcaacaggacctggcaggactacaagcggggctttggctctcttaacgacgagggcgagggagagttctggttggggaatgattatttgcatctgcttacccagcgcggttcagtcctgcgcgtcgaacttgaagattgggccggaaatgaggcttacgcagaataccattttcgggtgggctcagaggctgaaggatatgcgttacaagttagttcttatgaaggaactgccggggatgccctcattgaaggaagcgttgaggagggcgcagaatatacttcccacaacaacatgcaattctccacctttgaccgcgatgctgaccagtgggaagaaaattgcgcggaggtatatggaggaggctggtggtacaacaactgccaggcagccaatctcaatgggatttactaccccgggggttcctacgatcctagaaataactctccttacgaaatagagaacggtgtagtttgggtcagcttccggggagccgactatagtttgagggcagtacggatgaaaatccgccctctggttactcag

SEQ ID NO: 10426 - DNA, 2598 bp, Artificial Sequence
  derived and/or modified sequence
atgttctcaatgcgtattgtttgtcttgttttatctgttgttggtacagcatggactgcagatagtggagaaggagattttcttgcagaagggggaggagtacgtggtccaagagtagtcgaaagacatcaaagcgcatgtaaagattcagactggccattttgtagtgatgaagattggaattataaatgtccatcaggatgtagaatgaaaggattaattgatgaagtaaatcaagattttacaaatagaattaataagcttaagaattcattatttgagtatcaaaaaaataataaagattctcattcattaacaacaaatattatggaaatactacgtggagatttctcatcagcaaataatagagataatacatataatagagtttctgaagatctccgttcaagaatagaagttctaaagcgtaaggttattgaaaaggttcaacatattcaattattacaaaaaaatgtaagagcacaacttgttgatatgaaaagacttgaagttgatattgatattaaaattagatcatgcagaggatcatgttcaagagctcttgcaagagaagttgatcttaaggattatgaagatcaacaaaaacaattagaacaagttatcgctaaagatttactcccatcaagagatagacaacatttacctttaattaaaatgaaaccagttccagatcttgttcctggaaattttaaaagtcaattacaaaaagtaccacctgaatggaaagctttaactgatatgccacaaatgagaatggaattagaacgtccaggaggaaatgagattacaagaggaggatcaacatcctatggaacaggtagtgaaactgaatcgccaagaaatccttcatcagctggatcatggaatagtggatcaagtggaccaggttctactggtaatcgtaatccaggaagttcaggtacaggtggaactgctacatggaaaccaggttcatcaggtccaggatcaaccggatcatggaattcaggaagtagtggaaccggttcaacgggaaatcaaaaccctgggtcaccaagaccaggatcaacaggaacatggaatccagggtcatctgagagaggatctgctggtcattggacatcagaaagttcagtctctggatctactggacaatggcatagtgaatcaggaagtttcagaccagattcaccaggaagtggaaatgcaagaccaaataatccagattggggaacgtttgaagaagttagtggaaatgtttctcctggaacacgaagagaatatcatactgaaaagttagttacttcaaaaggggacaaagaattaagaactggtaaggaaaaagtaacaagtggatcaacaactactacacgtcgttcatgtagtaagacagttacaaaaactgtaattggaccagatggacataaagaagtaactaaggaagttgttacatcagaagatggtagtgattgtccagaggctatggacttaggaacattaagtggaattggaacattagatggtttcagacatagacatccagacgaagctgcattctttgacacagcttctacaggaaaaacatttccaggatttttttcaccaatgttaggagaatttgtttcagaaacagaatctagaggatcagagagtggtatttttacaaatactaaagaatcatcttcacatcatccagggattgcagaatttccatctagaggaaaatcttcttcatattcaaaacaatttactagtagtacatcatataatagaggtgattcaacttttgaatcaaaaagttataaaatggctgatgaagcaggatcagaagcagaccatgaaggtacgcatagtacaaaacgaggtcatgcaaagtcaagaccagttagagattgtgacgatgtattacaaactcatccaagtggaactcaatcaggaatttttaatattaaattacctggatcttcaaaaatattttcagtttattgtgatcaagaaacttcattgggaggatggttactaattcaacaaaggatggatggatcattaaactttaataggacatggcaagattataagagaggttttggaagcttaaatgatgaaggagaaggagaattctggcttggaaacgattatttacatttattaacacaaagaggaagtgttttaagagttgaacttgaagattgggcaggaaatgaagcatatgcagagtatcattttagagttggttcagaagctgaaggatatgctttgcaagtttcatcttatgaaggaacagcaggtgatgctttgattgaaggaagtgttgaagaaggagctgagtatacatcacataataatatgcaatttagtacatttgatagagacgctgatcaatgggaagaaaattgtgcagaagtatatggaggtggatggtggtataataattgtcaagctgcaaatttaaatggaatatattatccaggaggaagttacgatccaagaaataactcaccatatgaaattgaaaatggagttgtatgggttagttttagaggtgcagattactcattaagagcagttagaatgaaaattcgaccattagttacacaa

SEQ ID NO: 10427 - DNA, 2598 bp, Artificial Sequence
  derived and/or modified sequence
atgttcagtatgcggattgtgtgcctcgtgctgagcgttgtcggcacagcctggaccgcagatagcggcgaaggcgatttccttgctgagggaggcggtgttaggggccctagggtggtggaaaggcaccagtccgcctgcaaagattccgattggcctttttgctccgatgaggactggaattataaatgcccatcagggtgcaggatgaagggccttattgacgaggtgaaccaggacttcacaaatcgcattaacaaactgaagaattccttgtttgaataccagaaaaacaataaggatagccactccctgactaccaatatcatggagattttgcggggcgacttttcttccgccaataaccgggacaatacttataaccgggtctctgaagacctgcgcagtagaatcgaggttctcaagagaaaggtgatcgaaaaggtgcaacatattcagctgctgcagaagaacgtcagggcccaattggtggatatgaaacggctggaggttgatattgacataaagattcgcagttgtaggggttcctgtagccgagcactggcccgagaggtggatctgaaagactacgaggaccagcagaagcagctcgagcaggtgatcgctaaagacctccttccttcccgggacagacaacatctgcccctcatcaagatgaagcctgtccctgatttggttccaggaaactttaaatcccagctccagaaagtcccacctgaatggaaagcccttactgatatgcctcaaatgagaatggagctcgagaggcccggaggtaatgaaattaccaggggcgggtccacaagctatggaaccggctccgagacagagtctccccgaaatccgagcagtgctggatcttggaatagcggcagctccggtccaggtagtacaggaaatagaaatcccggttctagcgggaccggagggactgccacctggaagccaggatcctccggaccagggagcaccgggagttggaattctggcagctctgggactggctcaacaggcaaccagaacccagggtccccgcgccccggcagcacaggaacctggaaccctggctctagtgagcgggggagcgccggacactggacttctgagagttccgtctcagggagcactgggcaatggcatagcgaaagcggcagctttagacccgacagtcctgggagcgggaacgcccgaccgaataatccggactggggaacatttgaggaggtctccggaaatgtgtcacctggaacccggcgggaataccacacggagaagttggtgacatcaaagggggacaaggagctgcgaacaggcaaggagaaggtgacttctggctccacaacaacaaccaggcgaagctgcagcaaaacagtcactaagaccgtgatcggtccggatgggcataaggaggttacgaaggaagtcgtcacgagtgaagatggcagcgactgccctgaagcaatggatctgggtacactctccgggatcggtacgctcgacggctttagacacaggcacccagatgaggccgctttctttgacaccgcaagcactgggaagacctttcccggcttcttcagccctatgttgggcgagtttgtgtccgagacagagtcccgggggagcgaaagcgggatctttaccaataccaaggagagcagctcacatcatcccggaattgccgagttcccatccagggggaaaagctcatcttactctaagcagtttacgagcagtacctcctacaatcggggcgacagcaccttcgagtcaaaatcttataagatggcagacgaagccggctcagaggcagatcatgaagggacacactctaccaaaagaggacatgccaaatcccgacccgttcgcgattgcgacgacgtgctgcagacccacccgtccggcacccagagcgggatctttaatatcaaactgcccggatcctccaaaattttttccgtgtactgcgatcaggagaccagcctcgggggatggctcctgattcaacaaaggatggatggctcattgaatttcaaccgcacctggcaggactataagcggggcttcggctcccttaatgacgagggggaaggggaattttggctgggtaacgactatttgcatctgctgacccagagaggatctgtcttgcgggtcgagctggaagactgggccgggaacgaagcgtacgccgagtatcactttcgcgtggggtctgaggctgaaggctatgctctgcaggtgagctcttatgaagggacggccggagacgcactgatagagggcagcgtagaggagggcgctgagtacacaagccataataacatgcagttctcaaccttcgatagagacgcggatcagtgggaagagaattgtgctgaagtctacggtggcggttggtggtacaacaactgccaggctgctaatcttaatgggatttactaccctggaggctcttacgacccccggaataattctccttacgagatcgaaaacggagtggtctgggtgagctttcggggtgccgactattccctgcgggctgtacgaatgaaaattagaccccttgtgacccag

SEQ ID NO: 10428 - DNA, 2598 bp, Artificial Sequence
  derived and/or modified sequence
atgttctcaatgcgcattgtgtgcctagtcctgtccgtggtcggtactgcctggaccgccgactccggcgaaggggatttccttgcagagggcggcggcgtccgcggaccgcgagttgtagagcgccaccagtctgcctgcaaagatagcgattggcctttctgctcggacgaagattggaattacaagtgcccctcgggatgcagaatgaagggacttattgatgaggtgaaccaggatttcacaaaccggatcaataagctgaagaacagcctcttcgagtaccaaaaaaacaataaggatagccacagcctgaccacgaacatcatggagatactgcgtggtgatttttcgtcggctaacaaccgcgataatacctacaaccgagtgtccgaggacctgcgaagtagaatagaagtgctaaagcgtaaggtgatcgaaaaggttcaacatatccagcttcttcagaagaatgtgagggcccagctggttgacatgaaacggctcgaggtcgacattgatattaaaatccgcagctgcagaggctcctgcagccgtgcactggcccgggaggtagacctgaaggattacgaggaccagcagaagcagctagagcaggtaatcgccaaggatctattaccatccagggaccggcaacacctcccattaataaaaatgaagcctgtcccagatctcgtccccggaaatttcaagagccaacttcaaaaggtgcctccagagtggaaagcgcttacagatatgccccagatgcgcatggagctggaacgacccggcggtaacgagattacacgaggtggtagcacgtcgtacgggaccggcagcgagaccgagtcgcccaggaatccttccagcgccggctcttggaattcaggctcctccggcccagggtccactggcaaccgcaaccccggctctagcggaactggtggaaccgcgacgtggaaaccgggtagttcgggacctggctcgaccggatcttggaactcaggaagctcaggcacaggcagcaccggaaaccagaaccctggaagcccgaggcctggttcaacgggtacttggaatccaggtagcagcgagaggggaagtgccggacattggacctccgagagctcggtgtcgggtagcacaggccagtggcacagcgaatcgggctctttccgtccagattcaccaggatctggaaatgcccggcccaacaatcctgactggggcaccttcgaagaggtcagtggcaatgtgtcgccgggaacgcgtcgtgaataccatacagaaaagctcgtcacctccaaaggtgataaggagctacgaaccggtaaggagaaggttacaagcggcagtactaccacgacccgccgcagttgcagcaagaccgtgacaaagaccgttatcggtcctgacggacacaaagaggtgaccaaagaagtagtgaccagcgaggatggatcggattgtccagaagctatggaccttgggaccctgagcggaatcggaacactcgacggctttcgtcaccgccacccggatgaggcagcgttctttgatacagctagtactggcaaaacgttccccggattcttttcgccgatgctgggagagttcgtctccgagacggagagtcgaggctcagagtccggaatcttcactaacacgaaggagtcctccagtcaccatcctggaattgcggaattccccagccgaggaaagagttccagctacagcaagcagtttacgtcttccacatcctacaatcgtggcgatagtaccttcgagtcgaaaagctacaaaatggccgacgaggccggtagcgaggcagaccatgaaggcactcactcgacaaaacgcggtcatgctaagagcaggccggtacgtgactgtgatgacgttcttcaaacccatccctccgggacacaaagtggaattttcaacataaagttgccgggtagttccaagatcttctccgtgtactgcgatcaggagaccagcctgggtggatggctcttgatccagcagcgaatggacggctctctcaatttcaaccgaacttggcaagattacaagcggggtttcggcagtctcaacgatgagggcgaaggcgagttctggctcggcaacgattatcttcacctacttacacagaggggatccgttctgcgcgtagagcttgaggattgggccggcaacgaggcatacgccgagtatcacttcagggtcggcagcgaggctgaggggtacgctttacaggtctccagctacgagggcaccgccggagacgctcttatagagggcagtgtggaggagggagcggagtatacatcgcacaacaacatgcagttttccaccttcgatcgcgatgccgatcagtgggaagagaactgcgcggaagtgtacggaggaggatggtggtataataactgtcaggccgccaatttaaacggcatctattacccgggtggcagctacgacccgcgtaataatagtccgtacgagatcgagaacggagtggtgtgggtgtcattccggggtgccgattactccctacgcgctgtgcggatgaagatccgtccattggtgacccaa

SEQ ID NO: 10429 - DNA, 2598 bp, Artificial Sequence
  derived and/or modified sequence
atgttcagcatgcggatcgtgtgcctcgttctgtctgttgtgggcactgcgtggacagcagatagtggagaaggcgactttttggctgaggggggaggtgttaggggaccacgagtggtagagcgacatcagtcagcctgtaaggatagtgactggccattctgttctgacgaggattggaactataagtgtccttcaggctgtaggatgaagggattgattgacgaagttaaccaggatttcaccaaccgcatcaataagctgaagaacagtctctttgagtaccaaaaaaacaacaaagattctcacagcttgactaccaatatcatggagatccttagaggggatttctcctcggccaacaaccgggacaacacatataatcgtgtaagcgaggacctgcgctcccgcatcgaggtgctgaagaggaaggtgattgaaaaggttcagcacatccagctattgcaaaaaaacgtcagggcccagctagtggatatgaagcgtctcgaggttgatatcgatatcaaaatccgtagttgccgcggctcttgctctagagcacttgccagggaagtcgatttgaaagattacgaagaccagcagaagcagctcgagcaggttatcgcaaaggacctgttgccctcccgtgatcggcaacacctgccgctcataaagatgaagcccgtgcccgaccttgtgccagggaactttaagtctcagttgcaaaaggttccacccgaatggaaggctctgaccgatatgccacaaatgcgcatggagctggagcgccccggtgggaacgagattacccgcggggggtcgacttcatatggcacaggttcagagacggaaagccccaggaaccccagtagtgccgggtcatggaattctggcagcagcggtccaggttccacaggtaatcgcaatcccggcagctccggcacaggggggacagcgacctggaaacccgggagttccggtcctggcagcaccggcagctggaactctggctcatccggaaccggtagtacaggaaatcagaaccctggctctccaaggcctgggtctactggaacttggaatcctggaagcagcgagcgcggttctgctggacactggactagtgaaagctcagtttcaggaagcacaggacagtggcactcagagagcggcagttttcgcccagattcgccagggtctgggaatgccaggcccaacaatcccgactggggcacctttgaggaggtctcagggaacgtcagtccaggcacgagaagggagtaccataccgagaagttagtaacgagcaaaggcgacaaggaattacgcacagggaaggaaaaggtcactagtgggagcaccaccactacccgacggtcctgctcaaaaaccgttaccaagacagtgattgggcccgacggccacaaagaagtaacaaaagaggtagtcacttccgaagacggctcagattgtccagaagccatggatttgggcaccctctcaggaatagggacccttgatgggtttcgacaccgtcacccagacgaggcagctttctttgataccgcatccactggcaagacatttcctggctttttcagtccaatgctgggggagttcgttagtgagacagagagccgcggaagcgaaagcggaattttcacgaacacaaaggagtctagtagccatcacccaggaatcgcggaattcccctccagggggaagtcttcctcatatagtaaacaatttacttcttctacatcatataatagaggtgattctacattcgaaagcaaaagttacaagatggcggatgaggctggatccgaggccgaccacgaggggacacatagcaccaaaaggggccacgcaaagtcgcggccggttagagactgcgacgacgtgctccaaacccacccatctggtacccagtctggtatcttcaatattaagctcccgggctctagcaagatcttctccgtgtactgtgatcaggagacttccttgggaggatggttactcatccagcagcggatggacggttccctcaacttcaaccgcacatggcaggactataagcgtggcttcgggtcactgaatgacgagggcgagggcgaattttggctgggtaacgattatttgcatctgctcactcagcgcggctccgtgcttagggtagaattggaagattgggccggcaacgaggcctatgccgagtaccacttcagagtgggctccgaggccgaaggatatgccttgcaggtgtcctcttatgaaggtaccgccggcgacgcactgatcgagggatcagtggaagagggggccgaatacacctcccacaacaacatgcaattttctacatttgatagggatgccgaccagtgggaagaaaactgtgccgaagtgtacggaggtggctggtggtacaacaattgccaggccgcgaacttgaatggtatttactatccgggcggatcatatgatccccggaataactctccctacgagatcgagaacggcgtggtgtgggtgtcatttagaggtgcagactacagccttcgcgctgttcgaatgaagattcggccccttgttacacag

SEQ ID NO: 10430 - DNA, 2598 bp, Artificial Sequence
  derived and/or modified sequence
atgttttctatgagaatagtctgcctagtgctgagcgtagtggggactgcttggacggccgacagcggggaaggcgatttcttagccgaagggggtggtgtgcgcggcccccgagtggtggaacgccatcaatctgcttgcaaagattctgattggcctttctgttcagacgaagactggaactacaagtgcccctccgggtgccgcatgaaagggctgatcgatgaggttaatcaggatttcacaaatcggattaacaaactgaaaaactcactgttcgaatatcaaaaaaataacaaagattcccattccttgactaccaatataatggagatcttacgcggcgatttctcctccgctaacaatagggataatacttacaaccgagtttctgaggatctgcggagccgaattgaggttttgaagagaaaggtgattgaaaaggtacagcatatacagctcctccaaaagaatgttcgggctcagttggtggacatgaaacgcttggaggtagatatcgacatcaagattcgctcctgccgcggcagctgctcacgcgccctggcaagagaagtggacctaaaagactacgaagaccagcagaagcagctggagcaggttatagccaaggatcttctcccatccagagacaggcagcacctccccctaatcaagatgaaaccagtaccagacttggtgccgggtaacttcaagtcacagttgcaaaaagttccgccagaatggaaggcgcttacagatatgccccagatgcgcatggaactagagaggcccgggggcaatgaaatcacccgcgggggttccacttcttatggcaccgggtcagagacggagtctccacggaatccatcttcagcagggtcttggaattctggaagcagcgggcccgggtcgaccggaaatcgcaatcccggaagttccggaactggaggaacagctacctggaaaccagggtctagcggcccgggatcaacagggtcttggaatagcggatcctcaggcactgggtcaacaggaaaccagaatcctgggtcaccccgccctggctcaacaggtacctggaatccgggtagtagtgagcgagggtctgcagggcattggactagcgagtcctctgtgtccggtagtactggacaatggcacagcgagagtggtagtttcagacctgattcacctgggtcgggaaacgcccgcccgaataaccccgattggggcacttttgaggaggtctctggcaatgtgtccccaggcacccgccgcgagtaccataccgagaaactcgtgacatctaaaggagataaggagctaaggacagggaaagaaaaggttacctccggatcaacaaccaccactcgtcgatcttgtagcaaaacagtgacaaagacggtgatagggcccgacggacataaagaagttacgaaggaggtggttacttcagaggacggatctgactgccctgaggccatggaccttggcacattgagcgggatcggcactttagacgggttccgccacagacacccagacgaggccgctttttttgataccgcctcgacaggcaagaccttccctggctttttcagcccaatgcttggtgagttcgtttccgagaccgaaagtagaggcagtgaatccggcattttcactaacactaaggaatcttcgtctcaccacccaggaatcgcagaatttccctcccgaggaaaatcctcatcttactccaagcagttcaccagcagtacatcctacaaccgtggcgattcaacgtttgagagtaagtcttacaagatggcagacgaagctggaagtgaagcggaccacgagggcacacatagcaccaaacgaggccacgcaaaatctcgcccagtgagagactgtgacgatgtgctgcagacgcatcctagcggaacccagagtggcattttcaatatcaaactgcctggcagttcaaagattttttctgtttattgcgaccaggagacatctcttggaggatggttacttattcagcagagaatggacggatctctcaattttaatcggacctggcaggactataaacggggcttcgggtctctaaacgatgagggggagggtgagttttggctcggcaacgactaccttcatttgttgacacagcgaggaagcgtgctgagggtggagctggaggactgggccggaaacgaagcgtatgctgaatatcacttcagagtcggcagcgaggctgaggggtacgctctgcaggtatcttcctatgaaggcactgcgggcgacgctcttatcgaaggctcagttgaggaaggggctgagtatacatctcacaacaatatgcagttttccactttcgatagagacgccgatcagtgggaggaaaactgtgctgaagtttatggcggtggttggtggtacaataattgtcaggcagctaacctgaacggaatttactacccaggcgggtcctacgaccctcgcaataatagcccctatgagatcgagaatggcgtagtttgggtgtccttccggggagccgactacagtctccgcgcagtgcgcatgaaaatccgaccccttgttacgcag

SEQ ID NO: 10431 - DNA, 2598 bp, Artificial Sequence
  derived and/or modified sequence
atgttcagcatgagaatcgtgtgccttgttctctcagtggtgggaacagcgtggacagctgacagcggggaaggagactttctcgctgagggaggaggagtgagaggaccacgggtggtcgagaggcaccaatctgcctgtaaggatagcgactggccgttttgcagtgatgaagattggaactataaatgcccttcaggatgccggatgaaaggtcttatcgatgaggtaaaccaggatttcaccaacaggatcaacaagcttaagaacagcctgttcgaataccagaagaacaacaaagacagtcactcactgacaaccaacattatggaaatacttagaggcgactttagctctgccaataaccgggacaatacctacaacagggtttctgaagacctcagatctaggatagaggtactcaaaaggaaagtaatcgaaaaagttcaacatattcaacttctgcaaaaaaacgtccgagctcagcttgtggacatgaaaagattggaggtcgatatagacatcaagattaggagttgccgcggtagttgcagtagagccttagcacgggaagtggatctgaaagactacgaagatcaacaaaaacagctggaacaggttatcgcaaaggatttactgcctagtagggataggcaacacctcccactcatcaaaatgaaaccagttcccgacttggtccccgggaacttcaaatctcagctccaaaaggtgcctcctgaatggaaggctctcaccgacatgccccaaatgcggatggagcttgagcgacctggcggaaatgagattacacgaggcgggagcacgagctatggaacaggaagcgaaactgaatctcccagaaacccatcttctgcaggcagctggaactctggaagcagcggaccaggctccactggcaacaggaaccccgggagctctggcacaggaggcaccgccacatggaagcccgggtctagcggccctggtagtactggcagttggaactctggatcctcagggaccggcagcacagggaatcagaatccaggcagtccaagaccaggatctactggaacgtggaaccctgggtcctctgaaaggggaagtgctggacactggacctcggaaagtagcgtcagcggttctacaggacaatggcactcagaatccggaagctttaggccggattctcctggctcaggcaacgctaggcctaacaacccggactgggggacatttgaagaggttagcggcaacgtcagcccagggactagaagagaatatcacacagagaagctcgtgacctccaaaggagacaaggaactcagaaccggtaaagagaaggtgaccagcggctctaccactactactcggcggtcttgttctaaaacagtcactaaaactgtgattggaccagatggacataaggaggttaccaaggaggtggtcacttcagaagatgggtcagactgtcccgaggctatggatctgggaacccttagtggaatcggtaccttagatggctttcgacaccgtcatccagatgaggcagcctttttcgacacggctagcaccggcaagacctttccaggctttttctcacccatgctgggcgaattcgtcagtgaaactgaatctaggggatccgagtccggaattttcaccaacaccaaagaaagttccagccatcaccctggcattgctgagtttccctcgaggggcaagtcgtcttcatactcgaaacagtttacctctagtacatcgtacaatagaggcgattccacatttgaatctaagtcatacaaaatggctgacgaagcaggttccgaggccgatcacgagggaactcacagcactaagcgtggacatgccaagagtcgccccgtgagagattgtgatgatgtcctgcagactcaccccagtggaacccaaagcggcatctttaatatcaagctgcctggtagttcaaagattttttccgtgtactgtgatcaggagacaagtctcggcggttggcttctgatacagcagaggatggacggttctctgaattttaaccggacttggcaagattacaaacgtggctttggctctttaaacgatgagggcgagggcgagttttggctgggcaacgattacctccatctcctgacccaacggggatcggtcttgcgagtagagctcgaggattgggcgggcaacgaggcttacgctgagtaccattttagagtggggtctgaggctgaaggctacgccctgcaagtgagttcgtacgaaggaaccgctggggacgccctgattgagggatccgtggaagaaggagccgagtatacctctcacaacaacatgcagttcagcaccttcgacagggatgctgaccagtgggaggagaactgtgccgaggtgtatggcggaggctggtggtacaacaactgtcaggctgcgaatctgaacggaatctattaccccgggggaagttacgatccgcgaaacaattctccctatgaaattgaaaacggagttgtttgggtatcttttaggggagctgattacagccttagagctgtgcgcatgaaaatcagaccgctcgtcacacaa

SEQ ID NO: 10432 - DNA, 2598 bp, Artificial Sequence
  derived and/or modified sequence
atgttctctatgagaattgtgtgccttgtgttatccgtggttggtaccgcatggacggctgatagcggagaaggagattttcttgctgagggggggggggttcgaggccctagagttgtggaaaggcaccagtctgcctgtaaagatagcgactggccgttctgttctgacgaggactggaattacaaatgcccatcaggctgccgaatgaagggcctgatcgatgaagtaaaccaggactttaccaacaggatcaacaagctgaaaaactcccttttcgagtaccagaagaataacaaagactcccattctcttaccacaaatattatggagattctgcgaggtgacttcagctctgcaaacaacagagacaacacctacaaccgagtttccgaagaccttcgatctagaatcgaagtgctgaaaagaaaagttattgagaaagtgcagcacatacagttgctgcagaaaaacgtgagagcccaactggtcgatatgaaacgacttgaagtggacatcgacattaaaatccgaagctgtcgaggctcctgttcaagggctctggctagagaggtcgacttgaaggactacgaggatcaacaaaagcagcttgagcaagtgatagcaaaagacctacttccatcaagggacaggcagcatctacctttgattaaaatgaagccggtccccgatctggttccaggaaatttcaaatctcaactgcagaaagttcctcctgaatggaaagccctgactgatatgccccagatgcgaatggagcttgagcgcccaggtgggaatgaaatcacccggggggggtcgacttcctatggtactggttcagagactgaaagccccaggaacccctcctcggcagggtcttggaattccgggtcttccggacctgggtccaccgggaaccgaaatcccggctcaagcggcaccgggggtaccgcaacttggaagcccggaagttcaggccccggcagtactgggtcatggaatagcggctcttccgggacgggttctacgggaaaccaaaaccctggatctccccggcccggctcaacaggcacatggaaccccggctcttcggagaggggctctgccgggcactggaccagcgagtcgagcgtaagcggctcgacaggacagtggcattctgaaagcggcagcttccgacccgactccccgggcagtggtaatgctcgtcccaataatcctgattggggtacattcgaggaagtaagcggtaacgtgtcgccagggacacggcgggagtatcatacagaaaaactcgtgacttccaaaggagataaggagctcaggactggtaaggagaaggtcacttcaggcagcactacaactacacgtaggtcctgtagtaaaacggtcaccaagacggtgattggacctgatggccacaaggaggtgacgaaggaagtcgtgacatcggaagatggcagtgactgtcccgaagctatggatcttggcacactgagcggaattgggaccctggatgggttccgacatcgtcatcccgatgaagcagcatttttcgataccgcctcgaccggaaagacatttccgggcttcttctctccgatgttgggggaatttgtcagcgagaccgaaagtagagggtctgaatctggaatattcaccaacacgaaggaatccagctctcatcatcctggaatcgctgaattcccgtcgaggggcaagagttcatcatatagcaagcagttcacgtcaagcaccagttataatagaggggactccaccttcgagtcaaaaagctacaagatggcagatgaagccggctctgaagcagaccacgagggcacacacagtaccaagcgaggacacgcgaagagtagaccggtgcgagattgcgatgacgtactgcagacgcacccaagcggaacccagtccggaatcttcaacatcaagcttcctggctcctcaaagatcttctccgtatactgcgatcaggagaccagcctcggagggtggcttctaattcagcagcgaatggatggatctctgaacttcaatagaacgtggcaggattataagcgtgggttcgggtcattaaatgatgaaggagagggggaattctggctcggcaatgattacctacacttgctaacacagagagggtccgttctgagagtagagctagaagattgggcgggaaatgaggcctatgctgaataccatttccgggtgggatcagaggcggaaggatacgcacttcaggtttcctcctatgaaggcaccgctggcgatgcactgatcgaaggcagcgtggaggaaggtgccgagtacacgtctcacaataatatgcaattcagcacatttgatagggacgccgatcagtgggaggagaattgcgctgaggtatacggcggggggtggtggtataacaattgtcaggctgcaaatttgaacggtatatactaccctggcgggtcctatgacccacgaaacaatagcccttacgaaatagagaacggcgtggtttgggtttcatttcgaggggcggactactcactgcgagccgtcaggatgaagatccgacccctggtgacgcaa

SEQ ID NO: 10433 - DNA, 2598 bp, Artificial Sequence
  derived and/or modified sequence
atgttttcaatgcggattgtgtgcttggttctctcagtggtcgggacagcctggaccgccgattccggcgagggggattttctcgccgaaggtggaggagtgcgcggaccccgcgtggtggagcgccaccagtctgcttgtaaggattccgactggccattttgttctgatgaggattggaactataaatgccctagtggttgccgaatgaagggattgatcgacgaggtgaaccaggacttcacgaaccgtatcaacaagctaaaaaattcattgttcgaatatcagaagaataataaagattcccactcattgaccaccaatatcatggaaatcctcagaggtgatttttcatccgcgaataatcgagataatacatacaaccgggtgtcggaagatctgaggtctaggatcgaggtcctaaaacgcaaggtaatagagaaggttcagcatattcagttactacagaaaaacgtccgggcccagttggtcgatatgaagaggctggaagtagacattgacatcaaaatcaggtcttgcagaggcagctgctccagagcccttgctagggaggttgacttaaaagactatgaggaccagcagaaacagttagaacaagtcatcgcgaaggacttgttaccctcaagggacagacaacacttaccattaataaaaatgaaacccgtacctgatctggtgcccggaaacttcaaatcccagttgcaaaaggtgccaccagagtggaaggcccttactgacatgccccagatgagaatggagttagaaagacctggaggcaacgagatcactagagggggtagcacatcctacgggacgggtagcgagacggagtctccccggaacccctcctccgcaggctcttggaactctggtagctctggacccggttcaaccggtaacaggaatcctggtagcagcggaacaggggggaccgccacttggaagcccgggtccagcggaccgggcagcaccggttcttggaatagcggcagcagtggaacagggagcaccgggaatcagaatccagggagcccccggcccgggtctacaggaacgtggaatcccggcagcagtgagcgaggatcagcaggccactggaccagtgaatcatccgtctcaggatcaaccggacagtggcacagcgagtctggctcttttaggccagattctcctggctctggcaacgccaggccaaacaatccagattggggcacctttgaagaagtgtctggaaatgtgagtccaggaacccggcgggagtaccatacagagaaactggtcaccagtaaaggagataaggaactgaggaccggaaaggagaaggtgacgagcggttccacaacaaccacgcggcggtcttgtagcaaaactgtgacgaaaaccgtgataggccccgacgggcacaaagaggtcactaaggaagtcgtcacctcagaagatggatccgattgtcccgaagctatggatctgggaacactgtctggaattggaacccttgacgggttccggcatagacaccccgacgaggcagcgttctttgacacagcctccaccgggaaaacttttccagggttcttctccccaatgctcggagagtttgtatctgagacagagagcaggggttccgagagtggaatttttaccaatacaaaggagtcaagctctcaccatccgggcattgcggagtttccctcccggggtaaatcaagctcttattccaaacagtttacctcttccacctcatacaaccgaggcgacagcacatttgaaagcaagtcctacaagatggctgacgaagctggctctgaggcagaccacgaaggaacacactccaccaaacgggggcacgccaagagtcggccggtgcgcgactgtgatgacgtcctccagacccaccccagtggcacccagtccggtattttcaatatcaaactccccggtagtagcaagatcttctcggtttattgtgatcaggagacgagcctgggcgggtggttgcttatccaacagagaatggatgggtctctaaatttcaataggacatggcaggactataagcgtggttttgggtcactcaacgatgaaggggaaggcgagttttggttgggaaacgactatctgcacttgcttacacagaggggaagcgtgctcagagtggaactggaagactgggctggcaacgaggcttatgccgagtatcattttcgcgttggaagtgaggccgaagggtatgcattgcaggtgtcgtcatacgaaggaacagccggagatgcgctcattgagggctcagtcgaggagggcgccgaatacactagtcacaataacatgcagttctccacgtttgaccgcgatgccgaccaatgggaagaaaactgcgctgaggtctacgggggaggctggtggtataataactgtcaggcagccaacctgaatggcatctattatcccggtgggagctatgacccccgtaacaactccccgtatgaaatcgagaacggcgtggtctgggtgtctttccgcggagccgattactccctgcgggcagtaagaatgaaaattcggcccctggtgacacaa

SEQ ID NO: 10434 - DNA, 2598 bp, Artificial Sequence
  derived and/or modified sequence
atgttttcaatgcgcatcgtgtgtctggtgctgagcgtagtgggcacggcctggactgccgatagtggggaaggcgacttccttgcagagggcgggggtgtgaggggacctagggtggtagaaagacaccaatccgcctgtaaggatagcgactggcctttttgtagcgatgaggattggaactataaatgcccatcaggttgcaggatgaagggcctgattgacgaggtcaatcaggatttcacaaatcggatcaacaaattaaaaaacagcttgtttgagtatcagaagaacaacaaggattctcatagcctgaccactaacatcatggagatcctccgtggggacttttcaagtgccaataacagggacaacacatataatcgggtctccgaggatttacggtctcggattgaggtgctgaaaagaaaggttatcgaaaaagttcagcatattcagctattgcagaagaatgtacgtgcccaactcgtggacatgaagagactggaagtggatatcgatattaaaatccggtcttgcagagggtcctgtagtagagccctggctcgggaggtcgacctcaaggactacgaggaccaacaaaaacagctagaacaggtgattgccaaggaccttctcccatctagagatcgtcaacatcttccgctgatcaagatgaagcccgtgcccgacctggtgcccggtaacttcaaatcgcagcttcagaaggtccccccggagtggaaggctctgactgacatgccacaaatgcgcatggagctggagcggcctggcggtaacgaaattaccagggggggcagtacctcctatggcacaggatccgagaccgaatctccccggaatccttcttccgctggctcgtggaatagcggtagttcaggccccggttcgactggaaacagaaacccaggtagtagtgggacaggcggaacagccacctggaagcctgggtccagcggacccggttcaactggctcttggaatagcggaagcagcggtactggcagtaccggcaaccagaatcccggatctcctcgcccagggagtaccgggacgtggaaccccggttcatcggaaagaggcagtgccgggcactggacgtccgagagctcagtatctggctctaccggtcaatggcatagtgaaagtggcagttttaggccagacagtcccggatctggtaacgcaagaccaaataaccctgactggggcacatttgaggaagtgtcagggaatgtgtcacctggaacgaggagggagtaccacactgagaagctggtgacgtctaagggtgataaggaactgcgaacaggaaaggagaaagttacatctgggtcaacaaccactactcggcggagttgcagcaagactgtgacaaaaaccgtgatcgggcccgacggacacaaagaagtcactaaagaagtcgtgacatctgaagatggcagtgattgtcccgaggcgatggacctaggcacactgtcgggtattggcacgctcgacgggttccggcaccgccaccccgatgaggcagcttttttcgacaccgcttctacaggtaagacattcccaggcttcttcagcccgatgctgggcgaatttgtatctgagactgagtcgaggggttcagagtctggcatctttactaatactaaggagtcttctagccaccaccctggaattgctgaatttccatcgaggggcaagagctccagctactccaagcagtttacctcaagcacatcttataaccgcggcgattcgacattcgaatccaagtcctacaagatggcagacgaggccgggagcgaggctgatcacgaggggactcattctacaaagagaggacatgccaagtctcgccctgtgcgtgactgtgacgacgtccttcagacacacccatccggtacgcagtccgggattttcaatattaaattgcctggatccagcaagatcttttctgtctactgcgaccaagagactagtctgggcggatggctgttaattcagcaacgtatggacggatccctgaacttcaaccgtacctggcaggattataagcgaggcttcggctctttgaacgacgagggggagggagagttctggttaggaaacgactatctacacctgctgactcaacgaggctccgttttgagagtggagctggaagactgggccgggaacgaggcttacgcagagtaccattttcgcgtgggatcagaggccgaggggtacgccctgcaggttagctcatacgagggcactgcaggtgatgctcttatcgagggaagtgtggaggagggagctgagtacacatcacataacaacatgcagttcagcactttcgatcgagatgcagatcaatgggaggagaactgcgcagaagtgtatggcggtggctggtggtacaataactgccaggctgcaaacctcaacggaatatactaccctggcggtagctacgacccaaggaataacagcccatatgagatagagaacggggtggtgtgggtgagtttccgaggtgctgattattccttacgggctgtacgaatgaagatccggccattggtcactcag

SEQ ID NO: 10435 - DNA, 2598 bp, Artificial Sequence
  derived and/or modified sequence
atgttttccatgaggattgtctgccttgtcctgtctgtggtggggacggcatggaccgccgactcgggcgagggagattttttggccgagggtgggggggtgaggggaccacgcgtcgtcgagcggcatcagagcgcctgtaaggactccgactggccattctgctctgatgaagactggaactataaatgcccgagcggatgcagaatgaaaggcctgatcgacgaggtgaatcaggatttcaccaatagaatcaacaagctgaagaatagtctcttcgagtatcagaaaaacaataaggacagtcactcattgactaccaatatcatggaaatcctgcgaggcgacttctcgagcgccaacaaccgcgataacacctacaaccgcgtctcagaggatctgcgctcgagaattgaagttctaaagcggaaagtgattgagaaagtgcagcatatccaactgctccagaaaaacgtgagggctcagctagtcgatatgaagcgcctcgaagttgatatcgatatcaagataaggtcatgccgggggtcatgtagtagagccctggctcgggaagtggaccttaaggactacgaagaccagcagaagcagctagaacaagtgatcgccaaagacttgttacctagcagagatcgccaacatcttcccctcatcaagatgaagccagtcccagatcttgtgccaggaaacttcaaaagccagttacagaaggtgcctcccgagtggaaagccttgacagacatgccccagatgaggatggagctggagcggccaggaggtaacgaaatcaccagaggtgggtcaacctcatatggtaccggcagcgaaaccgaaagccctcggaatccgagttccgctgggtcctggaattcggggagctccggcccaggatccacgggcaacagaaaccccggcagctccgggacaggtgggacagcaacctggaagcctggatcctccggaccgggaagtacaggatcctggaactcagggtcgagcgggacgggcagtacagggaatcagaacccaggtagtccccggcccggctccaccggaacttggaatcccggcagctccgagcgaggttcggccgggcactggaccagtgaatcgtcagtaagcggtagtacaggtcagtggcactccgaatcgggcagttttcgtcccgactcccccgggtcaggtaatgcacgcccgaataaccccgactggggtacgtttgaggaagtcagtggtaacgtgtctcccggcacccgcagggagtaccacaccgagaagctggtgacgagcaagggagacaaggagcttagaacgggtaaggagaaagtgacatccgggagcaccacaaccacacggcggtcatgcagcaaaacagtgaccaagaccgtgattgggccagacggtcacaaggaggtcactaaagaagtggtaacatccgaggatgggtccgactgtcctgaggcaatggatcttggaaccttatccgggatcggaaccttagacggatttagacacagacaccccgatgaggccgcattctttgataccgcctctaccggcaaaacctttccgggcttttttagcccgatgttgggcgagtttgtcagcgaaacagagagcaggggcagtgagtcaggaatttttaccaacacgaaagagtccagcagccaccaccctgggatcgctgagttccccagcagaggtaagagctctagttactccaaacaattcaccagctctacgagctataatcgaggggatagtacgttcgagtctaaatcttacaagatggccgatgaggcgggctctgaagcagaccacgaaggcactcactcaactaagaggggccacgccaaaagcaggccggtacgagactgcgacgatgttttgcagactcatccaagcggcacacaatcaggaatattcaacattaaactgccgggctcttcaaagatattcagcgtatactgcgatcaggagacctctctcggcggatggctgctgattcaacagcgcatggatggatctctcaatttcaatcggacctggcaggattataagcggggctttggaagcctgaatgatgaaggggagggcgaattttggctggggaatgactaccttcacctgctgacgcagcggggcagtgtgctgcgcgtggaattggaagactgggccggaaacgaggcatatgccgagtaccacttcagagtgggatccgaagctgagggttatgctctgcaagtgtcaagttatgaaggcacagccggggacgccctcatagaaggcagcgtggaagagggggctgaatatacttcccacaataacatgcagttctcaactttcgaccgggacgcagatcagtgggaagagaattgtgcggaggtgtatggcggcggatggtggtataataactgccaggccgccaatctgaatggaatttattatcccgggggctcttacgatccaagaaacaattctccatacgagattgagaacggtgtggtgtgggtttccttcaggggcgccgactatagtctgagggccgtgcgaatgaaaatccgccctctggtaacgcag

SEQ ID NO: 10436 - DNA, 2598 bp, Artificial Sequence
  derived and/or modified sequence
atgttctctatgagaatcgtttgtttggtgctctccgttgtcggcacggcttggacagctgactcaggcgagggggacttcttggctgaggggggaggtgtgcgtggccctagggttgtggaacggcatcagtctgcatgtaaagactcagattggccattctgcagcgatgaggattggaattataaatgtccgtctgggtgtagaatgaagggccttatcgacgaggttaaccaagactttaccaacaggattaataagctgaaaaactctctgttcgaataccagaagaataacaaggacagccacagtctgacgacaaatatcatggagattttacggggcgatttctcttcggccaacaatcgcgacaatacctacaaccgggtgtcggaggatcttaggtctagaattgaggtactgaagcggaaagtgattgagaaggttcagcacattcagttgcttcagaaaaacgtacgggcccagctggtcgacatgaaacggctggaggtggatattgacatcaaaattaggtcttgcaggggttcttgtagccgggcactggctcgtgaggtggacctgaaagactacgaggatcagcagaagcagttggagcaggtgatcgccaaggatttacttccgagccgcgacagacaacacctgcctcttattaagatgaaacccgtccctgatctagttccggggaatttcaaatctcagctgcagaaagtcccacctgagtggaaagccctgacggacatgccccagatgaggatggaactagaacgccctggggggaatgagatcacgcgtggagggtccacctcttatggaactggttctgaaacagagtctccgagaaatccttcatctgccggctcatggaatagtggctctagtggccctgggagtacaggtaacagaaaccccggcagctctgggactggaggaactgcaacatggaaaccgggatcatccggtccaggctctactgggagctggaactctgggtcaagcggtaccggctccacagggaaccagaacccagggtccccccggccgggctcgacagggacatggaacccaggcagttcagaacgcggctccgccggccactggacgtcggaaagcagcgtgagcggctcaacagggcagtggcattcagagtcaggctcttttcgccccgattccccaggcagtggcaatgctcgtcctaacaaccccgactggggtacttttgaagaggtgagcggtaatgtcagccctgggaccagacgggaatatcacactgaaaagctggtgacatcgaagggggataaagagctgcgaacagggaaagagaaagtcaccagtggtagcaccacaactacgcgcagaagttgctccaagaccgtaactaagacggttattgggccagatggacacaaagaggtaaccaaggaggtagtcacctccgaagatgggtcagactgccctgaagccatggatcttgggactttaagcggcatcgggacacttgacgggttccggcatcgccatcctgacgaagccgctttctttgatacagcaagtacagggaagacgtttccaggtttcttcagcccaatgttgggcgaatttgtgtcagagacagaatctcgcggttcagagagcggtatattcactaacacgaaggagagttcctcacaccaccctgggattgccgaattcccctccaggggtaagtcaagctcctactccaagcagttcactagctcaacaagctataaccggggagattccacgtttgagtcgaaatcctacaagatggcggacgaggctggctctgaagcagatcatgaggggacacatagtaccaagcgaggtcatgccaagtcacgaccagtgagggactgtgatgatgtgctgcagactcatccttccggaacgcaatccggaatatttaatattaagttgccgggatcctcgaagattttttctgtatactgcgaccaggagacatcactgggcggctggctgctgatccagcagcgaatggacgggagcctgaacttcaatcgcacgtggcaggattataaacgagggtttggtagtctcaacgacgaaggcgagggcgagttctggctgggcaatgactacctgcacctgctaacccagcggggcagcgtcctcagagttgagctcgaagactgggcaggaaatgaggcctatgctgaataccacttcagagtaggctctgaggccgaggggtatgctctccaggttagctcatacgagggtacggccggcgatgcacttattgaggggtctgtggaagaaggcgcagagtacaccagccacaataacatgcagtttagtacttttgacagagacgccgaccagtgggaggaaaactgcgcggaggtgtacggtgggggctggtggtacaataattgccaggcagccaacctcaacggaatctactacccaggaggcagttatgatcccaggaacaactccccctacgaaattgaaaacggcgtagtatgggtgagcttcaggggcgcagactacagtttgagggccgtgcgcatgaagatcagacctcttgtgacccag

SEQ ID NO: 10437 - DNA, 2598 bp, Artificial Sequence
  derived and/or modified sequence
atgtttagcatgcggatcgtttgtttggttctctcggtggtaggaacagcttggacagctgattccggtgaaggggattttcttgccgaagggggcggtgtccgagggcccagagtcgtggagaggcatcagtccgcatgtaaagattctgactggccattttgctctgacgaggactggaattataaatgtcccagtgggtgccgcatgaaaggattgattgatgaggtgaatcaggacttcactaacaggataaataagctcaagaattccctgtttgagtaccaaaagaataacaaagattcacactcactgactacgaacattatggaaatcttacgcggtgatttcagctcagccaataatagagacaatacctacaaccgggtgagtgaagacctgcggtcacggatcgaagtgttaaagagaaaagtaatagagaaggttcagcacatccaactgctccaaaagaatgttagggcccagctggtggacatgaagcgcctggaagtggatattgacatcaagattagatcgtgccgtggaagctgcagccgggcactggctcgtgaggtggatctcaaggattatgaggaccagcagaagcaattagagcaagtgatcgctaaggacctgcttccctcccgggacagacaacacctgcccctgatcaaaatgaaaccagtaccagacttggtccccggaaattttaaaagtcagctgcagaaagtgccaccagaatggaaggcgttgaccgatatgcctcagatgcgcatggagctggaaagacccggcgggaatgagatcactcggggtgggagtacttcctacggtaccggtagtgagactgagagcccaagaaacccttcgtccgcgggaagttggaattcaggctctagtggtcctggctcaaccggcaaccgcaaccctggatccagcggtacaggcggaacagctacttggaagccaggctcctccggccccgggtcaactggcagctggaactccgggtcaagcggaaccggttcaaccggtaatcaaaacccagggtcccctcgacctggctctacagggacctggaaccctggaagtagtgaaagaggtagcgcaggtcactggactagtgagagcagtgtgtccggctcgacaggacagtggcattccgagtccggcagttttaggcccgacagcccgggctccggcaacgcacggcccaataacccggattggggcacgttcgaggaagtgagcggaaacgtcagcccaggaacacgaagagaataccacaccgagaagctggtcacctctaaaggagacaaagaactgagaacaggaaaggagaaagtgacaagtggttccacaactactacccgtcgctcctgtagtaaaaccgtcaccaagacagtcatcggccctgacgggcacaaagaagtgaccaaagaggtcgtaacctccgaggacggctcggactgtcctgaggccatggacttggggaccctgtcgggcattggtacactcgacggattccggcaccgacaccctgatgaagctgccttctttgataccgcctcaaccggcaagacctttcccgggtttttcagtccaatgttgggggagtttgtctctgaaaccgaatcgcgggggagtgagagtggaatcttcacaaatactaaggagtcatcctctcatcatccaggaatcgcagagtttccctctcgaggcaaaagctcatcttactccaaacagttcacaagcagcacctcatataaccgaggcgacagtacattcgaaagcaaatcttataaaatggccgatgaagccggttctgaagccgatcatgaaggcactcactcgacaaaaagaggccacgcgaagagccggcccgtgagggactgcgacgatgtgttacagacacatccctccggaactcaatccggaattttcaacatcaaactgcccggcagttctaagatcttcagtgtctactgtgaccaagaaacctccctgggcggctggctcctgatacagcagcgtatggatggctctcttaacttcaatcgaacttggcaggattataagagggggttcggctccctcaacgatgaaggcgaaggtgagttctggctgggcaatgactatctgcacctgttgacacagagaggatcagtgcttcgggtggaactcgaagactgggccggtaacgaagcctatgccgagtaccactttcgtgtagggtcagaggcagaaggctacgcccttcaagtgtcaagttatgaaggcacagccggggatgctctgatcgaaggctctgtcgaggaaggggcagagtacaccagccacaataacatgcagttttccacttttgatagggacgccgatcagtgggaagagaattgcgccgaggtatacgggggtggatggtggtacaacaactgtcaggcagccaacctgaacgggatatactatcctggaggatcttacgacccgcgcaacaatagcccttacgaaatagaaaacggagtggtgtgggtgagttttcggggcgcagattattccctgcgagctgtgagaatgaaaatccgtcctttggtcactcag

SEQ ID NO: 10438 - DNA, 2598 bp, Artificial Sequence
  derived and/or modified sequence
atgttttctatgcgcattgtgtgcctggtgctatcggttgtcggcacggcatggacagcagacagcggagagggagacttcctcgccgagggaggaggggtgagaggaccaagagtagtcgaacggcaccaatccgcgtgtaaggattctgactggcccttttgtagcgatgaagattggaattacaagtgtccctctggctgtcgcatgaaaggcttaatagacgaggtgaaccaagacttcacaaataggatcaacaaactcaagaatagtctgttcgagtaccagaagaataacaaagacagccattcgctcacaacgaacattatggagatcttacgcggtgattttagctcggccaataacagggataatacgtataaccgcgtctctgaagacctgcgctctcgtattgaggtgctcaagcgaaaagtgatagaaaaagtgcagcacattcagcttctgcagaaaaacgtacgcgcccagcttgtggatatgaaacgcttggaggtggacattgacatcaagatccggtcttgcaggggtagctgttcccgggcactggcacgggaagtcgatctaaaggattacgaggatcagcagaaacagctcgagcaagttattgctaaggacctcctcccaagtagggaccgacagcacctgcccctgatcaagatgaaacccgttcccgacctagtgccgggcaactttaagagtcagctccagaaggtcccaccagagtggaaggccctaaccgacatgccacaaatgagaatggagctcgaacgcccaggcggaaatgagatcacaaggggtggtagcactagctatggcaccgggtcggaaacagaatcccctcgcaatccatctagtgcagggtcctggaacagtgggtcctcaggtcccggaagcaccggcaaccggaacccaggaagctccggcaccgggggcactgccacatggaagccaggctctagtggcccaggcagcaccgggagttggaactccgggtcatcagggacaggaagcaccggaaaccagaacccaggttccccccggcccggcagcaccggcacttggaacccaggatcatctgagagaggctctgcaggccactggacatcagagtctagcgtgtcaggaagcactggtcaatggcattccgaaagtgggtctttcagacctgacagcccagggtccgggaatgctcggcctaataacccagactggggcacatttgaggaggtgtcgggcaacgtatcccccggaactcgccgcgagtaccatactgaaaaattggttacttccaagggtgataaagagttgcgtaccggaaaggagaaggtgacctcgggatcaaccactaccacccgcagatcatgtagcaaaacagttaccaaaacggttatcggtccggacggacataaggaagtcaccaaggaggtcgttactagcgaagatgggtcagactgtcccgaagccatggatctgggcaccctgtccgggataggcaccctagatggattccgtcatcgtcacccagatgaggccgcattttttgatactgcgtcgactgggaagacatttcccggcttctttagtcctatgcttggagagttcgtctcagaaaccgagtcccgcggcagtgagtcaggaatctttaccaacacgaaagagtcttccagccatcaccccggtatcgcagagtttccgagccgcggcaaatcaagctcttacagtaagcagttcacatcctctacatcttataatagaggcgactctaccttcgagtccaagtcttacaagatggccgacgaggcaggtagcgaagcagaccatgaggggacccacagcaccaaacggggacacgcaaagtcgcgcccagtgcgagattgcgatgatgtgctccagacccacccgagtgggacacagtccggaatcttcaatattaaattgcctggcagctccaagattttttctgtgtactgcgaccaagaaacaagcctcggagggtggctcttgatccagcagcgaatggatgggtcactcaactttaacagaacctggcaggactacaagaggggattcggatccctcaacgacgaaggtgagggtgaattttggttgggtaacgattatctgcacctgttgacacaaaggggttccgtactacgcgtcgagctggaggactgggctggtaacgaggcctacgctgaataccatttccgcgtggggtccgaagccgaggggtacgcattgcaagtaagttcatacgagggcacagctggggatgctctgatcgagggaagtgtggaggaaggcgcagaatacacatcacacaacaacatgcaattctctacctttgaccgggacgccgatcagtgggaggagaattgtgcagaggtgtacgggggcggctggtggtacaacaactgccaagctgccaacctgaacggcatttactaccctggtggatcttatgacccaagaaataatagcccctatgagatagaaaacggtgttgtttgggtctcctttcggggcgctgactactctctgagggctgtcaggatgaaaatccggcctctggtcacccag

SEQ ID NO: 10439 - DNA, 2598 bp, Artificial Sequence
  derived and/or modified sequence
atgttctctatgagaattgtatgcctggtgctgtccgtagtggggactgcatggaccgctgattccggagagggggatttccttgctgagggcggcggggtacgcggaccacgggtggtggagcggcatcagagcgcatgtaaggactccgattggcccttttgctccgatgaggactggaattataagtgccccagcggatgccgaatgaaaggactgatcgacgaagtcaaccaggacttcacaaataggatcaacaagctcaaaaactccctgtttgaataccaaaaaaacaacaaggacagtcatagtctcacaaccaatattatggaaattcttcgcggcgatttctcatccgccaacaatcgggacaacacttacaaccgcgtgtccgaagacctgaggagtaggatagaggtcttgaaaagaaaggtgattgagaaagtgcagcacatccagttgttgcaaaagaatgtgagggcccaattggtggatatgaaaagactggaggtggatatcgatattaaaataagaagttgtcgcggaagttgctccagggcactggcccgggaggttgatctgaaagattacgaagaccagcagaagcagctcgaacaagtgattgcgaaggatcttctcccaagcagggaccggcaacatcttcctctcattaaaatgaaaccggtcccagacctggtccccggaaacttcaagagccagctgcagaaagtcccgcccgaatggaaggcccttacagacatgccgcaaatgcggatggagcttgaaagacctgggggcaatgagatcacaaggggcggctcaaccagctacggaactggttcagagaccgaaagtcctaggaacccatctagtgcagggagctggaatagtggatcatcaggccctgggagcacaggcaataggaatccaggtagcagcggaactggtgggacagctacatggaaacccgggtcatctggacctggctccacagggtcttggaacagtggcagctctggcaccgggtctaccgggaatcagaacccggggtccccacggccgggatctacaggtacctggaaccctgggagctcagaaagagggtcagccggacactggacttccgagagttcagtgtcaggcagcactggacagtggcatagcgagagcggatcttttcggccagatagtcctggaagtggcaacgcccggcccaataatcccgattggggtaccttcgaagaagtcagtgggaacgtatctcctgggacccggcgggaataccacacagagaaactggtcacttcaaagggagataaagagctccggacaggcaaggaaaaggtgaccagcggttccactacaacaacaaggaggtcttgttccaaaacggtcacaaaaacagtgatcgggccagatggacacaaggaagtgactaaagaagttgtaacaagcgaagacggctctgattgtcctgaggcgatggacttgggcacccttagcggtattggtacactggatgggtttcggcataggcatccggacgaggccgccttcttcgatacggcttctaccgggaaaacattccccggcttcttttctcccatgctgggagaatttgtgagcgagacagaaagtcgagggtctgaatcaggcattttcacaaacacaaaggagagttccagtcaccatcctgggattgctgagttccctagtaggggcaagtctagtagctacagcaagcagtttacaagttccacctcttacaacagaggagactccacctttgagtctaaaagttacaagatggccgacgaggcgggctccgaggcagaccacgaaggcactcactcaactaagagaggtcatgctaaatccaggcccgtgagggattgcgatgatgtgttgcagacacacccaagcggtacgcagagtgggatttttaacattaagctgcctggatcttctaagatcttctcagtttattgcgatcaagagaccagcctgggtgggtggctgctgattcagcagagaatggacgggtccctgaacttcaaccggacctggcaggattacaagaggggattcgggtctctgaacgacgagggggagggcgagttttggctggggaacgattatctgcatttgctgactcagcgggggagcgtattgagagttgagctcgaagactgggccggcaatgaagcttacgctgagtatcacttccgcgtcggctccgaggccgaagggtacgcactgcaggtatcttcttacgaaggaaccgccggagatgccctgatcgaggggtccgtagaggaaggggccgagtatacttctcataacaatatgcaattctcaactttcgatcgggacgcggaccagtgggaagaaaattgtgctgaggtatacggaggtgggtggtggtataacaattgtcaggccgcaaatctgaatggtatctattaccctgggggatcttatgaccctcgaaacaactctccttacgaaatcgagaacggggtggtatgggtatcttttcgaggggctgactattcattgcgggccgtccgaatgaagatacgaccactcgtgactcag

SEQ ID NO: 10440 - DNA, 2598 bp, Artificial Sequence
  derived and/or modified sequence
atgttctctatgaggattgtgtgtctagtgctaagcgtggtgggaaccgcatggacagccgactccggggagggggatttcttagccgaaggtggaggggtgagaggtccgcgcgtcgtggagcggcaccaatccgcctgcaaagactctgactggcccttctgttctgatgaggattggaactacaaatgcccttcgggctgcaggatgaaagggctcatcgatgaagtgaatcaggattttacaaaccggattaacaagctgaaaaacagcttattcgagtaccagaaaaacaacaaggacagccacagcttgaccactaacatcatggagattctgcggggcgatttttcttctgcaaataaccgagacaacacttacaaccgggtctccgaggatttgcgatcccgcatcgaggtgttgaagcggaaggtgatagaaaaggtgcagcacattcagctcttgcagaaaaacgtgcgtgcacagctagtagatatgaagcgcctcgaagttgacatcgatatcaaaataagaagctgccgcgggagctgttctcgggccttggctcgggaggttgatctgaaggactacgaagatcagcagaaacagctcgaacaggttattgccaaggacctcctgccttcaagagaccgccaacacctgcccctcataaagatgaagcccgtgcccgacctggtgcctggcaattttaagagtcagctccaaaaagtgcctccagagtggaaggccctgacagacatgcctcagatgagaatggagcttgagcgaccgggaggcaatgagatcacaagaggcgggtccacttcatatggaaccggatctgaaaccgagtcacctcggaacccgtcatctgccggaagttggaatagcggcagttccggacctggcagtactggaaacagaaacccaggatcctcgggaactggaggcacagccacatggaagccaggttccagcggtcccggcagtactggctcctggaacagcggctcctccgggacaggatctaccggcaatcaaaaccccgggtccccaagacccggatccacgggtacatggaacccagggagttccgaaaggggatctgccggccattggacctctgagtctagcgtgtctggttcaactgggcagtggcacagcgaaagcggtagctttagacccgatagtccaggctccggcaatgcccgcccaaataaccccgactggggaactttcgaggaagtgagcgggaatgtgtcccctgggactcgaagagagtatcatacggagaagctcgtgacctccaagggggataaagagttgaggacgggaaaagaaaaagtgacttccggctccaccactaccaccagaaggagctgctctaagacagtcacaaagactgtcattggacccgacggccacaaagaggtcaccaaggaggtcgtgactagcgaagacgggtctgactgccccgaagccatggatctcggaacgctctccggtatcggaaccctagatggatttaggcaccgacatccggacgaagctgccttcttcgatactgcttccacgggcaagacgttcccgggttttttctcgccaatgctcggtgaattcgtgtctgaaaccgaaagccgaggctctgaatctggaatatttaccaataccaaggaaagctcttcgcaccatccgggaatcgctgaattcccctctagggggaagagctccagctactctaagcagtttactagctctacctcatataacagaggcgacagcacttttgagtccaagtcctataaaatggccgacgaggcaggctccgaggcagaccacgaaggtactcacagtacaaaacgaggccatgctaaatcaagacccgttcgcgattgtgatgatgttttacagacacatcctagcggtacccagtctggaatcttcaatatcaagctgccaggatccagcaagattttttctgtgtattgcgatcaagagacaagtctcggtgggtggttgcttatccaacagaggatggacggtagtcttaactttaataggacctggcaggattataagaggggttttggctctctaaacgacgaaggtgagggcgagttttggctgggcaacgattatttacatctgctgacgcaaaggggcagtgttcttcgcgtggaactggaagactgggcaggtaacgaggcctatgcagaatatcacttcagggtgggctctgaggctgaagggtacgccctgcaggtttccagctacgagggcaccgccggcgacgcactgatagagggaagcgtagaggagggagcggagtacacatctcacaataatatgcaattctcgaccttcgatagagatgcggatcagtgggaagaaaactgcgccgaggtttacggagggggatggtggtataataattgccaagcagcaaacctcaatggcatatactaccccggcggaagctacgaccccaggaataatagcccatacgagatcgaaaatggggtggtgtgggtctccttcagaggagccgactattccttgcgcgcagttcggatgaagatccgccccttggtgacacaa

SEQ ID NO: 10441 - DNA, 2598 bp, Artificial Sequence
  derived and/or modified sequence
atgtttagcatgcgaattgtttgtctggtgctgagtgttgtgggtactgcgtggactgccgattccggagagggtgacttccttgcagaaggcggcggtgttcgcggccctcgggttgtggaaaggcatcagtccgcgtgcaaagattcggactggcctttctgtagcgacgaagactggaactataagtgtcctagtgggtgcaggatgaaaggcctgatcgatgaggtgaatcaagactttaccaaccgcatcaacaaactgaagaactccctattcgagtaccaaaagaacaacaaagattcgcattctttgaccacaaacattatggaaatcctgcgaggtgactttagctctgccaataaccgcgataacacttataaccgtgtcagcgaggatctccggagccgaattgaggtcctgaaacgcaaagtcatcgagaaggttcagcatattcaactcctgcaaaagaatgttcgcgcacagctggtcgacatgaaacgtctcgaagttgatattgacatcaaaatccggtcctgtagagggagctgtagccgcgctctggctcgcgaggttgacctgaaggactacgaggaccaacagaagcaactggagcaggtgatcgcaaaagatctcctgcctagtcgagacaggcagcacctgccattgattaagatgaaaccggtgcctgacctggtacctggcaacttcaagtctcaactgcagaaggtgccaccagagtggaaagctctgactgatatgccgcaaatgcggatggaattggaacggccaggcggcaacgagatcacccgcggcgggtctactagctatggcaccggctccgagacagaatcaccgcggaatccgtcgagcgccggcagctggaacagcggctcgagcggtccaggcagcacgggtaataggaacccgggaagcagcggaaccggtgggacagctacctggaagcctggttccagtggtcccggctccactggatcatggaattcaggcagctccggcacgggttcgacggggaaccaaaaccccggcagcccacgccctggaagcacgggcacctggaatccaggtagtagcgagcgcggaagcgccggtcactggacgtccgagagcagcgttagcggatcaactggccagtggcacagcgaatccggctcatttcgcccagacagcccaggtagcggtaacgcccgtcccaataatccggattgggggacgtttgaagaggtcagcggaaacgtaagcccaggtacccggcgggaatatcacacagaaaagttggtgaccagcaagggagacaaagagctacgcacgggtaaagaaaaagttacctccggcagcaccacgactacgcgtcgatcatgctcgaaaaccgttacaaagaccgtgatcggccccgatggacataaggaggtcaccaaggaggtcgtaacgagtgaggatgggtccgattgccctgaagcgatggacttgggcacgttaagcggaatcggcacccttgatgggtttcgtcaccgtcacccggacgaagctgcgtttttcgatacggccagcaccggtaagacctttcctggattcttttccccgatgctgggagaattcgtgtccgaaaccgagtcccgcggctctgagagtggtatttttacgaacacgaaagaatcgagcagccaccatccaggcattgcagagttcccgtcgcggggtaagagctcttcctattctaaacagttcactagctccaccagctacaaccgcggcgattctaccttcgaatctaagtcttataaaatggcggatgaagcaggcagcgaagcagatcatgagggtactcacagcactaaacgtggccatgcgaagtcccggcctgtgcgtgactgtgacgatgtcctgcagactcatcctagtggaactcaatccggcatttttaatataaaactcccaggctctagcaagatattctcagtttactgtgaccaggaaacatcccttggaggttggctgttgatccaacagcgcatggatggcagccttaattttaaccgcacctggcaggattataagagggggttcgggtcgctgaatgatgaaggtgagggtgaattctggcttggcaatgattacctgcatctgttaacacagcgaggcagcgtgctgcgcgtggaactggaagactgggccggtaacgaagcgtatgcagaataccacttccgcgtcggcagtgaagcggagggatacgcactgcaggtaagctcctacgagggtacagcgggcgatgctttgattgaggggagcgtggaggaaggtgctgagtatactagccacaataatatgcagttcagcaccttcgatcgtgacgcggatcagtgggaagagaattgcgcggaggtgtatggcggcggttggtggtacaacaattgtcaggccgcgaatctaaacggtatttactatccaggcgggagctacgatcctcgcaacaactctccatacgagatcgagaatggtgtagtgtgggtcagctttcgcggtgcagactattcccttcgcgccgtgcggatgaagattcgacccctggttacccag

SEQ ID NO: 10442 - DNA, 2598 bp, Artificial Sequence
  derived and/or modified sequence
atgttttctatgcgcatcgtttgcctggtactttcggtggtaggtaccgcgtggaccgcagattctggggaaggcgatttcctcgcggaaggtgggggggtgcgaggcccaagagtagtggagcgccatcagtccgcctgtaaagactcagactggcccttctgttcggatgaggactggaattataaatgtccctcaggatgccgcatgaagggtctgatagacgaggtgaatcaggacttcaccaatcggataaacaaactgaagaattccctgtttgaataccagaagaacaacaaggactcccattccctgacgacgaacattatggagattctcagaggcgatttcagtagcgcgaacaacagggacaacacatataacagagtgtctgaagatttaagaagtcgcatagaggtgttgaagagaaaggttattgaaaaagtgcaacatattcagttgctgcagaagaatgtgcgtgcccagctggtcgatatgaagcgtctggaagtcgacattgatattaagatacgatcatgtcgtgggagctgttcacgggcattagccagagaggtggacctgaaggactacgaggatcagcagaaacagcttgagcaagtgattgcaaaggacctgctcccatctagagatcggcagcacctccccctgatcaagatgaagcctgttcctgacctagtacccggtaacttcaaatctcagctccagaaggtgcccccagagtggaaagcactaactgatatgccacagatgcgtatggagctcgagaggcccggagggaacgaaataacccgcgggggatcaacatcttatggtaccggctcagaaacagagtctcctagaaatccctcttctgcaggatcttggaatagtgggagcagtggccccggcagtaccgggaaccggaaccctgggagttcaggcactggcgggaccgccacgtggaaacccggatccagtggccctggaagtacggggtcgtggaattcaggaagctctggaacaggttcaactgggaaccagaatccaggaagcccaaggcccggaagtaccgggacatggaaccctgggtcttcagagcgcgggtctgctgggcactggacatcagagtcaagtgtgagtggctcaactggccaatggcatagcgaatctggatcgtttcggcctgattcgccaggatcaggcaatgcaaggccaaataaccccgactgggggaccttcgaagaggtgtctggcaatgttagtcctggaacccggcgcgaataccacacagagaaattagtgacctcgaagggcgacaaggagctgcgaactgggaaggaaaaagttaccagcggcagtactaccacaacacgccggagttgttccaaaacagttacgaagacagtgatcggcccggatggccacaaagaagtgacaaaagaagtggtcaccagcgaggacgggagtgactgcccagaggcaatggatctgggaacgctgtctggtattggcactctagatggcttcagacaccgccatcctgacgaggctgccttcttcgatacagcttccacagggaagacgttccctgggtttttttcaccgatgcttggcgaatttgtgagcgagaccgagtctcgtgggagtgaatccgggatttttacgaacacgaaggagtcttcctcgcatcatccagggattgccgagttcccatcgcggggcaagtcaagcagctattctaaacagttcacgagctccacctcttataacaggggcgacagcacctttgaatccaaatcttataagatggctgatgaggccggttctgaggcggatcacgaaggtactcacagtacgaagagaggacacgccaagtcccgcccagtgagggattgcgacgacgtacttcagactcaccccagcggcacacagtcaggtattttcaacatcaaactgccggggtctagcaagatattctcggtttactgtgatcaagagactagtctgggcgggtggcttctaatacagcagcgcatggacggctcccttaacttcaaccgcacctggcaagattataagagaggatttggatcgctcaacgatgaaggggagggagagttctggctgggtaatgattacctgcaccttctgacacagagaggaagcgtgttgagggtggaactcgaagattgggccggcaatgaagcatacgcagaataccacttccgggtggggagcgaagccgaggggtatgcgttgcaggtcagctcctatgaggggacagctggagatgccctaatcgagggatctgttgaagaaggcgcggagtataccagccacaataacatgcagttctcaactttcgatagggatgcggatcagtgggaggaaaactgtgccgaggtctacgggggggggtggtggtataataattgccaggctgctaatcttaacgggatctattatcccgggggaagctacgatccccggaacaactcaccgtatgagattgaaaacggcgtggtgtgggtgtcattcaggggtgcggactactcgctcagggcagtcaggatgaagatcaggcctctggttacacag

SEQ ID NO: 10443 - DNA, 2598 bp, Artificial Sequence
  derived and/or modified sequence
atgttttccatgcggatagtatgtttggttctgagtgtcgtggggaccgcatggactgctgatagtggagagggggatttcctggctgagggcggaggagtgcggggcccaagagtcgtggagcggcaccagtctgcctgcaaggactcagactggccattctgctccgatgaagattggaactacaagtgtcccagcggttgcaggatgaaaggactcattgacgaagtgaaccaggatttcaccaatcggatcaacaagttgaagaattcgctgttcgagtatcaaaaaaataacaaagatagccacagcttgaccacaaacatcatggagatcctgcggggagacttctctagcgcaaataacagagataatacctataacagagtcagtgaggacctaaggtcaagaatcgaggtgctgaagagaaaagttatcgagaaagtccaacacattcaactgcttcagaaaaacgttcgggcccagctggtggatatgaaaaggctggaagtggacatagatattaaaatcaggagctgccgcggcagctgctccagggcattggcgcgcgaggtggatttaaaagattatgaggaccagcagaagcaactggaacaggtgattgctaaggacctactgccttcccgcgatcggcagcatctcccattgatcaaaatgaaacctgttcccgacttagtgcccggaaattttaagtcccagctccagaaggtgccaccagagtggaaggctctgacagacatgcctcagatgagaatggagcttgagaggccggggggcaatgaaatcacacgcggcggtagtacctcttacggtactggaagtgagaccgagagtcctcgcaacccctccagtgcaggtagttggaatagtggttccagtggtccaggcagcacaggcaatagaaacccaggcagtagtggcactgggggaaccgccacctggaagcccggctccagtgggcccgggtctaccgggtcttggaatagcggcagttcaggcactggcagtactggcaatcagaaccctggaagcccacgtcccggttccactggcacatggaatccaggttcctccgagcggggatctgcagggcactggactagcgagagttcagttagtggttcaactggccaatggcacagcgaaagtggctcttttcgtccagacagcccaggtagcgggaacgcaagacccaacaacccagactggggaacatttgaagaggtctccggtaatgtgtcacctggcacacgtagagagtatcacactgagaagctcgtgacttcaaagggggacaaagagctcagaacaggcaaggagaaggtgaccagcgggagtactacaacaacccggaggagttgcagcaagaccgtaactaagactgttatcgggcctgatggccacaaagaggtcacaaaggaggtggtcacgtctgaagacggctcagactgtcctgaagcaatggacttgggaacgttatcaggaatcggcacgctcgatggtttcagacacaggcatcctgatgaggccgcttttttcgacaccgcatcgacaggtaagaccttccccggttttttctctcctatgctgggggagttcgtttccgaaactgagtccaggggtagcgaatccggtattttcacgaatactaaggaatcctctagccatcacccaggcatcgccgaatttccgtcacggggcaagtcctctagttattctaagcagttcacctcctccacgagttataaccggggagactctacctttgaatccaagtcttacaagatggccgacgaagccggcagtgaggccgaccatgaggggactcactccacaaaaaggggacatgccaaatctagaccggttcgcgactgtgatgatgttctccagacccaccccagcgggactcagagcgggattttcaacatcaaactccctggtagcagcaaaatcttctctgtatattgcgatcaagagacatcattggggggctggttgctcatccagcagagaatggacggctccctgaatttcaaccgtacctggcaggattataagcgagggtttggttcgttgaatgatgaaggcgagggagaattttggctgggaaatgattatcttcacttgcttacccaacgaggctctgtgcttcgagtggaactggaggactgggctgggaatgaggcctatgccgagtatcactttcgggtggggtccgaggccgagggatacgctttacaggtgtccagttacgagggaaccgcaggcgatgccctgattgaaggttctgtggaagagggcgcagagtatacaagtcacaataacatgcagttcagcacctttgatagagatgccgaccagtgggaggagaactgtgctgaggtgtacggcgggggctggtggtacaacaattgccaggcggcaaatctgaacggcatctattacccaggtgggtcctacgatccacggaataattcaccttatgagattgagaatggcgtagtgtgggtgtcatttcgcggcgctgactacagccttcgagcagttcggatgaaaataagaccactggtgacccaa

SEQ ID NO: 10444 - DNA, 2598 bp, Artificial Sequence
  derived and/or modified sequence
atgttttcgatgcgaatagtatgtctagtactatcggtagtaggtacggcgtggacggcggattcgggtgaaggtgattttttagcggaaggtggtggtgttcgtggtccgcgagttgtagaacgtcatcaatcggcgtgtaaagattcggattggccgttttgttcggatgaagattggaattataaatgtccgtcgggttgtcgtatgaaaggtttaatagatgaagtaaatcaagattttacgaatcgaataaataaattaaaaaattcgttatttgaatatcaaaaaaataataaagattcgcattcgttaacgacgaatataatggaaatattacgaggtgatttttcgtcggcgaataatcgtgataatacgtataatcgtgtatcggaagatttacgttcgcgaatagaagtattaaaacgaaaagtaatagaaaaagtacaacatatacaattactacaaaaaaatgttcgtgcgcaattagtagatatgaaacgtctagaagttgatatagatataaaaatacgttcgtgtcgtggttcgtgttcgcgagcgttagcgcgtgaagtagatctaaaagattatgaagatcaacaaaaacaactagaacaagttatagcgaaagatttattaccgtcgcgtgatcgtcaacatctaccgctaataaaaatgaaaccggtaccggatttagttccgggtaattttaaatcgcaactacaaaaagtaccgccggaatggaaagcgctaacggatatgccgcaaatgcgtatggaattagaacgtccgggtggtaatgaaataacgcgtggtggttcgacgtcgtatggtacgggttcggaaacggaatcgccgcgtaatccgtcgtcggcgggttcgtggaattcgggttcgtcgggtccgggttcgacgggtaatcgaaatccgggttcgtcgggtacgggtggtacggcgacgtggaaaccgggttcgtcgggtccgggttcgacgggttcgtggaattcgggttcgtcgggtacgggttcgacgggtaatcaaaatccgggttcgccgcgaccgggttcgacgggtacgtggaatccgggttcgtcggaacgaggttcggcgggtcattggacgtcggaatcgtcggtttcgggttcgacgggtcaatggcattcggaatcgggttcgtttcgtccggattcgccgggttcgggtaatgcgcgaccgaataatccggattggggtacgtttgaagaagtttcgggtaatgtttcgccgggtacgcgtcgtgaatatcatacggaaaaattagtaacgtcgaaaggtgataaagaactacgtacgggtaaagaaaaagtaacgtcgggttcgacgacgacgacgcgtcgttcgtgttcgaaaacggtaacgaaaacggttataggtccggatggtcataaagaagtaacgaaagaagttgtaacgtcggaagatggttcggattgtccggaagcgatggatctaggtacgctatcgggtataggtacgttagatggttttcgtcatcgacatccggatgaagcggcgttttttgatacggcgtcgacgggtaaaacgtttccgggttttttttcgccgatgttaggtgaatttgtatcggaaacggaatcgcgaggttcggaatcgggtatatttacgaatacgaaagaatcgtcgtcgcatcatccgggtatagcggaatttccgtcgcgtggtaaatcgtcgtcgtattcgaaacaatttacgtcgtcgacgtcgtataatcgaggtgattcgacgtttgaatcgaaatcgtataaaatggcggatgaagcgggttcggaagcggatcatgaaggtacgcattcgacgaaacgtggtcatgcgaaatcgcgtccggtacgtgattgtgatgatgttttacaaacgcatccgtcgggtacgcaatcgggtatatttaatataaaattaccgggttcgtcgaaaatattttcggtatattgtgatcaagaaacgtcgctaggtggttggttactaatacaacaacgtatggatggttcgttaaattttaatcgaacgtggcaagattataaacgtggttttggttcgctaaatgatgaaggtgaaggtgaattttggctaggtaatgattatttacatctactaacgcaacgtggttcggtactacgagttgaattagaagattgggcgggtaatgaagcgtatgcggaatatcattttcgtgtaggttcggaagcggaaggttatgcgttacaagtttcgtcgtatgaaggtacggcgggtgatgcgttaatagaaggttcggtagaagaaggtgcggaatatacgtcgcataataatatgcaattttcgacgtttgatcgtgatgcggatcaatgggaagaaaattgtgcggaagtttatggtggtggttggtggtataataattgtcaagcggcgaatctaaatggtatatattatccgggtggttcgtatgatccgcgtaataattcgccgtatgaaatagaaaatggtgtagtatgggtatcgtttcgaggtgcggattattcgctacgtgcggtacgtatgaaaatacgtccgttagtaacgcaa

SEQ ID NO: 10445 - DNA, 2598 bp, Artificial Sequence
  derived and/or modified sequence
atgttcagcatgcgcatcgtgtgcctggtgctgagcgtggtgggcaccgcctggaccgccgacagcggcgagggcgacttcctggccgagggcggcggcgtgcgcggcccccgcgtggtggagcgccaccagagcgcctgcaaggacagcgactggcccttctgcagcgacgaggactggaactacaagtgccccagcggctgccgcatgaagggcctgatcgacgaggtgaaccaggacttcaccaaccgcatcaacaagctgaagaacagcctgttcgagtaccagaagaacaacaaggacagccacagcctgaccaccaacatcatggagatcctgcgcggcgacttcagcagcgccaacaaccgcgacaacacctacaaccgcgtgagcgaggacctgcgcagccgcatcgaggtgctgaagcgcaaggtgatcgagaaggtgcagcacatccagctgctgcagaagaacgtgcgcgcccagctggtggacatgaagcgcctggaggtggacatcgacatcaagatccgcagctgccgcggcagctgcagccgcgccctggcccgcgaggtggacctgaaggactacgaggaccagcagaagcagctggagcaggtgatcgccaaggacctgctgcccagccgcgaccgccagcacctgcccctgatcaagatgaagcccgtgcccgacctggtgcccggcaacttcaagagccagctgcagaaggtgccccccgagtggaaggccctgaccgacatgccccagatgcgcatggagctggagcgccccggcggcaacgagatcacccgcggcggcagcaccagctacggcaccggcagcgagaccgagagcccccgcaaccccagcagcgccggcagctggaacagcggcagcagcggccccggcagcaccggcaaccgcaaccccggcagcagcggcaccggcggcaccgccacctggaagcccggcagcagcggccccggcagcaccggcagctggaacagcggcagcagcggcaccggcagcaccggcaaccagaaccccggcagcccccgccccggcagcaccggcacctggaaccccggcagcagcgagcgcggcagcgccggccactggaccagcgagagcagcgtgagcggcagcaccggccagtggcacagcgagagcggcagcttccgccccgacagccccggcagcggcaacgcccgccccaacaaccccgactggggcaccttcgaggaggtgagcggcaacgtgagccccggcacccgccgcgagtaccacaccgagaagctggtgaccagcaagggcgacaaggagctgcgcaccggcaaggagaaggtgaccagcggcagcaccaccaccacccgccgcagctgcagcaagaccgtgaccaagaccgtgatcggccccgacggccacaaggaggtgaccaaggaggtggtgaccagcgaggacggcagcgactgccccgaggccatggacctgggcaccctgagcggcatcggcaccctggacggcttccgccaccgccaccccgacgaggccgccttcttcgacaccgccagcaccggcaagaccttccccggcttcttcagccccatgctgggcgagttcgtgagcgagaccgagagccgcggcagcgagagcggcatcttcaccaacaccaaggagagcagcagccaccaccccggcatcgccgagttccccagccgcggcaagagcagcagctacagcaagcagttcaccagcagcaccagctacaaccgcggcgacagcaccttcgagagcaagagctacaagatggccgacgaggccggcagcgaggccgaccacgagggcacccacagcaccaagcgcggccacgccaagagccgccccgtgcgcgactgcgacgacgtgctgcagacccaccccagcggcacccagagcggcatcttcaacatcaagctgcccggcagcagcaagatcttcagcgtgtactgcgaccaggagaccagcctgggcggctggctgctgatccagcagcgcatggacggcagcctgaacttcaaccgcacctggcaggactacaagcgcggcttcggcagcctgaacgacgagggcgagggcgagttctggctgggcaacgactacctgcacctgctgacccagcgcggcagcgtgctgcgcgtggagctggaggactgggccggcaacgaggcctacgccgagtaccacttccgcgtgggcagcgaggccgagggctacgccctgcaggtgagcagctacgagggcaccgccggcgacgccctgatcgagggcagcgtggaggagggcgccgagtacaccagccacaacaacatgcagttcagcaccttcgaccgcgacgccgaccagtgggaggagaactgcgccgaggtgtacggcggcggctggtggtacaacaactgccaggccgccaacctgaacggcatctactaccccggcggcagctacgacccccgcaacaacagcccctacgagatcgagaacggcgtggtgtgggtgagcttccgcggcgccgactacagcctgcgcgccgtgcgcatgaagatccgccccctggtgacccag

SEQ ID NO: 10446 - DNA, 2601 bp, Artificial Sequence
  derived and/or modified sequence
atgttcagcatgagaatcgtgtgcctggtgctgagcgtggtgggcaccgcctggaccgccgacagcggcgagggcgacttcctggccgagggcggcggcgtgagaggccccagagtggtggagagacaccagagcgcctgcaaggacagcgactggcccttctgcagcgacgaggactggaactacaagtgccccagcggctgcagaatgaagggcctgatcgacgaggtgaaccaggacttcaccaacagaatcaacaagctgaagaacagcctgttcgagtaccagaagaacaacaaggacagccacagcctgaccaccaacatcatggagatcctgagaggcgacttcagcagcgccaacaacagagacaacacctacaacagagtgagcgaggacctgagaagcagaatcgaggtgctgaagagaaaggtgatcgagaaggtgcagcacatccagctgctgcagaagaacgtgagagcccagctggtggacatgaagagactggaggtggacatcgacatcaagatcagaagctgcagaggcagctgcagcagagccctggccagagaggtggacctgaaggactacgaggaccagcagaagcagctggagcaggtgatcgccaaggacctgctgcccagcagagacagacagcacctgcccctgatcaagatgaagcccgtgcccgacctggtgcccggcaacttcaagagccagctgcagaaggtgccccccgagtggaaggccctgaccgacatgccccagatgagaatggagctggagagacccggcggcaacgagatcaccagaggcggcagcaccagctacggcaccggcagcgagaccgagagccccagaaaccccagcagcgccggcagctggaacagcggcagcagcggccccggcagcaccggcaacagaaaccccggcagcagcggcaccggcggcaccgccacctggaagcccggcagcagcggccccggcagcaccggcagctggaacagcggcagcagcggcaccggcagcaccggcaaccagaaccccggcagccccagacccggcagcaccggcacctggaaccccggcagcagcgagagaggcagcgccggccactggaccagcgagagcagcgtgagcggcagcaccggccagtggcacagcgagagcggcagcttcagacccgacagccccggcagcggcaacgccagacccaacaaccccgactggggcaccttcgaggaggtgagcggcaacgtgagccccggcaccagaagagagtaccacaccgagaagctggtgaccagcaagggcgacaaggagctgagaaccggcaaggagaaggtgaccagcggcagcaccaccaccaccagaagaagctgcagcaagaccgtgaccaagaccgtgatcggccccgacggccacaaggaggtgaccaaggaggtggtgaccagcgaggacggcagcgactgccccgaggccatggacctgggcaccctgagcggcatcggcaccctggacggcttcagacacagacaccccgacgaggccgccttcttcgacaccgccagcaccggcaagaccttccccggcttcttcagccccatgctgggcgagttcgtgagcgagaccgagagcagaggcagcgagagcggcatcttcaccaacaccaaggagagcagcagccaccaccccggcatcgccgagttccccagcagaggcaagagcagcagctacagcaagcagttcaccagcagcaccagctacaacagaggcgacagcaccttcgagagcaagagctacaagatggccgacgaggccggcagcgaggccgaccacgagggcacccacagcaccaagagaggccacgccaagagcagacccgtgagagactgcgacgacgtgctgcagacccaccccagcggcacccagagcggcatcttcaacatcaagctgcccggcagcagcaagatcttcagcgtgtactgcgaccaggagaccagcctgggcggctggctgctgatccagcagagaatggacggcagcctgaacttcaacagaacctggcaggactacaagagaggcttcggcagcctgaacgacgagggcgagggcgagttctggctgggcaacgactacctgcacctgctgacccagagaggcagcgtgctgagagtggagctggaggactgggccggcaacgaggcctacgccgagtaccacttcagagtgggcagcgaggccgagggctacgccctgcaggtgagcagctacgagggcaccgccggcgacgccctgatcgagggcagcgtggaggagggcgccgagtacaccagccacaacaacatgcagttcagcaccttcgacagagacgccgaccagtgggaggagaactgcgccgaggtgtacggcggcggctggtggtacaacaactgccaggccgccaacctgaacggcatctactaccccggcggcagctacgaccccagaaacaacagcccctacgagatcgagaacggcgtggtgtgggtgagcttcagaggcgccgactacagcctgagagccgtgagaatgaagatcagacccctggtgacccagtag

SEQ ID NO: 10447 - DNA, 2745 bp, Artificial Sequence
  derived and/or modified sequence
gggaaataagagagaaaagaagagtaagaagaaatataagagccaccatgttttcgatgagaattgtgtgtctcgtcttgtcagtcgtaggaaccgcgtggaccgccgacagcggggaaggtgatttcttggctgagggtggtggagtccgcggtcccagagtggtagaaaggcatcaatccgcatgtaaagacagcgattggccgttctgctcggatgaggactggaactataagtgcccttccgggtgtcggatgaaggggctcatcgacgaggtcaatcaggatttcactaaccgcatcaataagctcaaaaactcgctgttcgagtaccagaagaacaacaaggatagccactcgctgactacaaatatcatggaaatcttgcggggagacttctcaagcgcgaataatcgcgataatacgtacaaccgagtatcagaggacttgaggtcgaggattgaagtccttaagcggaaggtcattgagaaagtccaacacatccagttgctgcagaagaacgtacgggcgcagttggtggatatgaagaggctggaagtggacatcgacatcaagatccgatcctgtcggggatcatgctcacgagccttggcgagggaggtagacttgaaggactatgaggaccagcagaagcagttggaacaggtgattgccaaggacttgcttccgtcacgggatcggcagcacctccctttgatcaagatgaaacccgtgccggacctcgtgcccggaaacttcaagtcccagcttcagaaggtaccaccggagtggaaagcgcttacagacatgccgcagatgcggatggagttggagaggccgggaggaaacgaaattacgagaggcggctcaacatcgtacgggacaggttcggaaacagaatcgcccagaaatccatcgtcagcaggatcatggaacagcggtagctccggaccgggttcgacgggaaatagaaacccgggatcatcaggtaccggtgggactgcgacttggaagcccggttcgtcgggaccgggatcgactggatcgtggaatagcggctcctccggtactggatcgaccggaaatcagaatcctggttcgcctcggcctggctccaccggaacatggaacccgggcagcagcgaaaggggatcggctggacactggacgtcagagtcgtccgtgtcagggtcgacggggcagtggcactccgaatcgggatcgttccggcctgattcacctggctccggaaacgcaagacccaataacccggattggggtacgtttgaagaggtcagcggaaacgtatcaccggggacacggagggagtatcatactgagaaattggtgacatcgaagggagataaagagctcagaacggggaaggagaaggtgacgagcggatcaacgacgactactaggaggtcctgctcgaaaactgtaaccaagaccgtgattgggcccgacggccataaagaggtcactaaagaagtcgtgacctccgaggatgggtccgactgccccgaagccatggacctcgggacgctttccggaattgggacgttggacgggtttagacacaggcaccccgacgaagcagcgtttttcgatacggccagcaccggcaaaacgttccccgggttcttctcgcccatgctcggagagtttgtctcagaaacggagtcgcgcggttcggagagcggtatctttacaaatacgaaagagtcgtcgtcgcaccatcccggaattgcagaatttcccagcaggggcaaaagcagctcatactccaaacagttcacatcgtccacctcgtacaatagaggtgacagcacattcgaaagcaagagctacaaaatggccgacgaggcgggtagcgaggctgatcatgaaggtacacattcaacaaaacgcggacacgctaagtcgcgaccggtgcgggattgcgacgatgtcctccagacccacccctcggggacacaatcgggtattttcaatatcaaacttcccgggtcctcgaagatcttttcggtatattgtgatcaagaaacgtccttgggagggtggctccttatccaacaacgcatggacgggtcactgaactttaatcgaacgtggcaggattacaaacggggattcgggtcgttgaatgacgagggagaaggggagttttggctcggaaacgactacctccatctgctcacacagagaggtagcgtgttgagggtggaacttgaagattgggcgggaaatgaggcgtatgcggagtatcactttcgcgtcgggtcagaagcagagggatacgcacttcaggtgtcgtcgtatgaaggaacggctggggacgccctgattgaggggagcgtagaggaaggggcagagtatacgtcgcacaacaacatgcaattttccacattcgacagagatgccgatcagtgggaggaaaactgtgcggaggtgtacggcggtgggtggtggtataacaattgccaggcggccaacttgaatgggatctactatcccggaggctcgtacgatccacgcaataactcgccatatgaaattgaaaatggagtggtctgggtgtcgttccgaggagcagattactcgttgagagcggtcaggatgaagatcagacccttggtaacccaatgataagctgccttctgcggggcttgccttctggccatgcccttcttctctcccttgcacctgtacctcttggtctttgaataaagcctgagtaggaagg

SEQ ID NO: 10448 - DNA, 2601 bp, Artificial Sequence
  derived and/or modified sequence
atgttttccatgaggatagtttgtctagtcctttcggtggtgggtactgcctggaccgcagacagcggcgaaggcgacttccttgccgagggcgggggggtccgcgggccaagagtcgtggagcgacaccaaagcgcctgcaaggatagtgactggcccttttgttctgacgaagattggaattataagtgtccctccgggtgcaggatgaaaggcctgattgacgaggtgaatcaggatttcactaataggatcaataagctcaaaaactcgttgtttgaataccagaagaacaataaagacagccactcattaaccaccaacatcatggagatcctacgtggcgactttagtagcgcgaataatcgtgacaacacctacaaccgagtctcagaagatcttagatcaaggattgaggttctcaaaaggaaggtgattgagaaggttcaacacattcagcttttacagaagaacgtaagggcacagctcgtggacatgaagaggctcgaggtcgacatcgatattaagatcagaagctgcagaggctcatgcagccgcgctctggcgcgggaagtggaccttaaggactacgaagaccagcagaaacagctggaacaggtgattgcaaaagatctgctgccatcgcgtgatcgccagcatctgcctcttatcaaaatgaaacccgtacctgacctggtgcctgggaacttcaaaagtcaattacaaaaggtgcccccggagtggaaagccctcacggatatgccccagatgagaatggaactggaacgacctgggggtaatgagataacacggggtggttccacatcctatggtactgggagcgaaacagaaagcccgcggaaccccagctccgcggggtcctggaattctggatcctccggaccaggatccactgggaatcgcaaccccgggtccagcggtactgggggcaccgcgacctggaaaccaggaagttcagggcccggaagcaccggtagttggaattccggaagttctggtactgggtctaccggcaatcaaaacccgggcagcccgcggccaggatccacagggacatggaaccccggcagtagcgaaagaggctcagccggccattggacctctgagtccagtgtgtccggcagtacgggacaatggcacagcgagtctggctcctttcggcctgattctccaggatccggcaacgcccggcctaacaacccagactgggggacttttgaggaagtttcaggcaatgtctctcccggaacaaggagagagtaccataccgaaaaacttgtgacgagcaaaggcgataaggagctccggacaggcaaggagaaggtgacctcggggtcgacaaccactactaggcgctcttgctcaaagactgtgaccaagacagtcataggcccggacgggcacaaagaggtgactaaggaagttgtaacaagcgaggatggatctgactgccctgaagcgatggacctgggaactctctctggcatcgggacattagatggctttcggcatagacacccagacgaggctgcatttttcgacacagcgtcgacgggcaagaccttccctgggttcttttcgcctatgctgggcgagttcgtcagcgagacagagtctcgcggaagtgaaagtggaattttcacaaatacaaaagagtcaagttctcatcaccctggtatcgctgagttcccaagcagaggcaaatcctcatcatattccaagcagtttacgtcctccacaagctacaatcgtggggattccacgtttgagagcaaatcttacaagatggccgatgaagctggatctgaagccgatcacgaaggtacacacagcacaaagcgcggccacgccaaatcacgccctgtgagagattgcgatgatgtgctgcagacacacccgtccgggacgcagtccgggatcttcaatattaagctccccggctcctcaaagatattctcagtttactgcgatcaggagacgagcttaggaggttggctgttgattcaacagcgaatggatggctcacttaactttaaccgtacgtggcaggattataagcgtggattcggcagcctcaacgatgaaggtgaaggcgagttctggttgggtaacgattacctacatcttctgacccaacgggggtctgtcttgagggtggagctggaagattgggccggtaacgaggcctacgcagagtatcactttagagtgggtagcgaagccgaaggctacgccctccaggtcagctcgtatgaaggtacagccggcgatgcattaatcgagggaagcgtggaagagggagccgagtatacctcccacaacaacatgcagttctccactttcgaccgtgatgctgaccagtgggaggaaaactgtgccgaggtttacggcggggggtggtggtataataactgtcaggcagcgaacctgaacggcatctattatcctggaggaagctacgatcctcgaaacaattcaccatacgagatcgagaacggagtagtgtgggtgtccttccgtggcgctgattattctctgcgcgccgtccgaatgaagatcagaccacttgtgacccaatag

SEQ ID NO: 10449 - DNA, 2601 bp, Artificial Sequence
  derived and/or modified sequence
atgttctccatgagaattgtgtgcctggtgctgtctgtggtgggcacagcctggacagctgacagcggggagggggacttcctggccgagggcggcggcgtgcggggcccccgggtggtggagcggcaccagagcgcctgcaaggacagcgactggcccttctgcagtgatgaggactggaactacaagtgccccagcggctgcaggatgaagggcctgattgatgaggtgaaccaggacttcaccaaccgcatcaacaagctgaagaacagcctgtttgagtaccagaagaacaacaaggacagccacagcctgaccaccaacatcatggagatcctgcggggggacttcagcagcgccaacaacagagacaacacctacaacagagtgtctgaggacctgcggagccgcatcgaggtgctgaagaggaaggtgattgagaaggtgcagcacatccagctgctgcagaagaatgtgcgggcccagctggtggacatgaagaggctggaggtggacatcgacatcaagatccgcagctgccggggcagctgcagccgggccctggcccgggaggtggacctgaaggactatgaggaccagcagaagcagctggagcaggtgattgccaaggacctgctgcccagccgggaccggcagcacctgcccctcatcaagatgaagcctgtgcctgacctggtgcccggcaacttcaagagccagctgcagaaggtgcccccagagtggaaggccctgacagacatgccccagatgaggatggagctggagaggcctggaggaaatgagatcacccggggcggcagcaccagctatggaactggaagtgaaacagagagccccaggaaccccagcagcgctggctcctggaacagcggcagcagcggccctggcagcactggaaacagaaatcctggcagcagcggcactggaggaacagccacctggaagccaggcagcagcggccctggcagcacaggctcctggaacagcggcagcagcggcaccggcagcacaggcaaccagaaccctggcagcccccggcccggcagcacaggcacctggaaccctggcagcagcgagcggggcagcgctggccactggaccagcgagagctctgtgtctggcagcacaggccagtggcacagcgagagcggcagcttccggccagacagccctggcagcggaaatgcccggcccaacaacccagactggggcacctttgaggaggtgtctggaaatgtgtccccaggcacccggcgggagtaccacacagagaagctggtgaccagcaaaggagacaaggagctgaggacaggcaaggagaaggtgaccagcggcagcaccaccaccacccggcgcagctgcagcaagacagtgaccaagacagtcatcggcccagatggccacaaggaggtgaccaaggaggtggtgaccagtgaagatggcagtgactgcccagaggccatggacctgggcaccctgtctggaattggcaccctggatggcttccgccaccgccacccagatgaagctgccttctttgacacagccagcacaggcaagaccttccctggcttcttcagccccatgctgggggagtttgtgtctgaaacagagagccggggcagcgagagcggcatcttcaccaacaccaaggagagcagcagccaccaccctggcattgctgagttccccagccggggcaagagcagcagctacagcaagcagttcaccagcagcaccagctacaacagaggagacagcacctttgagagcaagagctacaagatggctgatgaagctggcagcgaggccgaccacgagggcacccacagcaccaagaggggccacgccaagagcaggcctgtgcgggactgtgatgatgtgctgcagacccaccccagcggcacccagagcggcatcttcaacatcaagctgcccggcagcagcaagatcttctctgtgtactgtgaccaggagaccagcctgggcggctggctgctgatccagcagaggatggatggcagcctgaacttcaacagaacctggcaggactacaagaggggcttcggcagcctgaatgatgaaggagagggggagttctggctgggcaatgactacctgcacctgctgacccagaggggctctgtgctgcgggtggagctggaggactgggccggaaatgaggcctatgcagagtaccacttccgggtgggcagcgaggccgagggctacgccctgcaggtgtcctcctatgagggcacagctggagatgccctgattgagggctctgtggaggagggcgctgagtacaccagccacaacaacatgcagttcagcacctttgacagagatgctgaccagtgggaggagaactgtgccgaggtgtatggaggcggctggtggtacaacaactgccaggccgccaacctgaatggcatctactacccaggcggcagctatgaccccaggaacaacagcccctatgaaattgaaaatggagtggtgtgggtgtccttcagaggagctgactacagcctgcgggctgtgaggatgaagatccggcccctggtgacccagtag

SEQ ID NO: 10450 - DNA, 3678 bp, Artificial Sequence
  derived and/or modified sequence
aggatgggaactaggagtggcagcaatcctttctttcagctggagtgctcctcaggagccagccccacccttagaaaagatgttttccatgaggatcgtctgcctggtcctaagtgtggtgggcacagcatggactgcagatagtggtgaaggtgactttctagctgaaggaggaggcgtgcgtggcccaagggttgtggaaagacatcaatctgcctgcaaagattcagactggcccttctgctctgatgaagactggaactacaaatgcccttctggctgcaggatgaaagggttgattgatgaagtcaatcaagattttacaaacagaataaataagctcaaaaattcactatttgaatatcagaagaacaataaggattctcattcgttgaccactaatataatggaaattttgagaggcgatttttcctcagccaataaccgtgataatacctacaaccgagtgtcagaggatctgagaagcagaattgaagtcctgaagcgcaaagtcatagaaaaagtacagcatatccagcttctgcagaaaaatgttagagctcagttggttgatatgaaacgactggaggtggacattgatattaagatccgatcttgtcgagggtcatgcagtagggctttagctcgtgaagtagatctgaaggactatgaagatcagcagaagcaacttgaacaggtcattgccaaagacttacttccctctagagataggcaacacttaccactgataaaaatgaaaccagttccagacttggttcccggaaattttaagagccagcttcagaaggtacccccagagtggaaggcattaacagacatgccgcagatgagaatggagttagagagacctggtggaaatgagattactcgaggaggctccacctcttatggaaccggatcagagacggaaagccccaggaaccctagcagtgctggaagctggaactctgggagctctggacctggaagtactggaaaccgaaaccctgggagctctgggactggagggactgcaacctggaaacctgggagctctggacctggaagtactggaagctggaactctgggagctctggaactggaagtactggaaaccaaaaccctgggagccctagacctggtagtaccggaacctggaatcctggcagctctgaacgcggaagtgctgggcactggacctctgagagctctgtatctggtagtactggacaatggcactctgaatctggaagttttaggccagatagcccaggctctgggaacgcgaggcctaacaacccagactggggcacatttgaagaggtgtcaggaaatgtaagtccagggacaaggagagagtaccacacagaaaaactggtcacttctaaaggagataaagagctcaggactggtaaagagaaggtcacctctggtagcacaaccaccacgcgtcgttcatgctctaaaaccgttactaagactgttattggtcctgatggtcacaaagaagttaccaaagaagtggtgacctccgaagatggttctgactgtcccgaggcaatggatttaggcacattgtctggcataggtactctggatgggttccgccataggcaccctgatgaagctgccttcttcgacactgcctcaactggaaaaacattcccaggtttcttctcacctatgttaggagagtttgtcagtgagactgagtctaggggctcagaatctggcatcttcacaaatacaaaggaatccagttctcatcaccctgggatagctgaattcccttcccgtggtaaatcttcaagttacagcaaacaatttactagtagcacgagttacaacagaggagactccacatttgaaagcaagagctataaaatggcagatgaggccggaagtgaagccgatcatgaaggaacacatagcaccaagagaggccatgctaaatctcgccctgtcagagactgtgatgatgtcctccaaacacatccttcaggtacccaaagtggcattttcaatatcaagctaccgggatccagtaagattttttctgtttattgcgatcaagagaccagtttgggaggatggcttttgatccagcaaagaatggatggatcactgaattttaaccggacctggcaagactacaagagaggtttcggcagcctgaatgacgagggggaaggagaattctggctaggcaatgactacctccacttactaacccaaaggggctctgttcttagggttgaattagaggactgggctgggaatgaagcttatgcagaatatcacttccgggtaggctctgaggctgaaggctatgccctccaagtctcctcctatgaaggcactgcgggtgatgctctgattgagggttccgtagaggaaggggcagagtacacctctcacaacaacatgcagttcagcacctttgacagggatgcagaccagtgggaagagaactgtgcagaagtctatgggggaggctggtggtataataactgccaagcagccaatctcaatggaatctactaccctgggggctcctatgacccaaggaataacagtccttatgagattgagaatggagtggtctgggtttcctttagaggggcagattattccctcagggctgttcgcatgaaaattaggccccttgtgacccaataggctgaagaagtgggaatgggagcactctgtcttctttgctagagaagtggagagaaaatacaaaaggtaaagcagttgagattctctacaacctaaaaaattcctaggtgctattttcttatcctttgtactgtagctaaatgtacctgagacatattagtctttgaaaaataaagttatgtaaggttttttttatctttaaatagctctgtgggttttaacatttttataaagatataccaagggccattcagtacatcaggaaagtggcagacagaagcttctctctgcaaccttgaagactattggtttgagaacttctcttcccataccacccaaaatcataatgccattggaaagcaaaaagttgttttatccatttgatttgaattgttttaagccaatattttaaggtaaaactcactgaatctaaccatagctgacctttgtagtagaatttacaacttataattacaatgcacaatttataattacaatatgtatttatgtcttttgctatggagcaaatccaggaaggcaagagaaacattctttcctaaatataaatgaaaatctatcctttaaactcttccactagacgttgtaatgcacacttatttttttcccaaggagtaaccaatttctttctaaaacacatttaaaattttaaaactatttatgaatattaaaaaaagacataattcacacattaataaacaatctcccaagtattgatttaacttcatttttctaataatcataaactatattctgtgacatgctaattattattaaatgtaagtcgttagttcgaaagcctctcactaagtatgatctatgctatattcaaaattcaacccatttactttggtcaatatttgatctaagttgcatctttaatcctggtggtcttgccttctgatttttaatttgtatccttttctattaagatatatttgtcattttctcttgaatatgtattaaaatatcccaagcaa

SEQ ID NO: 10451 - DNA, 2601 bp, Artificial Sequence
  derived and/or modified sequence
atgttcagcatgcggatcgtgtgcctggtgctgagcgtggtgggcactgcgtggactgccgactcaggcgaaggagactttctggcagagggaggcggagtgcgaggccctcgcgtcgtggaaagacaccagtctgcctgtaaagactctgattggccattctgctctgatgaagattggaactacaaatgtccaagtgggtgcaggatgaaaggactgatcgacgaagtgaaccaggacttcacgaacagaataaacaaactgaaaaactctcttttcgagtaccagaagaataacaaggactcacattcattaactacaaacatcatggagattctgaggggcgacttctccagcgccaacaatcgggacaatacttacaaccgggtgtccgaggatttaaggagcagaatagaggtgctgaagcggaaggttatcgagaaggtgcagcacatacaattgctccaaaaaaacgtcagggcgcagctggttgacatgaaacggcttgaggttgacatcgatataaaaattcgtagctgtcgcggatcttgctcacgggccctggctagggaggtagatctgaaagattacgaagaccagcaaaaacagttggagcaggtgatcgcaaaggacttgcttcctagcagagataggcagcacctgccattaattaaaatgaagcctgtaccagatttggtgcccggcaacttcaaaagccagctgcaaaaggtaccacccgagtggaaggcactgaccgatatgcctcagatgagaatggaattggagcgccctggtggcaatgagatcaccaggggcggctcaaccagctacggaaccgggtctgagaccgaaagcccccggaatcctagctctgccgggtcctggaactctggctcctccggcccggggtccaccgggaatcgcaaccccgggtccagcgggactggggggactgctacctggaagccaggttcttcgggccctgggtccaccggcagctggaacagtggctcctctggcacgggcagtacgggaaatcagaatcccggctctccgcgacccgggtcaaccgggacatggaaccccggctcaagtgaacgcggatcggccggtcactggacatccgagagcagcgtctcaggaagcacaggacagtggcactccgagtcgggatcctttaggccagacagccccggttcaggcaacgcccggcccaataatccggattggggaaccttcgaagaagtatcaggcaacgtctcccctggtacccggcgcgagtaccatactgagaagttggtgacgagcaagggagataaagaactgcggactggcaaggaaaaagtgaccagcggaagcacaaccactactcggagaagctgtagcaagaccgtgaccaagactgtcattggccccgacggccacaaagaagtaactaaggaggttgtgacttcagaagacggatccgactgccccgaggccatggatctcggtactctgtctggaatcggcactctagatggctttcgccatcggcacccagatgaggctgcattcttcgacaccgcatctaccggcaagacgtttccaggcttttttagtcctatgctcggtgagttcgtttccgagaccgaatcacggggatcagaaagtggtattttcaccaatactaaagagtccagcagccaccaccctggcatcgcagagtttcccagccgtgggaagtcctcatcttattcaaaacagtttactagctccacaagctataaccggggcgactcaacattcgaatctaagtcttacaaaatggctgatgaagccggttccgaggccgatcacgaaggcactcactcgacaaagagagggcacgcaaagtcgaggcccgtcagggattgtgatgacgtgttgcagactcatccatcgggcacccagagcggcattttcaatatcaaactcccagggagctctaagatatttagcgtctactgcgatcaagaaactagtctcggtggatggcttctcatccagcagaggatggatgggagcctgaatttcaatcggacatggcaggactataagaggggttttggcagcctcaatgatgaaggcgagggcgaattttggctgggaaatgattacctccatcttctcacccaacgaggctctgtgctgagagtggagctagaggactgggctggtaatgaagcttacgctgagtatcactttcgggtgggaagcgaagcggaggggtacgcactccaggtgtctagctatgaaggcacggccggggacgctctgatcgaggggagtgtcgaagaaggcgccgagtacactagtcacaacaacatgcaattttctacattcgacagggatgcagatcagtgggaggaaaattgcgctgaggtgtatggaggtggatggtggtacaacaactgccaggcagccaacctgaatggtatttattacccagggggttcctatgatccacgcaataactcaccctatgaaattgaaaacggagtggtgtgggtgagcttccgtggagccgactattcacttcgggccgtgaggatgaagatcagacctttagttactcagtag

SEQ ID NO: 10452 - DNA, 2601 bp, Artificial Sequence
  derived and/or modified sequence
atgttttccatgaggatagtgtgcttggtactgagcgtcgtgggcacagcctggacggcagattcaggggaaggcgattttctggcagaaggcggtggagtgcggggaccccgagttgttgagaggcatcagagtgcctgcaaagatagcgattggcctttctgctctgacgaggactggaattataaatgcccttccggctgtagaatgaagggactcattgacgaggtcaaccaggatttcactaacagaattaacaagctgaaaaacagcctctttgaatatcagaagaataacaaggacagccattcactcacaaccaatattatggagattctgcggggtgacttctcttccgctaacaaccgtgacaacacctacaatagagttagcgaggacctgcggtcccgtatcgaggtgttgaaacgtaaggtcattgagaaggtgcagcacatccagctgttacagaagaacgtccgcgctcagcttgtcgacatgaaacgcttggaagtggacattgacattaagatacgcagctgtaggggaagttgctctcgggcattagcccgagaggtggatctgaaggactatgaagatcagcaaaaacaattagaacaagtcattgcaaaggatctcctcccgtcccgcgacagacagcacttgcctctcatcaagatgaaacctgttccagaccttgtgccagggaattttaaatctcagctgcagaaagttcctcccgagtggaaggcattgactgatatgccacagatgcgtatggagctggaacgacccggaggcaacgagattacacgtggcggaagcacctcttacgggacaggaagcgagactgagtctccacgcaatccctcatctgccggaagctggaattcagggtcaagcggccctggaagtacagggaatcggaacccgggaagctcaggtaccggcggaaccgcaacttggaaacccggttcatctggcccagggtccaccggcagttggaactcaggttcttctggaaccggatcaaccggaaatcagaaccctggctccccacggccaggctctactggtacctggaatccaggatccagcgagcggggaagcgctgggcattggacaagcgagtcttcagtgtctgggtccacaggacagtggcactctgaatccggatcgttccggcctgatagccccggatctgggaacgccaggccaaacaatcctgattgggggacctttgaagaggtgtcaggaaacgtttcaccaggaaccaggcgcgaataccatacagaaaaattagtcacgtcaaagggagacaaggagttacgcacaggcaaagagaaggttacttcgggaagcaccacaaccacacgtagatcgtgttcaaagaccgtgacaaaaaccgtgatcggaccggatggccataaggaggtaactaaggaggtagtgacctccgaggatggttcagactgcccggaagctatggatctggggactttgagcggaataggtacattagatgggtttagacaccggcatcctgatgaagcagctttcttcgacacagcctcaaccggcaagactttcccaggatttttttctccaatgctgggtgaatttgtctctgagactgaaagtcgaggatcggaaagcgggatctttaccaatactaaggagtcatcttcccatcacccaggaattgcagaattccccagccgcggaaagagcagttcctactccaaacaatttaccagcagcacctcgtataaccgcggagactccacctttgagagcaaaagctataaaatggctgacgaggcaggatccgaggcagatcacgaagggactcactccactaaaagaggacatgccaagtcaagaccagtgagggattgcgatgacgtgcttcagacccatccctcaggaactcagtctggtatttttaacatcaaactcccaggatcctcgaagatcttctccgtgtactgtgatcaggagacctcactcggaggttggctattaattcagcagcgcatggatggatccctcaactttaatcgcacctggcaagactataagagaggcttcggaagcctgaatgacgagggagagggagaattctggctcggcaatgactacctgcaccttctgacacaaagagggagcgtgttgagggttgagcttgaggactgggccggtaacgaagcatatgcagaatatcacttccgggtcggcagcgaggctgagggatacgccctgcaggtatcttcgtacgaaggaacagcgggtgatgcactcatcgagggcagcgtggaagagggggcagaatacaccagccataacaatatgcagttcagcactttcgaccgagatgccgaccaatgggaggaaaactgtgccgaggtatacggtggcggatggtggtacaacaattgccaagctgccaacctcaatgggatctattatcctggaggttcttacgacccccgaaataattcaccttacgagatcgagaatggagtcgtgtgggtgtccttccgtggcgctgactactctctccgggcagtacggatgaagatcagacccctcgtgacacaatag

SEQ ID NO: 10453 - RNA, 2745 nt, Artificial Sequence
  derived and/or modified sequence
gggaaauaagagagaaaagaagaguaagaagaaauauaagagccaccauguuuucgaugagaauugugugucucgucuugucagucguaggaaccgcguggaccgccgacagcggggaaggugauuucuuggcugagggugguggaguccgcggucccagagugguagaaaggcaucaauccgcauguaaagacagcgauuggccguucugcucggaugaggacuggaacuauaagugcccuuccgggugucggaugaaggggcucaucgacgaggucaaucaggauuucacuaaccgcaucaauaagcucaaaaacucgcuguucgaguaccagaagaacaacaaggauagccacucgcugacuacaaauaucauggaaaucuugcggggagacuucucaagcgcgaauaaucgcgauaauacguacaaccgaguaucagaggacuugaggucgaggauugaaguccuuaagcggaaggucauugagaaaguccaacacauccaguugcugcagaagaacguacgggcgcaguugguggauaugaagaggcuggaaguggacaucgacaucaagauccgauccugucggggaucaugcucacgagccuuggcgagggagguagacuugaaggacuaugaggaccagcagaagcaguuggaacaggugauugccaaggacuugcuuccgucacgggaucggcagcaccucccuuugaucaagaugaaacccgugccggaccucgugcccggaaacuucaagucccagcuucagaagguaccaccggaguggaaagcgcuuacagacaugccgcagaugcggauggaguuggagaggccgggaggaaacgaaauuacgagaggcggcucaacaucguacgggacagguucggaaacagaaucgcccagaaauccaucgucagcaggaucauggaacagcgguagcuccggaccggguucgacgggaaauagaaacccgggaucaucagguaccggugggacugcgacuuggaagcccgguucgucgggaccgggaucgacuggaucguggaauagcggcuccuccgguacuggaucgaccggaaaucagaauccugguucgccucggccuggcuccaccggaacauggaacccgggcagcagcgaaaggggaucggcuggacacuggacgucagagucguccgugucagggucgacggggcaguggcacuccgaaucgggaucguuccggccugauucaccuggcuccggaaacgcaagacccaauaacccggauugggguacguuugaagaggucagcggaaacguaucaccggggacacggagggaguaucauacugagaaauuggugacaucgaagggagauaaagagcucagaacggggaaggagaaggugacgagcggaucaacgacgacuacuaggagguccugcucgaaaacuguaaccaagaccgugauugggcccgacggccauaaagaggucacuaaagaagucgugaccuccgaggauggguccgacugccccgaagccauggaccucgggacgcuuuccggaauugggacguuggacggguuuagacacaggcaccccgacgaagcagcguuuuucgauacggccagcaccggcaaaacguuccccggguucuucucgcccaugcucggagaguuugucucagaaacggagucgcgcgguucggagagcgguaucuuuacaaauacgaaagagucgucgucgcaccaucccggaauugcagaauuucccagcaggggcaaaagcagcucauacuccaaacaguucacaucguccaccucguacaauagaggugacagcacauucgaaagcaagagcuacaaaauggccgacgaggcggguagcgaggcugaucaugaagguacacauucaacaaaacgcggacacgcuaagucgcgaccggugcgggauugcgacgauguccuccagacccaccccucggggacacaaucggguauuuucaauaucaaacuucccggguccucgaagaucuuuucgguauauugugaucaagaaacguccuugggaggguggcuccuuauccaacaacgcauggacgggucacugaacuuuaaucgaacguggcaggauuacaaacggggauucgggucguugaaugacgagggagaaggggaguuuuggcucggaaacgacuaccuccaucugcucacacagagagguagcguguugaggguggaacuugaagauugggcgggaaaugaggcguaugcggaguaucacuuucgcgucgggucagaagcagagggauacgcacuucaggugucgucguaugaaggaacggcuggggacgcccugauugaggggagcguagaggaaggggcagaguauacgucgcacaacaacaugcaauuuuccacauucgacagagaugccgaucagugggaggaaaacugugcggagguguacggcgguggguggugguauaacaauugccaggcggccaacuugaaugggaucuacuaucccggaggcucguacgauccacgcaauaacucgccauaugaaauugaaaauggaguggucugggugucguuccgaggagcagauuacucguugagagcggucaggaugaagaucagacccuugguaacccaaugauaagcugccuucugcggggcuugccuucuggccaugcccuucuucucucccuugcaccuguaccucuuggucuuugaauaaagccugaguaggaagg

SEQ ID NO: 10454 - protein, 437 aa, Artificial Sequence
  derived and/or modified sequence
MSWSLHPRNLILYFYALLFLSSTCVAYVATRDNCCILDERFGSYCPTTCGIADFLSTYQTKVDKDLQSLEDILHQVENKTSEVKQLIKAIQLTYNPDESSKPNMIDAATLKSRKMLEEIMKYEASILTHDSSIRYLQEIYNSNNQKIVNLKEKVAQLEAQCQEPCKDTVQIHDITGKDCQDIANKGAKQSGLYFIKPLKANQQFLVYCEIDGSGNGWTVFQKRLDGSVDFKKNWIQYKEGFGHLSPTGTTEFWLGNEKIHLISTQSAIPYALRVELEDWNGRTSTADYAMFKVGPEADKYRLTYAYFAGGDAGDAFDGFDFGDDPSDKFFTSHNGMQFSTWDNDNDKFEGNCAEQDGSGWWMNKCHAGHLNGVYYQGGTYSKASTPNGYDNGIIWATWKTRWYSMKKTTMKIIPFNRLTIGEGQQHHLGGAKQAGDV

SEQ ID NO: 10455 - DNA, 1311 bp, Artificial Sequence
  derived and/or modified sequence
atgagctggagcctgcacccccgcaacctgatcctgtacttctacgccctgctgttcctgagcagcacctgcgtggcctacgtggccacccgcgacaactgctgcatcctggacgagcgcttcggcagctactgccccaccacctgcggcatcgccgacttcctgagcacctaccagaccaaggtggacaaggacctgcagagcctggaggacatcctgcaccaggtggagaacaagaccagcgaggtgaagcagctgatcaaggccatccagctgacctacaaccccgacgagagcagcaagcccaacatgatcgacgccgccaccctgaagagccgcaagatgctggaggagatcatgaagtacgaggccagcatcctgacccacgacagcagcatccgctacctgcaggagatctacaacagcaacaaccagaagatcgtgaacctgaaggagaaggtggcccagctggaggcccagtgccaggagccctgcaaggacaccgtgcagatccacgacatcaccggcaaggactgccaggacatcgccaacaagggcgccaagcagagcggcctgtacttcatcaagcccctgaaggccaaccagcagttcctggtgtactgcgagatcgacggcagcggcaacggctggaccgtgttccagaagcgcctggacggcagcgtggacttcaagaagaactggatccagtacaaggagggcttcggccacctgagccccaccggcaccaccgagttctggctgggcaacgagaagatccacctgatcagcacccagagcgccatcccctacgccctgcgcgtggagctggaggactggaacggccgcaccagcaccgccgactacgccatgttcaaggtgggccccgaggccgacaagtaccgcctgacctacgcctacttcgccggcggcgacgccggcgacgccttcgacggcttcgacttcggcgacgaccccagcgacaagttcttcaccagccacaacggcatgcagttcagcacctgggacaacgacaacgacaagttcgagggcaactgcgccgagcaggacggcagcggctggtggatgaacaagtgccacgccggccacctgaacggcgtgtactaccagggcggcacctacagcaaggccagcacccccaacggctacgacaacggcatcatctgggccacctggaagacccgctggtacagcatgaagaagaccaccatgaagatcatccccttcaaccgcctgaccatcggcgagggccagcagcaccacctgggcggcgccaagcaggccggcgacgtg

SEQ ID NO: 10456 - DNA, 1314 bp, Artificial Sequence
  derived and/or modified sequence
atgagctggagcctgcaccccagaaacctgatcctgtacttctacgccctgctgttcctgagcagcacctgcgtggcctacgtggccaccagagacaactgctgcatcctggacgagagattcggcagctactgccccaccacctgcggcatcgccgacttcctgagcacctaccagaccaaggtggacaaggacctgcagagcctggaggacatcctgcaccaggtggagaacaagaccagcgaggtgaagcagctgatcaaggccatccagctgacctacaaccccgacgagagcagcaagcccaacatgatcgacgccgccaccctgaagagcagaaagatgctggaggagatcatgaagtacgaggccagcatcctgacccacgacagcagcatcagatacctgcaggagatctacaacagcaacaaccagaagatcgtgaacctgaaggagaaggtggcccagctggaggcccagtgccaggagccctgcaaggacaccgtgcagatccacgacatcaccggcaaggactgccaggacatcgccaacaagggcgccaagcagagcggcctgtacttcatcaagcccctgaaggccaaccagcagttcctggtgtactgcgagatcgacggcagcggcaacggctggaccgtgttccagaagagactggacggcagcgtggacttcaagaagaactggatccagtacaaggagggcttcggccacctgagccccaccggcaccaccgagttctggctgggcaacgagaagatccacctgatcagcacccagagcgccatcccctacgccctgagagtggagctggaggactggaacggcagaaccagcaccgccgactacgccatgttcaaggtgggccccgaggccgacaagtacagactgacctacgcctacttcgccggcggcgacgccggcgacgccttcgacggcttcgacttcggcgacgaccccagcgacaagttcttcaccagccacaacggcatgcagttcagcacctgggacaacgacaacgacaagttcgagggcaactgcgccgagcaggacggcagcggctggtggatgaacaagtgccacgccggccacctgaacggcgtgtactaccagggcggcacctacagcaaggccagcacccccaacggctacgacaacggcatcatctgggccacctggaagaccagatggtacagcatgaagaagaccaccatgaagatcatccccttcaacagactgaccatcggcgagggccagcagcaccacctgggcggcgccaagcaggccggcgacgtgtag

SEQ ID NO: 10457 - DNA, 1314 bp, Artificial Sequence
  derived and/or modified sequence
atgagctggagtttacacccacgtaatctcatcctgtatttttacgctctcctgtttctttcatctacgtgtgtggcatacgtagcaacgcgagataattgttgcattttggacgagcgtttcgggtcttattgtcctaccacttgcggcatcgcagatttcctgtccacctaccagactaaggtggacaaagacttgcagtctctggaggatatattgcaccaggtggaaaataagacttccgaagttaaacagctgatcaaggctattcagttgacatataaccctgacgagtccagcaagcctaatatgatcgacgccgcaacactgaaatctagaaagatgttggaggagattatgaaatacgaggccagcattctgacacacgattcctctatccggtacctgcaggagatctacaactctaataatcaaaaaatagttaatttgaaggagaaggtcgcgcagctcgaggcccaatgtcaagaaccgtgcaaggacacagtccagatccacgatatcacggggaaagattgccaagacattgcgaacaaaggcgctaaacaaagcggtctttacttcatcaagcccctgaaggctaatcaacaattcctggtgtactgtgagatagacggcagcggtaatggctggaccgtgtttcagaaacgactggacggcagcgtggatttcaagaaaaactggatccagtataaggaggggttcggccacttgtctcctaccggaactactgagttttggttgggtaacgagaagattcaccttatcagtacacagtcggcaataccttatgctctccgagtagaactggaggactggaatggcaggaccagtacagctgactatgccatgttcaaggttggtccagaggctgacaaatacaggctgacatatgcatacttcgcagggggggatgctggggatgcctttgacggattcgacttcggtgatgaccctagcgacaagttcttcacaagccataatggaatgcaattcagtacatgggacaatgacaacgataagttcgagggcaactgtgcagagcaggatggtagtggctggtggatgaataaatgtcacgctggccacctaaatggagtgtactatcaagggggtacatattctaaggcttccacgcccaacggatacgacaatggaataatatgggcaacttggaagacaaggtggtacagtatgaagaagacaacaatgaaaattattccgttcaaccgtctgactataggggaaggacaacagcatcatctggggggggctaaacaagctggcgacgtttag

SEQ ID NO: 10458 - DNA, 1314 bp, Artificial Sequence
  derived and/or modified sequence
atgtcctggagcctgcaccccaggaacctgatcctgtacttctacgccctgctcttcctgagcagcacctgtgtggcctacgtggccacccgggacaactgctgcatcctggatgaaagatttggcagctactgccccaccacctgtggcattgctgacttcctgagcacctaccagaccaaggtggacaaggacctgcagagcctggaggacatcctgcaccaggtggagaacaagaccagcgaggtgaagcagctgatcaaggccatccagctgacctacaacccagatgagagcagcaagcccaacatgattgatgctgccaccctgaagagcaggaagatgctggaggagatcatgaagtatgaggccagcatcctgacccatgacagcagcatccgctacctgcaggagatctacaacagcaacaaccagaagatcgtgaacctgaaggagaaggtggcccagctggaggcccagtgccaggagccctgcaaggacacagtgcagatccatgacatcaccgggaaggactgccaggacatcgccaacaagggggccaagcagagcggcctgtacttcatcaagcccctgaaggccaaccagcagttcctggtgtactgtgaaattgatggcagcggaaatggctggacagtgttccagaagaggctggatggctctgtggacttcaagaagaactggatccagtacaaggagggcttcggccacctgagccccaccggcaccacagagttctggctgggcaatgagaagatccacctgatcagcacccagagcgccatcccctatgccctgcgggtggagctggaggactggaatggccgcaccagcacagctgactatgccatgttcaaggtgggccctgaggccgacaagtaccgcctgacctacgcctactttgctggaggagatgctggagatgcctttgatggctttgattttggagatgaccccagcgacaagttcttcaccagccacaacggcatgcagttcagcacctgggacaatgacaatgacaagtttgagggcaactgtgccgagcaggacggcagcggctggtggatgaacaagtgccacgccggccacctgaatggagtgtactaccagggcggcacctacagcaaggccagcaccccaaatggctatgacaatggcatcatctgggccacctggaagacccgctggtacagcatgaagaagaccaccatgaagatcatccccttcaaccggctgaccatcggggagggccagcagcaccacctgggcggggccaagcaggccggagatgtgtag

SEQ ID NO: 10459 - DNA, 1760 bp, Artificial Sequence
  derived and/or modified sequence
aaaaaggaggagcttcaacctgtgtgcaaaatctgggaacctgacagtataggttgggggccaggatgaggaaaaaggaacgggaaagacctgcccacccttctggtaaggaggccccgtgatcagctccagccatttgcagtcctggctatcccaggagcttacataaagggacaattggagcctgagaggtgacagtgctgacactacaaggctcggagctccgggcactcagacatcatgagttggtccttgcacccccggaatttaattctctacttctatgctcttttatttctctcttcaacatgtgtagcatatgttgctaccagagacaactgctgcatcttagatgaaagattcggtagttattgtccaactacctgtggcattgcagatttcctgtctacttatcaaaccaaagtagacaaggatctacagtctttggaagacatcttacatcaagttgaaaacaaaacatcagaagtcaaacagctgataaaagcaatccaactcacttataatcctgatgaatcatcaaaaccaaatatgatagacgctgctactttgaagtccaggaaaatgttagaagaaattatgaaatatgaagcatcgattttaacacatgactcaagtattcgatatttgcaggaaatatataattcaaataatcaaaagattgttaacctgaaagagaaggtagcccagcttgaagcacagtgccaggaaccttgcaaagacacggtgcaaatccatgatatcactgggaaagattgtcaagacattgccaataagggagctaaacagagcgggctttactttattaaacctctgaaagctaaccagcaattcttagtctactgtgaaatcgatgggtctggaaatggatggactgtgtttcagaagagacttgatggcagtgtagatttcaagaaaaactggattcaatataaagaaggatttggacatctgtctcctactggcacaacagaattttggctgggaaatgagaagattcatttgataagcacacagtctgccatcccatatgcattaagagtggaactggaagactggaatggcagaaccagtactgcagactatgccatgttcaaggtgggacctgaagctgacaagtaccgcctaacatatgcctacttcgctggtggggatgctggagatgcctttgatggctttgattttggcgatgatcctagtgacaagtttttcacatcccataatggcatgcagttcagtacctgggacaatgacaatgataagtttgaaggcaactgtgctgaacaggatggatctggttggtggatgaacaagtgtcacgctggccatctcaatggagtttattaccaaggtggcacttactcaaaagcatctactcctaatggttatgataatggcattatttgggccacttggaaaacccggtggtattccatgaagaaaaccactatgaagataatcccattcaacagactcacaattggagaaggacagcaacaccacctggggggagccaaacaggctggagacgtttaaaagaccgtttcaaaagagatttacttttttaaaggactttatctgaacagagagatataatatttttcctattggacaatggacttgcaaagcttcacttcattttaagagcaaaagaccccatgttgaaaactccataacagttttatgctgatgataatttatctacatgcatttcaataaaccttttgtttcctaagactaga

SEQ ID NO: 10460 - DNA, 1314 bp, Artificial Sequence
  derived and/or modified sequence
atgagctggagcctgcacccccggaacctgatcctgtacttctacgccctgctcttcctgagctcaacttgcgtggcgtacgtggccactcgtgataactgctgcatcttagatgagagattcggcagttattgtccaaccacctgtgggatcgccgattttctttctacataccagactaaagtggacaaggacctccagtcactcgaggacatcctgcaccaggttgaaaacaaaacttctgaggtgaaacagctgattaaggcgatccagttgacttacaatccagacgaatcttctaagcccaacatgatcgacgccgcaactcttaagtcccggaaaatgctggaggagatcatgaaatatgaggccagcattctgactcatgattctagcataaggtatctgcaagaaatctacaacagcaataatcagaaaatcgtgaacctcaaggagaaagttgcccagcttgaggcccaatgccaagaaccttgtaaagacaccgttcaaattcacgacattaccgggaaagactgtcaggatatcgcaaacaagggggctaaacaatccgggctgtactttatcaagcctttgaaggccaatcaacagttcctagtttattgtgaaatcgacggctccggcaatgggtggaccgtcttccagaagcggctagatgggtctgtggacttcaagaagaactggattcaatataaggaagggttcggccatctaagtcccacggggacaaccgaattctggctcggaaacgagaagattcacttgatttcaacccagtctgctataccctacgctctgcgtgtcgagttggaggactggaatggaagaaccagtaccgccgactacgctatgttcaaggtgggtcccgaagcggataaataccggttaacctacgcttacttcgccggcggcgacgccggtgacgccttcgacggcttcgattttggagatgaccccagcgacaaattcttcacaagtcataacggcatgcagtttagcacttgggataacgataacgataaattcgagggcaattgtgctgaacaagacggctctggctggtggatgaacaaatgccacgctggccacctgaatggtgtgtactaccagggaggaacatattctaaagcctctacacctaatggctacgacaatgggatcatttgggctacttggaagactaggtggtacagtatgaagaagaccaccatgaagataatccctttcaacagactcacaatcggtgagggccaacaacaccacctaggtggcgcgaagcaggcaggcgatgtttag

SEQ ID NO: 10461 - DNA, 1314 bp, Artificial Sequence
  derived and/or modified sequence
atgtcgtggagcctgcaccctcggaacctgatcctgtatttttatgcactgctgtttcttagttccacatgtgtggcttatgtcgccacccgagataactgctgcatcttagacgaacggtttggcagctattgtcccaccacatgtggaatcgcggacttcctctccacgtaccagacaaaggtcgacaaagatctccagtcattggaagacatactacatcaagttgaaaataagacgagtgaagtgaaacaattaattaaggccattcagctgacttacaacccagatgagtctagtaagcccaatatgatagacgcggctaccctgaagtcaaggaaaatgctagaggaaatcatgaagtacgaggcttcgatactaactcacgattcaagtatccggtatctgcaagagatttacaactcaaataatcagaaaattgtgaatctcaaggaaaaggttgctcagctggaggcacagtgccaggaaccgtgtaaagacaccgtacagatccacgacattacgggaaaagactgccaggatatcgcgaacaagggcgcaaagcaaagcgggctgtactttattaaaccacttaaggcaaatcagcaattcctggtgtattgcgaaatcgacggatcaggcaatgggtggacagtatttcagaagcggctggacggaagtgtggatttcaaaaaaaactggattcagtataaagaaggctttggacatctgagcccaacaggcaccactgagttttggctgggcaatgaaaagatccatctgatctcgacacagagcgctattccatatgccctgcgcgttgaactggaggactggaacggacgaactagtacggcagactatgccatgttcaaggttggccctgaggctgacaaatacaggcttacctacgcgtatttcgcgggtggagacgcaggcgacgcgtttgatggattcgatttcggcgatgaccccagtgacaaattcttcacgagccataatggaatgcaatttagtacttgggacaacgataacgacaagtttgaggggaactgtgcagaacaggacggcagtggctggtggatgaacaagtgtcacgccggtcaccttaatggggtatactatcagggcggaacctacagcaaggctagtacacctaatgggtatgataacgggataatctgggccacatggaagacaagatggtacagtatgaaaaaaactacaatgaaaataataccctttaatcgcctaaccatcggagagggacagcaacatcatctgggaggagccaagcaggccggagatgtctag

SEQ ID NO: 10462 - protein, 522 aa, Artificial Sequence
  derived and/or modified sequence
MAAVVAATRWWQLLLVLSAAGMGASGAPQPPNILLLLMDDMGWGDLGVYGEPSRETPNLDRMAAEGLLFPNFYSANPLCSPSRAALLTGRLPIRNGFYTTNAHARNAYTPQEIVGGIPDSEQLLPELLKKAGYVSKIVGKWHLGHRPQFHPLKHGFDEWFGSPNCHFGPYDNKARPNIPVYRDWEMVGRYYEEFPINLKTGEANLTQIYLQEALDFIKRQARHHPFFLYWAVDATHAPVYASKPFLGTSQRGRYGDAVREIDDSIGKILELLQDLHVADNTFVFFTSDNGAALISAPEQGGSNGPFLCGKQTTFEGGMREPALAWWPGHVTAGQVSHQLGSIMDLFTTSLALAGLTPPSDRAIDGLNLLPTLLQGRLMDRPIFYYRGDTLMAATLGQHKAHFWTWTNSWENFRQGIDFCPGQNVSGVTTHNLEDHTKLPLIFHLGRDPGERFPLSFASAEYQEALSRITSVVQQHQEALVPAQPQLNVCNWAVMNWAPPGCEKLGKCLTPPESIPKKCLWSH

SEQ ID NO: 10463 - protein, 447 aa, Artificial Sequence
  derived and/or modified sequence
MAAVVAATRWWQLLLVLSAAGMGASGAPGQRAYTPQEIVGGIPDSEQLLPELLKKAGYVSKIVGKWHLGHRPQFHPLKHGFDEWFGSPNCHFGPYDNKARPNIPVYRDWEMVGRYYEEFPINLKTGEANLTQIYLQEALDFIKRQARHHPFFLYWAVDATHAPVYASKPFLGTSQRGRYGDAVREIDDSIGKILELLQDLHVADNTFVFFTSDNGAALISAPEQGGSNGPFLCGKQTTFEGGMREPALAWWPGHVTAGQVSHQLGSIMDLFTTSLALAGLTPPSDRAIDGLNLLPTLLQGRLMDRPIFYYRGDTLMAATLGQHKAHFWTWTNSWENFRQGIDFCPGQNVSGVTTHNLEDHTKLPLIFHLGRDPGERFPLSFASAEYQEALSRITSVVQQHQEALVPAQPQLNVCNWAVMNWAPPGCEKLGKCLTPPESIPKKCLWSH

SEQ ID NO: 10464 - DNA, 1566 bp, Artificial Sequence
  derived and/or modified sequence
atggcagcggtggtggcagcgacgcggtggtggcagttgcttttagtcctttctgcggctgggatgggagccagcggcgcgcctcagcctccgaatattttactactgcttatggatgacatgggatggggggatttaggagtctatggtgaaccttctcgggagactccgaaccttgaccgcatggcggctgaagggcttctgtttccgaacttttacagtgcaaatccgctttgctccccctctcgtgcggctctcttaactggaagattgcctatacggaatggcttttacacgacaaacgctcatgcaagaaatgcatacacgccgcaggaaattgttggagggatcccagactcagaacaactgcttcctgaattacttaaaaaagcagggtatgtttcgaagatagtgggaaaatggcatctgggccatcggccgcaatttcacccactgaagcatggattcgatgaatggtttggatccccaaattgtcactttggaccgtacgataataaagcccggccaaatattccggtatatcgcgactgggaaatggtaggaaggtattatgaagagtttccaatcaatctcaaaacgggcgaagctaatttaacgcaaatatatttacaagaggcgttagattttattaagagacaagcgaggcatcacccgttttttttgtattgggctgttgatgcgacgcacgcgccagtctatgcaagcaaaccgtttcttggcacgtcacagcgtggccgctacggcgatgctgtgagagaaattgatgattcaattggaaagatattggaattattgcaggatcttcatgtcgctgataacacatttgtcttttttacgtcggataacggagctgctctgattagcgcaccggaacagggaggatcaaacggaccatttttatgtggcaagcagacaacctttgagggcggtatgcgcgaacctgccttagcgtggtggccgggtcatgtaacggcaggccaagtatctcatcaattaggttccatcatggatttgtttactacctcactggccctggctggtttgactccgccgagtgatcgtgcaattgacggccttaatttgctgccaaccttactacaaggccggctgatggatcgtccgattttctactacagaggcgacacacttatggcagccacgcttggccaacataaggcccatttttggacatggaccaactcatgggaaaattttagacaaggcattgatttctgccctggccagaatgtttctggagtaacgacgcataacttagaagaccataccaaacttccgttaattttccatttaggtcgggaccctggagaaagattcccactgagttttgctagtgcagagtatcaggaagcgctcagtcgcattacatccgtggtccaacagcatcaggaggcactggtgcccgcgcaacctcagttgaatgtgtgcaattgggcggtcatgaactgggccccaccaggttgtgagaagctgggaaaatgtcttacgcctcctgagagtattcctaaaaagtgtctatggagccac

SEQ ID NO: 10465 - DNA, 1566 bp, Artificial Sequence
  derived and/or modified sequence
atggccgcggtcgtggcagcgacccgttggtggcagctgctgctcgtcctttccgccgcaggaatgggcgcttcgggcgccccccagccccctaatatcctccttcttctgatggatgacatgggatggggagatctcggagtgtacggagaaccttcgagagaaacccctaacctggatcgtatggccgccgagggacttctgtttcctaacttctactcggcaaacccactttgttctccatcacgggcggcactgcttaccggtaggctccctatcaggaatggattttacaccactaatgcacatgctagaaacgcatacacccctcaggaaattgtgggtgggatcccagattcggagcagctgctgccggagttgcttaagaaagcaggatatgtgtccaagattgtgggtaagtggcatttgggacatcgacctcaatttcatccgctgaagcatggatttgatgaatggtttggtagcccgaactgccactttggaccctacgacaacaaggcccgccctaacattccggtctaccgcgattgggaaatggtgggacgatactacgaagagttcccgattaacctgaaaacgggagaagcaaaccttactcaaatctacctccaggaggcactggatttcatcaagagacaggcaagacaccatccatttttcctttattgggcagtggatgcgacgcacgccccagtgtacgcatcgaagccatttcttgggacttcgcagcgcggtcgctacggtgatgccgtccgggaaattgacgactcgattggtaagattcttgaactgctccaggatcttcacgtggcagataataccttcgtgtttttcaccagcgataatggtgcggcgcttattagcgcaccagaacaaggtggttccaacggccctttcctttgtgggaagcagactacttttgaagggggaatgagagaaccagcccttgcctggtggcccgggcacgtgacggcaggacaggtgtcgcatcaacttggttcaatcatggatctctttaccacttcgttggcactggctggtcttacgccacccagcgatcgggccattgacgggcttaatcttctgcctaccctgctccagggacgccttatggaccgtcctatcttttactatcgcggcgatactctcatggccgcaacgcttggtcagcataaggcgcatttttggacctggactaactcgtgggagaactttcggcaaggcattgacttttgtcccgggcaaaacgtgtctggcgtgaccactcacaatttggaagatcacaccaagttgcccctcattttccatcttggacgggatcccggtgagcgatttccgctctcgttcgcaagcgcagagtaccaagaagccttgtcgcgaatcacctcggtcgtgcaacagcatcaggaagcactcgtgcctgctcaaccccagcttaacgtctgcaattgggccgtgatgaactgggcacctcctggatgcgaaaaactcggtaaatgcctgacgccccctgaatcaattccaaagaagtgtctttggagccat

SEQ ID NO: 10466 - DNA, 1566 bp, Artificial Sequence
  derived and/or modified sequence
atggccgcagtcgtggccgccacccggtggtggcaacttctgcttgtgctgtcagcagccggtatgggtgcgtcgggggccccgcagccccccaatatccttctcctgctgatggacgacatgggttggggcgacctcggtgtctacggcgaaccctcccgtgaaacccccaacctggatcgcatggcggcagaaggtttgttgtttcctaatttctactcggcaaacccactgtgctctcctagccgcgcagctctgctcacgggaaggctgcctatacgcaatggattctataccactaatgcccatgcccggaacgcatacaccccccaggaaatcgtggggggaattccagattccgaacaattgctccccgaactgctcaaaaaagccggctacgtctccaagattgtgggaaaatggcacctggggcataggccacagtttcatccacttaagcatggttttgatgaatggtttggatcccccaattgccattttggtccttacgataacaaggcacgacctaacatccctgtctaccgagactgggagatggtcggaagatactacgaagagtttcccataaacttgaaaaccggcgaagcaaaccttacccaaatctacctgcaggaagcgctcgatttcatcaagagacaggcaagacaccacccattcttcctgtactgggctgtggacgcaacgcatgcgccagtgtacgcatccaagccatttctgggtacgagccagagaggtcgctacggcgatgcagtgcgcgaaattgacgatagcatcggcaaaattctcgaactcctgcaagaccttcatgtggccgacaacaccttcgtctttttcacttccgataacggtgcagcgttgatttccgctccggaacagggtggatccaatgggccattcctgtgcgggaagcaaactacctttgaaggcggaatgcgcgaaccagcacttgcatggtggcctggtcacgtgactgcaggccaagtctcacatcaactggggagcattatggacctttttacgacttcacttgcccttgccggactcactccaccctccgatagagcaattgatggacttaaccttcttcccaccctcctgcaaggcaggctcatggataggcccattttctactaccggggagatactctcatggcagctaccctgggtcagcataaagctcatttttggacgtggactaactcatgggaaaactttaggcaggggatcgatttctgccccggacagaacgtgtcgggagtgaccacccataacctcgaggatcatactaagctgcctcttatctttcatcttggcagggatccaggggaacggttcccactgtcgttcgcctccgcagagtaccaagaggcgctgagccgcattacctctgtggtgcaacaacaccaggaagcgcttgtgccagcacagccccagctgaatgtgtgcaattgggcagtgatgaattgggcacctccaggctgtgaaaagctgggaaagtgtctgaccccgccagagagcatccctaagaagtgtctttggagccac

SEQ ID NO: 10467 - DNA, 1566 bp, Artificial Sequence
  derived and/or modified sequence
atggcagctgtcgtggcagctaccagatggtggcagctccttctggtgctcagcgcagcaggtatgggagcttcaggagcaccacaacccccaaacatccttctcttgctgatggatgatatgggctggggcgacctgggtgtgtacggtgagcccagccgtgaaacccctaaccttgatcggatggccgcagaaggactgttgtttccaaacttttactcggcaaaccccctttgtagcccatcacgggctgcacttctcaccgggcgcctgccaattagaaatggcttttacactactaacgcacatgcacgcaacgcttacactccgcaagagattgttggaggtatcccagactccgaacaacttttgccagaacttttgaagaaggccggctacgtgagcaagatcgtgggtaaatggcatctgggccatcgtcctcagtttcatccccttaagcatggtttcgatgaatggttcggatcaccaaattgtcactttggaccttacgacaataaggcaagacctaacattccagtgtatcgtgattgggagatggtgggtcgctactatgaagagttcccgattaatctgaaaaccggagaagccaacctgacccagatttacctccaagaagcacttgactttatcaagcgccaagccagacatcatccatttttcctttactgggctgtcgatgcaacccacgcccctgtgtacgcatcgaaacctttcctgggtacctcgcaacggggccgctatggagacgccgtgcgggagatcgatgactcaattggaaagatactcgaactccttcaagatcttcatgtcgctgacaacacttttgtgttcttcacctcagacaacggggctgcactcatctctgctcctgagcagggaggctccaacggaccctttctttgcggaaagcaaaccacctttgaaggcggaatgagggagcctgccttggcctggtggcctggtcatgtgactgcagggcaagtctcgcatcagttgggatcgatcatggatctgtttaccacttccctggcattggcagggcttacccctcccagcgatagggcaatagacgggcttaacttgctgcccacgctcctccaaggacggctgatggatcgaccgattttctactaccggggtgatactcttatggcggcgaccctgggtcagcacaaggcacacttttggacttggacgaactcatgggagaattttcgacagggaattgacttttgcccaggacaaaacgtctcgggagtcactactcacaacttggaggatcatactaaacttccgctgatttttcaccttggtcgggatcccggtgaaaggttccctctcagctttgcctccgctgaataccaggaagcactgtccagaatcacttccgtggttcagcaacaccaggaagccctcgtgcctgcacaacctcaactcaatgtgtgtaactgggccgtcatgaactgggccccacctggctgtgaaaagctcggaaagtgtctgacgccgccagaatccataccaaaaaagtgcttgtggtcccat

SEQ ID NO: 10468 - DNA, 1566 bp, Artificial Sequence
  derived and/or modified sequence
atggccgccgtggttgccgcaacccgctggtggcagctgttgctggtgctctcggctgccggcatgggagcgtccggagcgcctcaaccacccaatattctgcttctgctgatggacgatatgggatggggagatctgggcgtgtacggagaaccatcaagagagacgcccaacctcgacagaatggcagctgaagggctgctgttcccaaatttctactccgccaacccactgtgttcaccttcgcgagctgccctgctgaccggtagactcccaattcggaacggattctacaccaccaatgcccacgcccgcaatgcatatacccctcaggagatagtgggaggaattccagattcggaacagctcttgccggagctcctgaagaaggcgggatacgtgtcaaaaatcgtgggtaagtggcatctggggcacaggccgcagttccacccactcaaacacggtttcgacgaatggttcggttcaccaaactgccacttcgggccctacgacaataaggcccggcccaacatccctgtgtaccgcgattgggaaatggtcggaagatactacgaggaatttcctatcaacctgaaaactggagaagccaatctgacccagatctatcttcaggaggccttggatttcattaaacgccaggcgagacatcacccgtttttcttgtactgggcagtcgatgcaacccacgcacctgtgtatgcctccaaaccgttcctgggaacttcccagagaggtcgctacggagatgccgtccgggagatcgacgactccatcggaaagatcctggaattgctgcaagatctgcacgttgccgacaatacgttcgtctttttcacctccgacaacggtgcggcactcatctcggcgccggaacagggaggatccaacggaccatttctttgcggaaagcagactacctttgagggcggaatgcgcgaaccagccctcgcttggtggcctggccacgtgaccgcgggccaggtgtcgcaccaactggggtcgatcatggacctgttcactacttccctggctctcgccggtttgacgccaccctccgatcgggccatcgatggactcaatctgctgccgacgctgctccaaggacgcctgatggaccgccccattttctactaccgcggcgacactctcatggccgcaaccctcggacaacataaagcgcacttctggacttggacgaattcgtgggagaactttcgccagggcatcgatttctgcccgggacagaacgtctcaggagtcaccacgcacaacctggaggatcataccaaactcccgctgatcttccacctgggtcgggaccctggagaacgctttccgctgagctttgcgtcagcggagtaccaggaagccctgagtcgcatcacgtcggtggtgcaacagcatcaagaagcgctggtgcccgcccagccgcagctgaatgtgtgcaactgggccgtgatgaattgggcgccgccgggatgtgagaagctggggaagtgcctcaccccgccagagtcaatcccgaagaagtgtctttggtcacat

SEQ ID NO: 10469 - DNA, 1566 bp, Artificial Sequence
  derived and/or modified sequence
atggccgccgtggtcgctgcaactcgctggtggcagctcttactggtgctaagtgccgcaggcatgggcgccagtggagccccccaacctcccaacatcctgctgctgctgatggacgacatggggtggggggacttgggcgtatacggtgaaccctccagagaaacccccaatctggatagaatggcggccgagggtcttctcttcccaaatttctacagtgctaatcctttgtgcagcccaagtagggcggccctgctgaccggtagactgcccattcgcaatggcttctacactaccaacgcgcacgcccgtaacgcctacactccccaggaaattgtgggggggattccagactccgaacagctgctgcccgagctcctgaaaaaggccgggtacgtcagtaaaattgtgggcaaatggcatctcggacaccgaccccagttccaccctctgaaacatggattcgatgaatggttcgggtcacctaattgccactttggcccctacgacaacaaagcaagacccaacattccggtatatcgcgattgggagatggtaggccgctattacgaagaatttcccataaatttgaaaaccggtgaggcaaatctgacccagatttacctgcaagaggcactggatttcataaaacgtcaggccaggcaccacccttttttcctatattgggcagtcgacgcgacccatgccccagtctatgcgtctaagccattcctgggaacctctcagaggggacgctacggagacgccgttcgtgagattgatgattccattggaaaaatcctggaactactgcaggatctgcacgttgcggacaatactttcgtttttttcacctccgacaatggggctgcgttgatatcagcccccgagcaggggggatcgaacggaccttttctctgcgggaagcagacaaccttcgaaggaggtatgagggaaccagcattagcctggtggccggggcacgtaacggctggccaagtttcccaccagctgggatctattatggatttatttaccacatctcttgcactcgctggactgacgcccccgagtgatagggctatagatggtctgaacttattgcctacactgcttcaggggagacttatggatagacctattttctactacaggggcgatacattgatggccgctacccttggccaacataaggcacacttctggacatggaccaatagctgggaaaatttcaggcagggcatcgacttttgccccggccagaacgtaagtggggttaccacccacaatttagaagatcacactaaactccctttgatctttcaccttggaagagaccccggtgagcgatttcctcttagttttgccagcgcggaataccaagaagctctgtccagaatcacgtcagtcgttcaacagcaccaggaggcattagttccagcacagccacagttgaatgtgtgcaactgggcagtcatgaactgggccccaccaggctgtgagaaattgggaaagtgtttgacaccgccggagtccatacctaagaagtgtctgtggagtcat

SEQ ID NO: 10470 - DNA, 1566 bp, Artificial Sequence
  derived and/or modified sequence
atggccgccgtcgtggcagccaccagatggtggcaactcctgctggtgctcagcgccgctggaatgggtgcgagcggagcaccgcaacctcctaacatcctcctcctgctcatggatgacatgggatggggcgacctgggggtgtacggagaaccgtcaagagagactccaaacctggatcggatggccgcggaaggactgctcttcccaaacttctacagtgctaatccactctgctcgccgtcgcgcgccgccctgctcaccggacgcctgccgatccggaacgggttctatactaccaacgcccacgcccggaatgcatacactccacaggagattgtcggaggtatcccggattcggaacaactgctgcctgagcttctcaagaaggcagggtacgtctcaaagatcgttggaaagtggcatctggggcatcgtccacagttccacccactgaaacatggatttgacgaatggttcggatcgccgaattgccacttcggaccgtacgacaataaagcccgcccaaacatcccggtgtaccgggattgggaaatggtggggcggtattacgaagagttcccgattaacctgaaaaccggagaagccaacctcacgcagatctatctgcaagaagctcttgacttcatcaagagacaggcgcgccatcaccccttcttcctctactgggcggtagacgcaacccacgcccctgtgtacgcatctaagccgttcctgggaacgtcccaaaggggacggtacggggatgcagtccgggagatcgatgactcgatcggcaagatcctggagctgctgcaggatctccacgtcgccgataacaccttcgtgttctttaccagcgacaatggagcagccctcatctccgcacctgaacaaggaggatcgaatggcccgttcctctgcggaaaacaaaccacctttgaagggggaatgagagagccggcgctcgcgtggtggccgggccacgtgacggcgggacaagtgtcgcaccaactgggatcaattatggatctgttcaccactagcctcgcactggccggactcactccgccctcggatcgggccatcgatggactgaatttgctcccaaccttgctgcaaggaaggcttatggaccggccgatcttctactacagaggagacactctgatggccgccaccctcggacaacataaggctcacttctggacctggactaatagctgggaaaactttcgccagggcatcgacttctgcccgggacagaacgtgtcaggcgtgactacccacaacctcgaggaccatactaagctcccgcttatcttccatttgggacgggatccgggtgagcgctttccgctctcctttgcgtcagctgaataccaagaagctctctccagaattacctccgttgtgcaacagcatcaagaagcgttggtgcccgcccagccgcagcttaacgtctgcaactgggccgtgatgaattgggctcctcccggctgcgaaaagctgggaaagtgcctgaccccaccagagtccatccctaagaaatgcctctggagccat

SEQ ID NO: 10471 - DNA, 1566 bp, Artificial Sequence
  derived and/or modified sequence
atggctgccgtcgtcgcggcaacccgatggtggcaactactcctcgtgctatccgcggccggcatgggggcatcaggcgccccacagcctcctaacattctcctgctgcttatggacgacatgggctggggcgatctgggcgtctatggcgagccaagtcgggaaaccccaaacttggacagaatggcagccgagggtctcttatttcccaacttttattccgccaaccctttgtgctctcccagccgcgccgcattgctcacaggtaggctgcccatcaggaacgggttctacactaccaacgctcatgctcgcaacgcttatacacctcaagaaatcgtgggcggcattcctgactctgagcagctgctgcccgaactactgaaaaaagcggggtatgttagcaaaatcgtagggaaatggcacctagggcatcgacctcagttccatcccctcaagcatggattcgatgagtggtttggctcacccaactgccatttcggcccttatgataacaaggcacgccccaacatccccgtttatagagactgggagatggtgggacggtattacgaagagttccccattaaccttaagaccggagaagcaaatctcactcaaatttacttacaggaggcacttgactttattaaacgacaagctcggcatcatccattctttctgtattgggctgtggatgcgactcacgctcctgtatatgccagtaagccttttctgggcacctcccagcggggccgctatggtgatgcagttcgcgagatcgacgactcaatcggaaaaattttagaactcctccaggacctccacgtggccgacaacactttcgtcttttttacctccgataatggggctgccctcatttcagcgccagaacaagggggctccaatggaccgtttctgtgtggcaaacagaccacttttgaggggggtatgcgcgagccagccctggcttggtggcctggacatgtcacagcaggccaagtcagccatcagctgggtagcatcatggatttgtttaccacttcgctcgccctggctgggctgacacccccctccgatcgggctatcgacggattaaacctactccctacactgctccagggcaggcttatggatcggcccattttctattatagaggtgatacactgatggcggcaacccttggacagcacaaagctcacttctggacttggacaaattcttgggaaaattttcggcagggcatcgatttttgtccaggccagaacgtgtctggcgtcaccacacataatcttgaggatcacacgaagctccctctcatttttcacctgggccgtgacccaggcgaacgattccctctgagctttgcatcagctgaataccaggaagctctgtcccgaatcaccagcgttgtgcagcagcaccaagaggctttagttcccgctcaaccccagctgaatgtttgtaattgggctgtgatgaactgggccccacccggttgtgagaagttaggtaaatgcttgaccccacccgaatccataccaaagaagtgcctttggagccac

SEQ ID NO: 10472 - DNA, 1566 bp, Artificial Sequence
  derived and/or modified sequence
atggcggcggtagtagcggcgacgcgttggtggcaattactattagttctatcggcggcgggtatgggtgcgtcgggtgcgccgcaaccgccgaatatactattactactaatggatgatatgggttggggtgatctaggtgtttatggtgaaccgtcgcgtgaaacgccgaatctagatcgaatggcggcggaaggtctattatttccgaatttttattcggcgaatccgttatgttcgccgtcgcgtgcggcgctactaacgggtcgattaccgatacgtaatggtttttatacgacgaatgcgcatgcgcgtaatgcgtatacgccgcaagaaatagttggtggtataccggattcggaacaactattaccggaactattaaaaaaagcgggttatgtatcgaaaatagttggtaaatggcatttaggtcatcgtccgcaatttcatccgttaaaacatggttttgatgaatggtttggttcgccgaattgtcattttggtccgtatgataataaagcgcgtccgaatataccggtatatcgtgattgggaaatggtaggtcgatattatgaagaatttccgataaatctaaaaacgggtgaagcgaatttaacgcaaatatatttacaagaagcgctagattttataaaacgacaagcgcgtcatcatccgttttttctatattgggcggtagatgcgacgcatgcgccggtttatgcgtcgaaaccgtttctaggtacgtcgcaacgtggtcgttatggtgatgcggtacgagaaatagatgattcgataggtaaaatactagaattattacaagatctacatgttgcggataatacgtttgtattttttacgtcggataatggtgcggcgttaatatcggcgccggaacaaggtggttcgaatggtccgtttctatgtggtaaacaaacgacgtttgaaggtggtatgcgagaaccggcgctagcgtggtggccgggtcatgtaacggcgggtcaagtttcgcatcaactaggttcgataatggatctatttacgacgtcgttagcgttagcgggtctaacgccgccgtcggatcgagcgatagatggtctaaatttactaccgacgttactacaaggtcgattaatggatcgaccgatattttattatcgaggtgatacgctaatggcggcgacgttaggtcaacataaagcgcatttttggacgtggacgaattcgtgggaaaattttcgacaaggtatagatttttgtccgggtcaaaatgtttcgggtgtaacgacgcataatttagaagatcatacgaaactaccgctaatatttcatctaggtcgagatccgggtgaacgttttccgttatcgtttgcgtcggcggaatatcaagaagcgctatcgcgtataacgtcggtagtacaacaacatcaagaagcgttagttccggcgcaaccgcaattaaatgtttgtaattgggcggttatgaattgggcgccgccgggttgtgaaaaactaggtaaatgtttaacgccgccggaatcgataccgaaaaaatgtctatggtcgcat

SEQ ID NO: 10473 - DNA, 1566 bp, Artificial Sequence
  derived and/or modified sequence
atggccgcggtcgtcgcagccacacgctggtggcagctgctgcttgtcctgtctgcagcaggcatgggcgcttctggagcgccacagcctcctaacattctgctcctgctcatggatgacatgggatggggcgacctgggcgtttacggcgagccatcaagggagacgcctaacctggatcgcatggcggccgagggcctactgttcccaaacttctatagtgctaatcctctgtgtagtccgtctagggccgccctgctgactggcaggcttccgattaggaatgggttctacacaacaaatgctcacgcacggaacgcctacacgcctcaggaaatcgtgggcggaattcccgacagcgaacaattgttgcctgagctcttgaagaaggctgggtatgtgagtaaaattgtgggcaagtggcatctgggtcatcgcccccagttccatccactgaaacacggtttcgacgagtggtttggctcgcccaactgccattttggcccctacgacaataaagctcgccctaatatcccagtctaccgcgactgggagatggtaggccgatattatgaggaatttcccattaacctgaaaacaggagaagcaaacctgacacagatatacttacaagaggctctcgatttcatcaagcgccaggcgagacatcacccattttttctctactgggcggtggatgctacccatgcgcccgtgtatgcctccaagccattcctgggcacaagccagagggggcggtatggagacgcagttagggaaatcgatgacagcatcggtaagatcctggagttgctgcaggatctccatgtagccgacaatacgtttgtcttcttcacatctgacaatggagccgcactcatctctgccccggagcagggaggtagcaatggccccttcctctgcggcaaacagacaactttcgagggtggaatgcgagagcctgccttggcctggtggccaggccatgtcactgccggacaagtaagtcatcagctgggatcaatcatggatttgtttacgacgagtctcgcattagctggcctgactccaccatcagacagagccattgacggacttaatctgctgcccactttgctccagggacgccttatggacagacccattttttattaccggggcgatacccttatggccgcaacactgggccaacataaggcccatttctggacttggacaaactcttgggaaaatttcaggcaaggcatagacttctgtcccggccaaaacgtctccggggtaaccacacacaacctggaggaccatactaaactgcctttaattttccatcttggaagggatccaggcgagcgcttcccactgtcattcgccagcgccgagtaccaggaagctctgagtagaattacatctgttgtgcaacagcaccaggaagcactggtcccggctcaaccccagttgaacgtgtgtaactgggctgtgatgaactgggctccacccggctgcgaaaaactgggtaagtgtcttacgccacccgagagcatcccgaaaaagtgcttgtggtcacac

SEQ ID NO: 10474 - DNA, 1566 bp, Artificial Sequence
  derived and/or modified sequence
atggccgctgtggtggccgctacccggtggtggcagctgctgctcgtcctctctgcggccggaatgggagcatccggtgcgccgcagccccccaatatcctcctcctcttgatggacgacatgggatggggggacctgggcgtgtatggagaaccttcacgggagacgccgaatctggatcgcatggctgcagagggactgctctttcctaacttctactcggcgaatccgctgtgctcgccgtctcgtgccgcgcttcttactggtaggctcccgatacggaacggcttctacaccactaacgcccacgctagaaatgcctacacgccccaagaaatcgtcggaggtatcccagactccgagcaactcctgccagaactgttgaagaaagctggatacgtctcgaagatcgtcggaaagtggcatctcggccacaggcctcaattccatccactcaagcatggattcgacgagtggttcggttctcccaactgccatttcggtccttacgacaacaaagcccgcccgaacattcctgtgtaccgggattgggaaatggtcggacgatactacgaggaatttccaatcaatcttaagaccggcgaagcgaatctgacccagatttatctccaagaagcactcgacttcatcaagcgccaggccaggcaccacccgttctttctctactgggccgtcgacgctactcatgcgccagtgtacgcttcaaagcccttcctgggcacctcgcaaagaggacgatacggggacgccgtgcgggaaattgacgattccatcggaaaaatcctggaattgctgcaagatctgcacgtggcggataacacttttgttttcttcacttcagacaacggcgcagcattgatttccgcaccggaacagggcggctcgaacggtccttttctctgtggcaagcagaccacgtttgagggtggtatgcgcgagccggcgctggcctggtggcctggacacgtgactgcaggacaggtgtcccaccagttgggctccatcatggatctgtttaccacgtcgctcgcccttgcgggactgaccccaccgagcgaccgggcgatcgacggcctgaatctgctgccgaccctgctgcaaggacggctgatggacagacctatcttctactaccgcggagatactctcatggcagccaccctgggacagcataaagcgcatttctggacttggaccaactcgtgggagaacttccgacaggggatcgatttctgtccaggacagaatgtgtcaggcgtcactacccacaacttggaggatcatactaagttgcctctcatattccacctcggacgcgatccgggagaaaggttcccgctgagcttcgccagcgccgaataccaggaggcattgagcaggatcacgtcggttgtgcaacagcaccaggaggccctcgtcccagcccaaccccagcttaacgtgtgcaattgggccgtgatgaactgggcgcctccgggctgcgagaagctgggaaagtgccttaccccacccgaatcgatcccaaaaaagtgcctttggtcacac

SEQ ID NO: 10475 - DNA, 1566 bp, Artificial Sequence
  derived and/or modified sequence
atggcagcagtggtcgcggcaacgcgctggtggcaactccttcttgtcctgagcgcggcaggaatgggtgctagcggggcaccacaacctcctaacattcttcttctgctgatggatgatatgggctggggcgaccttggggtgtacggcgagccatcaagagaaaccccgaacctcgaccggatggcagcagaaggactcctgtttcctaatttctactcagcgaaccctctttgttcgccatcacgggcagcacttctgactggccggctgccaatacggaacgggttttacaccactaacgcacacgcaagaaacgcctacactcctcaagaaatcgtgggcggaattcctgattccgaacaactgcttccagaacttcttaagaaagcaggctacgtgtccaagatcgttggaaagtggcatctgggacacagacctcaatttcatcctctgaagcatggatttgacgaatggttcggatctcccaattgtcattttggtccgtacgacaacaaagcaagaccaaatatcccggtttatcgggattgggagatggtgggaagatactacgaagaatttcctatcaatcttaaaactggggaggcaaaccttactcaaatctacctgcaggaggcactggatttcatcaaaagacaggcccgccaccatcccttttttctctactgggctgtcgatgcaacccatgcacctgtgtacgcatctaagccttttctgggaacgagccaacgcggtagatatggagatgcagttcgggaaattgatgactccattggaaagatacttgaacttcttcaggacctgcatgtggcagataacactttcgtctttttcacgtcggacaatggagcagcgcttatctcggcgccagagcagggcggctccaatggaccctttctttgcggaaaacagaccacctttgaaggagggatgagagagcctgcattggcgtggtggcccggccatgtcactgcgggacaagtgtcccaccaactcggatcgataatggatctgtttacgacctcgctcgcacttgccgggcttacgcccccatcggatcgggcaattgatggtttgaacctgctcccaactcttcttcagggtcgattgatggatcgtcccatcttctattacagaggcgacaccctgatggcagcaaccctcggacagcataaggcgcatttctggacctggactaactcgtgggaaaacttcaggcaggggattgatttttgtcccgggcaaaacgtctccggagtgaccacgcacaacctggaagatcatactaaactgcccttgattttccatcttggaagagatccaggagaacgcttcccactctcctttgcaagcgccgaatatcaggaggctctgagtaggattacctcggtggtacagcaacatcaagaagccctggtgcctgctcaacctcagcttaacgtgtgcaattgggcagtcatgaattgggcccctcctgggtgcgaaaaactgggcaaatgtcttactcccccagagagcattcctaagaagtgtctttggtcgcat

SEQ ID NO: 10476 - DNA, 1566 bp, Artificial Sequence
  derived and/or modified sequence
atggcggcagtggtcgctgccacccgctggtggcagctcctgcttgtcctgtcggctgcgggcatgggcgccagcggagccccacagccaccgaatatcttgcttcttttgatggacgacatgggctggggcgacctcggggtgtatggggagccaagcagggagactcccaacctggaccggatggcagcagaagggcttcttttccccaacttctacagcgcaaatccactgtgcagcccgtcgcgcgccgcgctgctgaccggaaggcttccgatccgcaacggattctatacgactaacgcgcacgcacgcaacgcgtacactcctcaggaaattgtcggtggaatcccagattcagagcagctgcttccagagctgctcaaaaaagctgggtacgtgagtaaaatcgtcggcaagtggcacctgggacacagaccgcaattccatccgctgaagcatgggttcgacgaatggttcgggtcgccgaactgccatttcggtccgtacgacaacaaggctcggccgaacattccggtgtaccgcgactgggagatggtgggacgatactacgaagaattcccgatcaatctcaaaactggcgaagcaaacctcactcagatttacttgcaggaagcactggactttatcaagcgccaggcccggcatcacccgttttttctctactgggcggttgatgccactcacgccccggtgtacgcctcaaaacctttcctgggaacctcccagcgcggcaggtacggcgacgccgtgagagagatcgatgactccatcggaaagatccttgagctgctgcaggacttgcatgtggccgataacacttttgtgtttttcacctcggacaacggggcagcactgatttctgccccggagcagggaggcagcaatggtcctttcctttgcggcaagcagactaccttcgagggaggcatgagagagccggccctggcctggtggccgggacatgttactgcaggacaggtgtcacatcagctgggctcgatcatggatctgttcaccacctcacttgctctggcaggtctgactccgccatccgaccgcgcgattgacggtctgaacctccttcctaccctgctgcaggggcgcctgatggacagaccgatcttctattaccggggagataccctcatggccgccaccctgggccaacacaaggcccacttctggacctggactaattcctgggaaaactttcggcaagggatcgatttttgccctggacaaaacgtgtcgggagtcaccacccataacctcgaggatcacactaaactgcctctgattttccacctgggacgggatccgggtgaaaggttcccgctctcattcgcgtccgcagaataccaagaagccctttcgcgcattacttctgtggtgcagcaacaccaggaagcgctcgtgccagcccaaccacagcttaatgtctgcaactgggccgtgatgaactgggcaccaccgggatgcgagaagctgggaaagtgcctgactcctccagagtcaatcccaaagaagtgcctctggtcccac

SEQ ID NO: 10477 - DNA, 1566 bp, Artificial Sequence
  derived and/or modified sequence
atggccgcagtggtggcagcgacccggtggtggcaactgctgctggtgctttcggcggccggtatgggagcgtccggagcacctcagcctcctaacattctgctgctgttgatggatgatatggggtggggtgaccttggagtgtacggcgaaccaagccgcgaaaccccaaacctggatcgcatggccgcagagggtttgcttttcccaaacttttactcagccaaccccctttgttcgccatcgcgcgccgcactcctcaccggtagactgccgatcagaaacggcttttacaccaccaacgctcatgcccggaatgcatacacccctcaagagatcgtgggtgggattccggattcagaacaacttttgcccgaactcttgaagaaagccggatacgtgtccaaaattgtcgggaaatggcatctgggacatagacctcaattccatccgcttaagcacgggtttgacgaatggtttgggtcaccaaactgccatttcggcccatacgacaataaggcaaggcctaacattccagtgtaccgcgattgggagatggtcgggaggtactacgaggaatttccgatcaatctgaaaactggcgaagcaaacctcacccaaatctacctccaggaggcactcgacttcattaagcggcaagccagacaccacccatttttcctgtactgggcagtagacgcaacccatgcaccagtgtacgccagcaagccttttcttggtacgtcacagcggggaagatacggagacgcagtgcgtgagatcgatgattccatcggtaagatccttgaactgcttcaagaccttcatgtggcagacaacacctttgtgttcttcacctctgataatggcgcagcgcttatttccgcacccgaacagggaggctcgaacgggccttttctgtgtggaaaacagaccacctttgaaggagggatgcgcgaacctgcacttgcgtggtggccaggacacgtgactgccggacaagtctcccatcaattgggttcaatcatggacctctttaccacgtccctcgcccttgcaggattgaccccaccttccgacagggcgattgatgggctgaacctcctgcctactcttcttcaaggccggctcatggatcgacctattttctactacagaggggatactctcatggcagcaaccctgggacaacacaaggcgcatttttggacctggaccaactcgtgggagaactttagacaagggatcgatttttgtcctggacagaatgtgtcgggtgtgacgacgcacaatttggaggaccatactaagctccctctgatttttcatctgggtcgtgaccccggtgagcgcttccctcttagctttgcatcagccgagtaccaggaagctctgtctcggattacctcagtggttcagcaacaccaagaagcactcgtgcctgcgcaaccacagctgaatgtctgcaattgggcagtgatgaactgggcaccccccggatgcgaaaaacttggaaagtgtctgacgcctcccgaatcgatccctaaaaagtgtctctggtcccac

SEQ ID NO: 10478 - DNA, 1566 bp, Artificial Sequence
  derived and/or modified sequence
atggccgctgtcgtggccgctactcgctggtggcagctcctgctggtgctgagtgctgccgggatgggggcttctggggcacctcagccaccaaatattctgctgctgttaatggacgatatgggctggggcgacttgggcgtgtacggcgagccttctcgcgaaacccctaacctggatcggatggctgccgaaggtctgttgttccctaatttctatagtgccaaccccttgtgctctccttcacgagcagccttactaacaggaagacttccaatccgtaatggattctacaccaccaacgcccacgcacggaacgcctacacccctcaagagatagtaggcgggattccagacagtgaacaactcttgcccgagctcttaaagaaggcaggctatgttagcaaaatagtcggaaaatggcatcttggacacagaccacagttccacccactgaagcacggattcgatgagtggttcggctcccctaattgtcattttggaccatatgataacaaggctcgtcccaatatccccgtttatagggactgggagatggtcgggcgttactacgaggaatttcccatcaatctcaagactggcgaggcaaatctaacccagatatacctgcaagaagctctggattttataaagcgccaggctagacatcacccctttttcctatattgggccgtggatgccactcacgcccccgtgtatgccagcaagccattcctggggacaagccaaagagggcgctacggcgatgccgtgcgagaaatcgatgatagcatcggtaaaatcctagagctgctgcaagatttacacgtcgctgacaacacttttgtattcttcaccagtgataatggcgccgcccttatctctgccccagaacaaggaggctctaatggcccctttctgtgtggaaaacagactaccttcgagggcggaatgcgcgaaccagcattggcctggtggcccgggcacgttactgcagggcaagtttctcatcagctggggagcataatggatttattcactacctctttagccctggctgggctgactcctccttccgatcgggccatagacggcctcaacttactgcccactctcctgcagggcaggctgatggatcggcctatcttttactatagaggggacactttaatggcagctaccttaggacagcataaagcccacttttggacctggacaaactcctgggagaactttcgtcaaggaatcgatttttgccctggccaaaacgtcagcggggtgaccactcataacctcgaagatcacacaaaactgcctctgattttccacctgggacgggacccaggcgagcggttccctctgtcttttgcttccgcagagtatcaggaggccctgtctcgaatcacctccgtagtgcaacagcatcaggaggctctagtgcccgcccagccccaactgaacgtgtgcaattgggcagtgatgaactgggctcctcccggctgcgaaaaacttggaaagtgtttaacaccacccgaatctatccccaagaagtgtttgtggtctcac

SEQ ID NO: 10479 - DNA, 1566 bp, Artificial Sequence
  derived and/or modified sequence
atggcagccgtggtggcagcaaccagatggtggcaactgcttctcgttctctccgcagctgggatgggcgcatcaggagcgcctcaaccaccgaatatactgctgcttctcatggacgatatgggatggggtgacctgggcgtgtacggcgagccttcgcgggagactccaaatcttgataggatggcagcagaaggtcttttgtttcctaatttctactcggctaacccactctgctcaccgtcaagggcagcactcctgactggtagactcccaatccggaacggattttacaccacgaatgcacatgccagaaacgcatataccccgcaggagattgtgggtggaatccctgactcggaacagcttctgcccgaactgctcaagaaggcaggttacgtgtcaaagattgtcggcaagtggcacctgggccaccggcctcaatttcatcctctgaagcatggatttgatgagtggtttggatcacctaactgccatttcggaccatacgataacaaagcacgccccaatatcccggtctacagggattgggagatggttggtaggtactacgaggagtttccgatcaacttgaaaaccggtgaagcaaacctcacgcagatctaccttcaggaagcactcgacttcattaaacggcaagcccgtcaccatccgttttttctctactgggcggtggacgcgacgcatgcccccgtgtacgcatcgaagccatttctcgggaccagccagcgggggaggtacggtgatgcagtgagagaaatagatgattcaattgggaaaatcctggaacttcttcaagaccttcatgtggcggataacaccttcgttttctttacttcagataacggggcagcccttattagcgcaccagaacagggtggctccaatggtccttttctgtgcggaaaacaaactacgttcgagggaggtatgcgtgaacctgcacttgcatggtggccaggccatgtcaccgccggtcaggtgtcccaccaattgggctcgatcatggacttgttcacgacttcccttgcacttgccgggctcactccgccttcggaccgcgccatagatgggttgaatttgcttcctactctgttgcaaggtcgcctcatggacagaccgatattctactaccgaggcgataccttgatggccgcgactctcgggcaacacaaggctcatttttggacctggaccaactcctgggaaaacttccgccaaggcattgatttttgtcccgggcaaaacgtgtccggtgttacgacccataacctggaagatcataccaagttgcccctcatttttcacctgggcagggaccctggagaacgtttcccacttagctttgcatcggcagaataccaggaagcactgtcgagaatcactagcgtggtccagcaacatcaggaggcccttgtgcccgcacaaccccaactgaatgtgtgtaactgggccgtgatgaattgggcccctccgggttgtgaaaagctgggaaagtgtctcacgccacctgagtctattccgaaaaagtgtctgtggtcccac

SEQ ID NO: 10480 - DNA, 1566 bp, Artificial Sequence
  derived and/or modified sequence
atggctgcagtggttgcagcgacccggtggtggcagctgcttttggtccttagcgccgccggtatgggggcttccggagccccacagccacccaatatcttgctcctgctgatggatgatatgggctggggtgaccttggggtgtacggagaacccagccgagaaacgcccaatctagaccgcatggctgccgagggcttactttttccgaacttctattcagcaaatccattgtgttccccttcccgcgcagccttgctgaccggacggctgcccatacggaacggcttttacactactaacgcacacgctcgtaatgcttacactccgcaggagatcgtcggcggtattcccgacagcgagcagctgctcccagaattattgaaaaaagctggctacgtgtcaaaaattgtgggaaaatggcatttgggccacagacctcaatttcacccactgaagcacggcttcgatgagtggtttgggagtcccaactgccatttcggaccatacgacaataaggcccgtccgaatataccagtgtacagagattgggagatggtgggaagatattacgaagagtttcccatcaacctgaaaaccggcgaggccaacttgactcaaatctatctgcaggaggctctcgactttattaagcgccaagccagacaccatccattcttcctgtactgggctgtggatgccactcacgctccagtttatgcatcaaaaccctttctaggcacctcccagcgcggtagatacggggatgctgtgagggaaatagacgactccatcggcaagatccttgagttgcttcaagatctgcacgtagctgacaacacattcgtattctttacttccgacaatggcgccgctctgatttctgcgccagagcagggcggctccaatgggccgttcctctgcggaaagcaaacaacatttgagggaggtatgcgagaacctgcacttgcctggtggccaggacatgtaacggcaggccaggtctctcaccagcttggttctataatggacctgttcactactagcctagctctggcaggtctaactccaccgagcgacagggctattgacggactgaatctgttgccaaccttactgcagggccgtttgatggacaggccaatattctactatcggggagatacgctcatggctgcaaccctcggccaacacaaagctcatttttggacctggaccaactcctgggagaactttcggcaaggaatcgatttttgtcctggtcaaaacgtgtccggagtaactactcataacttggaggaccacacaaaactgcctctgatctttcacctgggccgcgatccaggtgaacgatttcctctaagctttgcctctgctgagtaccaggaggcacttagtcgcatcaccagcgtggtgcaacagcatcaagaagccttggtgcccgcacagccgcagttgaacgtgtgcaattgggccgtgatgaactgggcccctccagggtgtgagaagcttggaaaatgcctaacaccacccgaatctatacctaagaagtgtctgtggagtcac

SEQ ID NO: 10481 - DNA, 1566 bp, Artificial Sequence
  derived and/or modified sequence
atggcggccgtggtagccgccacaaggtggtggcagctgttactggtcctcagcgctgctggaatgggagccagcggcgccccccaacccccaaatatactgcttctcctcatggacgatatggggtggggggacctgggcgtatacggtgagccttccagagagacaccaaatttggatcgtatggccgcagagggattgctgttccccaacttttatagcgctaaccctctgtgcagcccctccagagccgctcttctcacgggtcgactgccaattcgaaatgggttttatactacaaatgcccacgccagaaatgcctataccccacaggagatagtgggaggtatacctgatagcgaacagctgctgcctgaactgctcaaaaaagcaggttacgtgagcaagattgtgggcaaatggcacttgggccatcgccctcagttccatccactgaaacacgggtttgatgaatggttcggatcccccaattgccatttcgggccgtatgataataaggcacgcccgaatataccggtgtaccgtgactgggaaatggtgggcaggtattacgaagaattccccatcaacctaaaaactggggaggcgaatttgacacagatctaccttcaggaagcactggactttatcaagagacaggcgcgacaccatcctttcttcctctactgggctgtcgacgcgactcatgctccagtatacgcctccaaaccatttttgggcacatcccagaggggtagatatggagacgccgtcagggagatcgacgactctataggaaagatcctcgagcttctgcaagatctacacgtcgccgacaatacttttgtctttttcacatcagacaatggagccgcactgatatcagcccctgagcaggggggatcaaatgggccatttttatgtggaaagcagaccaccttcgagggaggaatgcgcgaaccagctcttgcatggtggcccgggcacgttactgccggacaggtgagtcatcagctcggctcaataatggatctgttcacaacctccctggctctggctggtctgacgcctccaagcgaccgcgccatcgatggtctgaacctgctgcccaccctcttgcagggtaggcttatggaccgacctatcttttactacagaggagacaccttgatggcagccactctgggacaacataaggcccacttctggacctggacaaattcctgggagaattttagacagggcattgacttttgtccaggccagaacgtgtccggtgtgacaacccataatctcgaagatcacactaagctgcccctgatcttccacttgggtcgcgacccaggcgagcgtttcccactttcttttgcctcagccgagtaccaggaggccctgtcccgcattacctccgtcgtgcagcagcaccaggaagccctcgtccctgcgcagcctcagttgaacgtctgcaattgggcagtgatgaactgggcacctcccggatgcgaaaagttaggtaagtgccttactccccccgaaagcattcccaagaaatgtctctggtctcac

SEQ ID NO: 10482 - DNA, 1566 bp, Artificial Sequence
  derived and/or modified sequence
atggcagccgtcgtcgccgccacccgatggtggcaactactgcttgttctgagcgccgctgggatgggagccagtggtgctccccagcccccaaatatcttgctgctgttgatggatgatatgggatggggagatctcggcgtttatggagaaccttctcgcgaaacacctaacctggaccgcatggcagctgaaggtctcctctttccaaatttctactctgctaatccattgtgcagtccatcgcgggctgcactgctcaccggaaggcttcccatcaggaacggcttctacaccacgaacgcgcacgcgagaaacgcatatactcctcaggagatcgtggggggcatccctgattccgaacaacttcttcccgagctcctgaaaaaagctgggtatgtgagcaaaatcgttggtaagtggcacctgggacaccgcccccagtttcaccccctgaaacacggcttcgacgagtggttcggaagcccaaactgtcattttggcccctatgataacaaggcgcggcccaacataccagtgtatcgggactgggagatggtggggcggtattatgaggaattccccatcaacctgaaaacaggcgaagctaaccttacacagatctatcttcaggaagctctcgattttattaaaagacaggctcggcatcatccgttctttctttattgggctgtggatgccacacacgccccagtctacgcttccaaaccctttctcggcacctcacagcgtggccggtatggcgatgccgtcagagagatcgacgactcaattgggaaaattttggagctgctgcaagatctccacgtggccgacaacacatttgtgttctttacatctgataatggggcagccctgatcagcgcccccgagcaaggcggctcgaatggcccattcctgtgtgggaagcagaccaccttcgaaggtggaatgagggagcccgctctggcttggtggcccggtcatgttaccgctggacaggtgtctcaccagctgggtagcattatggatctgttcactacttctctggctcttgccggtcttacacctcctagcgaccgggcgatagatgggctgaatctgctccctactctccttcaggggagattgatggaccgaccaatcttttactatcgaggggatacgctgatggccgccactttggggcagcataaggcacatttctggacttggactaactcttgggaaaatttccgtcagggcattgacttctgccctgggcaaaatgtaagtggagtgactacccataacctggaggaccatacaaaactaccgctcattttccatttaggtagggatcccggcgagcgtttcccgttgtctttcgcttcagccgaataccaagaggccctttccaggatcacgtctgttgtgcagcagcaccaggaggctctagtccccgcgcagcctcaactcaacgtctgtaattgggccgtgatgaattgggcccccccaggctgcgagaagctcggcaaatgcctgacacctcccgaaagtatcccgaagaagtgtctgtggagtcac

SEQ ID NO: 10483 - DNA, 1566 bp, Artificial Sequence
  derived and/or modified sequence
atggcagcagtggtggccgctacaaggtggtggcagctgctgttggtgctcagtgccgccggaatgggtgcttctggagccccccaacctcctaatatactgcttttgctcatggatgacatgggctggggagacctgggcgtgtatggcgagccctctcgcgagacccctaacctcgatagaatggcagctgaaggtctgctcttcccaaatttctattcagcaaacccattgtgctctccatccagggccgctctccttaccggaagactccccatcaggaacggcttctataccactaatgctcacgcacgtaacgcatacacaccccaggagattgtgggaggcatccccgatagcgaacagttgctcccagaactgctcaagaaggccggctacgtctcaaaaatcgtgggaaagtggcatcttggtcatcgcccacaattccacccactgaagcatggtttcgacgagtggtttggatcacctaattgccacttcggaccttacgacaacaaggcccgccctaatattcccgtatacagggattgggagatggtgggcaggtattacgaagagttccctatcaacctcaagacaggtgaagccaacctgacccaaatttaccttcaggaagcactcgacttcattaagagacaggccaggcatcacccattctttctgtactgggcagtggatgcaacccatgctcctgtgtatgccagtaagcctttcttgggtacatcacagaggggaaggtacggcgatgccgttagagagatcgacgacagtatcggtaaaatcctggaactgctccaagatctgcacgtggctgataacaccttcgtgttcttcacaagtgacaacggagcagccctgatcagcgcaccagagcagggtggatctaacggccctttcctgtgcggaaagcaaacaactttcgaaggcggcatgagagaacccgccctggcctggtggccaggacacgtcacagcaggccaggtgtctcaccaactgggatcaatcatggacctgtttaccacatccctggcactggctggtcttaccccaccctccgatagggcaatcgatggactgaacctgctccccacccttctccaaggtagacttatggataggccaattttctactaccgtggagatacattgatggctgctacactgggccagcataaagcccacttctggacatggaccaactcctgggaaaatttcagacagggtatcgacttctgcccaggacaaaacgtgagcggagtaaccactcacaacctggaagaccacacaaaacttcctttgatttttcatctgggccgcgaccccggcgaacgtttccctctctccttcgctagcgccgagtaccaggaggccctttctaggattacttcagttgtgcagcagcatcaggaagccctggtgcccgctcagccccagttgaacgtgtgcaactgggctgtcatgaattgggccccccccggctgcgagaaacttggtaaatgcctcacacctcctgagtccatccctaaaaagtgtctgtggtcacat

SEQ ID NO: 10484 - DNA, 1566 bp, Artificial Sequence
  derived and/or modified sequence
atggccgcggtggtggctgccacaagatggtggcagctgcttttagttctgtctgctgcgggaatgggcgcttcaggagctccacagcctccaaatattcttctattgctcatggacgacatgggatggggtgatctgggcgtttacggggagccatcaagggaaacaccaaacttggataggatggctgccgaggggctcttgtttcctaacttttatagcgccaaccctctgtgttctcctagtagagctgccctgctgacgggccgacttcctatcagaaacggcttctacactactaatgctcacgcacgcaatgcttatacaccgcaagaaatcgtgggaggtatccctgactctgagcagctgctcccagaactgctgaagaaagccggttacgtcagcaaaattgtcggcaaatggcacctcggccacaggccccaattccatcctctgaaacacggatttgacgagtggttcggatccccaaactgccacttcggcccgtacgacaacaaggcccggccaaacatacctgtgtaccgggattgggagatggtcggtcgttattacgaagagtttcctattaaccttaaaacaggagaagccaatctgacgcagatctacctccaggaggcacttgatttcataaaacggcaagcacgccaccatcctttcttcttatattgggccgtggacgccacccacgcacccgtgtatgcctccaaaccctttttgggtacttctcagcgaggccggtacggcgatgcggtaagggaaattgatgactcaatcggcaaaatactggagctcttgcaggatctccatgtggctgacaacacgttcgtgttttttacatcagataatggagccgccctgatcagcgcgcccgaacagggcggttccaacgggcccttcctgtgcggaaaacagaccaccttcgaaggcggtatgagggagcccgctctggcgtggtggcccggccatgtgaccgcggggcaagtgtcgcatcagctcgggagcataatggatcttttcaccacatccctggcactcgctggactgacaccaccctcggacagggccattgatggactgaacctcctgccaactttactccaagggagactgatggatagacctattttttactaccggggagacacgctaatggcagcaactctggggcagcataaagcccatttttggacctggactaattcttgggagaatttcagacagggcattgatttctgccccgggcagaatgtctccggggtaacgacacacaatcttgaagatcatactaaactgcctctgatcttccatctgggtagagacccaggagagaggttcccactgtcttttgccagcgctgagtatcaggaggcactgtcccgcattacttcagtcgttcagcaacaccaagaggcgctagtccctgcccagcctcagttgaacgtgtgcaattgggcagtgatgaattgggcaccacctggctgtgaaaaactgggaaagtgcctgactcctccagaaagtattcccaagaaatgcctgtggtcacat

SEQ ID NO: 10485 - DNA, 1566 bp, Artificial Sequence
  derived and/or modified sequence
atggctgccgtggtcgctgctactcgatggtggcagctactccttgttttgtctgcagcaggaatgggagcttctggcgccccacaacctccgaatatacttctcttactaatggatgacatgggatggggtgatctcggagtatatggagaacctagtcgcgagactccaaatttggatcgaatggctgctgaaggcctgttgttcccaaacttttattcggccaatccgttatgcagcccaagtcgagctgcgcttctgacgggacgcttgccaattcggaacggattctatactaccaatgcacatgctcgtaacgcttatactccacaagaaatagttggaggaattccagattcagaacaactgctaccagaattgttgaaaaaagctggatatgtttcaaaaatagtgggtaaatggcacttgggacatcgtccacagtttcatccacttaaacatggttttgatgagtggtttggatccccaaattgccacttcggaccatatgacaacaaagcgaggccgaacataccagtttatcgagactgggagatggttggaagatattatgaagagttccccattaatcttaaaacaggggaggccaatctcacacaaatatatcttcaagaagctctcgatttcataaagagacaggctcgtcatcatccattcttcctttattgggccgtcgatgcaacccatgcgcccgtttatgcttctaaaccatttttgggtacttcccagcggggcagatatggagacgccgtacgtgaaatcgatgattcaattggaaaaatacttgaactcctccaggatttgcatgtggctgataatacttttgtcttcttcacatctgataatggagccgctttaataagcgctccagaacagggaggcagtaacggtcctttcttgtgtggtaagcagacgacttttgaaggaggaatgagagaaccggcactggcatggtggccgggtcacgtcacggcaggtcaagtgtctcatcaactaggttccattatggatttgtttacaacttcattggctctagcaggactcacgccaccatcagatcgagctattgatggacttaacctgcttccaacattgctgcaaggacgtttgatggaccgcccaatcttttactatcgaggagatacacttatggccgcaactcttgggcaacacaaagcacatttctggacttggactaattcatgggagaacttcagacaaggcatagacttctgtccaggacagaacgtttcaggggtcactacgcacaatttggaggatcacaccaaattgccgctgatattccatcttggaagagatccaggcgagcgctttccactatcgttcgcctctgctgagtaccaagaagcactctctagaatcacatccgttgttcagcaacatcaagaagcactcgtgcctgcacaaccacaactgaatgtgtgcaattgggcagtcatgaactgggctccaccaggatgcgaaaaattgggaaagtgccttacaccaccggaatcaattccaaaaaaatgcctttggtcgcac

SEQ ID NO: 10486 - DNA, 1566 bp, Artificial Sequence
  derived and/or modified sequence
atggctgccgtggtagcagctacacggtggtggcagttactattggtgctgtccgccgcagggatgggagcttcaggggcacctcaacctcccaatatccttctgctgcttatggatgatatgggatggggcgatcttggcgtttacggggagccaagccgtgagacccccaatctggacagaatggctgcagagggtttgttgtttcctaatttttattctgcgaaccccctgtgctcgccctctcgagcagctctgcttaccgggcgcctccctattagaaatggtttttacacgaccaatgctcacgcacgtaacgcttacacaccgcaggaaatagttgggggtatccccgatagcgagcagctactgcctgaactattgaagaaagcggggtacgtgtcaaagattgttggtaagtggcatcttggccacaggccccagttccacccactgaaacatggattcgatgaatggtttggatcgccgaactgccatttcgggccttacgataacaaagcccgccccaacatccccgtataccgggactgggagatggtgggcagatactatgaagaattccccataaatctaaagacaggcgaggcaaacttaacccagatctacctgcaggaggcgctggacttcatcaagcgtcaggccaggcaccacccatttttcctgtactgggcggtggatgccacgcatgcacctgtctacgcgagtaagccttttctgggaacctcccagcggggtcggtacggggacgcggtcagggagatagatgatagcataggcaagatccttgaactattgcaggacttgcatgtggccgataatacattcgtgttcttcactagcgacaatggagccgccttgatttctgccccagagcaggggggaagtaatgggccattcttgtgcgggaaacagacaacctttgagggagggatgcgggagcctgccctggcatggtggcccgggcacgtaaccgcggggcaggtgagtcatcagttgggctccattatggacttgttcacaacaagcctagcactcgcaggtttgactccaccttcagatcgcgccatcgatggactgaatctactgccaacactgctgcaggggcgcttgatggatcgtccaattttttactatcgcggggacacactcatggccgcgactctgggacagcacaaagcccatttctggacatggactaactcttgggaaaattttagacagggtatagatttttgtcccggtcagaatgtgagcggggtcaccacccacaatctggaggatcataccaagctgcccctgatattccatctgggcagggatcctggcgaaagattccccctatcatttgcgagcgccgagtaccaagaagccttaagcaggatcaccagcgttgtccagcagcaccaagaggccttggtccccgcccagccacagctgaatgtctgtaactgggccgtgatgaactgggccccaccaggctgtgaaaaactcggaaaatgcctgacgccacccgagagtattcccaaaaagtgcttgtggagccac

SEQ ID NO: 10487 - DNA, 1566 bp, Artificial Sequence
  derived and/or modified sequence
atggcggccgtggtggccgccacccgctggtggcaactgctcctggtgttgagcgcggcaggaatgggggcgagcggcgccccgcagcctccgaatatccttctgctcctcatggacgatatgggctggggagacttgggagtgtacggcgagcccagccgggaaaccccaaacctggacaggatggcagcggaaggactgctcttcccaaacttctattcggcaaatccgctctgttcaccgtcgcgcgccgcactcctgactggacgccttccgatccggaacggcttctacactaccaatgcccatgccaggaacgcctacacccctcaagaaatcgtgggcggaatcccggactcagagcagctgttgccggagctcctgaagaaagccggatacgtctcgaagatcgtgggaaagtggcatctgggacatcgcccgcaatttcatccactgaaacacgggttcgacgaatggttcggaagcccaaactgtcactttggcccgtacgataacaaggcacggccaaatatcccagtgtacagggactgggagatggtcggccggtactacgaagaattcccgatcaaccttaagactggagaggcaaatctgactcagatctacctccaagaggcgctcgatttcatcaaaaggcaagcccggcatcacccgtttttcctgtactgggcggtggatgccacccatgcaccagtctacgcgagcaagcccttcctcgggacctcacaacgcggccgctacggagacgcggtgcgggagatcgacgacagcatcggtaagattctggaactgctgcaggatctccatgtggcggacaacactttcgtgtttttcacttcagacaacggcgccgcgctgatctcagctccggaacagggtggttcgaatggaccctttctgtgtggaaaacaaactaccttcgaaggaggcatgcgggagcccgcccttgcatggtggccggggcacgtgactgcaggacaggtgtcccatcagctgggatcgatcatggaccttttcactaccagcctggcgctggcgggtctgacccctccttctgacagggcgatcgatggccttaacctcctcccaacgctgctccaaggcaggctgatggaccgcccaatcttctactatagaggagataccctcatggctgcgaccctgggccagcacaaggcgcatttttggacttggacgaactcgtgggaaaacttccggcagggaatcgatttctgcccgggtcaaaacgtctccggcgtgacgacccacaatctcgaggatcacaccaaacttccgctgatcttccatcttggacgcgatccaggtgagcgctttccactctcgtttgcctcggctgaataccaagaagccctctcacgcattacttcagtggtgcagcagcatcaagaagcgttggtgcccgcccagccccaactgaacgtctgcaactgggccgtcatgaactgggcgccgcccggctgtgagaaactggggaagtgcctgacgccccccgagtccatccctaagaagtgcctctggtcccac

SEQ ID NO: 10488 - DNA, 1566 bp, Artificial Sequence
  derived and/or modified sequence
atggctgcggtggtggccgcaacacgctggtggcagttgcttcttgtgctatctgctgccggaatgggagcttcaggcgccccacagcccccaaacattttactgttgttaatggacgatatgggttggggtgatcttggcgtttatggagaaccttcgcgtgagacaccaaatcttgatagaatggctgcggagggattgctttttcccaacttttattcagccaatcctctctgttcaccaagccgagccgctcttctaacaggacgacttcctatcaggaacggattttatactacaaatgcacacgctcgtaatgcctatacaccacaagaaatcgtgggtgggatcccagacagtgaacagcttctgcctgagttactcaaaaaggcagggtacgtgagcaaaatagtgggaaagtggcatctgggtcataggccacaatttcaccccctcaagcatgggttcgatgaatggttcggttccccgaattgtcactttggaccttatgacaataaagcccgtcccaatattcctgtttatcgcgattgggaaatggtcgggcgttactatgaagagttccctatcaatctcaagaccggtgaagctaatctgacacaaatctaccttcaggaagctctagattttatcaagagacaagcgagacatcacccgttctttttatattgggccgtggacgcaacacacgctcctgtgtatgcctcaaaacctttcttgggaacctcccaacgggggcggtatggcgatgctgttagggagattgatgattccattggcaagattcttgaattgctgcaggatttacacgtcgccgacaatacttttgtcttcttcacatctgataatggtgctgcacttataagcgcccctgaacaggggggctcaaatggacctttcctctgcggtaagcaaactacgtttgaggggggaatgagagaaccagctttagcttggtggcccggacacgtaaccgccggacaggttagtcatcagttaggctccattatggatcttttcactaccagcttggcattggcgggtctaactccaccgtcggatcgagccatcgatggtcttaacctcctacccacattacttcaagggaggttgatggaccgaccaattttctattataggggagacacgcttatggccgccactttgggtcaacacaaggctcacttctggacttggaccaactcttgggaaaactttaggcaaggtattgacttttgtcctggtcaaaacgtctccggagtgacgactcataacctcgaagatcacacaaaattgcctctcatattccatcttggacgcgatccaggtgaaagatttcctttatcgttcgcttccgctgaataccaagaggccttatcaagaatcacgagcgttgtgcaacagcatcaggaggctttggttcctgcccaacctcagctgaacgtttgtaactgggccgttatgaattgggctcctccaggctgtgaaaagcttggaaaatgcctgactcctcctgagtcaatcccaaaaaagtgcctctggagccat

SEQ ID NO: 10489 - DNA, 1566 bp, Artificial Sequence
  derived and/or modified sequence
atggctgcggtggtggcagccactcggtggtggcagctccttctagtactctccgcagccggtatgggagcttccggagctccccagccccctaatatccttttgctgctaatggatgatatgggttggggcgacctcggtgtgtatggcgagcctagtagagagacacccaaccttgaccgtatggctgctgagggtcttcttttccccaatttttattctgccaacccgttgtgcagtccgagtagggccgcactcttgactggtagactcccgataagaaacggcttctacactactaacgcccatgccagaaacgcctataccccacaagagattgtagggggaattcctgactccgagcagttacttcccgagctgctgaaaaaggctggttacgtcagcaagatcgttggcaagtggcacctaggccaccggccccagtttcatccgctgaaacatggattcgacgagtggttcggttctccaaactgtcatttcgggccatatgataacaaagcaaggcctaatattcccgtttaccgcgattgggagatggtcggccgctattatgaggaattcccgatcaacctgaagacaggcgaggccaacttgacccaaatctacctgcaagaagcgttggatttcatcaagaggcaggcgcgccaccatcctttcttcctgtactgggcagtcgacgctacacacgctcccgtctatgcctcgaaaccctttctggggacttcccaacgaggtcgctacggggacgccgtgagggagatcgacgattcaattggtaagatcctggaattgctgcaggatctgcatgtggccgacaatacttttgtgttcttcacctccgataacggagctgccctcattagcgctcctgaacaggggggctcaaatggtcccttcctctgcggaaaacagaccaccttcgaaggcggtatgcgcgagcctgcactggcttggtggcccggccatgtgacggcgggacaagtctcacaccaactgggtagtattatggatctgtttacaactagtttggcactggccggattgactccgccctctgatcgggcaattgatggcctcaatctcctgcccacactactacagggaaggcttatggacaggccgattttttactaccgaggcgacaccctgatggccgccactctggggcagcataaggcccacttttggacttggacaaattcatgggaaaatttcaggcagggaatcgatttttgtccgggccagaatgtgtccggagtgaccacgcacaatttggaggatcacacgaaactgccacttatcttccacctcggacgcgatcccggtgagcggttccccctttcttttgcttcggcagagtaccaagaagcattaagtcgcatcacctctgtggttcagcagcatcaggaagccctagtgccggcgcaacctcaactgaatgtatgcaattgggccgtcatgaactgggctcctcctgggtgtgaaaaactcgggaaatgcctgactccacccgagagcataccaaaaaaatgtctctggtcccac

SEQ ID NO: 10490 - DNA, 1566 bp, Artificial Sequence
  derived and/or modified sequence
atggctgcagtggtcgccgcgacaagatggtggcaactgcttctcgtcctcagcgcagctgggatgggcgctagtggtgcccctcagcccccaaatattctgttactgcttatggatgatatgggatggggcgacctgggcgtttatggggaacccagccgtgagactcccaatttggaccgcatggcagcggagggactcttgttccccaacttctactcggcaaatccactgtgttctccttccagggcggctctgctgaccggaagactaccaattcgcaatggattctacaccaccaacgctcacgcacgtaacgcctatacaccacaggaaatcgtgggcggcatacctgacagtgagcagctacttcccgaactcctgaaaaaagcaggatacgtaagtaaaatcgtggggaagtggcacctgggacatcgcccccagttccacccacttaagcatggatttgacgaatggttcggcagtccaaattgccacttcggcccctacgataataaggcacgcccaaacatacctgtatatcgggactgggagatggttggtcgttattatgaagagttccctatcaacctcaagaccggagaagcaaacctgacgcaaatctacctgcaggaggcgctggactttatcaagcggcaggcccgtcaccacccatttttcttgtattgggctgtggacgctacgcatgccccagtgtacgcatcaaagcctttcctgggcaccagccagagaggccggtacggggacgcagtgcgcgagatcgacgattctatcggtaagatcctggagctcctgcaggacctccatgtggccgataacaccttcgtgttcttcacctccgacaacggcgccgctcttatatcagcgccagagcaggggggatcgaatggtccgttcctgtgcgggaagcagacaacctttgaggggggaatgcgtgagccagccctcgcttggtggcccggacatgtgacagctggccaggtgagccatcagttgggttctatcatggacctcttcacaaccagcttggccctcgcaggcctcactccccctagtgatcgcgctatcgacggcctcaacctgctccctaccttgctccaaggtagacttatggaccggcctatattttattacaggggggacacgctgatggctgccacactaggtcaacataaggctcacttttggacctggacgaattcttgggagaactttcggcagggcatagacttttgtcctgggcagaatgtgagcggcgtgactacccataatctggaagatcacaccaagttgcctcttatctttcacttaggccgcgaccccggcgaaagatttccgcttagcttcgcttccgccgaataccaggaggccctctctcggatcacatctgttgtacagcaacatcaagaggcccttgtgccagcgcagccacaactgaacgtttgcaattgggcagtaatgaactgggcccctccgggctgtgaaaagctgggaaagtgcttaactccacctgaatcaattccgaagaaatgcctgtggagtcat

SEQ ID NO: 10491 - DNA, 1566 bp, Artificial Sequence
  derived and/or modified sequence
atggcagcggtagtggcggcaactaggtggtggcaactcctgctcgtgctcagcgccgcaggtatgggagcttcaggcgctccgcaaccgcccaatatccttcttcttctcatggatgacatgggttggggtgatttgggtgtttacggagaaccaagccgcgaaaccccgaacctggaccgtatggctgcagagggcctgcttttcccgaacttctactccgcaaaccctctctgctcgccttcccgggcagcacttcttaccggtagactccccattagaaacgggttttacacgaccaacgcccatgcaaggaacgcgtacacgcctcaggaaattgttggtggaattccagattcagaacaactgcttccagagcttctgaaaaaggccggatacgtgtcgaagatcgtcggtaagtggcaccttgggcatcgccctcagtttcatcctctgaaacatggatttgacgagtggttcgggtcccctaactgtcatttcggtccatacgacaataaggcaagacccaacattcctgtgtaccgcgattgggagatggtgggcagatactacgaagaatttccaattaacctcaaaaccggtgaagccaatcttacccaaatctatctgcaagaggcactcgactttatcaagcggcaagcacggcatcatccatttttcctgtactgggccgtcgatgcaacccatgcgccagtctacgcgtcaaagccatttcttggcactagccaaagaggacgttacggggacgccgtgagagaaattgatgattcaattggaaagattcttgagctcctgcaagaccttcatgtggctgacaacacttttgtgttctttacctcagacaacggagcggcccttatctccgcgcccgaacaaggtggatctaacggtcctttcctctgtgggaagcagaccactttcgaaggagggatgagggaacccgcactggcatggtggccaggacatgtgaccgccggacaagtctcccatcagctcggctcgattatggatttgttcactacttccttggcactcgcaggcctcactcctccctcggaccgcgcgatcgatgggctgaacctgctgcctaccctccttcaaggcagactgatggacagacctatattctactaccggggagacacccttatggcggcaactctggggcagcacaaggcccatttttggacctggaccaactcctgggagaatttccgtcagggtatcgacttttgtccgggacagaatgtctccggtgtgacgactcataacctcgaggatcacactaaacttcctctcatttttcaccttggaagggatcctggcgaaagatttcctctgtcgtttgcgtcagcagaataccaagaagctctttcacggattacgtcggtcgtgcagcaacatcaagaagccctcgtgcctgcacaaccccaactgaatgtgtgcaactgggccgtgatgaattgggcacctccgggctgtgaaaaacttgggaaatgtctgaccccacccgaatccattcctaaaaagtgtctctggtcccat

SEQ ID NO: 10492 - DNA, 1566 bp, Artificial Sequence
  derived and/or modified sequence
atggctgcagtcgtggcagcaacccggtggtggcagctcctgcttgtcctgtcggccgccggaatgggtgcgagcggagcaccccagccgccaaacattttgcttttgctcatggatgacatggggtggggtgacctcggagtgtacggcgagccctccagagagactcctaacttggacagaatggcagcagaagggctgctctttccaaacttctattcggcaaatcccctgtgttcaccatccagggctgcactcctcaccggcagactgcctattcgcaacggattctacactactaatgcccatgcacgtaatgcttacacgcctcaagaaatcgtcggcggtatccccgactcggagcagcttctgcctgagcttctgaagaaagccggctacgtctccaagatagtcggcaagtggcaccttggtcatcggcctcaatttcacccactgaaacatggatttgatgaatggttcgggtccccaaattgccactttggtccctacgataacaaagcaaggccgaatatccctgtgtacagggactgggaaatggtgggacgctactacgaggagtttcctatcaacttgaaaacgggagaagcaaaccttacccagatttaccttcaggaggccctggacttcataaagagacaggcacgtcaccacccatttttcctgtactgggccgtggatgccactcacgccccggtctacgcatcgaagccatttctgggaacctctcaaagaggccgatacggagatgcagttagagaaattgatgacagcatcggaaagatcctcgagctgctgcaggacctgcatgtcgcagataataccttcgtgttctttactagcgataatggagcagctctgatctccgcacccgagcaggggggatcgaatggcccttttctgtgtggcaaacaaaccacctttgagggcggtatgagggaacccgcactggcatggtggcctggtcatgtgaccgcaggacaggtgtcccatcaacttggttccataatggatctcttcaccacctcgctggcgctggcaggactcactccaccgtcagaccgggcaatagatggcctcaatctgcttcctactctgctgcaaggcagactcatggatcgtccgatcttttactatcgcggtgataccctcatggcagcaactttgggtcaacacaaagcacacttttggacctggaccaactcgtgggagaactttagacaagggattgacttctgccctggacagaacgtgtcaggggtgactacgcataatctcgaggatcatacgaagctccctctgattttccaccttggacgcgatcctggagagcggtttccactctccttcgcgtccgcagaataccaggaagcactctcaagaattacttccgtggtgcagcagcatcaagaggcattggtgccagcacaacctcagcttaacgtctgtaattgggcagtgatgaactgggcaccgcctggttgtgaaaagttgggcaagtgcctgactcctcctgagtccattcctaagaaatgtctgtggtcccat

SEQ ID NO: 10493 - DNA, 1566 bp, Artificial Sequence
  derived and/or modified sequence
atggcagctgtggttgcagccacacggtggtggcaactgctgcttgtgctgtcagctgcaggtatgggagcctctggggcaccgcagccgcctaatattctgctgttgcttatggatgatatggggtggggggatctaggcgtgtatggcgagccctcacgagaaacaccaaacctcgatagaatggccgctgagggattattgtttccgaacttttactcagcaaaccccctgtgtagcccctcacgagccgccctgcttaccggccgtctgccaatccggaatggcttctataccactaatgctcacgcccggaacgcgtatacaccgcaggagatagtgggcggtatacccgactctgagcagttactcccagaactgttgaagaaggcaggatacgtttcaaaaatcgtaggcaaatggcatctgggccatcggcctcagtttcatcctctgaagcacggatttgacgaatggttcggatcaccaaactgccacttcggtccatacgacaataaggcccgacctaacatacctgtttacagggactgggagatggtcggccgctactacgaggaattccccatcaaccttaagaccggtgaggctaacctgacgcagatttacctgcaggaggccctggatttcatcaaaagacaggcccgacaccatcccttcttcctatattgggcagtcgacgcgacccacgcgcccgtctatgcctccaagcccttcctgggtacatcccagcggggtcgctatggcgacgccgtaagggaaatcgacgacagtattggcaaaattctggaattgctccaggatctgcatgtggctgacaacacattcgtgttttttacaagcgataacggcgctgccctcatctccgccccggagcaaggcggcagcaatggcccttttttatgcggaaaacaaactactttcgaaggtggaatgcgagagcccgctctagcctggtggcccggccacgtgaccgccggccaggtgtctcatcagctagggtccattatggatctatttactaccagcctcgctctcgctggtctcactcctccttccgaccgggccattgacggactgaacctgttgccaactctgctccaggggagactcatggacagaccaatcttctattatcgaggcgatactttaatggcggctactttgggccagcacaaggcacacttttggacttggaccaacagttgggagaatttccggcagggcattgatttttgcccgggccagaacgtgtccggagtgactacccataatctcgaagaccacaccaagcttccgcttatctttcacctggggcgcgacccaggcgaaaggttccctctgtcctttgcgtctgcagaataccaggaggctctctccaggattaccagtgtggtgcaacagcaccaggaggcactggtcccagcgcagcctcagttaaacgtatgcaactgggccgttatgaattgggcaccacctggctgcgagaagcttggtaaatgtctgacccctcctgaaagcattcccaagaagtgcctgtggtcacac

SEQ ID NO: 10494 - DNA, 1566 bp, Artificial Sequence
  derived and/or modified sequence
atggcagcagttgtagccgctacccgatggtggcagctcttgctggtactgtcagctgctggaatgggggcaagcggagccccacagcctcccaatattctgttgctgttaatggacgacatggggtggggggacctgggcgtgtatggtgagccttctcgggagacccctaatctcgacaggatggcagctgagggcctcctgttccccaatttctactctgccaatcccctctgctctcctagccgggcagccctcctcaccgggcggttacctatccgcaatgggttttatactactaatgcccacgccagaaacgcatatacccctcaggagatcgtgggagggatcccagattccgagcagctgctcccggagctgctgaagaaagctggttacgtgtctaaaattgtaggaaagtggcatctgggccacagaccgcaatttcaccccctgaaacacggatttgatgaatggtttggaagccctaactgccacttcggaccttatgacaacaaagcgcggccaaatatccctgtgtatagagattgggagatggtggggcggtactacgaagagttcccaatcaacctaaagaccggggaagctaacctcacacagatctacctacaagaggctttggactttataaaaagacaagctcgccatcacccatttttcctgtactgggcagtggatgcgacccacgccccagtgtatgcttctaaacccttcctggggacaagtcagcgaggtcgatatggcgatgctgtgagggagattgacgactctattggcaagattcttgaactgctgcaggatcttcacgtggccgacaacaccttcgtgttcttcacgagcgataatggagctgcccttatatccgctccagagcaggggggctcaaacggaccctttctgtgcggcaagcagaccacctttgaagggggtatgcgtgagcccgctctggcttggtggccaggccacgtgaccgcggggcaggtatcccaccaacttggttccatcatggacctgtttaccacctcgttggctctcgccggacttacccccccctctgaccgggccatagatggcctcaatctccttccgaccctgctccaaggacggctaatggatcggccaattttttactaccgcggcgatacactcatggctgctaccttaggacagcacaaagctcatttctggacatggactaattcatgggagaacttccgccagggcatcgacttttgtcctggacagaatgtttctggagtgactactcacaatctggaagatcatacgaaattaccactgatcttccatctggggagagaccccggagagcggttccccctttccttcgccagcgcagagtaccaggaagccctgtcgaggatcacaagcgtagtgcagcagcaccaggaggccctggttccggcccaacctcaactaaacgtttgcaattgggccgtgatgaattgggcgcctcccggctgcgaaaagctggggaagtgcctgactcctcccgaaagcatccctaaaaagtgcctctggagccat

SEQ ID NO: 10495 - DNA, 1566 bp, Artificial Sequence
  derived and/or modified sequence
atggcggcagtggttgctgcaacacgctggtggcagctcctgctagtgctgagtgcggccgggatgggagcctccggcgcaccccagcctcccaatattttgctcctgctgatggatgacatgggctggggagatctgggcgtgtacggagaaccctcacgggagacacctaatctggaccggatggcggcagaaggtctgctgttcccgaatttctactctgcgaatccactatgtagcccttctagggcagcactgctgaccgggcggctgcctatcagaaacggtttttatacaactaacgcccacgctagaaatgcctacacgccccaggagattgttggtggcattcccgattcggagcagctccttccagagctcctgaaaaaagccgggtatgtaagtaagatcgtggggaaatggcacctcgggcatcgaccccagtttcacccactgaagcacgggttcgatgagtggttcgggtcacccaactgccattttgggccctatgacaacaaagcccgcccgaatatacccgtttatagagactgggaaatggttggacgatactacgaggagtttcctatcaatcttaaaaccggtgaagccaatttgacccaaatctacttgcaggaagctcttgattttattaagcggcaggctaggcaccatccattctttctgtattgggccgttgatgcaacccatgcgcctgtgtacgcatctaagcccttcttgggcacaagtcagcgcgggaggtatggcgatgcagtccgcgaaattgacgattcgatcggcaagatactggagctgctgcaggacctgcatgtggcggacaacactttcgtgtttttcacttctgacaatggagcagctctgatctctgctcctgagcaggggggtagtaatggcccttttctgtgcggtaagcagaccactttcgagggaggcatgcgggagccagctctcgcctggtggccaggacatgtcacagctggccaggtatcgcaccagctcgggtctatcatggatctttttacgacgtctctcgctctagccggtttaacgcctccctcagacagagctatagacggcttgaatctcttgcccacgctgctgcagggccgtctcatggacagaccaattttttattaccgcggcgataccctgatggctgccaccttagggcagcacaaggcccatttctggacatggacaaactcctgggagaattttcggcagggaattgacttctgccccggacagaacgtgtcaggagtgacgacacacaacttggaggaccataccaagcttcccctcatttttcacttggggagggatccaggagaacgctttccactgagttttgcttctgccgagtatcaggaggccttaagcagaattacctctgttgtacagcaacatcaagaagcgctggttccagcgcagccacaattgaatgtctgtaattgggctgtcatgaactgggccccacccggttgtgagaagctcggaaagtgcctgactcctcctgaatccattcccaagaaatgcctgtggtctcat

SEQ ID NO: 10496 - DNA, 1566 bp, Artificial Sequence
  derived and/or modified sequence
atggcagcggttgtcgccgccaccaggtggtggcagctgctgcttgtgttaagtgcagcgggtatgggagcaagcggcgctcctcagccccccaatattctccttcttctgatggatgacatgggctggggagatctcggagtctacggagagccatcaagggagacccctaatctggaccgtatggcggctgaagggctcttgttcccgaatttctattcagccaacccactgtgctcaccatcacgcgctgctctcctgacagggcggctgcctataagaaacggtttttataccactaacgcgcacgcccgcaatgcttacacacctcaggagatcgtgggtgggatacccgacagcgaacagctgttacccgaattgctcaagaaggctggctacgtcagtaaaattgtgggaaagtggcatttgggccacaggcctcaattccatccgctgaagcacggctttgacgagtggttcggaagcccaaactgccatttcgggccttacgacaataaggccagaccaaatatccccgtgtaccgagactgggagatggtgggacgatactacgaggagttcccaatcaatctcaaaaccggggaagcaaacttgactcagatttatttacaagaggcactcgacttcattaaaaggcaggcacggcaccaccccttttttttgtactgggctgttgatgcaacacacgcaccagtgtatgcctcaaagcccttcctcggaacgagtcagcgaggccgatacggcgacgctgtgagggaaatcgatgactcaattggaaagatccttgaacttttgcaggatctccacgttgcagacaatacatttgttttcttcacttcggacaacggggccgcccttatctccgcacctgagcagggaggttctaatgggcccttcctgtgcggaaagcaaaccacctttgaaggcggcatgagggagccagctctcgcctggtggccgggccacgtgactgctggacaggtctcccatcagctgggcagcatcatggacctgtttacaacaagcctggcgctcgccggacttacccctccatctgatagggctatagatggactcaacctattgccgactttgctgcagggtaggctgatggacagaccaatcttctattaccgtggggataccttgatggcggccacacttggccagcataaagcgcacttctggacatggacaaatagctgggagaattttagacagggtatcgacttctgcccgggccagaatgtgtctggtgtgaccacgcacaatctcgaggaccataccaagctgcctctgatattccatctcgggcgcgaccctggggagcgcttccctttgagtttcgcatcagcagaatatcaggaggcccttagtcggatcacctctgtggtgcagcaacaccaggaggctttagtgccggcccaaccgcagttaaatgtgtgtaactgggcagtcatgaattgggcacctccgggttgtgagaagctaggtaagtgtctgactcctcctgagtccatccctaagaaatgtctatggagccat

SEQ ID NO: 10497 - DNA, 1566 bp, Artificial Sequence
  derived and/or modified sequence
atggccgcagtggtagctgctacgagatggtggcagcttttgctggtcttgtccgcagctgggatgggagcttctggggccccccagccccctaacatcctccttcttcttatggatgatatggggtggggggatcttggagtctacggggaacccagtcgggagactccaaacctcgataggatggccgctgaagggctactcttccctaacttctattcggcaaaccctctctgttccccctctcgggccgcactgctcacaggaagactgccaatcagaaatggattctatactacaaatgcccacgctagaaatgcctatactcctcaggaaatcgtgggaggaatacctgattctgaacagctgctacccgaacttcttaaaaaggctggatatgtgtccaaaatcgtagggaagtggcacttgggacacaggccacagttccatccactaaaacacgggttcgatgagtggtttggatctcccaattgtcattttgggccttatgataacaaagcacgacctaacatccccgtgtatagagattgggaaatggtcggacggtattatgaagaattcccaataaacttaaaaacaggggaggccaatctgactcaaatatatctacaggaagctttggattttataaaaaggcaggcgcggcaccatcctttctttctctattgggccgtagatgcaacacacgcacctgtctatgcctctaaacctttcttaggaacatctcagcgggggcgatatggagatgccgttcgggaaatagatgattccatcggaaaaatactcgaactgctgcaggaccttcacgtggctgacaatacattcgtattctttacatccgataacggggctgccctcatttctgcccctgaacaagggggatccaacgggcctttcctgtgtgggaaacagacaacttttgaaggaggaatgcgggaaccagccctcgcatggtggcccggacatgttactgcgggacaggtgtctcatcagctcggatccatcatggatctatttactacgagtcttgccttagccgggctgactccaccatctgatagagccatcgatggactgaatctccttcccactctccttcagggaaggctgatggatcgccccatattctattaccgcggagatacactcatggccgctacactggggcagcacaaggcccatttttggacttggacaaactcttgggaaaatttccgccagggaatagatttctgccccggacagaacgtatctggggtgacaacacacaatcttgaagatcacacaaaactacccctcatctttcacctagggagggatcctggggagaggttccccctgtccttcgctagtgcagaataccaggaagccctaagtcggattacatctgtggtccagcaacatcaggaagctctcgttcccgcccagcctcaattaaacgtgtgtaattgggctgtaatgaactgggctcctcccgggtgtgaaaaacttgggaaatgtcttactcctccagaatccatccccaagaagtgtttatggtctcac

SEQ ID NO: 10498 - DNA, 1566 bp, Artificial Sequence
  derived and/or modified sequence
atggccgctgtcgtggccgccactcgctggtggcagctgctccttgtgctgagcgccgctggaatgggagcgtccggagcccctcagccgccgaacatcctgcttcttcttatggacgacatgggttggggcgacctgggggtctacggcgagccgtcaagggagactccgaatctggaccgcatggccgcggaaggacttctgttcccaaacttctactctgccaacccattgtgctcgccctccagggcggcactcctgactggccggctcccgatccggaatggtttctataccaccaatgcccacgcccgcaacgcgtacaccccacaagaaatcgtgggtggtattcccgattccgaacagctgctcccggaacttctgaagaaggccggctacgtgtcgaagatcgtgggaaagtggcacctcggacatcgcccgcagttccatccgctgaagcacggattcgacgaatggtttggaagcccaaattgtcattttggtccatatgacaataaggctagacctaatatcccggtgtaccgcgactgggaaatggtgggacggtactacgaggaattccctatcaacttgaaaacgggagaggccaatctgacccagatttacctgcaggaggcactcgactttatcaagcggcaggccaggcaccacccatttttcctgtactgggcggtcgacgctacccacgccccagtgtacgcgtcgaaaccgttccttggaaccagccaacgcgggcggtatggggacgccgtcagagaaatcgatgacagtattggtaagatcctcgaactgcttcaggacctgcacgttgcggataataccttcgtgttcttcacttcagacaacggagctgcactgatctcggccccggagcagggaggatccaacgggcctttcctctgcggtaagcaaaccactttcgaaggcggaatgcgcgaaccggcactggcctggtggccaggacatgtcactgccggccaagtctcgcatcagctgggctcgatcatggaccttttcaccaccagcctggccctggccggactcactccgccgtcggaccgcgctatcgacggcttgaatttgttgcctaccctgctccaaggccgcctcatggacaggccgattttctactacaggggcgacaccttgatggctgccactcttggccaacacaaggcccatttctggacctggaccaactcatgggagaatttcagacaggggatagacttttgcccggggcaaaacgtgtccggggtcactacccacaatttggaggatcacaccaagctgcccctgatcttccatctgggcagagatcctggtgagaggttcccgctctcattcgcttccgcggaataccaggaagcattgtcgagaatcacctcggtggtacaacagcaccaggaggccttggtcccggcccaaccccagctgaacgtctgcaactgggccgtgatgaattgggcaccgcctggctgcgagaagctgggaaaatgcctgactccgccagaatcaatccccaagaagtgtctctggtcccac

SEQ ID NO: 10499 - DNA, 1566 bp, Artificial Sequence
  derived and/or modified sequence
atggccgcagtcgtggcggcgactaggtggtggcaactcctgctcgtgttgtcagcagcaggtatgggggcatccggagcacctcagccacctaatatccttctcctcctcatggacgacatgggttggggtgatctcggtgtctacggtgagccttcccgtgaaaccccaaacctggatcggatggcagccgaggggctgctgttcccgaacttctattcagcaaaccctctttgctctccctcccgcgcagcactgcttactggacgactgcctatccgcaatggattttacactaccaacgcgcatgctcgtaacgcatatacgcctcaggagatcgtcggtggaatacccgactcagaacagcttctgccggaactgttgaaaaaggcagggtacgtttcgaagatagtgggaaaatggcatctgggtcacaggccacaattccaccctctgaagcatgggtttgacgagtggttcggatcgcctaactgtcattttgggccatacgacaacaaggctagaccgaatattcctgtctaccgtgattgggagatggtgggccgatactacgaggaatttcctattaaccttaaaaccggagaagcaaatctcacccagatctaccttcaggaggcgctggatttcatcaaaaggcaggcaagacatcacccattctttctttactgggcggtcgacgcaactcatgcacccgtgtatgcatccaagccatttctgggtactagccaacgtgggcgctacggtgacgcagtccgcgaaatagatgattccatcggaaagatactcgaactgctgcaggaccttcatgtcgccgataacaccttcgtgttctttacctccgataacggggccgcccttatctcggcgccagagcagggtgggtccaacggtcctttcctctgcggtaagcagaccaccttcgagggtgggatgagagaacccgccctggcatggtggccaggccacgtgaccgcaggacaggtatcgcatcagctgggatcgatcatggatctctttactacttcccttgctcttgccggcctgacccctccttccgatcgggcaattgatggtttgaatctgctgcccactctgcttcaaggcagactgatggatagacctattttctactaccgaggtgataccctcatggccgcgactctgggacagcacaaggcacacttctggacttggaccaactcgtgggagaactttcgccaagggatcgacttttgtcctggccaaaacgtgtccggcgtgactacccataacctggaagatcataccaagctccctctgattttccatttgggtcgcgatccaggcgaacgattcccactgtcgtttgcatccgcggaataccaggaggcactttcgaggattactagcgttgtgcaacaacatcaagaggcccttgtcccagctcagccccagctcaatgtgtgcaattgggctgtgatgaattgggcccctccaggctgcgagaagctgggaaagtgtctgactcctccggagagcattcccaaaaagtgtctgtggtcgcac

SEQ ID NO: 10500 - DNA, 1566 bp, Artificial Sequence
  derived and/or modified sequence
atggccgccgtggtggcagctacccggtggtggcagctcctactggtcctcagcgccgcaggtatgggggcttccggtgcaccacaaccgccaaatattctgcttctgctcatggacgacatgggatggggcgacctgggcgtgtacggtgaaccctcccgcgagactcccaatttagaccgtatggccgccgagggactcctgttccctaatttctattcagcaaatcccctttgttcccctagtagagctgctttgctcacaggacgccttccaattaggaatgggttctacactaccaatgctcacgccagaaacgcctacactcctcaggagatagttggtggtatccccgactcggagcaattactgcctgaactgctgaaaaaagctgggtacgtaagcaaaatcgtcgggaaatggcacctggggcaccgcccccagtttcaccccctgaaacacggttttgacgagtggtttggtagtcctaattgccactttggcccgtacgacaataaggctagacctaatattccggtttatagagattgggaaatggtgggcaggtattacgaagagtttcctataaacctgaagactggtgaggcgaatctcactcagatctatctccaggaggctctagactttataaagcggcaagctaggcatcacccctttttcctctactgggcagtagacgccactcatgctcccgtctatgctagcaaacccttcctggggacttctcagcggggtcggtacggtgacgccgtgcgcgaaatcgacgacagtatcggtaagatcctggagcttctgcaggatttgcatgttgccgacaatacctttgttttcttcacctccgacaatggggctgccctaatcagcgcgcccgaacagggagggagcaatggtccatttttgtgcggaaagcagacaacgttcgagggaggaatgcgggagcccgccttagcttggtggcctggccatgtaactgcaggacaagtctctcaccaactggggagcattatggaccttttcacaacaagcctggccctagccggactcaccccacctagtgatcgcgccattgatggccttaatctcctgccaacactgctgcagggtcgcctaatggacaggcccatcttctattatcgaggagacacccttatggccgccacgcttggccaacataaagcacatttctggacttggactaactcttgggaaaatttccggcagggaattgatttttgtccgggccagaacgtgtctggcgtgacaacccataacctggaggatcacacaaagctccctctgatcttccaccttggcagagaccccggtgagaggtttcctctgtcttttgcctctgctgaataccaggaggccctctccagaataacaagcgtcgttcagcagcatcaagaggccctcgtgccagcccaacctcaattgaatgtctgtaactgggctgtcatgaattgggcccctcctggctgcgaaaaactgggaaagtgtctcacaccacccgaaagtattccaaaaaagtgcctgtggtcccat

SEQ ID NO: 10501 - DNA, 1566 bp, Artificial Sequence
  derived and/or modified sequence
atggctgctgtggtggctgccaccaggtggtggcaactccttcttgtattaagtgcagccgggatgggtgcctcaggcgctccacagcctcctaacatcctactactactgatggacgatatgggatggggggatttgggagtgtacggagagccatcccgggaaacaccaaaccttgatcgaatggcagccgaggggctgctatttccaaacttttactcggccaatcccctctgttcacccagtagggcggcactgctaaccggtcggctgccaattcggaacggcttttatacaacaaacgcacacgccagaaatgcgtacacgccccaggaaatcgtcggagggattccagacagcgagcagctgctcccggagctgcttaagaaggctggctacgttagtaagattgtcgggaaatggcacctgggacataggccacagttccacccattgaaacacgggtttgatgagtggttcggatctcctaactgtcattttgggccatatgacaataaagctaggccgaatatcccagtttatagagactgggaaatggtggggcgctactatgaggaatttcccatcaaccttaaaactggcgaggcaaacctgactcagatctacctgcaggaggccttggattttatcaagaggcaggctcgtcaccaccccttttttctgtactgggctgtggatgcaactcatgcaccagtttacgctagcaagccgtttctgggaacgagtcagcgcgggcggtacggggacgcggtgagggagatcgacgattcaatcgggaagatcctagaactacttcaagacctgcacgtggccgacaacacgttcgtctttttcacatcagataatggagctgcattgatctcggcccctgaacagggcggctccaacgggcccttcctgtgtgggaaacagaccaccttcgaaggaggaatgcgagagcccgcactggcctggtggccaggacacgtgactgctggccaggtttcgcatcaactgggctccataatggatttgttcactacctctctcgccttggccggactcacaccaccttctgaccgcgcgattgacggcctgaatctgctcccaacattactgcagggccggctaatggatcgccctatcttttattacagaggggacacactcatggccgcaaccctgggccagcataaggcgcacttctggacttggactaactcatgggagaatttcagacaagggattgacttctgcccaggacagaatgtgtcaggcgtgacaactcacaatcttgaagatcacaccaaattgcccttgattttccatctcggcagagaccctggagagcgttttccccttagtttcgcttccgccgaatatcaggaagccctgagtcgaatcacatccgtagttcaacagcatcaggaggcactggtacctgcccaacctcagttgaacgtgtgtaattgggccgtcatgaactgggctcctccgggttgtgaaaaattaggcaaatgtcttacccccccggagagtattcccaaaaagtgcctgtggagtcat

SEQ ID NO: 10502 - DNA, 1566 bp, Artificial Sequence
  derived and/or modified sequence
atggccgccgtggtggcagcgacgcgatggtggcaactgcttctggtcttgtccgctgcgggcatgggcgccagcggcgcaccccagccaccaaacatccttcttctccttatggacgacatgggttggggcgacctgggtgtctatggcgagccgtctagggaaaccccgaacctggatagaatggccgcggagggactgctgtttcccaatttctacagcgccaaccctctgtgctccccgtctcgtgccgcccttctcaccggacgcttgcccatccgcaacggattttacaccaccaacgctcatgcgcgcaacgcttatactccccaagaaattgtcggaggcatccctgactccgagcagctattgccggaactgctaaagaaagcaggttacgtctcgaagatcgttggtaagtggcaccttggtcatcggccgcagttccacccgcttaagcatggatttgatgagtggtttggctcccccaattgccacttcggcccctacgataacaaggccagaccgaacatccctgtttaccgtgactgggagatggtcggacgttactacgaagaatttcctatcaacctgaagaccggcgaggcaaacttgacccagatctatttgcaggaggctttggatttcattaaacgccaggcccgtcatcacccttttttcttgtactgggccgtcgacgccacccacgcaccggtctatgcctccaagcccttcttgggtactagtcaacggggtcgttatggggacgcagtacgggagatcgatgacagtataggtaagatcctagagctcctgcaggatctccacgtcgctgataacactttcgtcttctttacgtccgacaacggcgctgctctgatctcggcacccgagcagggaggctcgaatggaccgttcttgtgtggaaagcagacaactttcgagggcgggatgcgcgagcctgccctcgcgtggtggccaggccatgtgacagccggccaagtgtcgcatcagttggggtcgattatggatctgttcactacgtccttggcgctggcaggcctcactccaccttccgatcgggctatcgacggtttgaaccttcttccgaccttgctgcaggggcgccttatggacagaccgatcttctactatcgtggcgacacgcttatggctgctacgttgggccagcataaggcccacttttggacctggacgaacagttgggagaacttccgccagggaatcgacttctgccccggtcagaacgtatctggagttaccacccacaacctcgaagaccacacaaaactgccattgatcttccatctcggccgggaccccggagaacgcttcccactgtccttcgcttctgctgaataccaggaggctctgagccgcataacctcggtggtccagcagcaccaggaggctctagtgcctgcccaacctcaactcaacgtgtgcaattgggcagtgatgaactgggccccccccggctgtgagaagttaggcaaatgtctgacaccgcctgagtctattcctaagaagtgcttgtggtcccat

SEQ ID NO: 10503 - DNA, 1566 bp, Artificial Sequence
  derived and/or modified sequence
atggccgcagtggtcgccgcaacacgctggtggcagttgttgctggtcctcagtgccgccgggatgggcgccagtggtgcacctcaacctcctaatattcttctgctgctaatggatgatatgggatggggggatctaggggtctacggggaaccctcaagagaaacgccgaatctcgacagaatggccgccgaggggcttctctttccgaatttttactcagcaaacccattgtgctcgcccagccgggcggccttactaaccggtaggctgcctatcaggaatgggttttataccacaaatgctcacgcgagaaatgcgtatactcctcaggaaatagtgggcggcatccctgatagtgaacagcttttgcctgagctgctcaagaaggccgggtatgtgtccaagatcgtaggaaaatggcatttaggacacagaccccagttccatccactgaaacacggattcgacgagtggtttggctcgcccaactgccacttcggcccgtatgataataaggcacggcctaacataccagtttacagagactgggagatggttgggaggtactacgaggagtttcctatcaacctcaagacgggggaggcgaacttaacccagatatatctccaagaggcgctggactttataaaaagacaagctcgccaccacccttttttcctctattgggctgtggatgccacacacgctccagtatatgcctccaagccatttttggggaccagtcagcggggccgatatggagatgcagttcgtgagattgatgacagcatcggaaaaatcttagaactgctccaagacttgcatgtggccgataatacgtttgtcttcttcacaagcgataacggtgccgcactaatttcagcccctgagcaaggggggtccaacggcccgtttctgtgcggaaagcagactactttcgaaggcggtatgcgcgagcctgcacttgcctggtggcccggtcatgtgacagcagggcaggtgtctcatcagctcggcagcataatggatctgtttactacatctttggcgctggccggccttactccgccttccgaccgcgccatagatggcctcaacctgctgcctacactgctccagggccgactgatggatcgccccatcttttattacaggggagatacgcttatggccgccactctgggacagcacaaggctcatttctggacttggacaaatagctgggagaactttagacaggggatcgatttttgtccaggacagaatgtttcaggagtgaccactcacaatttggaggatcatacaaagttaccactgatctttcacctcgggcgggacccaggagagcggttccctctgagcttcgcttccgcagagtaccaagaggccctttccaggatcacctctgtggtgcagcagcatcaggaagcactggtgccggcgcaaccacagctgaacgtgtgcaattgggccgtcatgaattgggcccctcctggctgtgagaagctgggaaaatgcctgacccctccagagagcatccccaaaaaatgtttgtggagtcac

SEQ ID NO: 10504 - DNA, 1566 bp, Artificial Sequence
  derived and/or modified sequence
atggccgccgtggtcgcggcgaccaggtggtggcaacttttgctggtgctgagtgcagccggcatgggagcgtccggcgctccgcaaccaccgaacatcctgctgctcctgatggatgacatgggatggggagatctcggcgtgtacggggagccatcgagggaaaccccgaacctcgaccgcatggcggcagaaggcctgctctttcccaacttctactcggccaaccctctctgctcgccatcgcgggccgcactcctgactggacggcttccgatcaggaatgggttctacactactaatgcccatgccagaaacgcctacaccccgcaggaaatcgtgggtggcatcccagattccgaacagctgctcccggagctgttgaagaaagcaggctacgtgtcgaagatcgtgggaaagtggcaccttggtcaccgcccgcaattccacccactgaaacacggattcgatgaatggtttgggtcacccaattgccacttcggaccctatgacaataaggctcgccctaatatccccgtttatcgggactgggagatggtgggacggtactacgaggaattcccgatcaaccttaagaccggcgaggcaaatctgacccagatttatcttcaagaggcccttgatttcatcaagcgccaagcgcgccaccatccatttttcctttactgggccgttgatgctacccatgctcctgtgtacgcatctaaacccttcctgggcacgtcgcagcggggccgttacggcgacgcagtccgcgaaatcgacgattccatcggaaagatcctggaactgctccaggatctgcatgtcgccgataacacgttcgtattctttacgtcggataatggagctgccctcatcagcgcgccggaacagggcggaagcaacggaccgttcctgtgcggaaaacagactactttcgaaggtgggatgagggagccagccctcgcatggtggcccggccacgtgactgcaggacaagtgagccatcagcttggctcaattatggacctcttcactaccagcctggcactcgccgggctcacgccaccatctgacagggcgattgacggattgaacctgcttcccaccctcctccaaggtcggctcatggaccgtccaatcttctattacaggggagacactttgatggcggccaccctcggacagcacaaggcccatttctggacttggactaatagctgggagaacttcagacagggaattgacttttgccctggccaaaacgtctccggggtcaccactcataacctcgaggaccacaccaagctgccgcttatcttccacctgggacgcgaccctggcgagcggtttcccctgtccttcgcttcggccgaataccaggaggctctctcgcgcatcacttccgtggtgcagcagcaccaggaagccttggtcccggcgcaaccacagctcaacgtctgcaattgggctgtgatgaactgggcccctccgggatgcgagaaactgggaaaatgtctcactcctccggaaagcatccccaagaagtgcctgtggagccac

SEQ ID NO: 10505 - DNA, 1566 bp, Artificial Sequence
  derived and/or modified sequence
atggcggccgtcgtggcagctacaaggtggtggcagctcctcttggttcttagcgcagcgggcatgggtgcttccggagcaccccagcctcccaacatcctgctccttcttatggacgacatgggctggggagatctgggggtttatggcgagccctctcgcgaaacacccaatttggacaggatggctgccgagggcctgttgttcccaaacttttattccgcaaatcccctttgctcccccagtagggctgccctgctgactggccgactccctatacgaaacggattttatacgacaaacgctcacgctaggaatgcatataccccacaggaaatagtgggcgggattcccgactccgaacagctgctgcctgagcttctcaagaaagcagggtacgtttctaagattgttggcaagtggcaccttgggcaccggccccagtttcatccactgaaacatgggtttgatgagtggtttggatctcccaactgtcacttcggcccttacgacaacaaggccagacccaatattcccgtgtatagagactgggagatggttgggcggtactatgaggagttccctatcaacttgaaaacgggtgaggccaatcttacacagatctacctccaggaggctctggatttcataaagagacaggcccgccatcacccctttttcctctactgggccgtggacgccactcacgccccagtgtacgcatctaagccattcttgggaacttcccaacgcgggcgctacggggacgcggtaagagaaattgacgactctatcggaaagattctcgaactgctgcaggacctgcacgtcgctgacaatactttcgtctttttcactagcgacaatggggctgccctgatcagcgcccccgagcaagggggcagtaatggacctttcctctgcggtaagcagacgacattcgaaggaggtatgagagagccagcattggcatggtggcctggccacgtcacagccggccaggtttcacaccagcttggatctatcatggatctcttcacaacctcccttgccctggctggacttaccccgccgtccgatagggcaatcgatgggctgaacctgcttcccactttgctccaaggaagactgatggatcgccccatcttctactacaggggggacacgctgatggccgcgaccctgggtcaacacaaggctcacttttggacctggacaaattcatgggagaacttcaggcaaggtatcgatttttgcccaggccagaatgtcagtggcgtgaccacacataatctggaagaccatacaaaactgccacttatttttcatctgggtagggaccctggggagcggtttcctcttagcttcgcatctgctgagtatcaggaggcactctcacgaatcacttctgtggtccaacaacaccaggaagcgctggtgccagcacagccacaactgaatgtatgcaactgggcagtgatgaactgggcccctccaggctgtgaaaaacttggtaaatgcctgacgcctcctgagagtattcccaaaaagtgtttgtggagtcac

SEQ ID NO: 10506 - DNA, 1566 bp, Artificial Sequence
  derived and/or modified sequence
atggctgcagtggtcgcagctaccagatggtggcagcttcttcttgtgctgtccgcagcaggaatgggagcttccggcgcgccccagccccccaacattctgttgcttcttatggatgatatgggttggggggatcttggagtgtacggtgagccatcgcgagagacgcctaatctcgataggatggcagcagaagggctgctcttccctaacttttacagcgcgaacccactgtgtagccctagcagggcagcattgctcaccggccgcctgcctattcgcaatggtttttacactactaatgcacatgccagaaacgcctacactcctcaggaaatcgtgggaggtattccagattccgaacaactccttcctgaactgctgaagaaagccggatacgtcagcaagatcgtgggaaaatggcatcttggacatcgcccacaatttcaccctctcaagcacggatttgatgagtggttcggaagccctaactgtcattttgggccttacgacaacaaggcacgcccgaacatacctgtctaccgagactgggaaatggtcggccgttactacgaagaatttccaatcaatctgaaaactggagaagcaaacctgacccagatttaccttcaagaagcacttgactttatcaaacgtcaggctcggcatcacccgtttttcctttattgggctgtggatgctacccatgctccagtgtacgcatcgaaacccttcctgggtacttcacaaaggggtcgatacggagatgcagtgcgtgaaatcgacgattcgattggaaagattctcgaactgcttcaagaccttcatgtggcagataatacctttgtgttcttcacttcggataacggagcggcactgatctccgctcccgaacagggcggcagcaacggaccctttctttgtggcaaacaaactacctttgagggtggaatgcgggaacccgcgcttgcgtggtggccgggacacgtgactgcaggacaggtgtcacaccaacttggctcgattatggacctctttactaccagcctggcactcgcaggcctgaccccaccctctgatcgcgccatagatgggctgaacctgcttccaactctgctgcaaggcagacttatggaccgcccgattttctactatcgaggggatactctgatggcagccaccctcgggcagcataaagctcacttctggacttggaccaacagctgggaaaacttcagacagggaatcgatttttgtcccggtcagaatgtgagcggagtgactacgcacaacttggaggaccacaccaaactgcccctgatctttcatcttgggagagatcccggagagcgcttcccactttcattcgcatccgcagaataccaagaggcactctccagaataacctccgtggtgcaacaacatcaggaagccctcgtgccagcacaacctcagttgaacgtgtgtaactgggcagtgatgaattgggcacccccagggtgtgaaaagctgggcaagtgtctcaccccaccagaatcgattcctaaaaagtgtctctggtcgcac

SEQ ID NO: 10507 - DNA, 1566 bp, Artificial Sequence
  derived and/or modified sequence
atggccgctgtcgtcgccgcgaccaggtggtggcaactgcttttggtgttgtcggccgccggaatgggcgcctcgggtgccccacaaccacctaacatcctccttctgttgatggatgatatggggtggggcgaccttggagtctacggcgaaccatcccgagaaactcccaacctggaccgcatggcggctgaaggcctgctgttcccgaacttttactcagccaatcccctgtgcagcccatcgagagccgcgctgctcactggtagactgccgatccgaaatggtttctacaccaccaatgctcacgctcgaaacgcttacacgccacaggaaatcgtgggaggcattcctgattctgagcaactgctccccgagctgctgaagaaggccggatacgtgagcaaaatcgtgggaaagtggcacctcggtcaccggcctcagttccacccgctgaagcacggttttgacgagtggtttggatcccctaactgtcactttggcccgtacgataacaaagcgaggccgaatatacctgtgtaccgcgactgggagatggtgggacggtactacgaggaattcccgatcaatcttaaaactggagaggcaaacttgacgcaaatctaccttcaagaggcattggacttcatcaaacggcaggcgcgccaccatcccttcttcttgtactgggcagtggacgcaacccatgcaccggtgtacgcgtcaaagcctttccttgggacttcccaacgcgggcgctatggagacgctgtccgggaaatcgatgactccattggaaagattcttgaactgctgcaggatctccatgtggcagataacaccttcgttttctttacttcagataacggagcggccttgattagcgctccggaacagggaggctccaacggaccattcctgtgtggtaagcagactacgttcgaagggggaatgagggaaccagcactggcgtggtggcctggccacgtgaccgccggccaggtgtcccatcagctgggatctattatggatctgttcactacctcactcgccctggctggactgaccccgccttccgaccgcgccatcgacgggctgaacctgttgccgaccctgttgcagggaaggcttatggaccgaccaatcttctactaccggggagacactttgatggccgccaccctcggccaacataaggcgcacttttggacttggaccaattcatgggaaaactttcgccagggtatcgacttctgcccaggacagaacgtgtccggcgtcactacccataatctggaagatcacactaaactgccccttatcttccacctggggcgggacccgggcgagagattcccgctcagcttcgcgtcggcggagtatcaagaggcactgtcacgcatcacttccgttgtccagcagcatcaagaagcccttgtgcctgcacagccccagctcaacgtttgcaattgggcagtcatgaattgggccccacctggatgcgagaaactgggaaagtgcctgactccgccagagagcatcccgaagaagtgcctttggagccat

SEQ ID NO: 10508 - DNA, 1566 bp, Artificial Sequence
  derived and/or modified sequence
atggctgctgttgtggccgccacccggtggtggcagctcctgctggtgctgagcgcagctggtatgggagcgagtggagccccacagccaccaaatattctgttacttctcatggacgacatggggtggggagatcttggagtgtatggggagccttcccgagaaacgcccaatctggaccgaatggctgccgagggcttactgttccccaacttctattctgccaacccactatgctctccctcgagagccgccttgttaactgggcgactgcctatccgtaatggtttttacacaaccaatgcccatgcgagaaacgcctatacacctcaggagatcgtgggggggatcccagattccgaacagctactcccggagctactcaagaaggctggctacgtctctaagatagtcggaaagtggcacttggggcacagacctcaattccatccgcttaaacacggcttcgacgagtggtttggatctcctaactgtcattttgggccatacgacaataaggctcgacctaatatcccagtttatagagattgggaaatggtagggcgatattacgaagaatttcccatcaacctgaagaccggtgaagctaatctgactcagatctatttacaagaagcgttggattttatcaaaagacaggccagacaccatcctttttttctctattgggcagttgatgccacccacgctccagtttatgccagcaaaccattcctcggaaccagtcagcgaggccgatacggcgatgccgtgagagaaatcgatgactcaatcggaaagattctcgaactcctgcaggatctccacgtggccgacaacacatttgtcttttttacctctgacaacggggccgccttaataagcgctcctgagcaaggggggtctaacggcccatttctctgcggcaaacaaaccacctttgagggtggaatgcgagaaccagccctcgcctggtggcctggtcacgttacagcaggacaagtcagtcaccagctgggttccataatggatttgttcaccacttcattagcacttgcaggtctgacccccccgtctgatagggcaatagacggccttaacttactgcctacactgctgcaggggagattaatggacagaccgatcttttattatagaggagatacgctcatggctgccactttgggacagcataaagcccacttctggacctggactaactcttgggagaacttcagacaggggatcgatttttgcccgggccagaacgtctccggagtgactacgcataacctggaagatcacacaaaactacccttgattttccatctgggaagagaccccggcgagcgattccctctgtcatttgctagcgctgagtatcaggaggcccttagtcgtattacatcagtcgtgcagcaacatcaagaagcattggtgcctgcgcaaccacagctgaatgtttgtaactgggccgttatgaactgggctcctccaggatgtgagaaactggggaaatgtctgacaccccccgaaagtattcctaagaaatgtctctggagccac

SEQ ID NO: 10509 - DNA, 1566 bp, Artificial Sequence
  derived and/or modified sequence
atggcagcggtcgtcgcagcgacccgctggtggcagctccttctggtgctgtcagccgcaggaatgggagcgtcgggcgcaccacagccacccaacatccttctgctccttatggatgatatgggttggggcgacctgggcgtctatggggagccttccagagaaacccctaacttggacagaatggcagccgagggacttctgtttccaaacttctacagcgcgaacccactgtgctcgccttcccgggccgcgctcctgaccggtcgactgcctattcgcaatggcttctacactacgaacgcacatgctaggaacgcatacaccccccaagaaatcgtggggggtatccctgactccgaacagctgcttcctgaactgctgaagaaagcaggatacgtgtcgaaaattgtcgggaagtggcatcttggtcatcggccccagtttcatccacttaagcatgggtttgatgagtggtttggttcgcccaattgtcattttggtccttatgacaacaaggcacggccaaacattccggtgtatagagactgggaaatggtgggaagatactacgaagaatttcccattaatcttaagacgggtgaggccaatctcactcaaatctacctccaggaggcactcgatttcattaagcgccaggcccggcatcatcccttctttctttattgggccgtcgatgcaacgcacgcccccgtgtatgcgtcgaagccatttctgggaaccagccagagaggacgatacggagatgccgtgagggaaatagatgattccattggaaagattctggagttgctccaagatcttcatgtggctgacaatacctttgttttcttcacgtccgataacggagcggcactgatttcggccccggaacagggtggttccaacggtccctttctttgtggaaagcagactacctttgagggaggaatgcgggaacccgctctggcgtggtggccagggcatgtgaccgcaggacaagtgagccatcaactcggatccattatggatctctttaccacctcccttgcactcgcaggacttactccaccaagtgaccgtgcaatcgacggactgaatctgctccccaccctgcttcaagggcggctcatggacaggccgatattctactaccgcggagatactctcatggccgcaaccctcgggcaacataaggcgcatttttggacttggaccaacagctgggagaacttccggcagggaattgacttctgccctggtcaaaacgtgagcggggtgacgacccacaatctggaggaccacaccaaactgcctttgatatttcatcttggtagagatcccggtgagcgttttccgctgtcctttgcaagcgccgagtaccaagaagccctgtccagaatcaccagcgtggtccaacaacatcaggaagcactggtgcctgcacagccacaactcaacgtgtgtaattgggcagtcatgaattgggctcctcctggatgtgaaaagctcggaaaatgccttaccccaccggaatccataccaaagaagtgcctgtggtcccac

SEQ ID NO: 10510 - DNA, 1566 bp, Artificial Sequence
  derived and/or modified sequence
atggccgcagtcgttgctgctacgagatggtggcagctccttcttgttctcagtgcggccggtatgggcgctagtggtgctcctcagccaccaaacatcctattactgctcatggacgacatgggctggggtgatctaggtgtttatggtgagccatcgagggagacaccgaacctagacaggatggctgccgaaggacttctcttccccaatttctactcagccaatcccttgtgttccccttctagagcggcgctgcttaccggtcgccttccaattcgtaacggcttttacacgactaacgcccatgctcgcaacgcttacacacctcaggagatcgtaggtgggatccccgattcggagcaactgttgcctgaacttctgaagaaggcgggttatgtcagcaaaatagtagggaagtggcacttaggacatcggcctcaattccatcctctcaagcacgggttcgacgagtggttcggctcgccaaactgccactttggcccgtacgataacaaggcgaggcctaatatccctgtgtacagggattgggagatggtcggacgatactatgaagagtttcccataaacttgaaaacgggtgaggcgaacttaacccagatttacttgcaggaggccctggacttcatcaaacgacaggcccgacatcatccgttctttttgtactgggctgtcgatgcgacccatgcgccggtatacgcttccaagcccttcttaggcacatcgcaacgcggccgatacggcgatgccgtgcgggagattgatgactcaataggaaagatccttgagttgcttcaagatcttcacgtggccgataataccttcgtattttttacctctgacaacggcgcggccctcatatccgctccagaacaaggcggctcgaatggaccattcctttgcggcaagcagacaactttcgaagggggtatgcgggagcccgctctggcatggtggccagggcatgtcacagcgggtcaggtctcacaccagctaggatccatcatggaccttttcactacctcgctcgctcttgcgggtctgacgccaccaagtgacagagcgatcgatggtctgaatcttctgcctactctgctgcagggacgactaatggatcggccaatattctactatcggggagacaccctgatggctgctactcttggccagcataaggcgcatttttggacatggaccaattcgtgggagaacttccgtcagggaatcgacttttgcccgggtcagaatgttagtggtgttacgacacacaaccttgaggaccacaccaagctgccgctgatttttcatcttgggagggacccaggcgagagattccccctttccttcgctagcgcggaatatcaggaagctcttagcagaatcacctcagtcgtgcagcaacatcaagaggctctggttccggcgcagcctcagttgaacgtgtgcaactgggcagtcatgaattgggccccacccggatgtgaaaaattggggaaatgcctaaccccacccgagtctatccctaaaaagtgtttgtggtcacat

SEQ ID NO: 10511 - DNA, 1566 bp, Artificial Sequence
  derived and/or modified sequence
atggcggcagtggtggccgctacacggtggtggcagctgttgttggtcctgtctgccgcgggaatgggcgcaagtggtgcaccacagcctccgaatatattactgctcctgatggacgacatgggttggggggatctcggggtctacggtgagccttctagagagacccccaacctggacaggatggcagcggaaggtctcttattccctaatttctacagcgccaatcctctatgctctccttctagagccgctctgctgacggggcgcctgccaattcgcaacggtttttacacaactaatgcacatgctagaaatgcttatacccctcaggagatcgtcgggggcatacctgacagtgagcagctgttgcccgagctgttgaagaaagcaggttacgtgagcaagatcgtcgggaagtggcacctcggccaccggccccagtttcatccactcaaacacggattcgacgagtggttcgggagcccaaattgccattttggcccatacgacaataaagcccgtccaaatatcccagtctaccgggactgggaaatggtcggccgttattacgaggagttccccatcaatctgaagacaggcgaggccaacctgactcagatttatctgcaggaagctcttgactttatcaaaaggcaggccaggcaccaccccttttttttgtattgggccgtggacgcaacccatgcccccgtttatgcctctaagccattcttgggaacgagtcagaggggaaggtacggcgacgcagtgagggagatcgacgacagcatcggtaagatcctagagcttctccaggatcttcatgtcgccgataacactttcgtcttcttcacctctgacaatggagctgctctgatctccgcacccgagcagggcggatcgaacggcccattcctgtgtggaaaacagacaacatttgagggagggatgagggagccggctctagcctggtggcctggccacgtgaccgcaggacaagtttctcaccagctgggcagcattatggatctgtttaccacatctctagctctggcagggctcacacccccaagcgatagggcaatcgatggattgaacctccttccgactctgttacaaggtcggctgatggaccggcccattttttactatcggggcgacacgcttatggctgctaccctcggacagcacaaggcccacttctggacatggacgaatagctgggagaacttcagacagggcattgatttttgccccgggcagaatgttagtggtgtcaccacccacaatctggaggaccacaccaaactcccacttattttccaccttgggagagatccgggagagaggtttcctctgagctttgcttccgccgaataccaggaggctctgtctaggatcactagtgtagttcagcagcaccaggaggccctcgtgcctgcccagccacagctgaacgtgtgcaactgggccgtgatgaactgggctcctcccgggtgtgagaagttgggaaagtgcttgacccccccagagagtatcccgaagaagtgcttatggagccat

SEQ ID NO: 10512 - DNA, 1566 bp, Artificial Sequence
  derived and/or modified sequence
atggcggccgtggttgcggcgactcgctggtggcaactgttgctggtcctgtccgccgctggaatgggcgcatccggagccccacaaccgccgaacatactcctgcttctgatggacgacatgggttggggggatcttggagtctatggggagccgagcagagaaacgcccaacctcgatcggatggcagcagaggggctgctgtttccaaacttttactccgccaaccctctgtgctcgccgagcagagcggcactgctcacggggaggctgccgatacgcaacggattctacacgacgaacgctcacgcgcggaacgcgtacaccccacaggaaatcgtcggaggaatcccagattccgaacagttgcttccggaactcctcaagaaggccggctacgtttcgaagattgtcggaaaatggcatctgggtcaccgcccccaattccaccccctgaaacatgggtttgatgaatggttcggcagccccaactgccattttggcccttatgacaataaagctcggcccaatatcccagtgtacagagattgggaaatggtgggacgatactatgaggaattcccgatcaacttgaaaacgggggaagcaaatttgactcaaatctacctgcaagaagctctggatttcatcaagcgccaggcgcggcatcatccatttttcctgtactgggctgtggatgccacccacgcccccgtgtacgcatcgaagcctttcctgggaactagccagcgtggcagatacggcgatgcagtcagagagatcgacgacagcatcggtaagatcctggagctgctgcaggatctccacgtagcggacaataccttcgtgttcttcacctccgacaatggcgctgccctgatctcggccccagagcaaggcggatccaatggaccattcctttgcggaaagcagaccacgttcgaaggcggtatgagagaacccgcgctcgcgtggtggccgggacacgtcactgcaggacaggtgtcgcaccagcttggatccattatggacctgtttactacctcactcgccctggccggtctgacgccaccgtcggatagagcgatcgacggactcaacctgctgcccaccctgctgcaagggcggctcatggaccggccaatcttttactaccggggagacactctgatggcggccactctcgggcagcataaggctcacttctggacctggaccaattcgtgggagaacttcagacagggtattgatttctgcccagggcagaacgtgagtggagtgactactcacaacctggaggaccacaccaagctgcctctcatctttcatctgggtcgggaccccggcgaacggttcccgctctcattcgccagcgctgagtaccaggaggcactgtcacgcatcacctccgtcgtgcaacagcaccaggaggcgctcgtgccggcgcaaccacagctcaacgtgtgcaactgggccgtgatgaattgggctccgccgggatgtgaaaagctcggaaagtgtttgaccccgccagaatcgattccgaagaaatgtctgtggtcgcat

SEQ ID NO: 10513 - DNA, 1566 bp, Artificial Sequence
  derived and/or modified sequence
atggcagccgtcgtggccgctacccgatggtggcaactcctactggtcctctctgccgccgggatgggagcatccggcgcgccccagccaccgaacatcctgctgctgctgatggatgacatggggtggggtgatttaggggtatacggagaacccagcagggagacacccaaccttgaccggatggcagcagagggcctgctcttcccaaacttctatagcgcaaatcccctctgcagtccctctcgcgctgccctgttaacggggcggctgccaataaggaacggtttttataccaccaacgcacacgcccggaacgcctatacaccccaggagatcgtgggtgggataccagactccgagcagttactccctgaattactgaagaaagctggttacgtgtcaaaaatcgttggaaagtggcacctcggtcatcgaccacagtttcacccccttaagcatgggttcgacgagtggtttggcagtcctaattgtcactttggtccctacgataataaggccagaccgaacatccctgtatacagggattgggagatggtcggccgatactacgaggagttcccaatcaacttaaagacaggtgaagccaatttaactcaaatttacctgcaggaagcattggacttcattaaacgccaggcacgccaccacccattttttctgtattgggccgtcgacgccacacacgccccagtgtatgcctccaaacctttcttgggcacctcccagcgcggaagatatggtgatgctgtacgagagatcgatgacagcatcggaaaaattttggaactgctgcaggacctgcacgtggctgataatactttcgtcttttttaccagtgacaacggggccgcattaatcagtgcgccagagcaaggcgggagtaacggccccttcttgtgcgggaagcagacaacttttgaggggggtatgcgggagcccgcactcgcttggtggcccggacacgtgacggcagggcaagtgtctcatcagctcgggtcaattatggacctttttactacttcgctagcactcgccggcttaacacctccgtcggaccgggccatcgatggtctgaatttgctgcctacgctattgcaaggacgcctaatggaccgaccaatattttactatagaggtgacactttaatggcagccaccttggggcaacacaaagctcatttctggacctggactaactcttgggagaatttccggcagggcatcgacttctgccctggccagaacgtcagtggtgtgaccacgcataatttagaggatcacactaagcttcccctgatttttcatctcggtcgcgacccaggggagcggtttccgctgagctttgcctcagccgaataccaggaagcactgtcccggattaccagtgtcgtccagcagcaccaggaggcactcgtgccagcacaaccgcagctgaacgtctgcaactgggccgtgatgaattgggcaccgcctggctgtgagaagcttggtaaatgcttgaccccccccgagtcaatccctaagaagtgcctgtggtcgcac

SEQ ID NO: 10514 - DNA, 1566 bp, Artificial Sequence
  derived and/or modified sequence
atggccgcggtggtggcagcgactcggtggtggcaacttctgctggtgctgtcggcagcagggatgggagcatctggagcaccgcaaccccccaacatcctgctgctccttatggacgacatgggttggggagacttgggcgtctacggagaacctagcagggaaactcccaacctggacagaatggcggcagaaggcctgttgtttcccaacttttactcagccaaccccctctgctccccttccagagcagcattgcttaccggccgcttgcctattagaaatggcttttacaccaccaacgctcacgcaagaaacgcgtacactccacaagaaatcgtgggcggcatccccgatagcgaacagctgctgcccgaactgttgaaaaaagccggatatgtgtcgaagatagtgggaaagtggcaccttggacacagaccacagtttcatccgcttaagcatggttttgacgagtggtttggatcaccaaactgccactttggtccatacgataacaaggctagaccaaacatcccggtgtacagggattgggaaatggtcggaagatattacgaggaattccctatcaacctcaagaccggggaagcaaacctgacccagatatacctccaggaggcactggatttcatcaaacggcaagcaagacatcatcccttctttctgtactgggccgtggatgcgacgcatgcaccagtgtacgcatcgaagccattcctcggaacgtcccaacggggacgctatggagatgcagtgcgagaaatagacgacagcatcggaaagattctggaactgctgcaagatcttcatgtcgccgataacacctttgtgtttttcacttcagataatggagcagcactgatatcggccccagaacagggagggtcaaatggccccttcttgtgcggtaaacagaccacctttgaaggaggaatgcgagagcctgctctcgcctggtggccgggacatgtcactgccgggcaggtgtcccaccaactcggttcaattatggatctctttactacttcgctcgcacttgccgggcttactccaccgtctgaccgcgcaattgatgggctgaacctccttccaactttgctgcaggggcggctgatggatcggcctattttctactaccggggagataccctgatggcagcaaccttgggacagcataaggcccatttttggacttggactaacagctgggagaattttcgtcagggcatcgacttttgtcccgggcagaacgtgtcgggtgtgactacccataaccttgaggatcataccaagctgccactcatcttccatctcggcagagatccaggtgagaggtttcccctttcgttcgcgtcagccgaataccaagaagccctgtcacggattacctccgtcgtccagcagcatcaagaagcattggtgccggcgcagccccaacttaacgtgtgtaattgggccgtgatgaactgggccccacctgggtgtgaaaagctgggcaaatgtctgacgcctcctgaatcgattccgaagaagtgtctgtggagccac

SEQ ID NO: 10515 - DNA, 1566 bp, Artificial Sequence
  derived and/or modified sequence
atggcggcagtcgttgccgccaccaggtggtggcaactgctgctggtgcttagcgccgctggcatgggtgcctccggcgccccacaaccacccaatatactgctcctgttgatggacgatatgggctggggcgacctcggggtctacggagagccaagccgcgaaactccgaaccttgaccgcatggctgccgagggcctcctgttcccgaacttctactcggcaaatccactgtgcagcccttcgcgggccgctctgctgactgggcggctccctatccggaacggattctacaccacgaacgcccatgccagaaacgcgtacactccgcaggaaatcgtgggaggcatcccggattccgagcagctgctgccagaactgcttaagaaggcaggatacgtgtcaaaaatcgtgggaaagtggcatcttggacacaggccgcaattccatcctctcaaacatggttttgacgaatggttcggctcgccaaactgtcatttcggcccctacgataacaaggccagaccgaatatccccgtgtaccgggactgggaaatggtcggcaggtactacgaagaattcccgattaatctgaaaactggcgaggcaaacctgactcagatttacctgcaagaggcgctcgacttcatcaaaagacaagcaagacaccaccccttcttcctgtactgggccgtggacgcgactcacgcaccggtgtacgcctcaaagccatttctgggcacttcgcaacggggacgatacggcgatgcagtccgggagattgatgattcgatcgggaaaatcctggaacttcttcaggacctccatgtcgcggataataccttcgtgttctttaccagcgataatggagccgccctgatctccgccccagagcagggaggctccaatggtcctttcctgtgcggaaagcaaaccaccttcgaaggcggaatgcgggagccagcccttgcatggtggccgggccacgtgaccgccggacaagtgagccatcagttgggcagcatcatggacctgtttactaccagcctggcgctcgcgggactgactccgccttcagatagagcgatcgatggtctgaatctcctgcccaccttgctgcaggggcgcctgatggaccggccaatcttctactatagaggtgatacgctgatggcggctactcttggccagcataaggcgcatttttggacctggaccaacagctgggaaaacttccgtcaaggaatcgacttctgccctggccagaacgtgtcaggagtcactacccataatctcgaggaccataccaaactccctttgatcttccatctcggtcgggacccgggggagcggtttccactgagtttcgcgagcgcggaataccaggaagcgctgagccgcatcacctccgtcgttcaacaacaccaggaggctctggtcccggcacagcctcaattgaacgtctgtaactgggccgtgatgaactgggccccaccaggatgtgagaagctgggaaagtgcctgaccccgcctgaatcaatcccgaagaagtgcctgtggagccac

SEQ ID NO: 10516 - DNA, 1566 bp, Artificial Sequence
  derived and/or modified sequence
atggcggcagtggtcgccgctactaggtggtggcagctcctcctggtgctgagcgccgccggcatgggtgcgtcaggggctccgcaaccgccgaacatcctgctcctgctcatggacgacatgggatggggcgatctgggcgtctatggtgaaccatcgcgtgagactccaaacctggaccggatggcagcagaggggttgctgttcccgaatttctactcggctaatcccctgtgctcaccgagccgcgctgctttgctcactggtcgactccctattagaaacgggttctacactaccaacgcacatgcgcgcaatgcttacaccccgcaagagatcgtgggagggattccggactcagaacagctgctgccggagctcttgaagaaagcaggttacgtgtcgaaaatcgtgggcaaatggcatcttggccatagacctcagttccatccactgaagcacggattcgatgaatggttcggttcgccaaattgtcatttcggcccttacgacaataaggcgcgccctaacatccctgtgtacagagattgggagatggtgggacggtattacgaagaattcccgattaacctgaaaaccggagaggcaaacctgactcaaatctacctgcaggaagcgctggatttcataaagaggcaagcccgccaccacccctttttcctctactgggcagtcgacgcaacccatgccccagtgtacgcttccaagcctttccttggaactagccagcgcggtagatacggagacgcagttcgggaaattgacgactccatcggcaagatcctggagctcctccaagacctgcatgtcgcagataatacgtttgttttctttacctccgataacggcgccgccctcattagcgcccctgagcaaggtgggagcaacggaccattcctctgtggcaagcagactactttcgagggcggcatgcgagaaccggcgcttgcgtggtggccggggcacgtgactgctggccaggtgtcgcaccagctggggtcgatcatggacctttttactacgagcttggcgcttgccggactgactccaccgtcggaccgcgcgatcgatggtctgaacctcttgcccaccctcctgcagggacgactgatggacaggccaatcttttactaccggggagacactctcatggcggccactctcggacagcacaaggcccatttctggacctggactaactcctgggaaaactttaggcaaggcatcgatttctgccccggccagaacgtcagcggagtcactacgcacaatctggaagatcacaccaagctgcccctcatcttccatctcggccgcgacccgggagaacggtttccgctgtcatttgcctccgccgaataccaagaggccctgtctcgcattacgagcgtggtgcagcagcaccaggaagctctcgtcccagcacagcctcaactgaacgtctgcaattgggccgtgatgaattgggcccctccgggatgtgagaagctgggaaaatgccttactccgccagagtcaatcccaaagaagtgcctgtggagccac

SEQ ID NO: 10517 - DNA, 1566 bp, Artificial Sequence
  derived and/or modified sequence
atggctgctgtggttgccgcgactcgctggtggcaactgctgctcgtcctgagcgccgccggtatgggagcctccggggccccacagccgcctaatatcctgctgctgcttatggacgatatgggatggggtgatctgggggtgtacggagaaccttcacgagaaacgccgaacttggatcggatggccgccgaggggctcctttttcctaatttctacagcgccaatccgctttgctcgccctcaagggcggccctcctcacgggacggctgccaattagaaacggcttctatactaccaacgcgcacgcaagaaatgcctacaccccgcaggagatcgtcggcggaatccctgacagcgaacaacttctccctgaactgcttaagaaagccgggtacgtgtcgaagatcgtgggaaaatggcatctgggtcaccgcccacagttccatccactgaaacacggattcgacgaatggtttgggtcacctaactgtcacttcggaccgtacgacaataaggctaggcccaacatcccggtgtaccgggactgggaaatggtcggccgttactacgaagagtttccgatcaacctcaagacgggagaggccaacctgacccagatttacctccaggaggcactcgactttatcaagagacaagcccgccaccacccgttcttcctgtactgggccgtggacgccacccatgccccagtctatgcatcaaagccgttccttggcacttcccaacggggaagatacggagacgccgtgcgcgaaatcgatgactccatcggtaagatcctggaactgttgcaggacttgcatgttgctgacaacaccttcgtattcttcaccagcgataacggagctgcgctgatttcagccccggagcaaggaggatcgaatggaccattcctctgcggtaaacagaccactttcgagggtggaatgagagaacctgctctcgcctggtggccaggacatgtgactgctggacaggtgtcacaccaactcggatcgatcatggatcttttcaccacgtcgctggcactcgccgggttgaccccaccgtcggaccgtgccatcgacggactcaaccttctgccgaccctcctgcagggtaggctgatggacaggccgatcttttactacagaggagacacgctgatggcggctactctcggacagcataaagcgcacttctggacctggactaacagctgggaaaacttccgccaaggcatcgacttctgccccgggcagaatgtgtccggagtaaccacccacaacctggaggaccacactaagttgccgctgatttttcatttgggacgggacccaggagaaaggttcccgctgtccttcgcgtcggcagagtaccaggaagctctgtcaagaatcacttcggtagtccagcagcaccaagaagccctggtgccggcgcaacctcagctgaacgtgtgcaattgggccgtgatgaactgggcgcctccgggatgcgagaagctcggcaagtgcctgaccccacccgagtccatcccaaagaaatgtctgtggtcccat

SEQ ID NO: 10518 - DNA, 1566 bp, Artificial Sequence
  derived and/or modified sequence
atggcagcagttgttgctgcaactcgatggtggcaattattactagtattaagtgcagctggaatgggtgcttctggagctccacaaccaccaaacattttattattattaatggatgatatgggttggggagatcttggagtttatggagaacctagtagagaaactccaaatttagatagaatggcagctgaaggattattattcccaaatttttattcagctaatccactttgtagtccaagcagagcagcattattaactggaagattaccaattagaaatggattttatactacaaatgcacatgcaagaaacgcatatactccacaagaaattgttggaggaattcctgattcagaacaattattacctgaacttttaaaaaaagctggttatgttagtaaaattgttggtaaatggcatttaggtcatagacctcaattccatcctcttaagcatggatttgatgaatggtttggatcaccaaattgccattttggaccatatgacaataaagctagaccaaatatacctgtatatagagattgggaaatggtaggacgatattatgaagaatttccaataaatcttaaaactggtgaagcaaacctcactcaaatatatttacaagaagctcttgactttattaagagacaagcaagacatcatccattttttttgtattgggctgtagatgcaactcatgccccagtttacgctagtaagccttttttaggaactagtcaaagagggcgttatggagatgctgttcgtgaaattgatgattcaattggtaaaattttagaacttcttcaagatcttcatgttgctgataatacatttgtattctttacttcagataatggtgcagctttaatttcagcaccagaacaaggagggtctaatggaccatttctttgtggaaaacaaactacttttgaaggtggaatgagagagccagcacttgcttggtggcctggacatgttacagctggtcaagtatctcatcaacttggaagtattatggatcttttcactacatcattagctttggccggactaactccaccatctgatcgagctattgacggtcttaatcttttaccaactttacttcaaggtcgattaatggataggcctatattttattatagaggagatactcttatggcagcaacacttggacaacataaagctcatttttggacttggacaaattcttgggaaaattttagacaaggaattgatttttgtcctggtcaaaatgtaagtggagttactacgcataatcttgaagatcatacaaaattacctttaatttttcatcttggtagagaccctggggaaagatttccattgtcttttgctagtgctgaatatcaagaagctctttcaagaattacttcagtagtacaacaacatcaagaagctcttgttccagctcaaccacaattaaatgtatgtaattgggctgtgatgaattgggcacctcctggatgtgaaaaattaggtaaatgtttaacaccaccagaatcaattccaaagaagtgcttgtggtcacat

SEQ ID NO: 10519 - DNA, 1566 bp, Artificial Sequence
  derived and/or modified sequence
atggccgcagtggtggccgctacacggtggtggcagctgcttctggtgctgtccgctgccggcatgggcgcttccggggccccccagccaccgaatatcttgctgctactaatggatgatatggggtggggcgatctcggcgtgtacggcgagccgtcaagggagacacctaatctggacaggatggcagcggagggcctgctgtttcctaatttctatagcgctaaccccctgtgtagccctagtagggctgctcttctgactggacgactcccgatccggaatggattctatactactaacgcccatgctaggaacgcttacacccctcaggagatagtcggaggcataccggatagtgaacaactgctgccggaactgctgaagaaagccggatacgtatcaaagattgtcggtaaatggcacctggggcacaggcctcagtttcatccactaaagcatgggttcgatgaatggttcggatctcccaattgccacttcgggccttacgataataaagctagaccgaacattccggtgtacagggactgggaaatggtggggagatattacgaagaattcccaattaatctgaagactggagaggctaacctgacccagatctatctccaggaagctctcgatttcattaagcgtcaggccagacatcacccattcttcttgtactgggctgtcgacgcaacccacgcaccggtttatgcatccaaaccattcttaggtacgtcccagcggggccgttacggagatgcggtaagagaaatcgacgatagcataggaaaaatcctggaacttctccaggacctccacgtggcagataatacttttgttttctttacctccgacaacggtgcagccctgatcagcgcacctgagcagggcggcagtaacggccccttcctatgcggcaagcagaccacgttcgaaggtggcatgagggaacccgccctggcgtggtggcccggccacgtaacggccgggcaggtgtctcaccagcttggaagcatcatggatcttttcacaacatctctcgccctggctgggctgacaccaccaagcgatagggcgatcgacggtcttaacctgctcccaaccctgctccagggaaggttgatggatcgccctatcttttattaccggggtgatacacttatggcggctacgctgggacaacataaggcacacttttggacatggacaaattcttgggaaaatttccggcagggtattgatttctgccccggtcagaacgtatcaggcgttactactcacaatctggaagatcataccaaattgcccttgatttttcatcttggacgagacccgggcgaacggttccctctgtcgttcgccagtgccgaataccaggaagccttatcgagaatcacttcagtggttcagcagcaccaagaagctctggtgcccgctcagccgcagctaaacgtgtgcaattgggccgtgatgaactgggcacctcccgggtgtgaaaagcttggcaagtgcttgactccccctgaaagcattccaaagaagtgcctctggtctcat

SEQ ID NO: 10520 - DNA, 1566 bp, Artificial Sequence
  derived and/or modified sequence
atggctgcagtggtggctgcgaccagatggtggcaactgctgctcgtgctgagcgcggctggaatgggagcctcaggcgccccacaacccccgaatatcctgctcctcctcatggacgacatgggatggggggacctgggtgtgtacggcgaaccttcgcgggagactccgaatcttgaccgcatggctgcggagggactgctcttcccaaacttttactcagcaaatccactgtgctcaccctccagagcagcgctccttaccgggcggctcccgatccgcaacggtttctacaccaccaacgcgcacgctcggaacgcctacactccgcaggaaatcgtcggaggaattccagactcagagcaactgctgcccgagctcctgaagaaggccggatacgtgtcaaagatcgtcggcaagtggcacctcggtcacagaccgcagttccacccgctcaagcacgggttcgatgaatggttcggttcaccaaactgtcatttcggaccatacgacaacaaagcccggccgaatatcccagtctatcgcgactgggagatggtgggacgctactatgaggaattccctatcaacctgaaaactggagaggcaaacctcacccagatctacctgcaagaagccttggacttcatcaagcggcaagcccgccaccacccctttttcctctactgggcagtggacgccactcacgccccagtctacgcctcgaaaccttttctgggcacttcccagaggggccggtacggggatgcggtgcgggagatcgacgactcaatcggcaaaatcttggaactgttgcaggatttgcacgtggcggataatactttcgtctttttcacctcggacaacggcgccgcgttgatctcggcgccagaacaggggggatcgaatggcccgtttctgtgtggaaagcagactacctttgagggaggaatgagagaacccgccctggcctggtggccaggacatgtgactgccggccaggtgtcacatcagctcggttccattatggacctttttaccacttccctcgcactggccggactcactcccccgtccgatcgggctattgacggactgaacctgctgcccacgctcttgcaaggaaggctgatggatcgcccgatcttctactaccgcggcgatacgctcatggcggcgactctgggccagcacaaggcacatttctggacctggaccaattcatgggagaactttcgccaagggatcgatttctgcccagggcaaaatgtttccggagtgaccactcataatctggaggaccacactaagttgccgctgatctttcatctgggacgggatccaggggagcgcttcccgttgtcctttgcgtcggcggagtaccaggaggcgctgagccgcatcacctccgtggttcaacagcaccaagaagctctggtgccggcccaaccgcagctgaacgtgtgcaactgggctgtgatgaattgggccccgccgggatgcgaaaagctgggaaaatgcctgacgccccccgaatcaatcccgaagaagtgcctctggtcgcac

SEQ ID NO: 10521 - DNA, 1566 bp, Artificial Sequence
  derived and/or modified sequence
atggccgcagtggtggccgctacccggtggtggcaactcctgctggtgctcagcgccgccgggatgggagcatcaggagcaccgcagccgccaaatatcctgctcctgctgatggatgatatggggtggggagacttgggtgtctacggagaaccgtcgcgggaaacccctaacctggaccggatggctgccgagggactgcttttccccaacttctactccgcgaatccgctgtgttcaccaagccgagccgcgcttctgactggccgcctgccgatcagaaacggattctacactactaacgctcacgcgcgcaatgcatacactccacaagaaatcgtgggaggtatcccggactcggagcaactgcttccggagctgctgaagaaggccgggtacgtgagcaagattgtcgggaagtggcacctgggacacagaccacaatttcacccgctcaaacacggattcgacgagtggttcggttcgccgaactgccactttggcccctacgacaacaaggcgcggccgaatatcccggtgtacagagattgggagatggtggggcggtactacgaggagttcccgatcaatcttaagaccggagaggcaaacctcacccagatttacctgcaggaggcgctggacttcattaagagacaggcgcggcaccatccgtttttcctctactgggctgtggatgctacccatgccccggtgtatgcatcgaagccgtttttgggcacttcccagcgcggtcgctacggagatgcagtccgcgaaatcgacgactcaatcggcaagatcctggagctcctgcaagacctgcacgtggcggataacacgtttgtgttcttcacttcagacaatggcgcagccctcatctcggcgcctgaacagggaggttccaatggaccgttcctgtgcgggaaacaaaccaccttcgaagggggtatgcgcgaaccggcgttggcatggtggccaggacatgtgactgccggacaggtaagccaccagctcgggtccatcatggatttgtttaccacttcgctggctctggcaggcctcactcccccaagcgaccgggccattgacggactgaatctcctgcctaccctgctgcaaggacggttgatggatcgccccatcttctactatcgcggggatactcttatggctgccaccctgggacagcataaggctcacttctggacctggactaatagctgggagaactttcgccaggggatcgatttctgcccgggacagaatgtctcaggcgttaccacccacaacctggaagatcatactaagctgccgctgatcttccatctcgggagggacccaggtgagagatttccactgtcgtttgcttccgccgaataccaagaagcactctcacggattacttcagtcgtccagcaacatcaagaggcactcgtccctgctcaaccccagctgaacgtgtgcaattgggctgtgatgaattgggccccgccgggatgtgagaaactgggaaagtgtctgacgccgccggagtcgatccccaagaaatgcctttggtcgcat

SEQ ID NO: 10522 - DNA, 1566 bp, Artificial Sequence
  derived and/or modified sequence
atggcagctgtcgtcgcagcaactagatggtggcagcttctccttgtgctgtccgcagcaggaatgggcgcttcaggggccccccaacctcccaatatactgcttttgcttatggatgacatgggctggggtgatctgggtgtctacggagaaccatcaagggagactcctaatctcgaccgaatggctgcagagggcctcctttttcctaacttttacagcgcaaaccctctttgttccccttcgagagcagccctcctgaccggtagactccccattaggaacgggttctacacgactaatgcccatgcacggaatgcatacacccctcaagaaattgtcgggggaattcccgattcggaacaacttctgccagagctcctgaaaaaggctggctacgtgagcaagattgtgggcaagtggcatttggggcacaggccacagtttcaccctctgaaacacggatttgatgaatggttcggttcccctaactgtcatttcggaccatacgataacaaggcacggcctaacataccggtttacagagactgggagatggtggggagatactacgaagagttccctattaacctcaagactggtgaagcaaacctgactcagatttatctccaggaagctctcgatttcatcaagcgacaggctagacaccacccattctttctctactgggcagtcgacgcaactcacgcccccgtgtacgcatcgaaacccttcttgggaaccagccagagggggagatacggtgatgccgtgagagagattgatgatagcatcggtaagatcctcgaacttctccaggacctgcatgtcgcagataacacctttgtgttctttactagcgataacggggcagccctgatctccgcaccggaacagggaggatcgaacggcccctttctttgtggtaaacagactacctttgagggcggaatgagagaaccagcacttgcatggtggccaggtcatgtgaccgccggccaagtctcgcatcaacttgggagcattatggatcttttcaccaccagcctcgcacttgcagggctgactcctcctagcgatagggcgatcgacggacttaacctgcttcctactctccttcaaggtcgtcttatggacagacctatattctactaccgaggagatactctgatggcagcaactctgggacagcataaagcgcatttttggacgtggactaactcgtgggagaacttcaggcaaggaattgatttttgtcctggacaaaacgtcagtggagtgaccacccataatcttgaagatcataccaaactcccactgattttccatcttggacgcgatccaggggaacgctttcccctctcatttgcatccgcagaataccaagaagcactgagcagaatcacgtcggtggtgcagcagcaccaggaagccctggtcccagcacagccccaacttaacgtgtgtaactgggcagtgatgaactgggcgccacctggatgtgagaagctcggaaagtgcctgacccctcccgaatccatccccaagaagtgtctttggtcccat

SEQ ID NO: 10523 - DNA, 1566 bp, Artificial Sequence
  derived and/or modified sequence
atggccgctgtggtagcagctacaaggtggtggcagctactgctggtcctctctgccgccggaatgggggcctccggagctccccagccccctaacattttactgttacttatggacgatatgggatggggggatctcggagtttacggagaaccctctcgggagactcccaacctagataggatggcagctgaaggattgctttttccaaatttctactctgctaaccctttatgttctccctccagggcagcactcttaactgggcggttgcctatcaggaatggattctacacaactaatgcacacgcccggaatgcttatacaccacaggaaatcgtgggggggattccagattctgagcagttgttgcccgaattattgaaaaaggcaggatacgtttccaagatagtgggaaagtggcaccttgggcaccggccccagtttcaccctctcaaacacgggttcgacgagtggtttgggtcgcctaattgtcatttcgggccttatgataacaaagcacgacctaatatcccagtgtatcgagactgggaaatggtcggaaggtactatgaggaatttcctataaacttaaaaactggggaagccaacttaactcagatttatttgcaggaagccctagacttcatcaagcggcaggcccggcaccaccctttctttctgtattgggccgtggatgccactcatgctcctgtgtacgcatcgaaacccttcttaggaacatcccagcggggacggtatggggatgctgttagagaaatagatgattccatcggaaagattctagaattgctacaggatttacacgtagccgataatacattcgtgttcttcacatccgacaacggggccgcccttatctctgctcctgaacaggggggatctaatggaccatttctctgtggaaagcagacgacattcgaaggaggaatgagggaacctgcactggcttggtggcctggacatgtcacagcagggcaggtctctcatcagcttggatctatcatggatttatttacaacttcccttgccctcgccggactaactccgccatcagatcgtgcaatagatggactcaatctgcttcccactttactgcaggggcggttaatggatcggcccatcttttattatagaggggatactctcatggcagctacgctggggcagcataaagcccatttctggacttggacaaacagttgggaaaacttcagacaggggattgatttttgtccagggcagaatgtgagtggggttacaacacacaaccttgaggatcatacaaaacttcctctaatattccatctggggcgcgatcccggggaacgcttcccattgtccttcgcaagtgccgaatatcaggaagccctgtcgaggataacttcagtggtacagcagcatcaggaagcacttgtgccagcccagccccagctaaatgtgtgtaattgggccgtgatgaactgggccccccctgggtgtgagaaactcggaaagtgccttacaccccctgagtctatacccaaaaaatgtctgtggtctcat

SEQ ID NO: 10524 - DNA, 1566 bp, Artificial Sequence
  derived and/or modified sequence
atggcagccgtggtggcagcaacccgctggtggcaacttctgcttgtgctgtccgcagcgggaatgggggcatcaggcgcaccacagccccccaatatactccttttgctcatggatgacatgggatggggcgacctgggagtgtacggcgagccatcgagagaaactccaaatcttgatcggatggcagccgaagggctgctcttccccaatttctactcggctaacccactgtgttcgccttcccgcgcagccctgcttaccggtaggctgcccattagaaacggattctacaccactaatgcccacgcacggaacgcatacacccctcaagaaattgtgggagggatccctgactcggagcagctgctgcccgaacttctcaagaaggcaggatacgtgagcaaaatcgtcggtaagtggcatctgggtcaccgtccacaatttcatcctctgaagcatggctttgatgagtggttcggttcgcccaactgccacttcggcccatacgacaataaggcccggccaaacatacccgtctacagggactgggagatggtgggcagatactacgaagaatttccaattaaccttaagactggggaggccaaccttacgcaaatctacctgcaggaagcgctcgactttatcaaaaggcaggccaggcaccatccatttttcctttactgggcagtggacgcaactcacgccccggtctacgcatcgaagccatttctcggaacctcacagcgcggtcgctatggtgatgcagtgcgggaaatcgatgactcaatcgggaagatcctggaactcctgcaggatttgcacgttgcagataacacttttgtgttctttaccagcgataacggcgcagccctgatctccgccccagaacaaggcggcagcaacggcccttttctctgtggtaaacaaacgaccttcgaagggggcatgcgtgaacctgcactggcatggtggcctggtcacgtgactgctggacaggtgtcccaccagctcggctctattatggatctttttaccacttcccttgcactggccggacttaccccaccttccgatcgtgcaattgatggtctgaacttgctgcctactctgttgcaagggcgcctgatggatagacctattttctactacaggggagacaccctgatggctgccaccctcggacaacataaggcacacttttggacttggaccaacagctgggaaaactttagacaaggaatcgatttctgtccaggtcagaatgtgtcaggtgtcaccacgcataatctcgaagatcataccaaactgcccctgatttttcatcttggtcgggatcctggagagaggtttcccctgagcttcgcatctgctgagtaccaagaggccctgtctcgaataactagcgtcgtgcaacagcatcaagaagctctcgtgccggcacagccgcagctcaatgtctgcaattgggcagtcatgaactgggcacctccgggttgtgaaaaactcggcaaatgtctcactccaccagagtccatcccgaagaaatgtctctggtcacat

SEQ ID NO: 10525 - DNA, 1566 bp, Artificial Sequence
  derived and/or modified sequence
atggcggcagtggtcgcagccactaggtggtggcaactgctgcttgtcctttcggcagcgggaatgggggcgtcaggggcgcctcagccccctaacatacttttgcttctgatggatgatatgggctggggcgatctgggagtctatggggaaccttcgagggaaaccccaaaccttgatagaatggcggccgaagggcttctgtttcctaacttttacagcgcgaatccactttgcagcccttcccgtgctgccctgttgacgggacggctgccgatacgaaacggcttctacaccactaatgcacacgcaagaaacgcttacactcctcaggaaattgtgggcggtatcccagattcggaacaactccttcccgagctcctgaagaaggcggggtacgtctccaaaattgtgggaaagtggcatcttggtcatcgacctcaatttcaccccctgaaacacgggtttgacgaatggtttggatcgccgaattgccactttggaccatacgataacaaggcacgcccaaacattcctgtgtacagagattgggagatggtcggtagatactacgaagagttcccaattaaccttaagaccggcgaagctaacctcacccagatatatctccaggaagctcttgatttcatcaaacgccaagcgcggcaccatcctttctttctgtactgggcagtggacgcgacccatgctccagtgtacgcgtcaaagccatttctggggacctcgcagcggggtcgctacggtgacgcggtgagagagattgacgattctattggtaagatccttgaactcctccaggaccttcatgtggcagataacacctttgtgttcttcacttccgataatggagcagcacttatttccgcacctgaacagggtgggagtaatggaccatttctttgtggtaagcagaccacctttgaggggggaatgagggaaccagccctggcctggtggcctgggcatgtgaccgcaggccaggtgtcccatcaactgggctccatcatggatctctttaccacgtcacttgcattggcggggttgaccccacccagcgatagagccattgacggcttgaatcttcttccaactctcctccaaggccgccttatggacaggcctatcttttactaccgaggagatacgctcatggccgcaaccttgggacaacataaagcccatttctggacttggactaattcgtgggaaaactttagacaaggaatcgatttttgtccgggacagaacgtgtctggcgtgactacgcataacctcgaggatcacaccaaactgcccttgattttccatctggggcgggaccctggcgagcggttccctctgtcctttgcctccgccgagtaccaagaagctctgtcccgaatcacgtccgtcgtgcaacagcaccaagaggccctggtgccagcgcaaccacagctgaatgtctgtaattgggccgtgatgaactgggcgcctcccggatgtgaaaaacttggaaagtgccttactccacctgaatctattcccaagaagtgcctctggagccat

SEQ ID NO: 10526 - DNA, 1566 bp, Artificial Sequence
  derived and/or modified sequence
atggccgccgtggtggccgccacacgctggtggcagttgctgctagtcttgagcgcagcgggcatgggcgcgtcaggagcaccgcagccacctaatatcctgctcctgctgatggatgacatgggctggggcgacctgggggtctatggggaacccagtcgggagacacctaacctagatagaatggctgccgagggtcttctttttcccaacttttattcggcaaaccccctgtgctcgccatccagggctgcccttcttaccggaaggctgcctattaggaatggattctacaccacaaacgcccacgccaggaacgcgtataccccccaggaaatcgttggcggaatccccgactctgagcagcttctgcccgaactgcttaaaaaggccggctatgtatccaaaatagtcgggaagtggcacctcggccacaggccccagttccatcccctgaaacacggattcgacgagtggttcggcagcccaaactgtcactttggcccctatgataataaggctagacctaacattccggtctacagagactgggaaatggtggggaggtattacgaggaatttccaatcaacctgaaaacaggagaggctaacctgacccaaatctacttacaggaggccttagatttcataaaacgtcaggctcgacaccatcccttctttctgtactgggcggtcgacgctacacatgcaccagtatatgccagcaaaccctttctgggcacatctcaaagaggtaggtacggagatgccgtgcgtgagattgacgattcgataggcaagattctagaactcctgcaggatctgcacgtagctgataatacatttgtgtttttcacttctgataacggcgctgccctgatcagtgccccagagcaggggggctcaaacggcccctttctgtgtggcaagcagaccacctttgaaggaggtatgcgcgagccagccctggcttggtggccgggacatgtaacggccggtcaagtgtcccatcagttggggtctataatggacttattcactacctccctggccctcgctggcctgacacccccatctgatagggccatagatggcctgaacttgctcccaaccttactgcagggtcggctgatggataggcccattttctattaccgaggtgacacactaatggctgcaactctgggtcagcacaaggctcacttttggacctggacaaactcttgggaaaacttcaggcagggcatcgatttttgtcccgggcaaaacgtgtctggggtgacaacccacaatttggaagatcataccaagctcccgctcatctttcatctgggtcgagacccaggggaacgattcccactgagcttcgcttcagccgaataccaggaagctctgtccaggattacttcggtcgtacaacagcaccaggaagcgctggttcccgcccagccacagcttaacgtgtgcaattgggcggtcatgaactgggctcctcccggatgcgaaaaattaggaaagtgtttaacaccccccgagtctattcctaagaaatgtctgtggtcacat

SEQ ID NO: 10527 - DNA, 1566 bp, Artificial Sequence
  derived and/or modified sequence
atggcggctgttgtggccgccacccgctggtggcagctgttgttggtgttgtccgccgctggcatgggcgcaagcggcgcaccacagccgcctaatatcttgttgctgttgatggatgatatgggctggggagacctaggcgtctacggcgaaccgagccgcgagacgccaaacctcgatcgaatggccgcggaaggtctgctgttcccgaacttctactcagccaacccactttgtagcccctcccgagcggcgcttctgaccggccgcttgcccattcgaaacggattttacacgaccaacgcgcacgccaggaatgcgtacacgccgcaggagattgtggggggaataccggattcggagcagctactaccagagctgctgaagaaggctggctacgtatcaaagattgtgggcaagtggcatctgggacaccgtccccagttccatccccttaagcatgggtttgacgagtggtttggatccccgaactgccacttcggcccttacgataacaaggcacgcccaaatatcccggtgtaccgcgactgggagatggtcggacgttattatgaggagttccccataaatctaaagaccggcgaggcaaacctcactcagatttatttgcaggaagccctggacttcatcaagaggcaagcacgacaccaccccttcttcctgtactgggccgtggacgccacacacgccccggtctatgctagcaagccgttcctgggcaccagccagaggggtcgctacggtgatgcggtgcgcgaaatcgatgattccattggcaagatcctggagctgcttcaagacctgcacgtggccgataatacctttgtattcttcacaagtgataatggtgctgccttgatttccgcaccggagcagggtggctcgaatggaccgtttctgtgcggcaagcagaccacgttcgaagggggcatgagagagcctgcccttgcgtggtggcctggtcacgtgacggcgggccaggtaagccaccagctgggatcgattatggacctgttcacgacatctctggcgctcgccggcctgacccccccaagtgaccgagccatcgacggcctgaatttgttgccgacacttctgcaaggtaggctgatggatagaccaatattttactaccggggcgatacgcttatggccgccactctgggccagcataaggcccatttctggacatggacaaattcttgggagaacttccggcagggcatagatttttgccccggccaaaacgtttccggcgttactacacacaacctagaggaccatacaaagttgcccctcattttccatctgggccgcgaccccggtgaaagattccccctgagtttcgcgtctgccgaatatcaagaggcgctgtccaggattacgagtgtagtgcagcaacatcaggaagccttggtaccggcacaaccgcagctaaacgtgtgtaactgggcagttatgaattgggccccacccggttgtgagaagttgggcaaatgcctgacgccgcctgaaagcatacccaagaagtgcctgtggtcgcac

SEQ ID NO: 10528 - DNA, 1566 bp, Artificial Sequence
  derived and/or modified sequence
atggctgcggtggtggctgccactaggtggtggcagctcctattagtgctctctgccgctggcatgggggcttctggcgcaccacagccccccaatatcctgctgctactcatggatgatatggggtggggtgacctgggtgtgtacggcgagccttcaagagagacacccaacttggatcgcatggctgctgagggcttattgtttccaaatttttattcagcgaatccgctgtgttctccctctagagctgcattactgaccggcagattgcctataaggaacggcttttacactacgaacgctcacgccaggaatgcctatacaccacaggagattgtgggaggtatccccgattcagagcagctgctgcctgagctgctgaagaaggcgggttatgtctcaaaaatcgtcgggaaatggcatctcgggcaccggccacagtttcacccactgaagcacggcttcgatgagtggttcggcagccctaactgccacttcggcccttacgacaataaggcacgcccgaacatcccggtgtatcgggactgggagatggtgggccgttattatgaagagttccccattaacctgaaaaccggggaggccaatctgacccagatctaccttcaggaagccttggattttataaagaggcaggcccgacaccatccttttttcctgtactgggcagtggacgcaacacatgccccagtttacgcgtcaaagccctttttgggaacatctcaaaggggtaggtatggagatgccgtaagagagatagacgattcgattggcaaaattcttgaactccttcaggatctgcacgttgcggacaacacctttgtgtttttcacatccgataatggagctgccctaatcagcgcccctgagcagggaggaagcaatgggcccttcctgtgtggaaaacagacgaccttcgagggggggatgagagagccggcgctggcatggtggcccggccatgtgactgctggccaggtgtctcatcaactggggtcaataatggatctgttcacgacttctctggctctggccggattaaccccaccaagcgatagagcaatcgacggtttaaacttgctgccaacgctactacagggaagactcatggaccggccaattttttactaccgtggagacaccctgatggcagcaacactcggacagcacaaggcccacttttggacttggacaaatagctgggagaacttcaggcagggaatcgatttctgtcccggccagaacgtgagcggagtcacaacccacaatttggaagatcacacaaaactgcctctcatctttcacctagggcgcgacccgggagaaaggttccccttgagcttcgccagcgcggagtatcaggaagcactgtctcgcatcacctctgtggtgcaacagcatcaagaagcactcgtgcctgcgcaaccccaactgaacgtctgcaattgggctgtaatgaactgggcccctcctggatgcgagaaactcggcaagtgcttgacccctcctgagtcaatcccaaaaaagtgcttgtggtcacat

SEQ ID NO: 10529 - DNA, 1566 bp, Artificial Sequence
  derived and/or modified sequence
atggccgccgtagtcgccgcgacgcgctggtggcagcttctcttggttctttccgcggctggtatgggagcctcaggcgcccctcagcctcccaacattttgctgctgctgatggacgacatgggctggggagatctgggtgtatacggtgagccttctcgcgagacccccaatttggataggatggccgctgaaggtttgcttttccccaacttctattctgcaaacccgttgtgctcaccctcaagagccgctctgctgactggaaggctgccgattaggaatggcttctacaccacaaatgcccacgccagaaacgcctatacccctcaggagatagtaggtggaatcccagatagtgaacagctgctccccgagttgctgaaaaaagccggttatgtcagtaagattgtgggcaagtggcaccttggccacagaccgcagtttcatcctctgaaacatggcttcgacgagtggttcggcagtcccaattgccacttcggcccttacgacaacaaagcacgccctaatatcccagtataccgcgattgggagatggttggacgctattatgaagaattccctattaatcttaagacgggagaagccaatttgactcagatctacttgcaggaagctctggactttatcaaaagacaggctcgccaccaccctttcttcctgtattgggcagtagacgcaacccacgctccagtgtacgcttcaaagcctttcctgggtacttctcagcgcggtaggtacggagacgctgtgagagagatcgacgatagcatcggtaaaattctcgaactgctgcaggacctgcacgtggccgataatacttttgtttttttcacttcagataacggtgctgctctgatcagcgcgccagaacagggaggctcaaatggtcccttcctgtgtggaaaacagaccacttttgagggaggtatgcgcgaacccgctctggcatggtggcccggccatgtcactgccggacaggtatcccaccagctcggttctatcatggatttgttcaccacatcattggctctcgcgggattgactccccccagtgatcgcgcaatcgatggtcttaaccttttgccgacgctcctccagggtagacttatggacagacccatcttctactaccgcggtgacactcttatggcagcgaccctgggacagcacaaggctcacttttggacgtggactaactcttgggagaatttccgccaaggaattgacttctgcccgggccagaatgtaagcggcgtgacaacgcacaatttggaggatcacactaagcttcctctgatctttcatctgggaagggacccgggagagcgcttccccctctccttcgcctccgctgaatatcaggaagctctgtctagaattacgagcgttgtgcagcaacatcaggaggccctggtcccagctcagcctcagctgaacgtgtgtaactgggcggtcatgaattgggcgccgcccggctgtgaaaagttgggtaagtgtcttaccccaccggagtctatccctaagaagtgcctgtggagtcac

SEQ ID NO: 10530 - DNA, 1566 bp, Artificial Sequence
  derived and/or modified sequence
atggcagcggtggttgccgcaacccgttggtggcagctgcttctcgtgctgtccgccgcaggaatgggagcttcgggggcaccacagccaccaaacattctccttctcctcatggacgacatgggctggggggatctgggagtgtatggcgagccgtcaagggaaacccccaacctggataggatggcggccgaaggcctactctttcccaacttttattccgctaacccgctctgttcccccagcagggcagccctcctgaccgggcgcctccccattcgtaacggcttttacactacaaacgcccatgcgcgaaatgcgtatacgcctcaagagatagtgggcggcattcctgacagtgagcagctcctcccagagctcttaaaaaaagctgggtatgtgtccaagatagttggaaaatggcatttgggccacaggccccagtttcatccgctgaagcacggtttcgacgaatggttcgggtctccaaattgccatttcggcccatatgacaacaaggcccgccccaacatcccagtttacagagattgggaaatggtaggtagatattatgaggagtttcccattaatctgaaaactggggaggcaaatctgacacaaatatatctgcaggaagcattagatttcattaaacggcaagcccggcaccaccccttttttctttattgggcagtggatgcaacccatgcgcccgtgtatgcctccaaaccttttttggggacatcccagcggggacgatacggggatgcagtccgcgagattgatgattctatcggcaagattctcgagctcctgcaggatctccacgttgctgacaatacattcgtctttttcactagtgacaacggagccgccctgatctccgccccagaacaggggggcagcaatggacctttcctatgcggaaagcaaactaccttcgaaggcggtatgcgagagccagctctcgcctggtggcctggccatgtgacagcagggcaggtaagccaccagctcggctcaatcatggacctctttactacctccttggcccttgccgggctgactcccccctctgaccgagctatcgatggtcttaacttactgcctaccctattacagggtcggctcatggacaggcccatcttctattacagaggtgacactcttatggcagcaaccctcggccagcataaggcacatttttggacgtggactaattcctgggagaatttccgccaaggcatcgatttctgccccggacagaatgtgtcaggagtaacaacgcacaatttggaggaccacaccaaactacccctcatctttcacttgggtagagacccaggcgagcggtttccactttctttcgctagtgcggagtatcaggaggccctgtcaagaattacctcagtcgttcagcaacaccaagaggctctggtgcctgcccagccgcaactgaacgtatgtaactgggcagtgatgaactgggctcctcccgggtgtgaaaaactgggcaaatgtctgactccacccgaaagcatccctaaaaagtgcctgtggagccac

SEQ ID NO: 10531 - DNA, 1566 bp, Artificial Sequence
  derived and/or modified sequence
atggccgcggtggtggcagcaacgaggtggtggcaactcctgctggtactgtctgcagcgggaatgggggccagcggagctccccaaccccccaacatactccttctgctgatggacgacatggggtggggtgatttgggcgtgtatggtgagccgagccgcgagacaccgaacttggacaggatggccgccgaaggccttctgttccccaacttttatagtgcaaacccactttgtagcccgtcaagagccgctctcctcacaggccggcttcctatccgcaatgggttttatacaaccaatgctcacgctaggaatgcttacaccccgcaggaaatcgtggggggcattcccgacagtgagcagctgctgcctgaactgctgaaaaaggcaggctacgtgtctaagatagtgggaaagtggcatctcggacatagacctcagtttcatcccctgaagcacggctttgatgaatggtttggatcccccaattgtcatttcggcccctacgataacaaggctaggccaaatattccagtgtatagagactgggaaatggtgggccgctactatgaggagtttccaattaacttgaaaacgggtgaagctaacctgacccagatttacctgcaggaagcactcgatttcatcaagcggcaggcccggcatcacccattcttcttgtattgggcagtggatgctactcatgctcccgtgtatgcctcaaaaccttttctcggcactagtcagcgcgggagatacggtgacgccgttcgcgaaatcgatgatagcatcggaaagatcctggagcttttgcaagacctccacgtggcagataacacctttgtgttctttacttccgataacggtgccgcactgatctctgctcccgagcaagggggctccaatggtccattcttgtgtggcaaacagacgacattcgagggcggtatgagggaacctgctctggcgtggtggcctggtcacgtgactgccggacaggtatcccaccaactcggcagcataatggacttgtttacgaccagcctggcattggccggactgacccccccttctgaccgcgcaatagatggccttaacctcctgcctaccttgctccaggggcggctgatggaccggcccattttttattaccggggagacactctgatggcagcaacactcggacagcacaaggcccacttctggacctggacaaactcttgggagaacttcagacagggcatcgatttctgcccagggcaaaatgtgtccggcgtcacaacacacaacctggaggatcacactaaactgccactgatatttcatcttggaagagatccgggggagaggttccctttgtcatttgcttccgccgaataccaggaggccctctctagaatcacctccgtggtgcagcagcaccaggaagctttggtgccagctcagccgcaactgaacgtgtgcaactgggccgtgatgaattgggcccctccaggttgtgaaaagctgggaaaatgcctcacacccccagaaagcattccaaaaaagtgcctctggagccac

SEQ ID NO: 10532 - DNA, 1566 bp, Artificial Sequence
  derived and/or modified sequence
atggccgccgtagtggccgctacgcgctggtggcaattactcctcgtgcttagtgccgccggcatgggagcctcaggtgcgccacaaccaccaaatattttgctactgttaatggacgacatgggctggggcgacctcggggtgtatggtgaacccagtcgcgagactccgaacttggatcggatggcagcggaggggctcctgttcccaaacttttattctgccaacccactgtgtagtccgtctagggcggctcttctcacaggacgcctaccaattcggaacggattctacaccaccaacgcacatgcccgcaacgcatacactccacaagagatcgtgggaggtatccccgactctgagcagctcttgccggagttattgaaaaaggccggatatgtgtcaaagatcgttggcaaatggcatttgggacacaggccccaattccatccgttgaagcatggctttgacgagtggtttgggtccccaaactgtcatttcggtccttacgataataaggcccgccctaacatacccgtttacagggattgggagatggtaggcagatattatgaggagttccccataaacctcaaaacaggagaggctaaccttacacagatttacctgcaagaagccctggacttcatcaagcggcaagccaggcatcaccccttttttttgtactgggcggtcgacgccacgcatgcacccgtctatgcttccaagcctttcctgggaacctcccagcgcggacgctatggagacgcggtcagagaaatcgacgacagcattggaaaaatcttggagctgctccaagaccttcatgtcgccgataatacgttcgtatttttcacctccgacaatggcgccgcattgatcagcgctcctgagcaagggggtagtaacggtccttttctctgcggcaaacagacaactttcgagggaggcatgagagaaccagctctggcatggtggccaggccacgtgacagccggtcaggtgagtcaccagttgggcagcatcatggacctatttaccacctcacttgcacttgcgggcctgacccctccaagcgaccgggccatcgatggcctgaacctactgccaactctccttcagggcaggttgatggaccgaccaatcttttattacaggggcgatactcttatggccgccactctgggccaacataaggctcacttttggacctggactaatagctgggagaattttagacaaggaatcgacttctgccctgggcagaatgtctccggggttacaacacacaacctggaagatcacaccaagctgccattaattttccacctggggcgcgatcccggagagaggtttcccctctcattcgcatcagctgaataccaggaagcactgtcgaggatcacgagtgtggtacagcagcaccaggaggcactcgtgccggctcagccccagctgaatgtgtgtaactgggccgtgatgaattgggcgccacccggatgcgagaaactgggcaagtgcttgacaccccccgaaagcatccctaaaaaatgcctgtggtcccac

SEQ ID NO: 10533 - DNA, 1566 bp, Artificial Sequence
  derived and/or modified sequence
atggcagccgtggtggccgctactcgctggtggcagcttttgctcgtgttgtctgctgctgggatgggagcaagcggtgcaccacagcctcccaacatcctgctccttctcatggacgatatgggatggggtgaccttggtgtatacggtgagcccagccgagaaaccccaaatctggatagaatggcggctgaaggactactgtttccaaacttttacagtgccaaccccttatgctctccaagtcgcgccgcattgctcacaggtcgtctcccgattcgcaacggtttctacacaactaatgcacatgcaagaaatgcatacacacctcaggaaatcgtgggcgggatccccgacagcgagcagcttctgcctgagctgctgaaaaaggcgggctatgtgtctaaaattgtcggcaaatggcacttgggccatagaccacaattccaccctctgaagcatggcttcgatgagtggttcggctcaccaaattgccactttggaccatacgataataaggccagacccaatatccccgtctaccgcgactgggaaatggttggccgctactacgaggaatttcccatcaatctgaaaacaggcgaagcaaacctgacccagatatatttgcaggaggctttggattttatcaagcggcaggcaaggcatcaccctttcttcttgtactgggccgtagacgccacacacgctcctgtatacgcttcaaaacctttcttggggacgagccagcgggggcggtatggggatgccgtccgcgagatagacgattccattggcaagattttggaacttctgcaggacctccatgttgcagataatacttttgtgtttttcacttccgataacggtgctgcattgatttccgcgccagaacagggcggatctaacggcccatttctttgcgggaagcagacaacattcgaaggcgggatgcgggagcctgccctagcctggtggcccggccacgtgaccgcgggtcaagtttctcatcagctgggttcgataatggacctgtttacaacgagtctggccctcgccgggcttaccccaccgtccgatcgagccatagatggtcttaatctcttgcctaccctcctgcagggtcggctgatggatagaccgatattttattaccgcggggacaccttaatggccgcgaccctcggacagcataaggcccacttctggacttggacgaattcctgggagaactttagacagggtattgacttctgccccggacagaacgtgagtggtgtgaccacccacaatctggaagatcacactaagctcccacttatatttcacttgggccgggatcccggagagcgctttcctctgtcatttgcttctgcggagtaccaggaagccctctccagaattacgtccgtggttcagcagcaccaggaagcgctggtccccgcacaaccacaacttaacgtatgcaactgggccgtgatgaactgggcgcccccaggctgtgaaaagcttggcaagtgtttgacaccacctgagagtatcccgaaaaaatgcctctggagccat

SEQ ID NO: 10534 - DNA, 1566 bp, Artificial Sequence
  derived and/or modified sequence
atggccgccgtggtggcggccactcggtggtggcagctgctgctcgtactgagcgcagccggaatgggagcgtcgggcgctccgcagccacccaacatcttgctgttgctgatggatgacatgggatggggcgatctcggggtgtacggagaaccatcccgggaaaccccgaacctggaccgtatggcagccgagggcttgctgtttccgaacttttattcagccaacccactgtgttctccttcccgcgccgccctgctcaccggtcggcttccaatccgcaacggattctacaccaccaacgcccatgctcgcaacgcatacaccccacaggagatcgttggaggtattccggacagcgaacaattgctgccggagctcctgaagaaggcaggctacgtctcgaagatagtgggaaaatggcaccttgggcaccgcccccagtttcacccccttaaacatggcttcgacgagtggtttggcagccctaactgccacttcgggccgtacgacaacaaggcgaggccaaatatcccggtttacagggactgggaaatggtcggacggtactacgaagaattcccaatcaaccttaagacgggggaagcgaacctgacccagatctacctccaagaggccctggacttcatcaaacggcaggcacgccatcacccattcttcctgtactgggccgttgacgcgactcacgcgccagtctacgcctccaagcccttcctgggcacgtcgcaacggggccgctacggggatgccgttagagagatcgacgacagcatcgggaagatcctggagctcctgcaggacctccacgtggccgataatacgttcgtgttcttcacttcagacaatggagcggctctgatctccgccccggaacaaggtggatcgaacggaccattcctgtgcggaaagcaaactacttttgaaggaggaatgcgagagcctgccctcgcttggtggccgggtcatgtgactgcaggacaggtcagccatcaattgggtagcatcatggatctgttcacgacctcgcttgccctggcggggctgaccccgccctcggaccgtgccatcgatgggctcaacctgcttccaactttgctccagggccggctgatggataggcctatattctactatcgcggcgacaccctgatggcggccaccctgggacaacataaggcacacttttggacttggaccaattcttgggagaatttcagacagggaattgatttctgcccgggccagaatgtctcgggagtcactactcataatctcgaggatcacaccaaactgccactgatttttcacttgggccgggaccctggcgaacggttcccgctttcgtttgcatcagccgaataccaggaagccctcagtaggatcacctctgtggtgcagcaacatcaagaggcgttggtcccggcacagccacagctgaatgtctgcaattgggctgtcatgaactgggcgccgccgggatgtgaaaagctcggaaaatgccttacccctccagagtccatcccgaagaagtgcctgtggagccac

SEQ ID NO: 10535 - DNA, 1566 bp, Artificial Sequence
  derived and/or modified sequence
atggctgccgtggtggcagccacccggtggtggcagctcctgctggtgctgagcgcagcgggtatgggggcgtcaggcgccccgcaaccgccgaatatactcctgttgctcatggatgacatgggttggggagatctcggtgtatacggcgaacctagcagggaaaccccaaacctggatagaatggccgccgaaggtctgctcttcccgaacttctattcggctaacccactgtgtagcccgtccagggccgcgctgctgacgggacgtctccccatccgcaacggattctacaccactaacgcacacgctaggaatgcttacactccccaagagatcgtcggtggcatcccagactcggagcagttgctgcccgagctgctgaagaaagcagggtacgtgagcaagatcgtgggcaagtggcatctcggccaccgccctcagtttcatccgttgaaacacggattcgacgagtggtttgggtcaccaaattgtcactttggtccttacgacaataaagctagaccgaacatcccggtgtacagagactgggagatggtcgggcggtactatgaggaattcccgattaacctgaaaacgggcgaggcgaatctgacccaaatctacctgcaggaagcactggacttcattaagcgccaggcccgccatcacccctttttcctgtactgggcggtcgacgctactcacgcgccagtgtacgcttccaagccattcctgggaacctcgcaacgcggacgatacggagatgctgttcgcgaaatcgacgatagcatcgggaagatactggagctgctgcaagatctccatgtggcagataacaccttcgtgttcttcaccagcgacaacggagcagccctcatctccgcgccggaacagggaggaagcaacggacctttcctttgcgggaagcagactacttttgaaggggggatgcgggaacctgccctcgcgtggtggcccggccacgtgaccgccggacaagtgtcgcaccagcttggatctatcatggacttgttcactaccagcctggcgctggccggacttactccaccctctgaccgcgccatcgatggtcttaacctgcttccgaccttgcttcaaggtcggctgatggatcggcccattttctattacaggggagacaccctcatggctgctacgctgggccaacataaagctcatttctggacctggacgaactcgtgggagaacttccgccagggaatcgacttctgccctggccagaatgtgtcaggtgtaaccactcacaacttggaagatcatactaagctgccgctgatctttcacttgggaagagatccgggagaaagatttcctctgtccttcgcctccgcggagtaccaggaggcactgtcaaggatcacctccgtggtgcagcagcatcaggaagccctggtcccggcccagccgcagcttaacgtgtgcaattgggccgtgatgaattgggcacctcccggatgcgaaaaacttggcaagtgtctcactccacctgaaagcatcccaaaaaagtgcctgtggtcccac

SEQ ID NO: 10536 - DNA, 1566 bp, Artificial Sequence
  derived and/or modified sequence
atggccgccgtcgtcgcagctacacggtggtggcaactcctactggtactttccgctgctgggatgggcgcctctggcgccccacagccaccaaacatcctcctccttctgatggacgacatgggctggggcgatctcggcgtctacggagaaccctctagagagaccccaaatctcgaccgcatggctgcagagggcttgctgtttccaaacttctactcagctaatccactctgttcaccatctagggcggctctcctcactggcaggcttcctatcagaaatggcttctacacaactaacgcacacgcgagaaacgcttacacaccacaggagattgtcggaggaattcccgactccgaacaactgctgcctgagttgctgaaaaaagccggctatgtcagcaagatcgtcgggaagtggcacttgggacaccgcccacaattccaccctctcaagcatggattcgacgagtggttcgggagccctaactgccactttggcccctacgataacaaggcaaggccaaatataccagtctacagagactgggagatggttggcaggtactacgaggagtttccaatcaacttgaaaacaggagaagccaacctgacccagatatacctccaggaagctctggatttcattaagaggcaggctaggcaccatccatttttcctttattgggctgtcgatgcaacccacgctccagtgtacgctagtaaaccctttctgggaacgagccagaggggtcggtatggcgatgctgtgagggagatcgacgactccattggcaagatattagagctgcttcaagacctgcacgtcgcagacaacacattcgtgttttttacaagcgataacggcgccgctcttatatcggctcccgaacagggcgggtcaaacggaccattcttgtgtggcaagcagactacgttcgaggggggaatgagggagcctgcactggcatggtggcctggccatgttactgcaggccaagtttcccatcagctggggtctatcatggatttgtttacaacgagtcttgcactcgcaggcctgactcctccctctgaccgagctatcgacggcctgaacctcctcccaacactgctgcaaggacgcctcatggatcgccctatcttctactatagaggggacacacttatggccgccaccctggggcagcacaaggcacacttttggacatggactaattcgtgggagaacttccgccagggtatcgacttctgccctggccaaaacgtcagcggtgtcactacacacaacttagaagatcataccaagctgcctctcatctttcatctcggacgcgatcccggagaaagatttccattgagcttcgcatctgctgaataccaagaggcattgagccgtataactagcgtggttcagcagcaccaggaggcgctggtccccgctcaacctcaactcaacgtttgcaattgggcagtaatgaactgggctccacccggatgtgagaagctgggaaagtgcctgacccctcctgagagcatccctaaaaaatgcttgtggtcgcac

SEQ ID NO: 10537 - DNA, 1566 bp, Artificial Sequence
  derived and/or modified sequence
atggccgccgtcgtggctgccacaaggtggtggcagctactccttgtgctatctgcagcagggatgggcgctagtggagctccacagcctcctaatattctgctcttgctgatggatgacatgggatggggcgatcttggtgtttatggcgaaccttcccgggaaactcctaacctcgatcgcatggctgccgagggcctcctgtttcccaacttttattcggccaatcccctctgcagtccctcccgcgccgcactcttgaccggcagacttccaatccgcaatggtttttataccaccaatgctcatgcgcggaatgcatatacaccccaggagattgtgggaggcattccggatagcgaacagttgctccctgagttactaaaaaaggctggctatgtgtcaaaaattgtagggaaatggcacctcggtcaccggccgcagttccatccacttaaacacggcttcgacgagtggtttggctctcccaactgtcatttcgggccctacgacaacaaagcccgcccaaacattccagtgtacagggactgggaaatggtgggaagatactatgaggagtttcccatcaatctaaaaaccggcgaggccaacctcacacagatctatctgcaagaggcattggattttataaaaagacaggctcgccaccatccatttttcctgtattgggcggtggatgccacgcacgcacctgtctacgcctctaaacctttcctgggcacatcgcagagagggaggtacggagacgccgttcgcgagatcgatgacagcattggtaagatactcgagttgctccaggacctgcatgtggcagacaatactttcgtgttttttacatccgacaatggcgcagccttgatcagtgctcctgagcagggggggtcaaacggcccattcctatgcgggaaacaaaccaccttcgaaggcggcatgcgcgaacctgccttggcctggtggccgggtcacgtcaccgcgggtcaggtatcccatcagctggggtcaatcatggacctttttacgacctccctggcactggccgggctgacgccaccgtccgaccgggccattgacggactcaacctgctgcccactcttcttcagggacgcctgatggatcggccgatcttttactacagaggggacacgctcatggccgctacacttggacagcacaaggcgcatttttggacctggacaaactcctgggagaatttcagacaaggcattgacttctgtcccggccagaatgtatccggggtgactacacacaatctggaggaccatacaaagctgccactgatttttcacctcggtagagatccaggagagcggttccccctgagcttcgccagtgcggagtatcaggaggccctgtctcgaatcacttcagttgtacagcagcaccaggaggctttagtgcccgcgcagccgcaattgaacgtgtgtaactgggccgttatgaactgggcccctcccggatgcgaaaaactcggtaagtgcctgacccctccagaaagcataccgaagaaatgcctgtggagccac

SEQ ID NO: 10538 - DNA, 1566 bp, Artificial Sequence
  derived and/or modified sequence
atggcagccgtggtcgccgcgaccaggtggtggcaacttctgctggttctgtccgcggcgggcatgggtgcgtccggcgccccacagcctccgaacatcttgctcctgctgatggatgatatgggttggggggacctcggcgtatatggagaaccctccagggaaactccaaacctggacaggatggccgcggagggcctcctcttccccaacttctattcagcgaatcccctgtgctctccttctagggcagctttgctcaccggtcggctgcctatacgaaatggcttctatacaacaaacgcgcatgctaggaatgcctacaccccacaggagatagtcggcggcatacctgattcagagcagctgctgcccgagctcctgaaaaaagcaggatacgtctccaagatcgtgggaaaatggcatctcgggcaccggcctcagtttcatcctctcaagcacggattcgacgagtggttcgggagtcccaattgtcacttcggtccgtacgataacaaggctagaccgaatattccagtttacagagactgggagatggttggaagatactacgaggagttccctattaacctgaaaacaggagaagccaatctcacccagatctaccttcaggaggccctggacttcattaagcggcaagccaggcatcacccgtttttcctgtactgggctgtcgacgccacccacgctcccgtttacgcctccaaaccattcctgggaacgtcccagagaggcaggtacggcgacgccgtccgggagattgatgacagtataggcaagatcctggagctgctccaagacttgcacgtagctgataacacgttcgtgttttttaccagtgacaacggcgccgctctgatctccgcgccagagcagggaggaagcaatgggccgtttctctgcggcaaacaaacaacattcgaaggaggtatgcgcgagcctgccctggcttggtggcccggccatgtgactgcgggtcaagtaagccatcaacttggctccataatggatcttttcaccacttccctggctctggctggccttacacctccctccgatagagctatcgacggcctgaacctcctcccgactcttttgcagggccgcctgatggacagacctatattctactatcgaggagacacactcatggccgccacacttggtcagcataaggcccacttttggacctggacaaactcttgggagaattttagacagggtatcgacttttgtcccggacagaatgtttctggggtcaccacccataacctggaagaccacacaaagctgccgctgatattccaccttggcagggatccaggtgaaagattccccctcagttttgcaagtgcagaatatcaggaggctctttctaggatcacctctgtggtgcagcagcaccaggaggccctcgtccctgcacagccccaactgaatgtctgtaattgggccgtgatgaattgggcacctccaggctgtgagaaactggggaaatgccttactccacccgagtctatacctaagaaatgcctttggagccat

SEQ ID NO: 10539 - DNA, 1566 bp, Artificial Sequence
  derived and/or modified sequence
atggctgctgtggtcgccgccacacggtggtggcagttgctgctcgtactctccgctgctggcatgggagcctctggcgccccacaaccccctaatattctcctcctcttaatggacgacatgggctggggagacttaggcgtttatggagaaccaagcagggagactcccaacctggaccgtatggcagccgagggattgctttttccaaacttctatagcgcaaaccccctctgctccccatcccgggctgctctcttaactggtcgccttcccataagaaatggcttttatactaccaatgctcacgcgcgcaacgcctatacaccccaagaaatcgtgggtggcatcccagattcggagcagcttcttccagaactcctgaagaaggcagggtatgtctcaaagatcgtgggtaagtggcatctgggccataggccacagtttcatccactgaagcatggattcgatgaatggttcggcagccccaattgtcactttggtccatatgataataaagcccgccccaatataccagtctatcgtgactgggagatggtcggaaggtactacgaggaatttcctataaatctcaagactggcgaagccaatttgactcagatatacctgcaagaagccttagatttcatcaagaggcaggcgagacaccaccccttcttcctgtactgggcggtcgatgctacccatgcacctgtttacgcctcaaagcccttcctgggaacctcacagcgcggcaggtacggggacgcggttcgagaaatcgatgattcaattgggaagatcctcgaactcctccaagacctccatgttgccgacaatacattcgtctttttcacaagtgacaatggagccgctttaattagtgcccccgaacagggggggtccaacggaccattcctgtgcggaaagcagaccacattcgaaggtggaatgcgcgagcccgccttggcctggtggcccggccacgttaccgcaggccaggtgagccaccagttggggtccataatggatttattcactacatctcttgcgctggccggcctaactcctccgagtgacagagccatcgatggtctgaatctactccccacactcctgcaaggccgcctgatggacaggcccattttctattaccgcggggacacattgatggctgccaccctgggccagcataaggcccatttctggacatggaccaactcgtgggagaactttcggcaggggattgatttttgcccgggtcagaatgtcagtggcgtgacgactcacaatctggaggatcacacaaaattgccattgatttttcatctgggccgggatcccggcgaacgatttccactctctttcgcaagcgctgagtatcaggaggcactgagtcggatcacctcggtggtgcaacagcatcaagaagcactagtgcccgcacagccccaattgaatgtgtgtaactgggctgtgatgaactgggctcccccgggctgtgagaagctgggaaagtgtctaacccctccagagtcgattcccaagaagtgtctttggagccac

SEQ ID NO: 10540 - DNA, 1566 bp, Artificial Sequence
  derived and/or modified sequence
atggcagcagtggttgcagctactcgctggtggcaactgcttcttgttttgtctgcggccggaatgggagcaagcggagccccacagccgccgaatattttgctgttgctaatggatgacatgggctggggtgaccttggagtctacggtgaaccatctagagagactcctaacctggatagaatggcggccgaaggattacttttcccaaacttctatagcgcgaatcccctgtgctctcctagcagggctgctttactgacaggccgcctgcccatccgtaacgggttctataccactaacgcgcatgcgcgaaacgcatataccccccaggaaatcgtgggcggaatccctgactctgagcaactgctgcccgagctgctgaagaaggccgggtacgttagtaagatagtgggaaaatggcatttgggacacaggccgcagtttcaccctctgaaacacgggtttgatgaatggtttgggtcccctaactgtcatttcgggccgtacgacaacaaggcccgccccaacatccctgtctacagagactgggagatggtcggcagatactacgaagaattcccaatcaatctgaaaactggagaagctaacctgacccaaatttacctccaggaggccttggattttattaaaaggcaagccaggcaccaccccttcttcttgtactgggctgtcgacgctactcatgctcccgtttacgccagcaaaccattcctcggaacaagccagcgcgggcggtacggtgacgccgtgagggaaatcgatgatagcatcggaaagattttggagctccttcaggatcttcacgttgcggacaatactttcgtcttctttacctctgataatggagccgcacttataagcgcccccgagcagggaggttcaaacggaccttttttatgcggcaagcagacaacattcgagggcggcatgagggaacctgccctggcctggtggccaggacacgtcactgctggccaagtgtcacatcagctggggagcatcatggacctctttaccactagtctggcactcgcagggttgacccccccaagcgaccgcgcaatcgatggccttaatctgctgccaacactgttgcaggggaggttgatggatcgcccaatcttttactacagaggtgatacattgatggccgctacgctgggccaacacaaagcccacttttggacctggacaaactcatgggagaattttaggcaaggaattgacttttgcccgggacaaaacgtcagcggtgtgaccacccataatctcgaggaccacaccaaacttcctctgatctttcatcttggacgcgaccctggcgagcggttcccactgagttttgcatctgccgagtatcaagaggcactgagtcgcataacgagtgtggtgcagcaacatcaagaggctctggtaccagcccaacctcagcttaacgtgtgcaattgggcagtgatgaactgggccccacctggctgtgagaaacttggtaaatgcctgacaccccctgaaagcatccctaagaaatgcctgtggtctcac

SEQ ID NO: 10541 - DNA, 1566 bp, Artificial Sequence
  derived and/or modified sequence
atggccgcagtcgtggcagcaacccgatggtggcaactccttttggttctgtccgcagcagggatgggagcgtctggagccccgcagcctcccaatatcctgctcctgttgatggatgacatgggttggggggatctgggggtgtacggagagccgtcgagagaaacgcctaaccttgaccgcatggcggccgaaggactcctttttcctaatttctactccgctaacccgctgtgttcgccttcccgggcggccctgcttactggtaggcttccaattcgtaacgggttctacaccactaacgctcacgcaaggaatgcatacacgccacaagaaattgtgggcggtatacctgatagcgaacagctgttgcctgaactgctcaagaaggcaggatacgttagcaagattgtgggaaagtggcatctgggtcacagaccacaatttcatcccctgaaacacgggttcgacgaatggtttggctcaccaaattgccactttggcccgtacgataacaaggccagacctaatatcccagtgtacagagactgggaaatggtgggacgctactacgaggaatttcctatcaatcttaagaccggggaagctaatcttacgcaaatctaccttcaagaagccctggatttcatcaaacgccaagcacggcaccacccattctttctctattgggccgtggacgcaacccatgcacctgtctacgcctcaaaaccattccttggcaccagccagagaggtcgctacggtgacgcagtgcgtgaaattgacgattccataggaaagattctggagctgctgcaggatctccatgtcgctgataatacttttgtgttctttacttccgataacggcgccgctctgatttccgctcctgagcaggggggcagcaacgggcctttcctgtgtggaaagcaaactacctttgaaggaggtatgcgcgaacccgcactggcatggtggcccggacacgtgactgcgggtcaagtgtcacaccaacttgggtcaattatggatctctttacgacgtcgttggcactggcaggccttaccccaccgtctgatcgcgcaatagatgggcttaaccttcttcctactcttctgcaaggtagacttatggatagacccatcttttactataggggagatacgctcatggcagcaactcttggtcagcataaggcgcatttttggacctggactaacagctgggaaaacttcaggcagggcattgacttttgcccaggtcagaacgtctcgggagtgaccacccataaccttgaggatcataccaaacttccactcattttccatttggggcgggaccctggcgaacgtttcccattgtccttcgcatcggctgaataccaagaggccttgagcaggataacttccgtggtgcaacaacatcaggaggcacttgtcccggctcagccacagctcaatgtctgtaattgggcagttatgaattgggcaccaccaggttgtgagaagctgggcaagtgtcttaccccgccagagtcgatccctaagaagtgtctgtggtcccac

SEQ ID NO: 10542 - DNA, 1566 bp, Artificial Sequence
  derived and/or modified sequence
atggcagccgtggtggcagctacgcgctggtggcagctgcttctggtgctgagcgccgccggcatgggagcatctggggcgccccagcccccgaatatcctgctgctgctgatggatgacatggggtggggcgacctgggggtatatggcgagcccagccgtgagacgcccaacttggatcgcatggccgccgaagggcttctgttcccgaatttctattctgcaaatccactttgctcaccgagccgggcagctttactgacagggcgtctgccgatcaggaatgggttctatactacaaatgcccacgccaggaatgcatatactccacaagagatcgtgggtggcatccctgatagcgagcagctcctgcccgagctgttgaagaaggccggatacgtttccaagattgttggcaaatggcatctgggccaccggccacagtttcatccgctgaaacacgggttcgacgaatggtttggaagtcccaattgccacttcggcccatatgataataaggcccggccaaacatccccgtgtatcgagattgggagatggtgggtaggtattacgaggagttccctattaatcttaaaaccggggaggccaacctgacccagatctacctgcaggaagcactcgattttattaagaggcaggctaggcaccaccctttcttcctctattgggcagtcgacgcaacccatgctccggtgtatgcctcaaaaccattcctgggtacaagccagagaggaaggtatggggacgcggtcagagagattgatgattctataggaaaaatcctggagttgcttcaggacctgcatgtggcagataacacgtttgtgttctttaccagcgataacggagcggccttgatcagcgcgcctgaacaggggggtagtaatgggcctttcctgtgcggcaaacagacgaccttcgagggaggcatgagggaaccagcactggcctggtggccaggacatgtcaccgccgggcaggtttcccaccagcttggaagcattatggatctattcactaccagcttggccttggccggcctgacaccccccagcgatagggccattgacggactcaatctgctccccacacttctgcagggaagattgatggaccgtcccatattctactaccgaggagacactttgatggctgccaccctgggccagcataaggctcacttctggacgtggaccaattcatgggagaactttaggcagggtattgacttctgtccaggtcagaacgttagcggtgtcactacccataacctggaagaccacactaaactccctctgatttttcacttggggcgcgatcccggagagcgcttcccgctttcgttcgcttcggctgaataccaggaggccttaagccggatcaccagtgttgtccagcagcaccaggaggccttggttcctgcccagccccaattgaacgtctgtaactgggccgtgatgaactgggcgccgccagggtgcgagaagctaggcaaatgtctgaccccccctgagtctataccgaaaaagtgcctatggagccat

SEQ ID NO: 10543 - DNA, 1566 bp, Artificial Sequence
  derived and/or modified sequence
atggcagcagtcgtggccgccacccgctggtggcagctcctcctcgtgctttctgcggcgggaatgggcgcgtccggagccccccaacccccaaacattctcctgcttctgatggatgatatgggttggggcgacctgggcgtctacggtgaaccatccagagaaaccccaaacctggatcggatggcggcagagggactcttgtttcctaacttttactccgcaaatcctctgtgctccccctcacgggcagccctgctgaccgggagacttcccatacgtaacggcttttacactactaacgcacatgcacgaaacgcttacaccccccaagaaattgttggtggtataccggattccgaacaacttcttccagaactgctcaagaaagccggatacgtcagcaagattgtcgggaagtggcatctggggcatcgaccacaatttcatcctctcaagcacggattcgatgaatggtttggatcgccaaattgtcattttgggccctacgacaataaggcgaggccaaacattccagtgtacagagactgggagatggtcggaagatactacgaggagttccctatcaaccttaagaccggtgaagcaaacctcacgcagatctacctccaagaggcactcgatttcattaagcgtcaagccagacatcatccattctttctctactgggcagtggacgcaacccacgcaccagtgtacgcatcgaaacctttccttggcacttcacaaagaggacgctacggagatgccgtgcgagagatagatgactcaattggaaagattctggagcttcttcaagacctccacgtcgccgataacaccttcgtgttcttcacgtcggataacggggcggcacttataagcgcacccgaacaaggtggtagcaacggtccctttttgtgcggaaaacagactacctttgaaggggggatgagggaaccagcacttgcatggtggccaggccatgtcacggcaggccaggtgagccatcaactgggttccattatggatctctttactacgtcgctggcactggcaggtcttaccccgccttctgaccgagccatcgacggactgaaccttctcccaaccctgctgcagggaaggctgatggatagacctatcttttactaccgtggagacaccttgatggcagctacgctgggacaacataaggcacacttttggacctggacgaacagctgggaaaacttccgccagggaattgatttttgtcccggacagaatgtgagcggagtcaccacccataacctggaagatcatacgaagttgccattgatcttccatctcggacgcgatcccggggaaagatttcctcttagctttgcgagcgcagaataccaggaagcgctctcgagaatcacctcggtggtgcagcaacatcaagaggctctggtcccagcacagccgcagctgaatgtctgtaattgggcagtcatgaattgggcaccgccaggctgcgagaagctgggaaagtgcctgactcctcccgagtccataccaaagaagtgcctttggtcgcac

SEQ ID NO: 10544 - DNA, 1566 bp, Artificial Sequence
  derived and/or modified sequence
atggcggcggtcgtcgcagccactcgctggtggcagctccttctcgtcttgtccgccgcaggaatgggagcgtcgggagccccgcaacccccgaacatccttctccttctgatggatgatatgggatggggggacctcggagtgtacggggaaccatcaagggaaacccccaacctcgatcgcatggccgccgaaggactgctgttcccgaatttctacagcgcgaacccgctctgctccccctcccgcgcagccctgctgactggacgcctgccaatccggaatggattctacaccactaacgcgcatgctcgaaatgcatacaccccacaggaaatcgtgggaggaatcccagattcagagcaacttctgccagaacttctcaagaaagccggatacgtgtcaaagatcgtggggaagtggcatctgggtcaccggccgcagttccacccgctcaagcacggattcgatgagtggttcggaagcccaaattgccactttggaccgtacgataacaaggcgcgcccgaacatcccggtctatcgggactgggagatggtcggacgctactacgaggagttcccgattaatcttaagactggggaagccaacctcactcagatctatctgcaagaagcgctggatttcataaagagacaagctcgccaccacccgttcttcctttattgggcggtggacgccactcacgcaccagtctacgcctctaagccattcctgggaacttctcagcgaggacggtacggcgacgctgtgagggaaatcgacgactcaatcggaaaaatcctggagctgttgcaagacctgcacgtggccgataatactttcgtgttctttacctccgataatggagctgcattgatctcggctccggaacaaggaggatcgaatggaccgtttctgtgtggtaagcagactacttttgaaggcggaatgcgcgagcctgccctggcgtggtggcccggccacgtcactgccggacaagtctcccatcaactgggcagcatcatggacttgttcactactagcctcgctctggcgggcctgacccctccatcagacagagccatcgatgggctcaacctcctgcccaccctcctccagggacgactgatggaccggcctattttctactaccgcggagacacccttatggccgccaccctgggacagcacaaggcccatttttggacctggaccaattcctgggagaatttccggcagggcattgacttttgcccaggacagaacgtctccggagtgacgactcataatctggaggatcacactaaactcccactgatcttccatctcggccgggaccccggcgagcggttcccgctgagctttgcctccgctgaataccaggaggccctgagccgcatcaccagcgtggtccaacaacaccaggaagccctggtgccagcgcaaccccagctgaacgtgtgcaactgggcagtcatgaactgggctccgcccggatgcgagaagctgggcaagtgcctgactccgcctgaatcgatcccaaaaaagtgtctgtggagccat

SEQ ID NO: 10545 - DNA, 1566 bp, Artificial Sequence
  derived and/or modified sequence
atggccgccgtcgtcgctgccacccgctggtggcagctcttgcttgtcctgtcggcggcagggatgggtgcgtccggcgccccgcagcctccgaacatcctcctgcttctgatggatgatatgggctggggtgatctgggagtctacggggagccgtcacgcgaaactcccaacctggacagaatggccgcggaagggctgctgttcccgaacttctacagcgccaatcccctctgctccccttcgcgcgcagccctcctgaccggacgcctccctatcagaaacggattctacactactaacgcacatgcaagaaacgcttatactccgcaggaaatcgtgggaggcatccctgacagcgagcagcttctcccggaacttctgaagaaagcgggctacgttagcaaaattgtgggtaagtggcacctgggtcataggccacagtttcacccgctgaagcatggatttgacgagtggttcgggagcccaaattgtcatttcggcccgtacgacaacaaggcccgccccaatattccagtgtaccgcgactgggaaatggtgggacggtattacgaagaattcccaattaatctcaagaccggagaagccaatctgacccaaatctacttgcaagaagctctggacttcatcaagcggcaggcgcgccaccaccccttcttcctctactgggcggttgacgccacccatgcgccggtgtacgcttctaagccgttcctgggcacctcacagcggggccgatacggcgacgcggtgcgggagatcgacgactcaatagggaaaattctggagctgctccaagacctgcatgtcgccgacaacacctttgtgttcttcacttcagataacggagcggccctcatctcggcccctgaacaaggaggatccaacggtcctttcctctgcgggaaacaaacgacctttgaaggcggaatgagggagccagcgttggcatggtggccgggacacgtgactgcaggacaagtgtcgcaccagctgggaagtatcatggatctgtttactacttcgctggctctggcaggactgacgcccccgagcgatagagcaatcgacggacttaacctgctgccgactctcttgcagggaagattgatggataggccgatcttttactaccggggagataccctgatggccgccaccttgggccagcacaaggctcacttctggacctggactaattcgtgggagaattttcggcaaggaatcgatttctgcccaggtcaaaacgtgagcggcgtgactacccacaaccttgaggatcacaccaagctgccactcatcttccatctcggacgtgacccgggagaacgcttcccactgtccttcgcttccgccgagtaccaggaagcgctctcgcggatcacctccgtcgtgcagcagcaccaagaggcactggtcccagcccagccccagctgaatgtgtgcaactgggctgtgatgaattgggcccctcctggatgcgaaaagctcgggaagtgtctcacgccgccagagtccatcccgaagaaatgcctgtggtcacat

SEQ ID NO: 10546 - DNA, 1566 bp, Artificial Sequence
  derived and/or modified sequence
atggcagccgtggtggccgctacccgctggtggcaactgctccttgtgctctccgctgcgggaatgggagcgtcaggagctccgcagcctcccaacatcctgctgttgctgatggacgatatgggatggggcgatctgggcgtgtacggtgagccgtcgcgcgaaacgccaaacctggacaggatggccgccgaaggcctgctgtttcctaatttctactccgccaacccgctgtgcagcccctcgcgggccgcacttctgaccggacgcctgccgatcagaaacgggttctacactaccaatgcacacgcccggaatgcttatacgccacaagagatagtgggaggaatcccggactccgaacaactgttgccggaactgctcaagaaggcgggatacgtgtcgaagatcgtgggcaaatggcatttgggacataggccgcaatttcaccccctgaagcacgggttcgatgagtggttcggatcaccgaactgccatttcggaccctacgacaacaaggctcgccccaacatcccggtctaccgggactgggagatggttggacgctactacgaggaattcccgatcaacctgaaaaccggcgaagccaatctcactcagatttacctgcaagaagcgctggacttcataaaacgccaggcacggcaccatcccttcttcctttactgggctgtggacgctacccacgctcccgtgtacgccagcaagccattcctggggacctcccaacggggaaggtacggagatgccgtccgcgaaatcgacgattcgattggaaagatcctggagcttcttcaggacctgcatgtggcggataacacttttgtgttctttacttctgacaacggagccgccctcatctctgcccccgaacagggaggatcaaacggaccgttcttgtgcggcaagcagactactttcgagggaggcatgcgggaacccgccttggcatggtggccggggcatgtcacggcgggacaagtgtcgcaccagctcggctcaattatggacctttttactacttccctcgccctggcaggcctgaccccaccctccgatagagccattgatggcctgaatctcctcccgactctgctgcaggggcggctgatggacagacccatcttttactaccgcggggataccctgatggcggcaactcttggccagcataaagcgcatttctggacgtggaccaactcgtgggagaacttccggcagggaatcgacttctgtccgggccagaacgtgagcggagttactacccacaatctggaggaccacacgaaactgccactgatcttccacctgggaagggatccgggggagcggtttccactctcattcgccagcgccgagtaccaggaagctctgagtcgcatcacctccgtggtgcagcagcaccaggaggctcttgtgccagcccagcctcagctgaatgtctgtaactgggcagtcatgaactgggcgccgccagggtgtgagaagctcggaaaatgtctcacgccgccggaatcgatcccaaaaaagtgcctctggtcgcac

SEQ ID NO: 10547 - DNA, 1566 bp, Artificial Sequence
  derived and/or modified sequence
atggcggcggttgtggccgccacacgttggtggcagctactcctggtgctcagcgccgcagggatgggagcatctggggcaccccagccgcccaacatcctcttgctgttgatggatgatatgggttggggagacctgggcgtgtatggcgagccaagtcgggagactccaaatctcgatcgcatggctgcggaaggactgctgttccccaatttttatagtgctaacccattgtgcagcccatctcgggcagcactccttacaggacgtttacccattagaaatgggttctacactaccaatgcccacgcccggaacgcctacacaccacaagaaatcgtcggcgggattcctgatagtgaacagctgctgccagagttactcaaaaaagctggctatgtgagcaagattgtggggaaatggcatttagggcaccgccctcagttccatcccctcaaacatggcttcgatgagtggttcggcagcccgaattgccacttcggtccctatgataataaagcccgcccgaacattccagtatatcgcgactgggagatggtgggtcgctattatgaagaatttcctattaacttgaagactggggaagccaatcttacccaaatttatctgcaagaggctctggactttataaagcggcaggcgcggcatcaccctttcttcctttactgggctgtagacgcgacccacgctcctgtttacgctagcaagccgttcctgggaacatcccaacggggtcgttacggagatgccgtacgcgaaatagacgattctatagggaagatccttgagctcctccaagatctacatgtggccgataacacctttgtgttttttacctcggacaacggcgccgcactcatatctgccccagagcagggcggttcaaatggaccatttctatgtggtaaacaaactacttttgagggcggaatgagagagcctgctctcgcatggtggcccgggcacgtgacagcaggtcaggtcagccaccagctcggctcaattatggatctgttcacaacttctttggcattggcgggcctgacgcctccatccgacagggctatagacgggctcaacctcctgcctaccctcctgcaaggccggttaatggacaggcctattttttactatagaggggatactttgatggctgcgactttaggacagcataaggctcatttctggacgtggacaaatagttgggaaaatttcaggcagggcatcgacttctgtccaggccagaatgtcagcggggtgaccacccacaacctggaggatcacactaaactgccactgatattccatctcggccgagaccctggggagcgcttcccactgtctttcgccagtgccgagtatcaggaggccctgtccaggatcaccagtgtcgttcagcagcaccaggaagcactggtaccagcacagcctcagctgaacgtatgtaactgggccgtgatgaattgggccccccctggatgcgaaaagttgggcaaatgcctcaccccgcctgagagcattccaaagaagtgtctgtggagccac

SEQ ID NO: 10548 - DNA, 1566 bp, Artificial Sequence
  derived and/or modified sequence
atggccgccgtcgtcgctgcaacgcgatggtggcaactcttgcttgtgctgtctgcagcaggtatgggggctagtggggccccccagccaccaaacattctcctccttctgatggacgatatgggttggggcgacctgggggtctatggggaaccctctcgagagactccaaacctggatcgcatggccgctgaaggactgctctttccaaatttttacagcgcaaacccactgtgtagcccttcacgcgctgccctcctgactgggcgcctcccaataagaaacggcttttacactacgaacgcccacgctcgcaacgcctatacaccacaggagattgtgggcggtatccctgatagcgagcagctgctgcccgagctgctcaagaaagccggctacgtgtccaaaatagtgggcaaatggcatctcggacaccgccctcaattccacccactcaagcatggctttgatgagtggtttggatctcccaattgccacttcggtccttatgacaacaaagcgagacccaacattcctgtgtatagggactgggaaatggtaggacggtattacgaagagttcccaataaatctgaagacaggagaagcaaatctgacacagatctacctgcaagaggcattagattttatcaagcggcaggctaggcatcacccattcttcctgtactgggccgttgacgctacacacgctcccgtctatgcaagtaagcctttcttggggacctcccagcgcggccgttatggggacgccgttcgagaaattgatgattccattggtaaaattctcgagttgctacaggacctgcacgtggccgacaatacattcgtcttctttactagcgataacggggctgctctgatcagcgcaccagagcagggtggctccaacggtccatttctgtgtggcaaacagactacctttgaggggggtatgcgggaaccagccttggcttggtggcccggtcatgttaccgccgggcaggtgagccaccaacttgggtccatcatggatctgttcacaacctcactggctttggccgggttaaccccgccctccgaccgtgcgattgacgggctgaacctgctccctaccctcctacagggccgattgatggaccggccaattttctattaccggggagacaccctgatggccgctaccttgggccagcataaggcacacttctggacctggacaaattcctgggagaatttcagacagggcatcgacttttgccctggccagaatgtatccggcgtaacaacacataacctggaagaccatacgaagctacctctgatcttccatcttggacgcgacccaggcgagcggttcccactgtcttttgcttccgcagaatatcaggaggccctgtcacgtataactagcgtggtgcagcagcaccaggaggctctggtcccagcccagccacagcttaacgtttgcaattgggccgttatgaactgggccccacccgggtgcgaaaaactcgggaagtgcctcaccccacccgaaagcattcctaagaagtgtctgtggtctcac

SEQ ID NO: 10549 - DNA, 1566 bp, Artificial Sequence
  derived and/or modified sequence
atggcggcggttgttgcggcaacccgctggtggcaactgctgctggttctgagcgcggcaggaatgggcgcgtccggcgcgccacaaccgcctaacatcctgctactcctcatggatgacatgggctggggtgatttgggcgtatacggcgagccgtcccgcgagacccctaatctggatcggatggccgcggagggcttgctcttccctaatttttacagcgcaaacccactgtgtagcccgagccgcgcagcgctgctgactggccgcctgccaatccgcaatggtttctacactacgaatgcacacgcgcggaacgcctacaccccacaagaaattgtcggtggtataccagattccgaacaactgctgccggagttgctgaaaaaagccggctacgtcagtaagattgttggtaagtggcacctaggccaccgcccgcagtttcatcctctgaagcacggtttcgacgagtggttcggctcccctaactgtcacttcggcccatacgataacaaggccaggccgaatatcccggtctaccgcgactgggaaatggttggtcgctattatgaggagtttccgattaacctgaaaaccggtgaggcaaacctgacccaaatttacctgcaggaagcccttgacttcataaaacgacaagctcggcaccaccctttcttcctgtactgggccgtagatgcaactcacgccccagtctatgcctccaagccgtttctaggtacgagtcaacgcggcaggtatggcgatgctgtccgcgaaatcgatgactcaatcggtaagattctcgaactgctgcaggatctgcatgtcgccgacaacaccttcgttttctttacctcagacaatggagctgccttaatctccgcccctgaacagggtggaagcaacggtccttttctctgtggcaagcagaccacgttcgaaggtggcatgcgggaaccagccctggcttggtggccaggccacgtcaccgcagggcaggtaagccatcagctgggcagcattatggacctgtttactaccagccttgcgcttgcagggctcacgccaccttccgaccgcgccatcgatggtctgaatctgctgccaacgttgctgcagggacgcttgatggataggcctatcttctattatcgaggggatacactgatggcagccacccttggccagcataaagctcacttttggacctggaccaactcgtgggagaacttccggcagggaatcgatttttgccctggccagaacgtctccggcgttactacccacaatttggaagaccacactaaactacctcttatcttccacctgggtcgggatcctggcgagcgtttcccattgtcattcgcatctgctgagtatcaggaggctctctcccgtattactagcgttgtccagcaacaccaagaagcactggtcccggctcagcctcagctgaacgtgtgtaactgggccgttatgaactgggctccgccgggctgcgagaagctgggcaaatgcttaacccctccagagagcatccctaaaaagtgtctgtggagccat

SEQ ID NO: 10550 - DNA, 1566 bp, Artificial Sequence
  derived and/or modified sequence
atggccgccgtggtggccgccacccgctggtggcagctgctgctggtgctgagcgccgccggcatgggcgccagcggcgccccccagccccccaacatcctgctgctgctgatggacgacatgggctggggcgacctgggcgtgtacggcgagcccagccgcgagacccccaacctggaccgcatggccgccgagggcctgctgttccccaacttctacagcgccaaccccctgtgcagccccagccgcgccgccctgctgaccggccgcctgcccatccgcaacggcttctacaccaccaacgcccacgcccgcaacgcctacaccccccaggagatcgtgggcggcatccccgacagcgagcagctgctgcccgagctgctgaagaaggccggctacgtgagcaagatcgtgggcaagtggcacctgggccaccgcccccagttccaccccctgaagcacggcttcgacgagtggttcggcagccccaactgccacttcggcccctacgacaacaaggcccgccccaacatccccgtgtaccgcgactgggagatggtgggccgctactacgaggagttccccatcaacctgaagaccggcgaggccaacctgacccagatctacctgcaggaggccctggacttcatcaagcgccaggcccgccaccaccccttcttcctgtactgggccgtggacgccacccacgcccccgtgtacgccagcaagcccttcctgggcaccagccagcgcggccgctacggcgacgccgtgcgcgagatcgacgacagcatcggcaagatcctggagctgctgcaggacctgcacgtggccgacaacaccttcgtgttcttcaccagcgacaacggcgccgccctgatcagcgcccccgagcagggcggcagcaacggccccttcctgtgcggcaagcagaccaccttcgagggcggcatgcgcgagcccgccctggcctggtggcccggccacgtgaccgccggccaggtgagccaccagctgggcagcatcatggacctgttcaccaccagcctggccctggccggcctgaccccccccagcgaccgcgccatcgacggcctgaacctgctgcccaccctgctgcagggccgcctgatggaccgccccatcttctactaccgcggcgacaccctgatggccgccaccctgggccagcacaaggcccacttctggacctggaccaacagctgggagaacttccgccagggcatcgacttctgccccggccagaacgtgagcggcgtgaccacccacaacctggaggaccacaccaagctgcccctgatcttccacctgggccgcgaccccggcgagcgcttccccctgagcttcgccagcgccgagtaccaggaggccctgagccgcatcaccagcgtggtgcagcagcaccaggaggccctggtgcccgcccagccccagctgaacgtgtgcaactgggccgtgatgaactgggccccccccggctgcgagaagctgggcaagtgcctgaccccccccgagagcatccccaagaagtgcctgtggagccac

SEQ ID NO: 10551 - DNA, 1341 bp, Artificial Sequence
  derived and/or modified sequence
atggccgccgtggtggccgccacccgctggtggcagctgctgctggtgctgagcgccgccggcatgggcgccagcggcgcccccggccagcgcgcctacaccccccaggagatcgtgggcggcatccccgacagcgagcagctgctgcccgagctgctgaagaaggccggctacgtgagcaagatcgtgggcaagtggcacctgggccaccgcccccagttccaccccctgaagcacggcttcgacgagtggttcggcagccccaactgccacttcggcccctacgacaacaaggcccgccccaacatccccgtgtaccgcgactgggagatggtgggccgctactacgaggagttccccatcaacctgaagaccggcgaggccaacctgacccagatctacctgcaggaggccctggacttcatcaagcgccaggcccgccaccaccccttcttcctgtactgggccgtggacgccacccacgcccccgtgtacgccagcaagcccttcctgggcaccagccagcgcggccgctacggcgacgccgtgcgcgagatcgacgacagcatcggcaagatcctggagctgctgcaggacctgcacgtggccgacaacaccttcgtgttcttcaccagcgacaacggcgccgccctgatcagcgcccccgagcagggcggcagcaacggccccttcctgtgcggcaagcagaccaccttcgagggcggcatgcgcgagcccgccctggcctggtggcccggccacgtgaccgccggccaggtgagccaccagctgggcagcatcatggacctgttcaccaccagcctggccctggccggcctgaccccccccagcgaccgcgccatcgacggcctgaacctgctgcccaccctgctgcagggccgcctgatggaccgccccatcttctactaccgcggcgacaccctgatggccgccaccctgggccagcacaaggcccacttctggacctggaccaacagctgggagaacttccgccagggcatcgacttctgccccggccagaacgtgagcggcgtgaccacccacaacctggaggaccacaccaagctgcccctgatcttccacctgggccgcgaccccggcgagcgcttccccctgagcttcgccagcgccgagtaccaggaggccctgagccgcatcaccagcgtggtgcagcagcaccaggaggccctggtgcccgcccagccccagctgaacgtgtgcaactgggccgtgatgaactgggccccccccggctgcgagaagctgggcaagtgcctgaccccccccgagagcatccccaagaagtgcctgtggagccac

SEQ ID NO: 10552 - DNA, 1712 bp, Artificial Sequence
  derived and/or modified sequence
gggaaataagagagaaaagaagagtaagaagaaatataagagccaccatggctgccgtggtggcggcaacccgctggtggcagctgctccttgtgctctcagcagcaggaatgggggcgtcgggggctccccagccgcccaacatcctgctcttgctcatggacgatatgggttggggtgaccttggggtatacggagagccgtcgagggaaactcccaacttggacaggatggcggcagaaggtctgctctttccgaacttttactcagctaaccctctttgctcaccgtcgcgagcggcgcttctgactgggagactccccatcagaaatgggttctatacaacgaacgcccacgctcgcaatgcatacacaccgcaagagatcgtgggtggcattcctgattcggagcagttgttgccagaactccttaagaaggcgggatatgtctcgaaaatcgtcggaaagtggcatctcggccaccgaccccagttccatcctcttaaacatggctttgatgagtggtttgggtcgcccaattgccacttcggcccgtatgacaataaggccaggccaaacatcccggtctacagagattgggaaatggtagggcggtattatgaagagttcccgatcaatcttaaaacaggggaggcgaatctcacgcagatctaccttcaagaggcgctggacttcatcaaaagacaagcacggcaccatccctttttcttgtactgggccgtagatgctacacatgcgcccgtgtacgcctccaagccgtttttggggacgagccagcggggacgctacggggacgcggtgcgcgagatcgacgattcaattggaaagattcttgaacttttgcaagatctccacgtcgcagataatactttcgtattctttacctccgacaacggagcagcgctgatttcagcaccggagcagggagggtcgaatggtcccttcttgtgtgggaaacagacgacctttgagggaggaatgcgggagcctgcgttggcctggtggcctgggcacgtaacggcgggtcaggtatcacatcagcttggaagcattatggatctctttaccacatcgctggcactcgccggactcactcccccgtccgatagggcaatcgatgggttgaaccttttgccaacgctccttcaaggtcgactgatggatcgccccatcttctattacaggggtgacacgttgatggcggcgacattggggcagcacaaggcacatttttggacatggacaaactcgtgggaaaacttccggcagggcatcgacttttgtcccggacaaaatgtgagcggagtaacgacacacaaccttgaggaccatacgaagctccctcttatctttcatcttggtcgggacccgggtgaaaggtttcccctgtcgttcgcttcagcggagtatcaggaggcactgagccggattacttccgtcgtccagcaacaccaggaagccctcgtgccagctcagccccagttgaacgtatgtaactgggcggtgatgaattgggcaccgcctggttgtgagaagttggggaaatgcctgacgccccctgaatccattccgaaaaagtgcttgtggagccactaatgagctgccttctgcggggcttgccttctggccatgcccttcttctctcccttgcacctgtacctcttggtctttgaataaagcctgagtaggaag

SEQ ID NO: 10553 - DNA, 1569 bp, Artificial Sequence
  derived and/or modified sequence
atggccgccgtggtggccgccaccagatggtggcagctgctgctggtgctgagcgccgccggcatgggcgccagcggcgccccccagccccccaacatcctgctgctgctgatggacgacatgggctggggcgacctgggcgtgtacggcgagcccagcagagagacccccaacctggacagaatggccgccgagggcctgctgttccccaacttctacagcgccaaccccctgtgcagccccagcagagccgccctgctgaccggcagactgcccatcagaaacggcttctacaccaccaacgcccacgccagaaacgcctacaccccccaggagatcgtgggcggcatccccgacagcgagcagctgctgcccgagctgctgaagaaggccggctacgtgagcaagatcgtgggcaagtggcacctgggccacagaccccagttccaccccctgaagcacggcttcgacgagtggttcggcagccccaactgccacttcggcccctacgacaacaaggccagacccaacatccccgtgtacagagactgggagatggtgggcagatactacgaggagttccccatcaacctgaagaccggcgaggccaacctgacccagatctacctgcaggaggccctggacttcatcaagagacaggccagacaccaccccttcttcctgtactgggccgtggacgccacccacgcccccgtgtacgccagcaagcccttcctgggcaccagccagagaggcagatacggcgacgccgtgagagagatcgacgacagcatcggcaagatcctggagctgctgcaggacctgcacgtggccgacaacaccttcgtgttcttcaccagcgacaacggcgccgccctgatcagcgcccccgagcagggcggcagcaacggccccttcctgtgcggcaagcagaccaccttcgagggcggcatgagagagcccgccctggcctggtggcccggccacgtgaccgccggccaggtgagccaccagctgggcagcatcatggacctgttcaccaccagcctggccctggccggcctgaccccccccagcgacagagccatcgacggcctgaacctgctgcccaccctgctgcagggcagactgatggacagacccatcttctactacagaggcgacaccctgatggccgccaccctgggccagcacaaggcccacttctggacctggaccaacagctgggagaacttcagacagggcatcgacttctgccccggccagaacgtgagcggcgtgaccacccacaacctggaggaccacaccaagctgcccctgatcttccacctgggcagagaccccggcgagagattccccctgagcttcgccagcgccgagtaccaggaggccctgagcagaatcaccagcgtggtgcagcagcaccaggaggccctggtgcccgcccagccccagctgaacgtgtgcaactgggccgtgatgaactgggccccccccggctgcgagaagctgggcaagtgcctgaccccccccgagagcatccccaagaagtgcctgtggagccactag

SEQ ID NO: 10554 - DNA, 261 bp, Artificial Sequence
  derived and/or modified sequence
atggccgccgtggtggccgccaccagatggtggcagctgctgctggtgctgagcgccgccggcatgggcgccagcggcgccccccagccccccaacatcctgctgctgctgatggacgacagaggcagacactgcagccaggacggctaccccagcgccatggccagcaccccccccacccccatgcccgagacccccacccacagaagaagactgtgggccgccagccagaccagaagcagcagctgcagaagcttctag

SEQ ID NO: 10555 - DNA, 1344 bp, Artificial Sequence
  derived and/or modified sequence
atggccgccgtggtggccgccaccagatggtggcagctgctgctggtgctgagcgccgccggcatgggcgccagcggcgcccccggccagagagcctacaccccccaggagatcgtgggcggcatccccgacagcgagcagctgctgcccgagctgctgaagaaggccggctacgtgagcaagatcgtgggcaagtggcacctgggccacagaccccagttccaccccctgaagcacggcttcgacgagtggttcggcagccccaactgccacttcggcccctacgacaacaaggccagacccaacatccccgtgtacagagactgggagatggtgggcagatactacgaggagttccccatcaacctgaagaccggcgaggccaacctgacccagatctacctgcaggaggccctggacttcatcaagagacaggccagacaccaccccttcttcctgtactgggccgtggacgccacccacgcccccgtgtacgccagcaagcccttcctgggcaccagccagagaggcagatacggcgacgccgtgagagagatcgacgacagcatcggcaagatcctggagctgctgcaggacctgcacgtggccgacaacaccttcgtgttcttcaccagcgacaacggcgccgccctgatcagcgcccccgagcagggcggcagcaacggccccttcctgtgcggcaagcagaccaccttcgagggcggcatgagagagcccgccctggcctggtggcccggccacgtgaccgccggccaggtgagccaccagctgggcagcatcatggacctgttcaccaccagcctggccctggccggcctgaccccccccagcgacagagccatcgacggcctgaacctgctgcccaccctgctgcagggcagactgatggacagacccatcttctactacagaggcgacaccctgatggccgccaccctgggccagcacaaggcccacttctggacctggaccaacagctgggagaacttcagacagggcatcgacttctgccccggccagaacgtgagcggcgtgaccacccacaacctggaggaccacaccaagctgcccctgatcttccacctgggcagagaccccggcgagagattccccctgagcttcgccagcgccgagtaccaggaggccctgagcagaatcaccagcgtggtgcagcagcaccaggaggccctggtgcccgcccagccccagctgaacgtgtgcaactgggccgtgatgaactgggccccccccggctgcgagaagctgggcaagtgcctgaccccccccgagagcatccccaagaagtgcctgtggagccactag

SEQ ID NO: 10556 - DNA, 1569 bp, Artificial Sequence
  derived and/or modified sequence
atggccgctgtggtggcggctacgaggtggtggcagctgctcctcgtcctgagcgccgccggcatgggtgccagtggcgccccacagcctcctaatattttgttactgttgatggacgatatggggtggggtgacctgggcgtgtatggtgagccatctcgagagacgcccaaccttgatagaatggcagcagaggggctcttgttccctaatttttactccgctaatccattatgcagccctagtcgcgcagccttgctgactggaaggttgccgatccgtaacggattttataccaccaacgcacatgctagaaacgcatatacaccccaagagattgtgggcggcatcccggatagtgaacaactgctccccgaactgctgaagaaagcgggatacgtctccaagatagtgggaaagtggcacctgggacataggccgcagttccaccccctgaagcacggctttgacgaatggtttgggagcccgaattgtcacttcggaccttacgacaataaggccaggccgaacattcccgtctatagagactgggagatggtgggacgttactacgaagagtttccaataaacctgaagacaggagaagcaaatctcacccagatatacctccaggaagctttggatttcatcaagcgccaggcaagacatcatcccttttttttatattgggcagtggacgccacgcatgctcctgtgtatgcctcaaagccctttcttgggacttcacagcgtggccgctatggggacgccgtccgcgaaatagatgattccatcggtaagatcctggaattactgcaagacctccatgtggcagataatacctttgttttctttacatcggataacggtgctgctctcatttccgctcccgaacagggaggatctaacggcccattcctgtgcgggaagcagaccacctttgaggggggaatgcgagaacccgcactggcgtggtggcccggacatgtcacagccggacaggtgtcccaccaattaggcagtattatggatctcttcactacaagtctggccctggctggtctgacacctccctctgacagggctatcgacggcctgaaccttctgcctaccctcctacaaggccgtttgatggaccggcctatcttttattacaggggagatactctgatggccgccaccctggggcagcataaagcccacttctggacctggaccaatagttgggagaattttcgccagggaattgacttttgtccaggccagaatgtctctggggtaaccacccataatctcgaagaccatactaagcttcctctgatattccatctggggagagaccccggggaacgtttcccgctctccttcgcatccgccgagtatcaggaggcgctgagccggatcaccagcgtcgttcaacaacaccaggaggccttggtgccagcccaaccacaactgaacgtctgcaattgggcagttatgaactgggccccacccggatgtgagaagctcgggaagtgcttaacaccgcccgagagtatccccaagaaatgcctctggtcacattag

SEQ ID NO: 10557 - DNA, 1344 bp, Artificial Sequence
  derived and/or modified sequence
atggcagccgtggtggcagccaccagatggtggcagttgctgttagttcttagcgccgcaggaatgggggcctccggcgcaccagggcagagggcttataccccccaggagatcgtaggggggattccagattccgagcaactgttacctgagctcctaaagaaagccggttatgtgagtaaaatagtagggaagtggcatcttgggcacaggcctcagttccatcccctgaaacacggcttcgatgagtggtttgggagccctaactgccatttcggaccttatgacaataaagcccggcccaacataccagtgtaccgagactgggaaatggtaggtcggtattatgaggaattcccaattaacctgaagactggggaagccaacctgacccaaatatacttgcaggaagccctggacttcatcaagagacaagcccgccaccacccattctttctgtattgggcagttgatgccacccacgcccccgtatacgcttccaagccgttcctgggcacttctcagcggggtcggtacggggatgctgtgagggaaatcgacgacagtataggtaagatcctcgaattgcttcaggatctgcatgtggccgataatacgttcgttttttttacgtcagacaatggagctgctttaatctcggcccccgagcagggagggtcaaacgggcccttcctttgtggaaagcagacaacattcgaggggggtatgagagagcctgctcttgcttggtggcctgggcacgtgacagcaggccaggttagccaccaactggggagcatcatggatctgttcactacaagtttggccctcgcggggctgactcctcctagtgatcgcgcaatcgacggtctgaacctgctgccaacactgctgcaagggagactgatggacagacctattttctattaccgaggagacactctaatggcagccacgttggggcagcataaggctcatttctggacgtggactaactcatgggaaaatttcagacagggtatcgacttttgccctggccagaatgtgtccggggtcaccacacataacctggaagaccacaccaagctcccactcattttccatctgggtcgggatcccggggaaagatttcctctgtcattcgcatccgccgaataccaggaagccctgtcgcggatcacaagtgttgtccagcagcatcaggaagccctggtcccagcccagcctcaactgaacgtgtgcaattgggccgtgatgaattgggctccccccggctgtgagaagttaggaaagtgcctgactccgcctgagtcaatacccaaaaagtgcctgtggagccattag

SEQ ID NO: 10558 - DNA, 1569 bp, Artificial Sequence
  derived and/or modified sequence
atggctgctgtggtggccgccacccgctggtggcagctgctgctggtgctgtctgctgctggcatgggcgccagcggggccccccagccccccaacatcctgctgctgctgatggatgacatgggctggggagacctgggcgtgtatggagagcccagccgggagacccccaacctggacaggatggctgctgagggcctgctcttccccaacttctacagcgccaaccccctgtgcagccccagccgggccgccctgctgaccggccgcctgcccatcagaaatggcttctacaccaccaatgcccacgccagaaatgcctacaccccccaggagatcgtgggcggcatcccagacagcgagcagctgctgcctgagctgctgaagaaggccggctacgtgtccaagatcgtgggcaagtggcacctgggccaccggccccagttccaccccctgaagcacggctttgatgagtggtttggcagccccaactgccacttcggcccctatgacaacaaggcccggcccaacatccctgtgtacagagactgggagatggtgggccgctactatgaggagttccccatcaacctgaagacaggagaggccaacctgacccagatctacctgcaggaggccctggacttcatcaagaggcaggcccggcaccaccccttcttcctgtactgggccgtggatgccacccacgcccctgtgtatgccagcaagcccttcctgggcaccagccagaggggccgctatggagatgctgtgcgggagattgatgacagcatcggcaagatcctggagctgctgcaggacctgcacgtggccgacaacacctttgtgttcttcaccagtgacaatggagctgccctgatcagcgcccctgagcagggcggcagcaatggccccttcctgtgtgggaagcagaccacctttgagggcggcatgagggagcccgccctggcctggtggccaggccacgtgacagctggccaggtgagccaccagctgggcagcatcatggacctcttcaccaccagcctggccctggccggcctgaccccacccagcgaccgggccattgatggcctgaacctgctgcccaccctgctgcagggccgcctgatggaccggcccatcttctactacagaggagacaccctgatggccgccaccctgggccagcacaaggcccacttctggacctggaccaacagctgggagaacttccggcagggcatcgacttctgccccggccagaatgtgtctggagtgaccacccacaacctggaggaccacaccaagctgcccctcatcttccacctgggccgggaccccggggagcgcttccccctgagctttgccagcgctgagtaccaggaggccctgagccgcatcacctctgtggtgcagcagcaccaggaggccctggtgcctgcccagccccagctgaatgtgtgcaactgggccgtgatgaactgggcccctcctggctgtgagaagctgggcaagtgcctgaccccacctgagagcatccccaagaagtgcctgtggagccactag

SEQ ID NO: 10559 - DNA, 261 bp, Artificial Sequence
  derived and/or modified sequence
atggctgctgtggtggccgccacccgctggtggcagctgctgctggtgctgtctgctgctggcatgggcgccagcggggccccccagccccccaacatcctgctgctgctgatggatgaccggggccgccactgcagccaggacggctaccccagcgccatggccagcaccccacccacccccatgcctgagacccccacccacagaagaaggctgtgggccgccagccagaccaggagcagcagctgccgctccttctag

SEQ ID NO: 10560 - DNA, 1344 bp, Artificial Sequence
  derived and/or modified sequence
atggctgctgtggtggccgccacccgctggtggcagctgctgctggtgctgtctgctgctggcatgggcgccagcggggcccctggccagagggcctacaccccccaggagatcgtgggcggcatcccagattctgagcagctgctgcctgagctgctgaagaaggccggctacgtgtccaagatcgtgggcaagtggcacctgggccaccggccccagttccaccccctgaagcacggctttgatgagtggtttggcagccccaactgccacttcggcccctatgacaacaaggcccggcccaacatccctgtgtacagagactgggagatggtgggccgctactatgaggagttccccatcaacctgaagacaggagaggccaacctgacccagatctacctgcaggaggccctggacttcatcaagaggcaggcccggcaccaccccttcttcctgtactgggccgtggatgccacccacgcccctgtgtatgccagcaagcccttcctgggcaccagccagaggggccgctatggagatgctgtgcgggagattgatgacagcatcggcaagatcctggagctgctgcaggacctgcacgtggccgacaacacctttgtgttcttcaccagtgacaacggggccgccctgatcagcgcccctgagcagggcggcagcaatggccccttcctgtgtgggaagcagaccacctttgaaggaggcatgagggagcccgccctggcctggtggccaggccacgtgacagctggccaggtgagccaccagctgggcagcatcatggacctcttcaccaccagcctggccctggccggcctgaccccacccagcgaccgggccattgatggcctgaacctgctgcccaccctgctgcagggccgcctgatggaccggcccatcttctactacagaggagacaccctgatggccgccaccctgggccagcacaaggcccacttctggacctggaccaacagctgggagaacttccggcagggcatcgacttctgccccggccagaatgtgtctggagtgaccacccacaacctggaggaccacaccaagctgcccctcatcttccacctgggccgggaccctggagagcgcttccccctgagctttgccagcgctgagtaccaggaggccctgagccgcatcacctctgtggtgcagcagcaccaggaggccctggtgcctgcccagccccagctgaatgtgtgcaactgggccgtgatgaactgggcccctcctggctgtgagaagctgggcaagtgcctgaccccacctgagagcatccccaagaagtgcctgtggagccactag

SEQ ID NO: 10561 - DNA, 1569 bp, Artificial Sequence
  derived and/or modified sequence
atggccgccgtggtggccgccacccggtggtggcagctgctgctggtgctctctgcagccggaatgggtgccagtggggctcctcagccacctaatatactcctgctgctgatggatgacatgggctggggcgacttgggggtgtatggagagccctctcgggaaacccctaatctggaccggatggctgcggagggcctcctatttcccaacttctacagcgctaaccctctttgcagccctagccgagctgccttactgaccggcaggctgccgataaggaatggcttctacaccaccaatgcccacgcccgaaacgcctacacgccccaggagattgtaggcggaattcccgattccgagcagctgcttccggagctattgaagaaggctggctatgtttctaagatcgtaggcaagtggcacttgggacaccggcctcagttccatccattgaagcacggattcgatgagtggttcggctcgccaaattgtcatttcggaccctacgataataaggcccgcccaaatattcccgtgtaccgcgactgggaaatggtgggcagatattacgaggaattccctataaatctgaagacaggtgaagcaaaccttactcagatctacctgcaagaagcattggattttatcaagaggcaagcgcgccaccaccccttttttctgtactgggccgtggatgccacccatgcccccgtgtatgcttccaagcctttcttgggaacttcccagcggggcaggtacggagatgcagtgagagaaatagacgattcgatcgggaagatcctggagctactacaggatctccacgtggccgataatactttcgtattcttcacttccgataatggcgcagcactgatctccgcgccggagcaggggggcagcaatggcccctttctgtgtggtaaacaaactactttcgagggcggaatgagagaaccagccctggcttggtggcctgggcatgtgaccgccggccaagtgagccaccagctcggctcaattatggacctgttcacaaccagcctagccctagcgggcctgacccctccttccgatagagctattgacggtctgaatctcctcccaaccctgttgcagggcaggttgatggaccggccaatattctactataggggtgacacattgatggcagccacgttgggacagcataaggcccacttctggacctggaccaactcctgggaaaatttccgccaggggatagacttctgtcccggacagaacgtgagcggcgtcacgacacacaatctggaagaccacaccaagctcccactcatctttcatcttgggcgtgatcccggtgagcgtttcccactcagtttcgccagcgccgaataccaagaagccttgtctcgcatcaccagtgtcgttcagcaacatcaggaggcactggtgcccgcgcagcctcagctgaatgtgtgcaactgggctgtcatgaactgggccccgccaggctgcgaaaaattaggcaaatgcctgactccccctgagtcaataccaaagaaatgcctctggagccattag

SEQ ID NO: 10562 - DNA, 1344 bp, Artificial Sequence
  derived and/or modified sequence
atggccgccgtggtggccgccacccggtggtggcagctgctgctggttcttagcgccgctggaatgggagcaagcggggcccctggccaacgcgcttacactccacaggagatagtcggagggatcccagacagcgaacagttgctgcctgaactgctgaagaaggcaggttatgtgagcaaaattgtcggaaaatggcacctaggccaccgcccccagttccacccgctgaaacatggcttcgacgagtggttcgggagccccaattgtcacttcggtccctatgacaacaaggccagacctaatatccccgtctatagggactgggagatggttggcagatattacgaggaattccctatcaacctcaaaaccggagaagccaatttaacacagatttacctccaagaggcacttgactttattaaacggcaggcccggcaccacccgtttttcttgtactgggcagtcgatgctacacacgcccctgtgtacgcttccaagccttttctgggaaccagtcagcgtggccgttacggcgatgctgtaagggagatcgacgattccatcggtaaaattttagaactgctccaggacctccacgtcgctgataatactttcgttttttttacttctgacaatggcgcggctctcatctctgctccagagcagggaggctccaacggtccattcctgtgcggcaaacagacaacattcgagggtgggatgcgggaacccgcactggcttggtggcccgggcatgtgacagctgggcaggtgagccaccagcttgggtcaattatggatctgtttacgacatccctggcgctagcaggactgaccccacccagcgatagggcgatagacggccttaacttactccctacccttttgcagggcagactcatggatagacccatcttttattatagaggcgatacattgatggcagccaccctgggacagcacaaagcccatttctggacttggaccaactcgtgggaaaatttcagacagggcattgacttttgcccaggacagaacgtgtcaggagtcaccacccataacttggaggatcataccaagctgccactgattttccacctgggtagagacccaggcgaacgcttcccactcagcttcgcatccgctgaatatcaggaagccctgagccggattacatctgtggtccaacaacatcaggaggctctggtgccggcacagcctcagctcaatgtttgtaattgggctgttatgaactgggctcctcccggctgcgaaaaactgggcaagtgcctgacccccccagagtccattccaaaaaagtgtctgtggtcccattag

SEQ ID NO: 10563 - DNA, 2363 bp, Artificial Sequence
  derived and/or modified sequence
aggccccgccccgcagcccagccggaagggccggcggacgctcgctaggtcggctcgctggccggggctccgcggctcccgtggttgccatggcggcggttgtcgcggcgacgaggtggtggcagctgttgctggtgctcagcgccgcggggatgggggcctcgggcgccccgcagccccccaacatcctgctcctgctcatggacgacatgggatggggtgacctcggggtgtatggagagccctccagagagaccccgaatttggaccggatggctgcagaagggctgcttttcccaaacttctattctgccaaccctctgtgctcgccatcgagggcggcactgctcacaggacggctacccatccgcaatggcttctacaccaccaacgcccatgccagaaacgcctacacaccgcaggagattgtgggcggcatcccagactcggagcagctcctgccggagcttctgaagaaggccggctacgtcagcaagattgtcggcaagtggcatctgggtcacaggccccagttccaccccctgaagcacggatttgatgagtggtttggatcccccaactgccactttggaccttatgacaacaaggccaggcccaacatccctgtgtacagggactgggagatggttggcagatattatgaagaatttcctattaatctgaagacgggggaagccaacctcacccagatctacctgcaggaagccctggacttcattaagagacaggcacggcaccacccctttttcctctactgggctgtcgacgccacgcacgcacccgtctatgcctccaaacccttcttgggcaccagtcagcgagggcggtatggagacgccgtccgggagattgatgacagcattgggaagatactggagctcctccaagacctgcacgtcgcggacaacaccttcgtcttcttcacgtcggacaacggcgctgccctcatttccgcccccgaacaaggtggcagcaacggcccctttctgtgtgggaagcagaccacgtttgaaggagggatgagggagcctgccctcgcatggtggccagggcacgtcactgcaggccaggtgagccaccagctgggcagcatcatggacctcttcaccaccagcctggcccttgcgggcctgacgccgcccagcgacagggccattgatggcctcaacctcctccccaccctcctgcagggccggctgatggacaggcctatcttctattaccgtggcgacacgctgatggcggccaccctcgggcagcacaaggctcacttctggacctggaccaactcctgggagaacttcagacagggcattgatttctgccctgggcagaacgtttcaggggtcacaactcacaatctggaagaccacacgaagctgcccctgatcttccacctgggacgggacccaggggagaggttccccctcagctttgccagcgccgagtaccaggaggccctcagcaggatcacctcggtcgtccagcagcaccaggaggccttggtccccgcgcagccccagctcaacgtgtgcaactgggcggtcatgaactgggcacctccgggctgtgaaaagttagggaagtgtctgacacctccagaatccattcccaagaagtgcctctggtcccactagcacctgcgcagactcaggccaggcctagaatctccggttggccctgcaagtgcctggaggaaggatggctctggcctcggtcctcccccaaccctgcccaagccagacagacagcacctgcagacgcagggggactgcacaattccacctgcccaggacctgaccctggcgtgtgcttggccctcctcctcgcccacggcgcctcagatttcaggaccctcctcctcgcccacggcgcctcagacctcaggaccctgccgtctcacgcctttgtgaaccccaaatatctgagaccagtctcagtttattttgccaaggttaaggatgcacctgtgacagcctcaggaggtcctgacaacaggtgcctgaggtggctggggatacagtttgcctttatacatcttagggagacacaagatcagtatgtgtatggcgtacattggttcagtcagccttccactgaatacacgattgagtctggcccagtgaatccgcatttttatgtaaacagtaagggaacggggcaatcatataagcgtttgtctcaggggagccccagagggatgacttccagttccgtctgtcctttgtccacaaggaatttccctggacgctaattatgagggaggcgtgtagcttcttatcattgtaactatgttatttagaaataaaacgggaggcaggtttgcctaattcccagcttga

SEQ ID NO: 10564 - DNA, 1511 bp, Artificial Sequence
  derived and/or modified sequence
ggaagggccggcggacgctcgctaggtcggctcgctggccggggctccgcggctcccgtggttgccatggcggcggttgtcgcggcgacgaggtggtggcagctgttgctggtgctcagcgccgcggggatgggggcctcgggcgccccgcagccccccaacatcctgctcctgctcatggacgaccgagggcggcactgctcacaggacggctacccatccgcaatggcttctacaccaccaacgcccatgccagaaacgcctacacaccgcaggagattgtgggcggcatcccagactcggagcagctcctgccggagcttctgaagaaggccggctacgtcagcaagattgtcggcaagtggcatctgggtcacaggccccagttccaccccctgaagcacggatttgatgagtggtttggatcccccaactgccactttggaccttatgacaacaaggccaggcccaacatccctgtgtacagggactgggagatggttggcagatattatgaagaatttcctattaatctgaagacgggggaagccaacctcacccagatctacctgcaggaagccctggacttcattaagagacaggcacggcaccacccctttttcctctactgggctgtcgacgccacgcacgcacccgtctatgcctccaaacccttcttgggcaccagtcagcgagggcggtatggagacgccgtccgggagattgatgacagcattgggaagatactggagctcctccaagacctgcacgtcgcggacaacaccttcgtcttcttcacgtcggacaacggcgctgccctcatttccgcccccgaacaaggtggcagcaacggcccctttctgtgtgggaagcagaccacgtttgaaggagggatgagggagcctgccctcgcatggtggccagggcacgtcactgcaggccaggtgagccaccagctgggcagcatcatggacctcttcaccaccagcctggcccttgcgggcctgacgccgcccagcgacagggccattgatggcctcaacctcctccccaccctcctgcagggccggctgatggacaggcctatcttctattaccgtggcgacacgctgatggcggccaccctcgggcagcacaaggctcacttctggacctggaccaactcctgggagaacttcagacagggcattgatttctgccctgggcagaacgtttcaggggtcacaactcacaatctggaagaccacacgaagctgcccctgatcttccacctgggacgggacccaggggagaggttccccctcagctttgccagcgccgagtaccaggaggccctcagcaggatcacctcggtcgtccagcagcaccaggaggccttggtccccgcgcagccccagctcaacgtgtgcaactgggcggtcatgaactgggcacctccgggctgtgaaaagttagggaagtgtctgacacctccagaatccattcccaagaagtgcctctggtcccactag

SEQ ID NO: 10565 - DNA, 2048 bp, Artificial Sequence
  derived and/or modified sequence
atggcggcggttgtcgcggcgacgaggtggtggcagctgttgctggtgctcagcgccgcggggatgggggcctcgggcgccccaggacagagggcctacacaccgcaggagattgtgggcggcatcccagactcggagcagctcctgccggagcttctgaagaaggccggctacgtcagcaagattgtcggcaagtggcatctgggtcacaggccccagttccaccccctgaagcacggatttgatgagtggtttggatcccccaactgccactttggaccttatgacaacaaggccaggcccaacatccctgtgtacagggactgggagatggttggcagatattatgaagaatttcctattaatctgaagacgggggaagccaacctcacccagatctacctgcaggaagccctggacttcattaagagacaggcacggcaccacccctttttcctctactgggctgtcgacgccacgcacgcacccgtctatgcctccaaacccttcttgggcaccagtcagcgagggcggtatggagacgccgtccgggagattgatgacagcattgggaagatactggagctcctccaagacctgcacgtcgcggacaacaccttcgtcttcttcacgtcggacaacggcgctgccctcatttccgcccccgaacaaggtggcagcaacggcccctttctgtgtgggaagcagaccacgtttgaaggagggatgagggagcctgccctcgcatggtggccagggcacgtcactgcaggccaggtgagccaccagctgggcagcatcatggacctcttcaccaccagcctggcccttgcgggcctgacgccgcccagcgacagggccattgatggcctcaacctcctccccaccctcctgcagggccggctgatggacaggcctatcttctattaccgtggcgacacgctgatggcggccaccctcgggcagcacaaggctcacttctggacctggaccaactcctgggagaacttcagacagggcattgatttctgccctgggcagaacgtttcaggggtcacaactcacaatctggaagaccacacgaagctgcccctgatcttccacctgggacgggacccaggggagaggttccccctcagctttgccagcgccgagtaccaggaggccctcagcaggatcacctcggtcgtccagcagcaccaggaggccttggtccccgcgcagccccagctcaacgtgtgcaactgggcggtcatgaactgggcacctccgggctgtgaaaagttagggaagtgtctgacacctccagaatccattcccaagaagtgcctctggtcccactagcacctgcgcagactcaggccaggcctagaatctccggttggccctgcaagtgcctggaggaaggatggctctggcctcggtcctcccccaaccctgcccaagccagacagacagcacctgcagacgcagggggactgcacaattccacctgcccaggacctgaccctggcgtgtgcttggccctcctcctcgcccacggcgcctcagatttcaggaccctcctcctcgcccacggcgcctcagacctcaggaccctgccgtctcacgcctttgtgaaccccaaatatctgagaccagtctcagtttattttgccaaggttaaggatgcacctgtgacagcctcaggaggtcctgacaacaggtgcctgaggtggctggggatacagtttgcctttatacatcttagggagacacaagatcagtatgtgtatggcgtacattggttcagtcagccttccactgaatacacgattgagtctggcccagtgaatccgcatttttatgtaaacagtaagggaacggggcaatcatataagcgtttgtctcaggggagccccagagggatgacttccagttccgtctgtcctttgtccacaaggaatttccctggacgctaattatgagggaggcgtgtagcttcttatcattgtaactatgttatttagaaataaaacgggaggcaggtttgcctaattcccagcttg

SEQ ID NO: 10566 - DNA, 1569 bp, Artificial Sequence
  derived and/or modified sequence
atggcagcagtggtggctgctacgcggtggtggcaactgctgctagtgctgtcggccgctgggatgggggctagcggcgctcctcagccacctaatatcctgttactgctaatggacgacatgggatggggtgatctcggagtgtatggggaaccgagcagggaaacccctaacctcgacagaatggcagctgagggcctgttattccctaatttctatagcgccaatcctctctgcagtccctcaagggccgcattactgaccggacgtctgcctatccgtaacgggttttataccacgaatgcccatgccaggaacgcatatactccccaggagatcgtggggggaatacccgacagtgagcagctgttaccagagcttctgaagaaagcgggttacgtgtccaagatcgtcgggaaatggcatctgggtcacagaccccagtttcatccactgaagcatggatttgacgaatggtttgggtcaccaaattgccattttggcccttacgacaataaagcccgtcctaacatacccgtgtaccgggactgggagatggtcggtaggtactatgaagaatttcctattaaccttaagactggggaggccaacttgacacagatttatctgcaagaggcactcgatttcattaagaggcaagctaggcatcacccattcttcctgtactgggctgtggacgcaactcatgcacccgtctacgctagcaagcccttcctaggtacttcacagagaggaaggtatggcgatgcagtgagggaaatcgatgacagtattggaaagattttggaacttctgcaagatctgcatgtggcagacaacactttcgtgtttttcacatccgacaacggcgcagctttgatctccgctcccgagcagggcggtagcaacgggccttttctgtgcggaaaacagactactttcgagggcggaatgcgcgagcctgcgttagcatggtggcccggtcacgtgaccgcaggccaggtatcccaccagctgggctctatcatggaccttttcaccacgtccctggctctggctggactgactcccccaagcgatagggccattgacggtctcaacttgctgccaacacttttgcagggcagactgatggatcggcctatcttctactataggggtgatacattgatggccgctactctgggtcaacacaaggcacatttttggacatggactaattcgtgggaaaattttagacaagggattgatttttgtcccggacagaatgtctcaggagtcactacccataatctggaagatcacaccaaattgccactgatatttcatctcggccgagatcccggagagcgattcccactgtcatttgcttctgcggagtaccaggaggcactgtcaagaatcaccagcgtcgtgcagcagcaccaggaggctctggttccggcacaaccgcaacttaatgtttgtaattgggcagtcatgaactgggctccccctggctgtgagaagctcgggaaatgtctgacgccacccgaatctatacctaagaagtgcctatggagtcattag

SEQ ID NO: 10567 - DNA, 261 bp, Artificial Sequence
  derived and/or modified sequence
atggctgcagtggtggccgcaactcgctggtggcagctcctgctggtgctgagcgccgcaggcatgggggctagcggagcaccacaaccacccaacattctgctgctgctaatggatgaccggggtcgccattgtagccaggatggttatcccagcgctatggcctctaccccacctacgcccatgccggaaacgcctactcacaggagaagactttgggctgcctcacaaacaagaagttccagttgccggtcattttag

SEQ ID NO: 10568 - DNA, 1344 bp, Artificial Sequence
  derived and/or modified sequence
atggccgctgtcgtagcagcaacgagatggtggcagctcctgctggtgctgtccgccgctgggatgggggctagcggcgctcccggacagcgagcgtacacccctcaagaaattgtcggtggcatacctgacagcgagcagcttctaccagagttactcaagaaggccggatacgttagcaaaattgtaggaaaatggcacctcggtcatcgcccacagttccatcctctgaagcatggctttgacgaatggttcggctcaccaaactgtcatttcggcccatacgacaataaggccaggcccaatattcctgtgtaccgtgattgggagatggtcggccgttactatgaggaattccccattaacttaaaaaccggagaagccaatttaacacagatttacctccaggaagcactcgacttcatcaaaaggcaggctcggcatcacccattttttctgtactgggccgttgacgctactcatgcccctgtgtatgccagcaaaccatttctcggaacctcccaaaggggccgttatggagatgcggtgcgggagattgacgattctattggaaaaatattggaactgcttcaggacctgcacgtggccgataatactttcgtgtttttcacctcagataatggcgctgcccttatttccgctcccgaacagggcggttcaaatggcccattcctttgtgggaaacagactacttttgagggcggtatgagggagccagcattagcttggtggcctggtcatgtgacagccggtcaggttagtcaccagcttggctccatcatggatcttttcactacttctctggctctggccggacttacaccaccctccgacagggccattgacggtctgaatctgttacctacactgcttcagggaaggttaatggataggcccattttctattataggggagacaccctgatggcagctacgctgggtcaacacaaagctcatttctggacctggaccaacagttgggagaatttcaggcaggggattgatttttgcccgggtcaaaacgtgagcggtgttacaacacacaatctggaggaccacaccaagcttcctcttatcttccatttgggcagagatccaggggagcgcttccctctgtccttcgcaagcgccgaatatcaggaagccctgtctaggatcaccagcgtagtgcagcaacatcaggaggcgcttgtgcctgcacaacctcagctgaacgtttgcaattgggcagtgatgaattgggcacctcctggttgcgagaaactcggaaagtgtctgacgccgcctgagtctatccccaaaaaatgcctctggtctcactag

SEQ ID NO: 10569 - DNA, 1569 bp, Artificial Sequence
  derived and/or modified sequence
atggcagccgtggtcgcggcgacaagatggtggcagttattgctggtcctgagcgcagcgggcatgggcgcaagcggagcaccccaacccccaaatatactgcttctcctgatggacgacatgggatggggcgacctgggcgtgtacggtgaaccctcccgggaaactccaaatttggataggatggctgccgaagggctcttgttccctaacttctattccgctaaccccctctgctccccctcacgcgccgctttgctgactggacggcttcccatccgtaacggtttttatacaactaacgcgcacgcacgaaacgcctacacaccccaagagattgtgggtgggatccccgactccgagcagctgctcccagaattacttaaaaaagctggctacgtctcgaaaattgtgggcaagtggcacctgggtcaccggccccaattccaccctttaaaacacggtttcgacgaatggttcggctcccctaattgtcatttcgggccatatgataataaggccaggccgaacatccctgtctaccgagattgggaaatggtgggaagatattatgaggaattccccattaacttaaaaaccggtgaggccaacttgactcagatctacctgcaagaggcccttgactttataaagcgacaggcccggcatcaccccttctttctttactgggctgttgacgccacccacgctccagtctacgcttccaaacctttcctcggcacttcacagagaggtcgatacggcgacgcggtgcgcgagatcgatgacagcataggcaaaatccttgagctcttgcaggatctacacgtggcagacaatactttcgtttttttcaccagtgataatggagccgccctgatttccgctccagagcagggcggttctaacggtccctttctgtgtgggaaacagaccaccttcgaaggaggtatgcgagagcctgccctggcctggtggcctggccacgtgacagcaggccaggtctcccaccagttagggtcgattatggacctcttcaccacctctctcgcattagctggccttactccgccctcagaccgcgcaatagacggtcttaatttactcccaacacttctgcagggacgccttatggatcgccccattttctactacagaggggataccctgatggcggcgacactcggccagcacaaagctcacttctggacttggacgaatagctgggaaaatttccgacagggaatcgacttttgcccaggacagaacgtgagcggggttactactcacaaccttgaagaccacacaaagcttcctctgatctttcatctgggacgagatcctggggaacggttcccactgagttttgcaagcgcagaataccaggaggctctttctcgaattaccagcgttgtccaacagcaccaagaggcgctggtgcctgcccaaccacaattaaacgtctgcaattgggccgttatgaactgggcaccgcccggatgtgagaagcttggcaagtgcctgactccaccagagtccatcccaaaaaagtgcctatggtcccactag

SEQ ID NO: 10570 - DNA, 1344 bp, Artificial Sequence
  derived and/or modified sequence
atggctgcagttgtcgcagccacccgctggtggcaattgttacttgtgctaagcgctgctggcatgggcgcctctggagcccccgggcagagggcatacaccccacaggagatagtaggaggcattcccgactctgagcagctgctacccgagctacttaaaaaggccgggtacgtctccaaaatcgtcggcaaatggcacctcggccacagacctcagtttcacccgttgaaacacgggttcgatgagtggttcggatctcccaattgccactttgggccgtacgacaataaagcacgacccaacattccagtgtacagggactgggagatggtaggacgctactacgaggagttccccattaatctcaagactggtgaagctaacctgacacaaatttacctgcaggaggcgttggactttatcaagcgacaggcacgccatcacccttttttcctctactgggccgtagatgccacacacgcccccgtgtatgcctctaagccatttcttggaacttcccaacgaggtcggtacggcgacgctgtgagggagatcgacgactccatcggcaaaatcctggagctgctgcaggatttacacgtggcagataacacttttgtgtttttcacgagcgataatggcgccgccctcatctccgccccagaacaaggtggttcgaatggaccattcctttgcgggaaacaaacaacctttgaaggcgggatgcgtgagccagcgcttgcttggtggccagggcacgtaaccgccggccaggtctcccaccagctgggctccattatggatctgttcacgacttctctagcccttgccggcctgacacctccatccgacagagctatcgacggactgaatctgcttcctacattgcttcaaggaaggctgatggatagacctatcttttactacaggggcgataccctgatggctgcaaccctcgggcagcataaggcacacttctggacctggactaacagctgggagaactttcgccaaggcatcgacttttgtcccggtcagaatgtcagcggcgtgactacccataacttggaagatcacactaaattgccccttatctttcatcttggccgcgatcccggtgaacgctttcccctctccttcgcctccgccgaataccaagaagcgctctcacggattactagtgtcgtgcagcagcaccaggaggcactcgttcctgctcaaccccagctcaatgtttgtaactgggcagtgatgaactgggctccacctggatgtgagaagcttggaaaatgcctaacacctcccgagtctattccaaagaaatgcctctggtcccactag

SEQ ID NO: 10571 - DNA, 1569 bp, Artificial Sequence
  derived and/or modified sequence
atggccgccgtggtcgccgctacaagatggtggcagttgcttcttgttctctctgcagccggaatgggggccagtggtgctccccagccacctaatattctgttgctcctaatggatgacatgggatggggggacttgggggtctatggggaaccctctcgcgaaactccaaatcttgacaggatggctgccgaaggcctgctattccctaacttttatagtgccaatcccctgtgctcaccatcaagagctgccctgcttacaggacgcttgccaatcagaaacggcttttataccactaacgctcacgcacggaacgcatatacaccacaggaaatcgttgggggtatccccgattcagaacagctgctccccgagctcctgaagaaagccggttatgtgagcaagatagtcgggaaatggcaccttggacaccgaccacaatttcatcccctcaaacatggattcgatgagtggttcggttcccccaattgccactttggaccttacgataataaagctcgccccaatatacctgtttatcgcgactgggagatggtcggacgctactatgaggagttcccaattaacttaaaaacaggcgaggccaatctcacccaaatctacctgcaggaagcccttgactttataaaacggcaagctcgccaccatccgttcttcctctactgggcggtggacgcgacccatgcacctgtatacgctagcaaaccattcctcgggacctcacagcgcgggcgctatggagatgccgttcgtgagattgatgattcaattggaaagattctcgagctcctacaagacctgcatgttgccgacaacacatttgtgttcttcacttccgataacggagcagcacttatttccgctccagaacagggaggttcgaacggccccttcctgtgcggaaaacaaacgacatttgaaggcgggatgagagagccagcactagcctggtggcctggacatgtaacagcaggacaagtttcccatcaactagggtcgattatggatctgtttaccacaagtttagcactcgccggacttaccccaccctcggacagggccattgatggactcaacctgctacctacgctattgcaagggcgtctcatggatcgccccatattctattaccggggagataccttaatggcagccacattgggacaacacaaggcacatttttggacttggactaattcgtgggaaaacttcagacaggggatcgacttttgccccggccagaacgtgagcggtgtcacaacacataacctggaggatcacactaagctgcccctaatctttcacctgggtcgcgatcccggcgagcgattccctttaagttttgcttctgccgaataccaagaagctctgtcgagaataacttcagtcgtgcaacagcaccaggaagccttagtaccggcacagccgcaactaaacgtgtgtaactgggccgtaatgaattgggctccacctggctgcgaaaaactaggaaaatgcctgacccctccagaaagtatcccgaagaagtgtttgtggtcacattag

SEQ ID NO: 10572 - DNA, 1344 bp, Artificial Sequence
  derived and/or modified sequence
atggcagccgtggtggcggcgacccggtggtggcagctgttgctggttttgtcggccgcaggaatgggcgcgtccggtgcaccaggccaaagggcatatactccccaagaaattgtcgggggcattccggatagtgaacaactgctcccagaacttttaaagaaagcaggttacgtcagcaaaatcgtggggaaatggcacttgggccaccggccacagttccatcctctcaaacacggattcgatgaatggtttgggtctcctaattgtcactttggtccatacgacaataaggcccgcccaaacatcccagtgtaccgtgactgggagatggtgggacgttactatgaagaatttccaatcaatctaaagacaggcgaagctaatcttacccagatttatctgcaggaggccttagattttatcaaacggcaggccaggcaccatccctttttcctgtactgggccgtcgatgctacgcatgctcctgtctacgcatccaaacctttcctgggaactagtcagagaggaagatatggcgatgcagtacgagagattgatgactccataggcaagattctggaactgctgcaggatttgcacgtggcagataacacttttgtgtttttcacgagcgataatggcgccgccctcatctccgccccagaacaaggtggttcgaatggaccattcctttgcgggaaacaaacaacctttgaaggcgggatgcgtgagccagcgcttgcttggtggccagggcacgtaaccgccggccaggtctcccaccagctgggctccattatggatctgttcacgacttctctagcccttgccggcctgacacctccatccgacagagctatcgacggactgaatctgcttcctacattgcttcaaggaagacttatggaccggccaatcttctactatcgaggagacacactgatggcagctaccctcggccagcataaagcacatttctggacttggaccaactcctgggagaactttaggcaggggattgatttctgtcctggacagaatgtgtctggcgtgactacacataacttggaagatcataccaaacttcctctaatatttcacctgggtagagatccgggagagcgctttcccttgagtttcgcttccgcagaatatcaagaagcactcagcagaatcacaagcgtcgtgcagcagcatcaagaagctcttgtgcccgctcagccgcaactcaacgtgtgtaactgggccgtgatgaattgggcccccccaggttgtgaaaaactgggcaagtgtctgaccccccctgagtctatccccaagaagtgcttgtggtcccattag

SEQ ID NO: 10573 - RNA, 1712 nt, Artificial Sequence
  derived and/or modified sequence
gggaaauaagagagaaaagaagaguaagaagaaauauaagagccaccauggcugccgugguggcggcaacccgcugguggcagcugcuccuugugcucucagcagcaggaaugggggcgucgggggcuccccagccgcccaacauccugcucuugcucauggacgauauggguuggggugaccuugggguauacggagagccgucgagggaaacucccaacuuggacaggauggcggcagaaggucugcucuuuccgaacuuuuacucagcuaacccucuuugcucaccgucgcgagcggcgcuucugacugggagacuccccaucagaaauggguucuauacaacgaacgcccacgcucgcaaugcauacacaccgcaagagaucguggguggcauuccugauucggagcaguuguugccagaacuccuuaagaaggcgggauaugucucgaaaaucgucggaaaguggcaucucggccaccgaccccaguuccauccucuuaaacauggcuuugaugagugguuugggucgcccaauugccacuucggcccguaugacaauaaggccaggccaaacaucccggucuacagagauugggaaaugguagggcgguauuaugaagaguucccgaucaaucuuaaaacaggggaggcgaaucucacgcagaucuaccuucaagaggcgcuggacuucaucaaaagacaagcacggcaccaucccuuuuucuuguacugggccguagaugcuacacaugcgcccguguacgccuccaagccguuuuuggggacgagccagcggggacgcuacggggacgcggugcgcgagaucgacgauucaauuggaaagauucuugaacuuuugcaagaucuccacgucgcagauaauacuuucguauucuuuaccuccgacaacggagcagcgcugauuucagcaccggagcagggagggucgaauggucccuucuugugugggaaacagacgaccuuugagggaggaaugcgggagccugcguuggccugguggccugggcacguaacggcgggucagguaucacaucagcuuggaagcauuauggaucucuuuaccacaucgcuggcacucgccggacucacucccccguccgauagggcaaucgauggguugaaccuuuugccaacgcuccuucaaggucgacugauggaucgccccaucuucuauuacaggggugacacguugauggcggcgacauuggggcagcacaaggcacauuuuuggacauggacaaacucgugggaaaacuuccggcagggcaucgacuuuugucccggacaaaaugugagcggaguaacgacacacaaccuugaggaccauacgaagcucccucuuaucuuucaucuuggucgggacccgggugaaagguuuccccugucguucgcuucagcggaguaucaggaggcacugagccggauuacuuccgucguccagcaacaccaggaagcccucgugccagcucagccccaguugaacguauguaacugggcggugaugaauugggcaccgccugguugugagaaguuggggaaaugccugacgcccccugaauccauuccgaaaaagugcuuguggagccacuaaugagcugccuucugcggggcuugccuucuggccaugcccuucuucucucccuugcaccuguaccucuuggucuuugaauaaagccugaguaggaag

SEQ ID NO: 10574 - RNA, 1569 nt, Artificial Sequence
  derived and/or modified sequence
auggcagccguggucgcggcgacaagaugguggcaguuauugcugguccugagcgcagcgggcaugggcgcaagcggagcaccccaacccccaaauauacugcuucuccugauggacgacaugggauggggcgaccugggcguguacggugaacccucccgggaaacuccaaauuuggauaggauggcugccgaagggcucuuguucccuaacuucuauuccgcuaacccccucugcucccccucacgcgccgcuuugcugacuggacggcuucccauccguaacgguuuuuauacaacuaacgcgcacgcacgaaacgccuacacaccccaagagauugugggugggauccccgacuccgagcagcugcucccagaauuacuuaaaaaagcuggcuacgucucgaaaauugugggcaaguggcaccugggucaccggccccaauuccacccuuuaaaacacgguuucgacgaaugguucggcuccccuaauugucauuucgggccauaugauaauaaggccaggccgaacaucccugucuaccgagauugggaaauggugggaagauauuaugaggaauuccccauuaacuuaaaaaccggugaggccaacuugacucagaucuaccugcaagaggcccuugacuuuauaaagcgacaggcccggcaucaccccuucuuucuuuacugggcuguugacgccacccacgcuccagucuacgcuuccaaaccuuuccucggcacuucacagagaggucgauacggcgacgcggugcgcgagaucgaugacagcauaggcaaaauccuugagcucuugcaggaucuacacguggcagacaauacuuucguuuuuuucaccagugauaauggagccgcccugauuuccgcuccagagcagggcgguucuaacggucccuuucugugugggaaacagaccaccuucgaaggagguaugcgagagccugcccuggccugguggccuggccacgugacagcaggccaggucucccaccaguuagggucgauuauggaccucuucaccaccucucucgcauuagcuggccuuacuccgcccucagaccgcgcaauagacggucuuaauuuacucccaacacuucugcagggacgccuuauggaucgccccauuuucuacuacagaggggauacccugauggcggcgacacucggccagcacaaagcucacuucuggacuuggacgaauagcugggaaaauuuccgacagggaaucgacuuuugcccaggacagaacgugagcgggguuacuacucacaaccuugaagaccacacaaagcuuccucugaucuuucaucugggacgagauccuggggaacgguucccacugaguuuugcaagcgcagaauaccaggaggcucuuucucgaauuaccagcguuguccaacagcaccaagaggcgcuggugccugcccaaccacaauuaaacgucugcaauugggccguuaugaacugggcaccgcccggaugugagaagcuuggcaagugccugacuccaccagaguccaucccaaaaaagugccuauggucccacuag

SEQ ID NO: 10575 - RNA, 1344 nt, Artificial Sequence
  derived and/or modified sequence
auggcugcaguugucgcagccacccgcugguggcaauuguuacuugugcuaagcgcugcuggcaugggcgccucuggagcccccgggcagagggcauacaccccacaggagauaguaggaggcauucccgacucugagcagcugcuacccgagcuacuuaaaaaggccggguacgucuccaaaaucgucggcaaauggcaccucggccacagaccucaguuucacccguugaaacacggguucgaugagugguucggaucucccaauugccacuuugggccguacgacaauaaagcacgacccaacauuccaguguacagggacugggagaugguaggacgcuacuacgaggaguuccccauuaaucucaagacuggugaagcuaaccugacacaaauuuaccugcaggaggcguuggacuuuaucaagcgacaggcacgccaucacccuuuuuuccucuacugggccguagaugccacacacgcccccguguaugccucuaagccauuucuuggaacuucccaacgaggucgguacggcgacgcugugagggagaucgacgacuccaucggcaaaauccuggagcugcugcaggauuuacacguggcagauaacacuuuuguguuuuucacgagcgauaauggcgccgcccucaucuccgccccagaacaaggugguucgaauggaccauuccuuugcgggaaacaaacaaccuuugaaggcgggaugcgugagccagcgcuugcuugguggccagggcacguaaccgccggccaggucucccaccagcugggcuccauuauggaucuguucacgacuucucuagcccuugccggccugacaccuccauccgacagagcuaucgacggacugaaucugcuuccuacauugcuucaaggaaggcugauggauagaccuaucuuuuacuacaggggcgauacccugauggcugcaacccucgggcagcauaaggcacacuucuggaccuggacuaacagcugggagaacuuucgccaaggcaucgacuuuugucccggucagaaugucagcggcgugacuacccauaacuuggaagaucacacuaaauugccccuuaucuuucaucuuggccgcgaucccggugaacgcuuuccccucuccuucgccuccgccgaauaccaagaagcgcucucacggauuacuagugucgugcagcagcaccaggaggcacucguuccugcucaaccccagcucaauguuuguaacugggcagugaugaacugggcuccaccuggaugugagaagcuuggaaaaugccuaacaccucccgagucuauuccaaagaaaugccucuggucccacuag

SEQ ID NO: 10576 - RNA, 1569 nt, Artificial Sequence
  derived and/or modified sequence
auggccgccguggucgccgcuacaagaugguggcaguugcuucuuguucucucugcagccggaaugggggccaguggugcuccccagccaccuaauauucuguugcuccuaauggaugacaugggauggggggacuugggggucuauggggaacccucucgcgaaacuccaaaucuugacaggauggcugccgaaggccugcuauucccuaacuuuuauagugccaauccccugugcucaccaucaagagcugcccugcuuacaggacgcuugccaaucagaaacggcuuuuauaccacuaacgcucacgcacggaacgcauauacaccacaggaaaucguuggggguauccccgauucagaacagcugcuccccgagcuccugaagaaagccgguuaugugagcaagauagucgggaaauggcaccuuggacaccgaccacaauuucauccccucaaacauggauucgaugagugguucgguucccccaauugccacuuuggaccuuacgauaauaaagcucgccccaauauaccuguuuaucgcgacugggagauggucggacgcuacuaugaggaguucccaauuaacuuaaaaacaggcgaggccaaucucacccaaaucuaccugcaggaagcccuugacuuuauaaaacggcaagcucgccaccauccguucuuccucuacugggcgguggacgcgacccaugcaccuguauacgcuagcaaaccauuccucgggaccucacagcgcgggcgcuauggagaugccguucgugagauugaugauucaauuggaaagauucucgagcuccuacaagaccugcauguugccgacaacacauuuguguucuucacuuccgauaacggagcagcacuuauuuccgcuccagaacagggagguucgaacggccccuuccugugcggaaaacaaacgacauuugaaggcgggaugagagagccagcacuagccugguggccuggacauguaacagcaggacaaguuucccaucaacuagggucgauuauggaucuguuuaccacaaguuuagcacucgccggacuuaccccacccucggacagggccauugauggacucaaccugcuaccuacgcuauugcaagggcgucucauggaucgccccauauucuauuaccggggagauaccuuaauggcagccacauugggacaacacaaggcacauuuuuggacuuggacuaauucgugggaaaacuucagacaggggaucgacuuuugccccggccagaacgugagcggugucacaacacauaaccuggaggaucacacuaagcugccccuaaucuuucaccugggucgcgaucccggcgagcgauucccuuuaaguuuugcuucugccgaauaccaagaagcucugucgagaauaacuucagucgugcaacagcaccaggaagccuuaguaccggcacagccgcaacuaaacguguguaacugggccguaaugaauugggcuccaccuggcugcgaaaaacuaggaaaaugccugaccccuccagaaaguaucccgaagaaguguuuguggucacauuag

SEQ ID NO: 10577 - RNA, 1344 nt, Artificial Sequence
  derived and/or modified sequence
auggcagccgugguggcggcgacccggugguggcagcuguugcugguuuugucggccgcaggaaugggcgcguccggugcaccaggccaaagggcauauacuccccaagaaauugucgggggcauuccggauagugaacaacugcucccagaacuuuuaaagaaagcagguuacgucagcaaaaucguggggaaauggcacuugggccaccggccacaguuccauccucucaaacacggauucgaugaaugguuugggucuccuaauugucacuuugguccauacgacaauaaggcccgcccaaacaucccaguguaccgugacugggagauggugggacguuacuaugaagaauuuccaaucaaucuaaagacaggcgaagcuaaucuuacccagauuuaucugcaggaggccuuagauuuuaucaaacggcaggccaggcaccaucccuuuuuccuguacugggccgucgaugcuacgcaugcuccugucuacgcauccaaaccuuuccugggaacuagucagagaggaagauauggcgaugcaguacgagagauugaugacuccauaggcaagauucuggaacugcugcaggauuugcacguggcagauaacacuuuuguguuuuucacgagcgauaauggcgccgcccucaucuccgccccagaacaaggugguucgaauggaccauuccuuugcgggaaacaaacaaccuuugaaggcgggaugcgugagccagcgcuugcuugguggccagggcacguaaccgccggccaggucucccaccagcugggcuccauuauggaucuguucacgacuucucuagcccuugccggccugacaccuccauccgacagagcuaucgacggacugaaucugcuuccuacauugcuucaaggaagacuuauggaccggccaaucuucuacuaucgaggagacacacugauggcagcuacccucggccagcauaaagcacauuucuggacuuggaccaacuccugggagaacuuuaggcaggggauugauuucuguccuggacagaaugugucuggcgugacuacacauaacuuggaagaucauaccaaacuuccucuaauauuucaccuggguagagauccgggagagcgcuuucccuugaguuucgcuuccgcagaauaucaagaagcacucagcagaaucacaagcgucgugcagcagcaucaagaagcucuugugcccgcucagccgcaacucaacguguguaacugggccgugaugaauugggcccccccagguugugaaaaacugggcaagugucugacccccccugagucuauccccaagaagugcuuguggucccauuag

SEQ ID NO: 10578 - protein, 217 aa, Artificial Sequence
  derived and/or modified sequence
MATGSRTSLLLAFGLLCLPWLQEGSAFPTIPLSRLFDNAMLRAHRLHQLAFDTYQEFEEAYIPKEQKYSFLQNPQTSLCFSESIPTPSNREETQQKSNLELLRISLLLIQSWLEPVQFLRSVFANSLVYGASDSNVYDLLKDLEEGIQTLMGRLEDGSPRTGQIFKQTYSKFDTNSHNDDALLKNYGLLYCFRKDMDKVETFLRIVQCRSVEGSCGF

SEQ ID NO: 10579 - protein, 301 aa, Artificial Sequence
  derived and/or modified sequence
MATGSRTSLLLAFGLLCLPWLQEGSASSSSKAPPPSLPSPSRLPGPSDTPILPQFPTIPLSRLFDNAMLRAHRLHQLAFDTYQEFEEAYIPKEQKYSFLQNPQTSLCFSESIPTPSNREETQQKSNLELLRISLLLIQSWLEPVQFLRSVFANSLVYGASDSNVYDLLKDLEEGIQTLMGRLEDGSPRTGQIFKQTYSKFDTNSHNDDALLKNYGLLYCFRKDMDKVETFLRIVQCRSVEGSCGFSSSSKAPPPSLPSPSRLPGPSDTPILPQSSSSKAPPPSLPSPSRLPGPSDTPILPQ

SEQ ID NO: 10580 - protein, 285 aa, Artificial Sequence
  derived and/or modified sequence
MATGSRTSLLLAFGLLCLPWLQEGSASSSSKAPPPSLPFPTIPLSRLFDNAMLRAHRLHQLAFDTYQEFEEAYIPKEQKYSFLQNPQTSLCFSESIPTPSNREETQQKSNLELLRISLLLIQSWLEPVQFLRSVFANSLVYGASDSNVYDLLKDLEEGIQTLMGRLEDGSPRTGQIFKQTYSKFDTNSHNDDALLKNYGLLYCFRKDMDKVETFLRIVQCRSVEGSCGFSSSSKAPPPSLPSPSRLPGPSDTPILPQSSSSKAPPPSLPSPSRLPGPSDTPILPQ

SEQ ID NO: 10581 - protein, 299 aa, Artificial Sequence
  derived and/or modified sequence
MKWVSFISLLFLFSSAYSGSLDKRSSSSKAPPPSLPSPSRLPGPSDTPILPQFPTIPLSRLFDNAMLRAHRLHQLAFDTYQEFEEAYIPKEQKYSFLQNPQTSLCFSESIPTPSNREETQQKSNLELLRISLLLIQSWLEPVQFLRSVFANSLVYGASDSNVYDLLKDLEEGIQTLMGRLEDGSPRTGQIFKQTYSKFDTNSHNDDALLKNYGLLYCFRKDMDKVETFLRIVQCRSVEGSCGFSSSSKAPPPSLPSPSRLPGPSDTPILPQSSSSKAPPPSLPSPSRLPGPSDTPILPQ

SEQ ID NO: 10582 - protein, 26 aa, Artificial Sequence
  derived and/or modified sequence
MATGSRTSLLLAFGLLCLPWLQEGSA

SEQ ID NO: 10583 - DNA, 651 bp, Artificial Sequence
  derived and/or modified sequence
atggcgaccgggagccggacctcgctgctgctggccttcggactgctgtgcctcccatggctgcaagaggggtcggcattccctaccatccctctgtcccggctcttcgacaacgccatgctccgggcccatcggctgcaccaactggcctttgatacctaccaagaattcgaggaggcgtacatcccaaaagaacagaagtactcgttcctgcagaatccgcagacctcactgtgcttttctgagtcgattccaaccccgtcgaacagagaggaaacccagcagaagtcaaacctcgaactgctccggatctcactcttgcttatccaatcttggctcgaaccggtgcagtttttgagatcagtctttgccaacagcctggtgtacggagcgtcggactccaacgtgtacgatctgcttaaggacctggaagaaggaatccagactctcatgggtcggctggaagatggctcaccgcgcactggacagatcttcaaacagacctactccaaatttgatacgaactcccacaacgacgacgccctgttgaagaattatggactgctgtactgcttcaggaaggacatggataaggtggaaactttccttcggattgttcaatgccgcagcgtggaaggatcgtgtggcttc

SEQ ID NO: 10584 - DNA, 651 bp, Artificial Sequence
  derived and/or modified sequence
atggcaaccggcagcagaacttcactcctcctcgcgtttggcctcctttgcctgccctggctgcaggagggatcggcgttccctaccatccctctgtcgagactgtttgataacgctatgcttagggctcaccgattgcatcagctcgcctttgacacctaccaggagttcgaagaagcctacatccccaaagaacaaaagtattcgttccttcagaacccgcagaccagcctgtgctttagcgaatcgatcccgactccgtccaaccgcgaagaaactcagcagaagtcaaacctcgagctgctgcggatttcgctgctgctgatccaatcgtggctggaaccagtgcaattccttcggtccgtgttcgccaattcactcgtctacggcgcctcagactctaatgtttacgatcttttgaaggacttggaggaaggaatccaaaccctcatgggtcgcctcgaagatggatctccgcgtacgggtcagatcttcaaacagacttactcgaaattcgacacgaactctcacaatgacgatgccctgcttaagaactacggactgctgtactgtttccgcaaggacatggacaaggtggagactttcttgcgtattgtgcaatgccggagcgtcgaggggtcctgcggcttc

SEQ ID NO: 10585 - DNA, 651 bp, Artificial Sequence
  derived and/or modified sequence
atggctaccggatcccggacttcattactcctggcattcgggctactgtgtctcccgtggcttcaggagggaagtgctttccctaccattcccctctctcggctgtttgacaacgccatgctccgcgctcaccgattgcaccagttggctttcgacacatatcaggagttcgaggaagcctacataccaaaggagcagaagtatagttttttgcaaaatccacagacctcattgtgcttctccgagtcgatccctacccctagtaacagagaagagactcagcagaagtcaaacctggaattgctcagaatctcactgctgcttatccagagctggctggaacctgtccagtttctgaggtccgtgttcgcgaactccttagtgtatggcgccagcgactctaacgtctacgaccttctgaaggacctggaagagggtatccaaacgctcatgggcaggttggaggacggatcacccaggactgggcagatttttaaacagacgtatagcaagtttgatactaattctcacaacgacgatgccttgctcaaaaattatggcctactgtactgtttcagaaaagatatggataaggtggaaacctttctacgcatcgtgcagtgtagatcagtagagggaagttgcggcttc

SEQ ID NO: 10586 - DNA, 651 bp, Artificial Sequence
  derived and/or modified sequence
atggcaaccgggtcccggaccagtttgttattagcattcggtctattatgtctcccctggctgcaggaaggatctgctttccctaccatccctctaagtcgtctgttcgacaacgcaatgcttcgtgcacacaggctacatcaactggccttcgatacataccaggaattcgaagaagcttacattccaaaagaacagaagtatagctttttgcagaacccccagaccagcctgtgtttctctgagtctatacccaccccctctaaccgggaagagacacagcagaagagcaacctggaactactgagaattagtttactactgatacagtcttggttggaacccgttcagttcctacggagcgttttcgccaatagtctggtgtatggcgcaagcgactccaacgtgtatgacctcttgaaagacctagaggaggggatccaaaccctgatgggcagactcgaggatggctctccacgaactggacagatcttcaagcaaacatacagcaaatttgatactaacagccataacgacgacgctctcctgaagaattacgggctcctatactgttttcgcaaggacatggataaggtggaaactttcctgcgcattgtgcaatgtcggtctgtggagggatcctgcggcttt

SEQ ID NO: 10587 - DNA, 651 bp, Artificial Sequence
  derived and/or modified sequence
atggcaaccgggtctagaacctctctgttactggcttttggcctcctgtgtcttccttggcttcaggaagggagtgcctttcccaccatccccctctctaggctttttgacaacgccatgctgagggcacacagactacaccagttggcctttgacacgtatcaagagttcgaagaggcctatattccgaaggaacagaaatacagtttcctacagaacccccaaacctctctgtgcttctctgaatcgatcccaacccctagtaatcgcgaagagacacagcagaaatctaaccttgagcttctgagaatttctctgctgctaatccagtcctggctggagcccgtgcagtttcttaggtccgttttcgccaactccctggtttatggcgcctcggactctaacgtgtacgatctgttgaaggacctggaggaggggatccagactctaatggggcggctggaggatgggtcacctaggaccgggcagatatttaagcagacttactccaaatttgatacgaactcgcataatgatgatgcgctgctgaagaattatggcctcctgtattgttttaggaaggacatggacaaagtggaaactttcctccgcattgttcaatgcagatccgtggaggggtcctgcggcttt

SEQ ID NO: 10588 - DNA, 651 bp, Artificial Sequence
  derived and/or modified sequence
atggccacagggagccgcactagtctccttttggccttcggacttctgtgtctcccatggctccaagagggatcagcattccctactatccctctgagtcgcctgtttgacaacgctatgctacgagctcaccggctgcaccagctagccttcgacacatatcaggaattcgaggaggcatacatcccaaaagagcagaaatatagttttttgcaaaacccacaaacctccctgtgcttctcagaaagcatacccacaccaagcaatcgagaagagacccagcaaaagtcgaacctcgaattactgaggatctccctgttactcatccagtcttggttggagcccgtgcagttcctgcgctcagtctttgccaattccctggtgtacggcgcctcagattccaatgtctacgacctactgaaggatcttgaagagggcatacagacactcatggggcgcctagaggatggatcccccaggacgggccagatcttcaagcagacatactccaagttcgacactaacagccacaatgatgacgcgttgttgaaaaactacggtctgctgtattgctttcggaaggacatggataaggtcgagacattcctgcgaattgttcagtgccgctcggtagaaggttcgtgcgggttc

SEQ ID NO: 10589 - DNA, 651 bp, Artificial Sequence
  derived and/or modified sequence
atggctacaggctcgcgtaccagtctgctattggcatttggtctcctctgtcttccctggttgcaagaagggtcagcattcccgactatcccactatctcgtctattcgacaatgctatgttgcgtgcccaccggctacatcagctggctttcgatacttaccaggaattcgaggaagcttatatccctaaggagcaaaagtactcatttctacagaacccacaaacttcactctgtttttctgaatctatacctacaccaagtaaccgcgaggagactcagcagaaaagcaaccttgaacttttgaggatctccttgctgctaattcagagttggctagaaccggtgcagttcctgcggtctgttttcgcaaacagcctggtctacggtgcctcggattctaacgtttacgatttgttaaaagatcttgaggagggcattcaaacattgatgggtaggctagaggacggatcccctcgcaccggacagattttcaaacagacgtactctaaattcgatacaaactcccataatgacgatgctctgctgaagaattatggcttgctttactgttttcgtaaggacatggataaggtcgaaacttttctccgaattgtccagtgtagatccgttgagggctcctgtggtttt

SEQ ID NO: 10590 - DNA, 651 bp, Artificial Sequence
  derived and/or modified sequence
atggctaccggttcccggacctcattgctcctcgccttcggtctgctgtgtctgccgtggctgcaagagggatcagcattccccactatcccactgtccagacttttcgataacgccatgctccgcgcccatcggctgcaccagctcgctttcgacacgtaccaggagttcgaagaggcgtacattcctaaggagcagaaatactccttcctgcagaacccacaaacctccctgtgctttagcgagtcgatccctaccccctcaaaccgggaagagactcagcagaagagcaacctggagttgctgaggatctctttgctcctgattcaatcttggctggagccagtccagttcctgcggtccgtgttcgccaactccctggtgtatggagcgtcggatagcaacgtgtacgatcttctcaaagacctcgaagaaggaattcaaaccctcatgggacgcctggaggacggcagcccgcgcactggacagatcttcaaacaaacctactccaaattcgacacgaactcccacaatgatgacgcgcttctgaaaaactacggcctgttgtactgctttaggaaagatatggacaaggtggaaactttcctgcggattgttcagtgcagatcggtcgagggaagctgcggattt

SEQ ID NO: 10591 - DNA, 651 bp, Artificial Sequence
  derived and/or modified sequence
atggccactggttcgaggacctctctgcttttggcattcggcctcctgtgccttccctggctgcaagaaggctccgcattccctacgattccactttcgagactgttcgataacgccatgttgcgtgcacaccgacttcatcaactggcatttgacacctaccaggagtttgaagaagcgtacatcccgaaggagcaaaagtacagttttctgcaaaatccccagaccagcctctgctttagcgaatccatcccaactcctagcaatcgagaagagacgcaacagaagtcgaacctggagcttcttcgaatatcactcctgcttattcagtcatggttggaacctgttcaatttctccggtctgtatttgcaaactcactggtctacggtgcgtcggattcgaacgtgtatgacctcctgaaggacctcgaggaagggattcagacccttatgggacgcctggaggacgggagcccacgaaccggtcaaatctttaaacagacctactcgaagttcgatacgaattcccataatgatgatgcgctcctgaagaactacgggcttctctactgttttagaaaggatatggacaaagtggagactttcctgagaatcgtgcagtgtaggtcagtggaaggctcctgtggtttt

SEQ ID NO: 10592 - DNA, 651 bp, Artificial Sequence
  derived and/or modified sequence
atggcaactggatccagaacctccctcctcctggcttttgggctcctgtgtctgccatggctgcaagagggaagcgccttcccgactattccgctctcacggctctttgacaacgccatgttgcgggcacacaggcttcaccaacttgccttcgatacttaccaggagttcgaagaagcatacatcccgaaggaacagaagtactccttcctccaaaatccgcaaacctcactttgcttctcggagtcgattccgaccccatccaaccgggaagaaactcagcaaaagagcaatctggaactgttgcgtatctcactgctgcttatccagtcgtggctggaacctgtgcaattcctgcgctctgtattcgcgaactcgctggtctatggagctagcgatagcaatgtctacgatctgctgaaggatctcgaggaaggcatccagaccctgatggggaggctggaggacggaagcccgagaactggacagatcttcaagcagacctactccaaattcgacactaactcccataatgacgacgcccttctgaagaactacggactgttgtactgcttcagaaaagacatggataaggtggagacttttctccgcattgtgcagtgccgctctgtggagggatcctgtggcttc

SEQ ID NO: 10593 - DNA, 651 bp, Artificial Sequence
  derived and/or modified sequence
atggccaccggcagccgtacctctctgctgcttgccttcggcctgttgtgcctcccatggctgcaggagggaagcgccttccctacaatccctctctcccggttgtttgacaacgccatgctaagggcccatcgcctgcatcagctcgctttcgacacatatcaggagtttgaagaggcatacatccctaaggagcaaaagtactccttcctgcaaaacccacagacgagcctctgtttttcggaaagcatccctacaccttccaaccgggaagagacacagcagaagagcaacctcgagctcctaaggatctctttgctgctaattcagtcttggctggagcctgtgcagttcctgcgctccgtgtttgctaacagtttagtctatggagctagcgattcaaacgtgtacgacctgctgaaggatttagaggagggcatccagacgctgatgggacgacttgaggatggctcccctcggaccggccagattttcaagcagacttatagtaagtttgacaccaactctcacaacgacgatgccttgctgaagaattatggactgctgtattgttttagaaaggacatggataaggttgaaacctttctcaggattgttcagtgcaggagcgtggagggcagttgcgggttt

SEQ ID NO: 10594 - DNA, 651 bp, Artificial Sequence
  derived and/or modified sequence
atggcaactggctcccggacatcgctcctgctcgccttcggattactgtgtctgccctggctgcaggagggaagcgcctttccaacaataccactgtccaggctcttcgacaatgccatgcttcgggctcaccgccttcaccaactagctttcgacacctaccaggagtttgaagaggcttacattccaaaagaacagaaatactcctttctgcagaatcctcaaaccagtctgtgtttttcggagtcgattcccacaccatctaatcgggaggagacacaacagaagagcaacctcgagctgctgagaatctcattgctgttgatccaatcatggcttgaaccggtccaattcctgcgatccgtcttcgccaattcacttgtgtacggggcaagcgatagtaacgtctatgatctgctgaaagatctcgaggaagggatacagaccttaatgggtagactggaagatggctcaccccgcaccgggcagattttcaagcagacctattctaagttcgataccaattcccacaatgacgatgccctgctcaaaaactacgggctgctgtattgctttaggaaagacatggataaagtagaaacctttctccgaatcgtgcagtgtaggagcgttgaggggtcttgcgggttt

SEQ ID NO: 10595 - DNA, 651 bp, Artificial Sequence
  derived and/or modified sequence
atggccactgggtctcggacatcactgctcttggcattcggtctcctgtgcttgccctggctccaagaaggatccgcgttccccacgatacccttgagcaggctttttgataacgctatgctaagagctcaccgtctccaccagctggcctttgacacttatcaagaatttgaggaggcgtacataccaaaagaacagaagtacagttttctccagaacccgcaaacgagcttgtgcttttcggagagcatccctacccccagcaatcgcgaggaaactcaacagaagtctaatctggagctcctgcgcatcagtctactcctgatccaaagctggcttgaaccagtgcagtttttgcgcagtgtgtttgccaattccctagtgtacggggcctcagatagcaacgtatatgatctgcttaaggatctggaggagggcattcagaccttaatgggtaggctagaggacggtagcccacgaactggccaaatctttaagcagacgtactcaaagttcgacaccaactctcacaacgatgacgctctgctgaagaattacggtctgctatattgtttcagaaaggacatggacaaggtagagacatttctacggattgtgcagtgtcgaagcgtcgaagggtcctgcggattt

SEQ ID NO: 10596 - DNA, 651 bp, Artificial Sequence
  derived and/or modified sequence
atggccactgggtcaagaacaagtcttctactggccttcgggctcctatgtttaccctggctgcaggaaggatcagcctttcccactatccccctctctcgactattcgacaacgccatgctgagagcccaccgccttcaccagcttgcattcgatacatatcaggaattcgaagaggcctatatcccaaaagagcaaaaatactcattccttcagaacccccagacaagtttatgcttctcagagagtattcctacaccaagtaaccgagaagaaacacagcagaaatccaatctcgaactgttaagaattagtctgctcctcatacagtcctggctggaacctgtgcagttcctgcgaagtgtttttgcaaattccctggtttatggggcctccgatagtaatgtctatgatcttctcaaagatctcgaagagggaatccagactttaatgggaagactcgaagacggatctcctaggactggacagatttttaaacagacttatagtaaatttgatacaaactctcataatgacgatgctcttctgaagaattatgggctcctctattgtttccgaaaagatatggataaggttgaaactttcctcaggattgtgcagtgcaggtccgttgaaggatcttgtgggttc

SEQ ID NO: 10597 - DNA, 651 bp, Artificial Sequence
  derived and/or modified sequence
atggcgacggggagcaggaccagcctccttctggcttttggactcctctgtctgccatggctccaggaaggatcagccttccctactatcccactctctcggctgttcgataacgcgatgctccgcgcccaccgcctgcatcaattggcattcgacacgtaccaagagttcgaagaagcatacattccgaaagaacagaagtactcatttctgcaaaacccacagacctcgctctgcttctccgagagcattccgactccgtccaacagggaagaaacccaacagaaaagcaacctggaattgctgcgcatcagcctgctgttgatccagtcatggcttgagccggtgcagttccttcgatccgtgttcgccaactcgctcgtgtatggagctagcgactccaatgtgtatgatctgcttaaggaccttgaggaaggcattcaaactcttatgggacgtctggaggatggatcaccgcggactggacagatctttaagcagacttactccaagtttgataccaactcccacaatgatgatgccctgctgaagaactacggcctcctttactgcttcagaaaagacatggacaaagttgagacgttcctgagaatcgtccagtgcaggtcggtggaaggctcctgtgggttt

SEQ ID NO: 10598 - DNA, 651 bp, Artificial Sequence
  derived and/or modified sequence
atggccacgggttcgagaaccagcctgctgctggctttcgggctgctgtgccttccctggttgcaggagggatccgcgtttccgactatccccttgtcgcggctctttgacaatgccatgcttagagcgcatagattgcatcagctggcgtttgatacctaccaagagttcgaggaagcatatatccccaaagaacaaaagtactcattcctccagaacccgcagacttcgctctgcttctccgaatcgatccctaccccttccaatagggaagaaacccagcagaaatcgaacctcgaactcctgcggatctctctgcttctcatccaatcatggctggagccggtccagtttctgagatctgtgttcgctaattcactggtctacggcgcgagcgactccaacgtgtacgacctgctgaaagacttggaagaaggcatccaaaccttgatgggtcgcctggaggacggctcacctcggactggccagatcttcaagcaaacctacagcaaattcgacaccaattcgcataacgacgacgcactgctcaagaattacggcctcctgtactgcttcagaaaggatatggacaaggtggaaactttccttcgcatcgtgcagtgtcggagcgtcgaaggaagctgtggcttc

SEQ ID NO: 10599 - DNA, 651 bp, Artificial Sequence
  derived and/or modified sequence
atggcgactgggtcccgcacgtcgctgctgctggcatttggactgctgtgcctgccctggctgcaggaaggatcagccttcccgaccattccgctgtctcggctgttcgacaacgccatgctcagagcccatcgcctgcatcagctggcctttgacacctaccaggaattcgaggaggcgtacatcccaaaggagcagaagtacagtttcctgcagaacccacaaacttcgctgtgtttttccgagtcaatcccgaccccttcaaaccgggaagaaacccaacaaaagtccaatctggaactgctccggatttcccttcttctgatccaatcgtggctggagcccgtgcagtttctgaggagcgtctttgccaattccctcgtgtatggagcatccgactcaaacgtgtacgatctcctgaaggatctggaggagggaatccagacccttatgggcagactcgaggatgggtcgccgcgcaccggacagatcttcaaacagacttacagcaagttcgatactaactcccacaacgacgacgccttgttgaagaactacggattgctgtattgcttccggaaagatatggataaggtcgagactttcctgcgcatcgtacagtgcagaagcgtggagggctcgtgtggtttc

SEQ ID NO: 10600 - DNA, 651 bp, Artificial Sequence
  derived and/or modified sequence
atggctactggatctcgcactagtcttctcctcgcttttggactgttgtgcctcccttggcttcaagaaggatccgcatttcctaccattcctcttagccgcctctttgataatgcaatgcttcgggctcacaggctgcaccaactggcatttgacacataccaagagttcgaggaagcctacattccaaaggaacagaagtacagctttttacagaacccccagacttccctatgcttcagtgagagcattccaacaccatccaatcgcgaggagacccagcagaaaagtaatctagaactgctgaggatcagcctgctgctcatccagtcttggctggaacccgtgcagtttctgaggagcgttttcgcgaactcattagtttacggcgcctctgattccaatgtttacgaccttctgaaagatttggaggaagggattcagacactgatgggccgtctggaggacggcagtcccaggacaggacaaatctttaagcaaacttatagtaagttcgacaccaattcacacaacgatgatgctctgctgaaaaattatggactcttgtactgctttagaaaggatatggataaagtcgagactttcctccgcatcgtgcagtgtaggagcgtggaagggagctgcgggttc

SEQ ID NO: 10601 - DNA, 651 bp, Artificial Sequence
  derived and/or modified sequence
atggcgaccggcagtaggactagcctgttgcttgccttcggccttctctgcctcccctggctgcaggagggctccgcgtttccaaccatccctctgtctcggctgttcgacaatgctatgcttcgcgcacacagacttcaccagttggcttttgatacctatcaggagttcgaagaagcctacataccaaaggagcagaaatattccttcctgcagaatccacagactagcctctgtttcagtgaaagcattccaactccctctaatcgtgaggaaactcagcagaagtccaatctagagcttctccgcattagcctgctcctgatccaatcttggctggaaccggtgcagtttctgcgcagtgtattcgcgaacagtctggtctacggggcttcagacagtaacgtctatgacctgctgaaagatctggaggagggcatacaaacattgatggggcgattagaggatgggagcccacgtactggccaaatctttaaacagacttattccaaatttgatactaacagccacaatgatgatgccctactcaagaactatggactgctgtactgctttcggaaggacatggataaggtcgagacttttctaaggatcgtgcagtgtcgctcagtggaaggttcttgtgggttc

SEQ ID NO: 10602 - DNA, 651 bp, Artificial Sequence
  derived and/or modified sequence
atggcaacagggagcagaacttctctcctcctggcttttggcttgctctgcttaccttggctgcaggaaggcagtgcttttcctacgattcctctgtcacgcttattcgacaatgccatgctaagagcgcacagactccaccaactcgcattcgacacctatcaggagttcgaggaggcatacataccaaaagagcagaagtactcttttctacaaaacccccagacatctctttgcttttcggagtcgattccaaccccctctaaccgggaagaaacccagcagaaaagcaacctggaactgctgcggatctcactactcttgatccagtcttggctagaaccggtgcagttcttgaggtcggtttttgcaaattctttagtttacggggcctcagactcaaatgtatacgatctcctgaaagatcttgaagaagggatccagaccctgatgggcagattggaggatgggtctcctcgaaccggacaaatttttaagcagacatatagcaagtttgacactaattcacacaatgacgacgctctgctgaagaattacggactactctattgctttcggaaagacatggacaaagttgagacattcctgaggattgttcagtgtcgcagcgtggaaggatcctgcggcttc

SEQ ID NO: 10603 - DNA, 651 bp, Artificial Sequence
  derived and/or modified sequence
atggcgacgggctcgcgcacttccctcctccttgccttcggtctgctgtgccttccttggctgcaggaggggtcggcgttccccactatcccactgagcaggttgttcgataacgcgatgctcagggcacacaggttgcatcaactggccttcgacacctaccaagagttcgaagaggcttacatcccgaaagagcaaaagtacagctttctgcagaacccccaaacctccctgtgtttctccgaatccatcccaactccctctaaccgggaggaaactcagcagaagtcgaacctggaactgcttcgcatcagcctgctcctcatccagtcgtggctggagccggtgcagtttcttcggtcagtttttgcaaacagccttgtctacggggcctccgactcgaacgtctacgatctcctcaaggacctggaagaaggcatccagactctgatgggaaggcttgaggacgggtccccccgcaccggacagattttcaagcagacctacagcaagtttgacactaattcccacaacgacgacgcccttctcaagaattacggactgctgtactgcttccgcaaagacatggacaaggtggaaactttcctccgcatcgtgcaatgcagatcggtggaaggttcctgcggcttc

SEQ ID NO: 10604 - DNA, 651 bp, Artificial Sequence
  derived and/or modified sequence
atggctactggctcccggactagccttctcctcgcgttcgggcttttgtgtctgccatggcttcaggagggatccgccttccccacgattcctctgtcgaggttgttcgataacgctatgctgcgggcacatcggctgcaccaactggcattcgacacataccaggagttcgaggaggcttacattcctaaggaacagaagtacagttttctgcaaaatccgcagacctcactctgcttcagcgaatctattccgaccccctctaatagggaggagacacagcagaagagcaacctcgagctcctgcgaatctccctcctgttgattcagtcatggctcgaaccggtccagtttcttcggtccgttttcgccaacagcctggtctacggagcctccgattccaatgtgtatgatctcctaaaggatttggaggaaggaattcagaccctcatgggcaggctcgaggacgggagccctcggactgggcagatttttaaacagacatattcaaaattcgatactaattcccacaatgacgacgcgctgctcaagaactacggcctcttatattgcttcaggaaagatatggacaaagtggagactttccttaggattgtccagtgcaggtctgtggagggctcgtgcggcttc

SEQ ID NO: 10605 - DNA, 651 bp, Artificial Sequence
  derived and/or modified sequence
atggctaccgggtcgcgcacctctctgttgctcgccttcgggctcctgtgcctgccgtggctccaagagggatcggccttccctactattccgttgagcaggctgttcgataatgctatgctccgggcgcaccggctgcatcagttggcgtttgacacctaccaggaattcgaagaggcctacatcccgaaggaacaaaagtactccttcctccagaaccctcaaacctccctgtgcttttctgaaagcatacctaccccatccaaccgcgaggaaactcaacagaagtcgaatctggaattgctgagaatctccctgcttctcatccagagctggctcgagccggtgcaatttctccgctcagtgttcgcgaactcgctggtgtacggagcatcggacagcaacgtgtatgaccttctcaaggacttggaagaaggaatccagactctgatgggtcggctcgaggacggctcaccaagaaccggccagatcttcaaacagacttactctaagttcgacactaattcacacaacgatgatgccttgctgaaaaactacggccttctgtactgctttcgcaaggacatggataaagtcgaaacgttcctcagaatcgttcagtgtagatccgtcgagggttcttgtggcttt

SEQ ID NO: 10606 - DNA, 651 bp, Artificial Sequence
  derived and/or modified sequence
atggccacgggctcccgcactagccttttgctggccttcgggctgctatgcttgccctggctgcaggaagggagcgccttccccacaatccctttgagcaggctttttgataacgcgatgttgagggcacacagattgcaccagttggcatttgatacgtatcaagagtttgaggaggcctacattcccaaggagcaaaaatattcatttctccagaatcctcagacctccttgtgcttctctgagtccattccgacccctagcaatagggaagaaacccaacagaagtcaaaccttgagttgctccgtatatctcttctgctcatccagtcttggctcgaaccagtgcagtttctgcggtccgttttcgccaatagcctcgtgtatggcgcgtccgacagcaacgtgtatgaccttctaaaggatcttgaagagggaatccagacgttaatgggccgcctagaagacgggagtccacgaactggtcaaatcttcaaacagacttatagcaagtttgatacaaacagtcataatgatgacgcccttctcaagaactacggactactgtactgctttaggaaggatatggataaggtagagaccttcctacgcatcgttcaatgccgctctgtggaagggtcctgcggcttt

SEQ ID NO: 10607 - DNA, 651 bp, Artificial Sequence
  derived and/or modified sequence
atggccactggatccaggacctcactgctgctggcctttggtctgctttgcctgccatggctgcaagagggttcggcgtttccaaccattcctctctcacgcctgtttgacaacgcaatgttgcgcgcgcatcggctgcatcagctggcgtttgacacgtatcaagagttcgaagaagcctacattccaaaggaacaaaagtacagctttctgcaaaaccctcaaacttccctttgtttttctgaatcgataccgactccctcaaacagggaagagacgcagcagaaatcgaaccttgaacttcttcgtatctcgctgctcttgatccaatcctggctcgaaccagtccaattcctcagatccgtgtttgcgaactcacttgtctacggagcctccgattcaaacgtgtacgatctccttaaagacttggaagagggtattcagactcttatgggacgccttgaggatggttcacctaggaccgggcagatctttaagcaaacctacagcaagttcgacactaactcccataacgacgatgcactgctgaagaattacggacttctgtactgctttagaaaggatatggataaagtggaaacgttcctcaggatcgtccagtgtagatcagtcgaaggttcgtgtgggttt

SEQ ID NO: 10608 - DNA, 651 bp, Artificial Sequence
  derived and/or modified sequence
atggctaccggaagcaggacctctctgctcctggcatttgggcttctttgtttgccttggcttcaagagggttccgcatttcctaccattccgcttagccgcttgttcgataacgcgatgcttcgagctcatcgactccatcaactggcattcgacacctaccaagaatttgaagaagcatacattccaaaggaacagaagtactcatttctccaaaatccacagacttcactgtgtttttcagagagcatcccaactccctcgaacagggaggaaactcagcaaaaatcaaatctcgagctgcttaggatttccctccttcttatccaatcctggctggaacctgtgcagttccttcggtctgtgtttgcaaactcgctggtctacggagcgtcggactctaacgtgtacgatctgctcaaggatctggaagaagggattcaaactctcatgggacgattggaagatgggtccccgcggaccggacaaatcttcaagcagacgtactcgaaattcgacaccaattcccacaatgatgatgcccttcttaagaactacggcctcctgtattgttttcgcaaggatatggacaaagtggagacttttctcagaatcgttcaatgccgctcggtcgagggaagctgcggcttt

SEQ ID NO: 10609 - DNA, 651 bp, Artificial Sequence
  derived and/or modified sequence
atggcgacgggttcgcgtacctccctcctcctggccttcggccttctgtgcctgccatggctccaggagggatcggcattcccgaccattccactctcgcggctgttcgacaatgccatgctccgcgctcaccgcctgcaccagctggccttcgatacttaccaagaattcgaggaggcctacatccctaaggaacagaaatacagcttcctccagaatccccaaacctcactgtgtttctcagagagcattccaacgccttcgaaccgcgaggagactcaacagaagtcaaacttggagctgttgcggatctcgctgctgctcatccaatcgtggctcgaaccagtgcaattcctgcggtccgtgttcgcgaactccctggtgtacggagcatcagattccaatgtgtacgacctccttaaagacttggaggaaggtatccagacccttatgggaagattggaggacggcagcccgcgcactggacagatattcaagcagacctacagcaaattcgataccaattcgcacaatgatgacgcgctgctgaaaaactacggactgctgtactgtttccgaaaagatatggacaaggtcgaaaccttcctgaggattgtccagtgcagatcagtggagggatcctgcggcttc

SEQ ID NO: 10610 - DNA, 651 bp, Artificial Sequence
  derived and/or modified sequence
atggctaccggcagtagaaccagcctgctcctcgccttcgggctgctctgtctgccttggctccaagaaggttccgcatttcctactatcccgcttagtagactgttcgataatgctatgttacgggctcatagattgcatcagttggcatttgacacgtatcaggaatttgaagaggcttacatcccgaaagagcagaagtactcatttctgcagaacccacagaccagtttgtgcttcagcgagtcaatccccacaccctccaaccgcgaggagacgcagcagaaaagcaacctggagcttcttagaatttcgctcctgctgattcagagctggctggagcctgtacaattccttagatctgtgttcgccaacagtctggtgtacggcgcttctgattccaacgtatatgatcttctaaaagacctggaggaggggattcagacgctgatgggtcggctcgaggatggttccccacggaccggtcagatctttaagcagacatacagcaagttcgacactaacagccataacgatgatgctttactgaagaattacggactgctctattgctttaggaaggatatggacaaagtggaaacctttctcaggatcgtgcagtgtagaagcgtggaagggtcctgtggattc

SEQ ID NO: 10611 - DNA, 651 bp, Artificial Sequence
  derived and/or modified sequence
atggcaaccggatctcgcacttcattgttgctggctttcgggctcctctgcctgccctggcttcaagaaggatctgcattccctaccattcccttgtcccgtcttttcgataatgccatgctgcgagcacaccgactgcaccagctggcttttgatacctaccaggagtttgaggaggcgtatatcccaaaggagcagaagtacagtttcttacaaaatcctcagacctcgttgtgtttctctgaatcaataccaaccccaagcaacagggaggagacacagcagaagtccaatcttgaacttctgcggatatccctcctgctgatccaaagctggctggaaccagtgcaatttctgagatctgtgttcgctaacagtcttgtttatggagcctccgacagcaacgtttacgacctgctgaaggacctggaagaggggatccagacgttaatgggaaggcttgaggatggatcccctcgaacaggccaaatttttaagcaaacttactctaagtttgataccaactctcacaatgatgacgctctcctgaagaattatggtttgctgtattgcttcagaaaagacatggataaagtggagacatttttgcgcattgtgcagtgccggagcgtggagggaagctgtggattc

SEQ ID NO: 10612 - DNA, 651 bp, Artificial Sequence
  derived and/or modified sequence
atggccactggcagcagaacttcactattgcttgctttcgggctgctttgtttgccctggcttcaagagggctctgcgtttcccacaatccctctcagcagattgtttgataacgccatgctgagagcccaccgtcttcaccagttggcattcgacacgtaccaggagttcgaggaggcttacatccctaaagagcaaaaatacagcttcctgcagaatcctcaaacaagcctgtgcttttcagaaagtatcccaacacccagtaatagagaagagactcagcagaagtctaacctagaactgctgagaataagcctgctcctcatccagtcttggctggaaccagttcagttcctgaggtctgtgttcgccaactccctagtctatggggcatcagacagcaatgtgtatgaccttctgaaggatttggaggagggcattcagactttaatggggcggttggaggatggcagtccaagaacaggacagattttcaagcaaacttactcgaaatttgacacgaacagtcataacgatgacgctctgttgaagaattacgggctgctgtattgctttcggaaagatatggataaggtggagactttcctgcggatcgtccaatgtcgcagcgtcgaaggcagttgcggcttc

SEQ ID NO: 10613 - DNA, 651 bp, Artificial Sequence
  derived and/or modified sequence
atggctactggatctagaacgagtttacttttggcatttggacttttatgtttaccatggcttcaagaaggatctgcttttccaacgataccattatcaagacttttcgacaatgctatgcttagagcacatagattgcatcaacttgcatttgatacatatcaagaatttgaagaagcttatattcctaaagaacaaaaatatagttttttacaaaacccacaaacatctctttgtttctcagaatctattcctacaccatcaaacagagaagagactcaacaaaaatctaatcttgaattacttagaatttctcttttattaattcaatcatggttagaacctgttcaatttcttagaagcgtcttcgcaaatagtttagtatatggagcaagtgattctaatgtttatgatttacttaaggaccttgaagagggtattcaaactttaatgggacgattagaagatggaagtccaagaacaggacaaatttttaaacaaacatatagtaaatttgatactaactctcataatgatgatgcattgttaaaaaactatggattactttattgtttcagaaaagatatggataaagttgaaacatttcttagaattgttcaatgtagatctgttgagggtagttgcggattc

SEQ ID NO: 10614 - DNA, 651 bp, Artificial Sequence
  derived and/or modified sequence
atggctacgggctcccgtacgagtctgctactggcgtttggtttgttgtgtctgccctggttgcaggaaggctcggccttcccaacgatccctctctcccgactgttcgataatgccatgctgcgcgcccaccgccttcaccaacttgccttcgacacatatcaggagttcgaggaggcctacatccctaaggaacagaagtactccttccttcaaaacccccagacttccctgtgctttagcgagtctatccccactccgagtaaccgtgaggagacccagcagaaatcgaacctagaactcctccgcatcagcctcttgttgattcagagctggctggagcccgtccagtttctgcgctccgtcttcgcgaattcgttggtctacggagccagcgactcgaacgtgtacgacctcctgaaggacttggaggagggcattcaaacactcatgggacgtttggaggatggatccccccgcaccggccaaatctttaaacagacctacagcaagtttgataccaactcccataatgacgatgccttgctgaaaaactacggccttctatattgctttagaaaggacatggataaagtggagaccttccttcgtatcgtccagtgccgttctgtagagggttcatgtggcttc

SEQ ID NO: 10615 - DNA, 651 bp, Artificial Sequence
  derived and/or modified sequence
atggccaccggttcccggacgagcctcttgttggcattcggacttctctgcctgccgtggctgcaggagggatcagcctttcctaccatcccattgtcacggctgttcgataatgccatgctccgcgcacatagactgcatcaactggctttcgacacgtaccaggaattcgaggaggcctacatcccgaaggaacagaagtactccttcctccagaatccccagacctccctgtgtttctcagagtccatcccgactccatcgaatagagaggaaactcagcaaaaatccaacttggaactcctccggatctcccttctgctcatccagtcctggttggaaccggtgcaattcctgcggagcgttttcgcgaattcgctggtgtacggggcttcggacagcaacgtctatgacctgctcaaggacctcgaggaaggcattcaaactctgatgggtcgcctggaagatggaagccctcggaccggtcagatcttcaagcagacttattctaagttcgacaccaactcgcataacgatgatgctctgcttaagaattacggactgctgtactgcttccgcaaggatatggataaggtcgaaactttcttgcgcatcgtccagtgccgctcagttgagggatcctgcggattt

SEQ ID NO: 10616 - DNA, 651 bp, Artificial Sequence
  derived and/or modified sequence
atggccaccggctcacgtacctcgttgctcctggctttcggactgttgtgtttgccgtggctacaagaagggtctgcttttccgaccattcccctgagtaggctgtttgataacgcaatgttgcgggcgcatagattgcatcagcttgcctttgacacctatcaagagtttgaggaagcatacatccctaaggaacaaaagtattcatttctacaaaatcctcaaacaagcttatgcttttccgaaagtattcctacaccgtccaacagagaagaaacccagcaaaagtctaatctggaattattaagaatttctctgttactgatccaatcctggcttgaaccggtgcagttcttaagatctgtgttcgcgaattcgctcgtttatggagcttcggattccaatgtttacgatcttttgaaagacctggaagaaggcattcagacgcttatgggccgtctcgaagatggaagcccgcgaacgggccagatctttaaacaaacttacagcaagtttgacacgaattcacataacgatgatgcgctacttaaaaattacggtttgttgtattgctttaggaaagatatggacaaagttgaaacgtttctccgtatcgtacagtgcagatcggtggaaggaagttgcggattt

SEQ ID NO: 10617 - DNA, 651 bp, Artificial Sequence
  derived and/or modified sequence
atggcaaccggatcaagaacctctcttctcctggcatttggactcctgtgtctgccctggctgcaagagggcagcgccttcccgaccattccactttccaggctgtttgacaatgccatgctgcgcgcacatagacttcatcaactcgccttcgatacctaccaggagtttgaggaagcgtacattccaaaggagcaaaagtactcatttcttcagaacccacagacctcactgtgttttagcgaaagcatcccaactcctagcaatcgggaggaaactcaacaaaagtcgaatctggagctcttgcggattagcctgcttttgattcaatcctggttggaacccgtgcagttcctgcggagcgtctttgcgaactcgttggtgtacggagcatcggactccaacgtctacgacctgcttaaagatctggaagagggcatacagaccttgatggggcgtctggaagatgggtcgcccaggaccggtcagattttcaaacagacctacagcaaatttgacaccaactcgcataatgatgatgcacttcttaagaactacggacttctctactgcttccggaaagacatggataaggtggaaacttttctgcggattgtgcagtgtcgcagcgtggaaggttcttgcgggttt

SEQ ID NO: 10618 - DNA, 651 bp, Artificial Sequence
  derived and/or modified sequence
atggccacaggtagtcgaacttccctgctactggcgttcggtctgctgtgtctcccttggctgcaagagggtagcgccttcccgaccataccgctctcgcggctcttcgataatgccatgttgagagcacaccgactccaccagcttgcatttgacacgtaccaagagttcgaagaggcgtacatcccgaaggagcagaaatattcgttccttcaaaatccccagacctctctctgtttctccgagagtatccccaccccgtcaaatcgtgaggaaacgcagcagaagagcaatctcgagctcttgcgaatcagcctgctactgatccagagttggttggagccagtccagttcctgagatctgtattcgcaaattcgttggtctatggcgcctcagacagcaatgtgtacgatcttctcaaggatctggaggagggcatccagacactcatgggcaggctcgaggatggctccccgcggacaggacagattttcaagcaaacttacagcaaattcgacaccaactcgcacaatgatgacgctcttttgaagaattatggcctgctatactgttttcggaaagacatggacaaggtagaaaccttcctgaggattgtgcaatgccgctcggtggagggctcctgcggtttc

SEQ ID NO: 10619 - DNA, 651 bp, Artificial Sequence
  derived and/or modified sequence
atggcgaccggcagccggacctcgctgctgctggccttcggactcttgtgccttccctggttgcaagaaggatcagcatttcctaccatcccactgagccgactgttcgacaatgcaatgcttagggcacatcggcttcaccaattggccttcgacacctaccaagagtttgaggaggcgtacatccctaaagagcaaaagtattcctttctgcagaacccccagacgtcactttgtttttcggagagcattcctactccttccaatcgtgaagaaactcaacagaagagcaacctggagctgttgcggattagcctcctgctgatccagtcctggcttgaaccagtccagtttctgcgatccgtgtttgcaaattcgctggtgtacggagcatccgatagcaacgtctacgatctgctcaaggacctggaagaaggaattcagaccctgatgggcagactcgaagatggatcacctagaacgggccagatcttcaaacaaacttactccaagtttgataccaactcccataatgatgatgccctgcttaagaattacggcctcctctactgtttccgcaaggacatggataaggtggagacgtttctccgcattgtccagtgccggtcggtggaaggatcatgtggtttt

SEQ ID NO: 10620 - DNA, 651 bp, Artificial Sequence
  derived and/or modified sequence
atggccaccggctcccgaacgtccttgttgcttgcctttggccttctttgccttccgtggcttcaggaaggttcagcgtttcctaccatcccactttcacgtctctttgacaatgcaatgcttcgcgcacatcgactccatcaactcgcgttcgacacttaccaagagtttgaggaagcatacattccaaaggagcaaaagtacagctttctgcaaaacccacaaacctcactttgtttttccgaatcaattccgacgccttcaaacagagaagaaactcagcagaaaagcaatctggaactgctgcgtatttccttgcttttgattcagtcgtggttggaacctgtccaattcttgcggagcgtgtttgcgaactcgttggtgtatggtgcctcggactcgaacgtgtacgatctcctgaaagatctggaagaagggattcaaactctgatgggaaggctggaggatggctcgccgcgtaccggacaaatcttcaagcagacctacagcaaattcgatacgaactcccacaacgatgacgcactgctgaagaattacggattgctctactgttttagaaaggatatggataaggtcgaaacttttctgcgaatcgtgcaatgcagaagcgtcgaagggtcgtgtggattt

SEQ ID NO: 10621 - DNA, 651 bp, Artificial Sequence
  derived and/or modified sequence
atggccactggctccagaacaagcctgttgttggcattcggcctgctatgcctgccttggttacaagaaggaagtgccttccctacaatccccctttcgcggttgtttgacaacgctatgcttcgcgcacacaggttacaccagctggcgttcgacacctatcaggagtttgaggaggcctacatccccaaggagcagaagtactctttcctgcagaaccctcagaccagcctgtgtttcagcgagagcatccccactccttctaatcgagaggaaacacaacaaaagtccaatcttgaactgctcagaatctctctactcttgatccaaagctggctggagcctgttcagtttctccgatcagtcttcgccaattcactcgtttatggggccagtgactctaacgtttatgatctgcttaaggatctcgaagagggcattcagactctgatgggaaggctggaggacggaagcccccgaacaggtcagatattcaagcaaacctactctaagtttgatactaactctcacaatgatgacgccctcctcaaaaactacgggctgctgtactgcttccgcaaggatatggataaagtggaaacatttctcagaatagtgcagtgtagaagcgtggagggcagttgtggtttc

SEQ ID NO: 10622 - DNA, 651 bp, Artificial Sequence
  derived and/or modified sequence
atggctactgggagcagaacaagcctactgcttgcttttggattgctgtgtctgccatggctccaggagggctcagcctttccaacgatccctctttctagactgttcgataatgccatgctgagagcgcatagactgcatcagctggcatttgacacctaccaagagtttgaggaggcatacatccctaaagagcaaaagtatagctttctccagaacccacagacatccctctgcttttctgaatccatcccgactcctagcaacagggaggaaacccagcagaagagtaacttagaactccttagaataagtctactcctgattcagagctggctggagcccgtccagtttctcaggtctgtttttgccaacagcctggtgtatggagctagcgatagcaatgtgtatgacctcctgaaggatctcgaagaggggatccagaccctcatgggaaggctggaggacggcagcccaagaacaggccagatatttaagcagacttactcaaaattcgacacgaatagccacaacgacgatgcgcttttaaagaactacggactactctactgcttcagaaaagatatggacaaggtcgagacttttttacggatagtgcagtgtaggagcgtggaaggcagttgcggtttt

SEQ ID NO: 10623 - DNA, 651 bp, Artificial Sequence
  derived and/or modified sequence
atggcaaccgggagccggactagcctacttctcgcatttgggttattatgcttgccttggctgcaggagggtagtgctttccctacaattcccctgagccgtcttttcgataatgctatgcttagggcacatcggctccatcagttggcctttgatacctatcaggaatttgaagaagcatatatccctaaggaacagaagtatagttttctgcagaaccctcagacctctctgtgcttttcagaatccataccaaccccaagcaaccgagaagaaacacagcagaaaagcaatctggagctcctgaggatctctctcctgctgatacagagctggcttgagcccgttcagttcctgcggagcgtgtttgccaacagcctggtttacggcgcctccgattccaatgtatatgacctgttgaaagacctggaggagggcatacaaacactgatgggaagactggaagatggaagcccgcggacgggacaaatttttaaacaaacttactccaagttcgacactaattctcataatgacgatgcgctcctgaagaactacggactgctatattgtttcaggaaggatatggataaagtagagacctttttaagaatcgtccagtgccgcagcgtcgaagggtcatgtggattt

SEQ ID NO: 10624 - DNA, 651 bp, Artificial Sequence
  derived and/or modified sequence
atggccactgggtcccgaacctctttactattggctttcgggttgctgtgcctgccgtggctccaggagggatctgcatttcctaccattcccctctccaggttgtttgataatgcaatgctcagagcccacaggctgcatcaattggcgttcgacacttaccaggaatttgaggaagcttacataccaaaggagcaaaaatattcatttttacaaaaccctcaaacttctttgtgttttagcgaatcaattccgacaccttctaatcgggaagagacacagcagaagagcaacctggaactcctccgcatctcactgctcctgatccagtcctggctggaaccagttcagttcctcaggagcgtgtttgccaactcactcgtttatggggcctcagattccaatgtctacgatcttcttaaagacctggaggaggggatacaaaccctaatgggaagactggaagacggctcaccaagaacgggacagatcttcaaacagacgtatagcaagtttgacacaaacagccacaatgatgacgctctgttaaaaaattatgggctcctgtattgttttaggaaagatatggataaggtggagacttttctgcgaatcgtacagtgtcgaagtgttgagggctcttgtgggttt

SEQ ID NO: 10625 - DNA, 651 bp, Artificial Sequence
  derived and/or modified sequence
atggccaccggctctaggacttcattgctactggcattcggactgctgtgtttgccttggctgcaggagggtagcgcatttcccacgatcccgctgagcagactgttcgacaatgctatgctgagggcacacaggttacaccagctggcattcgatacctaccaagaattcgaggaggcttacatacctaaagaacaaaagtactcattcctgcagaatccgcagacaagcctttgcttttctgagtcaattccgaccccctcaaatcgtgaggagacccagcagaaaagcaatctggaacttctgcggataagcctgctgctgattcagagttggttggagcctgtgcagttcctgcgcagcgtctttgcaaatagtctggtgtatggcgctagtgattcaaacgtgtacgacttactgaaagacctggaggaagggatccagaccctgatgggccgtctggaggacggctccccaagaactggtcagatctttaaacaaacctactctaagttcgataccaactcacacaacgacgacgccttgctcaagaattacggactcctgtactgctttaggaaggatatggataaggtggagacttttctgcggatagtccagtgcaggagcgttgagggatcatgcgggttt

SEQ ID NO: 10626 - DNA, 651 bp, Artificial Sequence
  derived and/or modified sequence
atggcaaccggttcacgaacctcattgcttctcgcctttggactgctgtgccttccatggctgcaagaaggaagcgcatttccaaccatccctctttcgcggttgtttgataacgcaatgctgcgtgctcatagactccatcagctcgcatttgacacttaccaggaatttgaagaggcgtacattccaaaagaacagaagtactctttcctgcaaaatcctcagacctccctgtgcttctcggaatcaatccccactcccagcaaccgggaggagactcaacaaaaatcaaacctcgaacttctgcgtatctccctgctccttatacaatcctggttggaaccagtgcaatttcttcggtcggtgtttgccaactcgctggtgtacggcgcgagcgactcaaacgtttacgatcttcttaaggatctcgaagaaggtattcagactctgatgggtaggctcgaggatggttcaccaagaaccggtcagatattcaaacaaacttactcgaaatttgataccaattcccataatgatgacgcacttttgaaaaactacggccttctctactgttttcgcaaggacatggataaagtggagacttttctgcgaatcgtccagtgccgctcggtcgagggctcgtgtggattt

SEQ ID NO: 10627 - DNA, 651 bp, Artificial Sequence
  derived and/or modified sequence
atggcaaccggatcgagaacgtcgctgctgcttgcatttggtctgctctgccttccttggctccaagaaggtagcgcatttcctaccattcccctgtcaagactgtttgacaatgccatgctccgagcccaccgcctgcatcaacttgcatttgatacctaccaggaatttgaagaagcgtacattcctaaagagcagaagtactcatttctccaaaatccacagacttccttgtgtttttcagaaagcataccaaccccttctaatagggaagaaactcagcagaagtcgaacctggagttgctccggatctcgctgcttctgatccagtcatggcttgagcccgtgcaatttctgcggtcggtctttgcaaattcactggtgtacggggcctcggatagcaacgtgtacgatctgctgaaggatttggaagaaggaatacaaacgctcatgggccgtctggaagatggctcgcctagaaccggtcaaatcttcaagcagacttactctaagtttgacactaattcacataacgatgatgccctcttgaagaactacggactgctctattgtttccgaaaagatatggataaggtggaaacttttctgcgcattgttcagtgtcgatccgtcgaggggtcctgtggcttc

SEQ ID NO: 10628 - DNA, 651 bp, Artificial Sequence
  derived and/or modified sequence
atggccaccggtagccggacgtcgttgctgctcgcatttgggctgttgtgtctgccctggcttcaggagggatcggccttccctaccatcccactctcgagacttttcgacaacgccatgctgcgagcacataggttgcatcagcttgcattcgatacttaccaagaatttgaagaagcctacataccaaaggagcaaaagtactcgtttctgcaaaaccctcagacctccctgtgttttagcgagagcattcccaccccctccaacagggaggagactcaacaaaagagcaacttggaactcctccgcatttccctcctgcttattcagtcatggctggaacccgtccaatttcttaggtcagtatttgccaattcgttggtgtacggcgcaagcgactccaacgtgtacgatctgcttaaagacttggaggaagggattcaaactcttatgggacgacttgaagatgggagcccgcgcaccggacagatattcaagcagacctactcaaagtttgatactaattcgcacaatgatgatgcactccttaagaactacggcctgctgtattgcttcagaaaagacatggataaagttgaaacgtttcttcgcatcgtgcaatgccggtccgtggagggttcatgtggtttt

SEQ ID NO: 10629 - DNA, 651 bp, Artificial Sequence
  derived and/or modified sequence
atggctactggaagtaggacatctctcctcctggcctttggtctgctctgcttgccctggttgcaggaaggatctgcattcccaactatcccgctgagcaggcttttcgataacgcaatgctgagggcccacaggctgcatcagctggcgtttgatacctaccaagagttcgaggaggcctacatccccaaagagcagaagtactcttttctccaaaaccctcagacaagcttgtgtttctcagagagtatcccgaccccatccaacagagaggaaactcaacagaagagcaacttggagctgctcagaatatcactgttgttgatccagtcatggttggaacccgtccagtttttgaggtcagtgttcgcgaatagtctggtgtacggcgcctctgattctaacgtgtacgatctgctgaaggacttggaagagggcatccaaacactcatgggccgccttgaggacggctcacctagaacaggtcagatcttcaaacagacctacagcaaatttgacaccaacagccacaacgatgacgcactccttaaaaactacggactgttgtattgctttcgcaaggatatggataaagtagagaccttcctcaggatcgtacagtgccgctccgtggagggtagctgtggtttc

SEQ ID NO: 10630 - DNA, 651 bp, Artificial Sequence
  derived and/or modified sequence
atggctactggttccagaacctctctgttgctggccttcggcctgctttgcctcccgtggctccaggagggctcagctttcccgaccatcccgctttcacgtcttttcgacaatgcaatgctccgcgcacacagattgcaccagctcgcgttcgacacctatcaagaattcgaagaggcctacatccctaaggaacaaaagtactcgttcctccagaacccacagaccagcctgtgcttctccgaaagcatccccaccccatcgaaccgcgaggaaactcaacaaaaatccaacctggagctgctgcggattagtttgctgcttatccaatcctggctggagccagttcaattccttcggagcgtgtttgctaacagtctggtctacggggccagcgattcgaacgtgtacgacttgctgaaggatctcgaggagggaatccagaccctcatgggacgtctggaagatggttcaccgaggactggacaaatctttaagcagacgtactcgaaatttgacactaattcgcataatgacgatgcgctcctcaagaactacgggctgctgtactgcttccgcaaggacatggacaaagtcgaaactttcctcaggatagtgcagtgccgatcagtggaaggatcctgtggcttt

SEQ ID NO: 10631 - DNA, 651 bp, Artificial Sequence
  derived and/or modified sequence
atggccaccggaagccgcacatccctgcttttggcctttggacttctgtgcctcccctggctacaggaaggaagcgcgttccctaccattcctctttcccgtttgtttgataatgccatgctacgcgcccatcgactccaccaacttgccttcgacacataccaagaatttgaggaggcatacatccctaaggagcagaagtattccttcctgcagaatccccagacttcactgtgcttttctgaatcaatccccacacccagtaatcgggaggaaactcaacagaaatccaacttggagctgctgaggatctccctcctgctgatccaaagttggttggagccagtccaatttttgcggtctgtgtttgctaactccctggtgtatggggcttcagactcgaatgtatatgatctactgaaagatctggaggagggaattcaaaccctgatgggtagattggaggatgggagccctagaactgggcaaatcttcaagcagacatactccaaatttgacaccaactcacataatgatgatgcccttcttaagaactacgggcttctgtattgtttccggaaggatatggataaggtggagacattcttaagaatagttcagtgtaggtccgtggagggcagttgcgggttt

SEQ ID NO: 10632 - DNA, 651 bp, Artificial Sequence
  derived and/or modified sequence
atggcaacaggcagtaggactagtctgctgctcgccttcgggctcctctgtcttccgtggttacaggagggcagtgcgttccccactattccactctctcggctgttcgacaatgccatgcttagggcccatcgattgcaccagctggctttcgacacctatcaggagtttgaagaggcttatattcctaaggagcagaagtattccttcctgcagaatccacagacaagtttatgcttttcagagagtatccctacacctagcaaccgggaagagactcagcaaaaatccaacttggagctgctgcgcattagcctgctgcttatacaaagctggttagaacccgtacagttcctgcgctcagtgtttgccaactcccttgtgtacggcgctagcgactctaatgtgtacgatcttctgaaagacttggaggaggggattcaaaccctgatgggccgcctggaggacggtagccctaggacagggcaaattttcaagcagacttacagcaaatttgacactaactctcacaacgacgacgcactcctcaagaattacggtctactttactgttttagaaaggatatggataaggtggagaccttcctgcgtatcgttcagtgtaggagcgtggagggcagttgcggattt

SEQ ID NO: 10633 - DNA, 651 bp, Artificial Sequence
  derived and/or modified sequence
atggccactggaagcagaacctccctgctcctcgcgtttggactgttgtgtctgccatggctccaagagggttcagcatttccaacgattcctctgtcccggctctttgacaatgcaatgcttcgagcacatagactgcatcaactcgcatttgatacttaccaggaatttgaagaggcatacattcctaaagagcaaaagtactcctttctgcagaacccacaaacttcactttgtttctcggagtcaattcccaccccttcgaaccgggaagaaacccaacaaaagtctaacctggagctgctgaggatttccctcctcctcatacagtcgtggctggagcccgtgcagtttcttcgaagcgtgttcgcaaactcgctcgtgtacggagcgtccgattcgaacgtgtacgaccttcttaaagatttggaggaaggaatacaaaccctgatgggtagactcgaagatgggtcaccaagaactggtcagattttcaagcagacctactcgaagtttgatactaactcccataacgatgacgcacttttgaaaaactacggactgctctactgtttcaggaaggacatggacaaggtggagacttttctgagaattgtgcaatgtaggtcggtggagggtagctgcggcttt

SEQ ID NO: 10634 - DNA, 651 bp, Artificial Sequence
  derived and/or modified sequence
atggccacagggagcagaacctcgctgctactcgcttttggactactatgcctcccttggcttcaggagggaagtgcgttccctacaattcctctgagccggctatttgataatgctatgctgcgggctcacagactgcaccaactggctttcgacacctaccaggaatttgaggaagcgtacattcctaaggaacaaaaatattcatttctgcagaaccctcagacgtccttatgcttcagtgagtcaatacccacaccgtctaacagggaggagacccagcagaagtctaatctggaactactgagaatttcactgctactcatccagagttggctcgagcctgtgcaattcctgagatccgtgtttgccaattccttggtttatggggcctctgattcaaacgtatacgatctcctgaaagacctagaggaaggcatccagacacttatgggcagactcgaggatgggtcccctaggaccggacaaatctttaaacagacttatagcaagttcgatacaaactcgcataatgatgacgctctccttaagaactatggattgttgtactgtttcaggaaggatatggataaagttgagaccttcttgcgcattgtgcagtgtagatcagtggaagggtcttgtggcttc

SEQ ID NO: 10635 - DNA, 651 bp, Artificial Sequence
  derived and/or modified sequence
atggccaccggcagccgcacatctttgctgctcgccttcggactgctgtgcctgccctggttgcaggaaggcagtgcgtttccgacaattcctctctcccgcctgtttgataacgccatgcttcgcgctcaccgactccaccagttggcgtttgatacttaccaggaattcgaggaggcatatattccaaaggaacaaaaatactcctttcttcagaatccacagacctccctgtgcttctccgagagcatccccaccccttcaaaccgcgaggaaacccaacaaaaatctaacctggaactgttgcgcatcagcttgttgctcattcaaagttggttggaacccgtccagtttctgcggtctgtgtttgcgaactccttggtgtatggcgccagcgacagcaatgtgtacgacctgctgaaggacttggaggagggcattcagactctgatggggcgccttgaggacggaagtccaaggaccggccagattttcaaacagacatacagtaaattcgacactaattcacacaatgatgacgctctcttgaaaaactacggacttttgtactgctttagaaaggatatggacaaggtggagacgtttctgagaatagtgcagtgcaggtcagtcgaaggctcctgcgggttt

SEQ ID NO: 10636 - DNA, 651 bp, Artificial Sequence
  derived and/or modified sequence
atggccactggtagcaggacttctctgctcctcgccttcggcttgctgtgcctgccttggcttcaagaaggatcagcattcccaaccattccactgtctcgtttgttcgacaacgctatgctgcgtgcacatcgcctgcaccagttggctttcgacacttaccaagaatttgaggaggcttacatcccaaaagagcagaagtactcttttctgcaaaatccccagacctctctgtgcttttctgaatcaatcccaactccctccaacagggaagaaactcaacaaaaaagtaacctggaattgctcaggatatctctcctgctgattcaaagctggctcgagccagtacaattcctccgctccgttttcgccaatagtctggtctatggcgcatccgacagcaacgtgtatgaccttttgaaggatctcgaagagggcattcaaaccctgatgggccgccttgaggacggatctccaaggacaggtcagatctttaagcaaacttattccaagttcgacaccaacagccataacgacgatgccctcctcaagaactacggactgctgtattgtttccgtaaagatatggacaaagttgagacattccttcgcatcgtacaatgtaggtcagtggagggcagctgcggtttt

SEQ ID NO: 10637 - DNA, 651 bp, Artificial Sequence
  derived and/or modified sequence
atggccaccgggagccgcacctcgttactgctagcattcggccttctgtgcctgccttggctccaggagggcagtgcattccccaccatacccctgagtcgcctcttcgataatgccatgctgcgggcccaccggctgcatcagctggcatttgatacatatcaagagttcgaagaggcgtacatcccaaaggagcagaagtatagctttttacagaatccccagacctctctgtgttttagtgaaagcataccaacaccttcgaatcgcgaggagacccagcaaaaaagcaacctcgaactgttaaggataagcctgctgttgatccagtcttggctggaacccgtgcagttcttgcgaagcgtctttgcaaatagccttgtgtacggggccagtgacagcaacgtgtatgaccttctgaaggatctcgaggagggcattcaaactctgatgggccggcttgaagatggaagtccaaggaccgggcagatcttcaaacagacctactccaaattcgataccaattctcacaacgacgatgccctgctgaagaactatggtctgctttactgctttcgcaaagatatggacaaagttgaaacgtttctgcgaatagttcagtgccgttcagtggagggcagttgtggattt

SEQ ID NO: 10638 - DNA, 651 bp, Artificial Sequence
  derived and/or modified sequence
atggcgactggatcgagaactagccttctcctcgcattcggtttgctttgtttgccgtggttgcaagagggatccgctttccctaccatcccactctcgcgcctgttcgataatgccatgctgagagcacaccgcctgcatcaactggcgtttgatacctaccaggaattcgaggaggcttacattccgaaagagcaaaagtactcatttttgcaaaacccacaaacttctctttgctttagcgagagcatacctaccccgtcgaaccgcgaagaaacccagcagaagagtaacctggagctcctccggatctcgctcctgctcatccagtcctggcttgaaccagtccagttccttcgctcggttttcgccaatagcctcgtgtacggagcgtccgattccaatgtctatgatctcctgaaagatttggaagaaggaattcagaccttgatgggccggctggaagatggaagccctcggactggacagatctttaagcaaacgtactcaaagtttgacaccaattcacacaacgatgacgccctcctgaagaactacggtttgctgtactgttttaggaaagacatggacaaagtggaaaccttcctccgaattgtccagtgccggagcgtcgaaggatcatgcggtttc

SEQ ID NO: 10639 - DNA, 651 bp, Artificial Sequence
  derived and/or modified sequence
atggcaacgggctcccgcacttcattgctgctcgcctttggactgctgtgcctgccttggctccaggagggatcagcgttcccaaccatccccctgtcgcgcctgttcgacaatgcgatgctcagagcacataggctgcaccagcttgcattcgacacctaccaagagtttgaggaggcatacatcccgaaggaacagaagtactcatttctgcaaaatccgcaaacgtcactgtgcttctcggaaagcattccaactccatccaatcgcgaagagactcagcaaaagtcaaacctcgaactgctgcggatttcgctgctgctcattcaatcgtggctcgagccggtgcagttcctgaggagcgtgttcgccaacagcctcgtctacggagcctccgatagcaacgtgtacgatctgctgaaggacctggaggaaggaatccaaactctcatgggtcggctggaggatggcagcccaagaaccggacaaatcttcaaacagacctactcgaagttcgacaccaattcgcataacgatgacgcacttctcaaaaactacggcctgctgtactgcttccggaaagacatggacaaggtggaaaccttcctgcgtatcgtgcagtgcagatcggtggagggatcctgcggattc

SEQ ID NO: 10640 - DNA, 651 bp, Artificial Sequence
  derived and/or modified sequence
atggcaacgggatcacggacctcacttctgctggcattcggcctgctctgtctcccttggctgcaggaaggttcggcctttccgactatcccactttcgaggttgtttgataacgccatgcttagggctcatcgcctgcaccaactggcatttgacacctaccaagaattcgaagaagcatacattcccaaagaacagaaatactccttcctccagaacccccaaacctcgttgtgtttcagcgagagtatacctacgccttcgaatagagaagaaactcagcaaaaatcgaacttggaactgctgcgaatatccctgcttttgattcagtcctggcttgaaccagtgcagttcctgagaagcgtctttgccaattcactcgtctacggagcaagcgattcgaacgtttacgacctcctgaaggatctcgaagaaggtattcaaaccctcatggggcggcttgaagatggcagcccccggactggacagatctttaaacagacttactcaaagtttgatactaactctcataacgatgatgccctgcttaagaactacggacttttgtactgctttagaaaagatatggacaaagtcgaaacctttctgagaattgtccagtgtagaagcgtggagggctcctgtggtttt

SEQ ID NO: 10641 - DNA, 651 bp, Artificial Sequence
  derived and/or modified sequence
atggcaacaggatcacgcacatcccttctcctggcttttggattactctgtttgccttggttacaggaggggtcggcctttcctacaatccccctatcacgcctattcgataacgccatgctaagagctcatcgtctccatcagttggccttcgatacttatcaggaattcgaagaagcttacattcccaaggaacagaaatattcatttctacagaatccacagacatccctgtgtttcagtgaaagtatccccactccatctaatcgggaagaaacacagcagaagtccaacttagaactccttcgaatctccctcctgctcattcagtcatggctggaaccggtccagttcctgagatccgttttcgctaattccttagtgtatggggcctcagattccaacgtgtatgatctgctcaaagacttagaggaaggaattcagacactcatgggacggctcgaagatgggagtcctcggacagggcagatattcaaacagacatattcaaaatttgacactaactcccataatgatgatgccctgctcaaaaactatgggctgctgtattgttttagaaaagatatggataaagtcgaaactttcctgagaattgtgcagtgtagaagtgtagaagggtcatgcgggttc

SEQ ID NO: 10642 - DNA, 651 bp, Artificial Sequence
  derived and/or modified sequence
atggccaccggctcccggacctcgctgctcctggcattcggactgctctgtctcccatggttgcaggaagggtccgcttttcccaccatcccgctgtcgcggctctttgacaacgcaatgctgcgagcccacagactgcaccagctcgccttcgacacttaccaggagttcgaggaagcatacatcccgaaggagcaaaagtactcctttcttcagaatccgcagaccagcctttgcttttccgaatcaatcccgaccccgtcaaatcgggaagagacgcaacagaaaagcaatctggagctcctgagaatctcgctcctgctcattcagtcatggctggaacctgtgcaatttcttagatcggtgttcgcaaattccctggtctacggcgcatcggattccaacgtgtacgacctgctgaaagacttggaggaaggaattcagacgcttatggggagactcgaggacggaagcccgcgaactggccagatcttcaaacagacgtactccaaattcgacaccaattcgcataacgacgatgctctcctgaagaactacgggctgctgtactgcttccggaaggacatggacaaagtcgagactttcttgcgcatcgtgcaatgtaggagcgtcgaaggttcatgcggattt

SEQ ID NO: 10643 - DNA, 651 bp, Artificial Sequence
  derived and/or modified sequence
atggccacgggcagcagaacatccctcttacttgccttcggcctgctgtgtcttccctggttgcaggaggggtctgcgtttccaacaattccactgtcacgactgttcgataatgcaatgctcagagcccatagactccatcagttggcctttgatacctaccaggaattcgaagaggcgtatataccaaaggagcagaagtacagctttctgcagaacccccaaacttcactgtgttttagcgagtctatcccgacccctagtaatagggaggagacacagcaaaagagtaacttagagctgctgcgaatctccctgctgctgatccagtcctggcttgagcccgttcagttcctgcgcagcgtttttgccaactccctcgtttacggcgccagcgatagcaatgtctatgacctgttgaaagacctcgaagaaggaatacagactcttatggggcgtctggaggacggctccccccggacaggccagatatttaaacagacatatagcaaattcgatactaattcacacaacgacgatgcgctcctgaaaaactatggtcttctatactgctttagaaaggatatggataaggttgagacattcttgcgtattgtgcagtgcagatccgtggaaggaagttgcggtttt

SEQ ID NO: 10644 - DNA, 651 bp, Artificial Sequence
  derived and/or modified sequence
atggccaccggaagtaggaccagtctgctgttggcgtttggacttctctgtttgccttggctccaggaaggttcagcgttccccacaattcccttgtcacgcctgtttgataatgcgatgctcagagcacacaggctccaccagctggcatttgatacctatcaggagttcgaagaggcttacattcctaaggaacagaagtattcgtttttacagaatccacagacttcactgtgcttctccgagtcaatccccacaccttcaaatcgggaggagacccaacagaagagcaatttggaattgctccggatatccctgttgttgattcagagttggttggaacctgtgcagtttctccgtagcgtcttcgccaacagtctggtatacggggctagcgattccaacgtctacgatctgctcaaagacctggaggagggtatccaaaccctgatgggccgtctggaagatgggagcccccggaccggccagatttttaaacagacctacagtaagttcgataccaattctcacaatgacgacgcgctgctgaaaaactatggcctactttactgttttagaaaagacatggacaaggtcgaaactttcctgcggattgttcaatgtcgctccgtggaagggagttgcgggttc

SEQ ID NO: 10645 - DNA, 651 bp, Artificial Sequence
  derived and/or modified sequence
atggcaactggctcaagaacctcgttgttgctggcgttcggtctgctgtgcctgccgtggctccaagagggctccgcattcccaactatcccgctctcgcgactctttgacaacgccatgctgcgggcacacaggctccaccagctcgccttcgatacgtaccaggaattcgaggaagcatacattccgaaggaacagaagtattcattcctccagaacccgcaaacctcgctgtgtttttcggagtcaatcccgaccccatcaaaccgggaagaaacccagcagaagtcgaacctcgaacttctgcggatctcccttctgctgattcagtcgtggctggaaccggtgcagtttttgcggtcggtgttcgcgaatagcctcgtctacggagcttcagactcgaacgtgtacgacctcctgaaggacctggaggagggcatccagactctcatgggcaggcttgaggacggctccccacgcaccgggcaaatctttaagcagacttactccaagttcgatactaactcccataatgacgatgctctgcttaagaactacgggctcctctactgcttccgtaaagacatggataaggtggagacgttcctgagaatcgtgcagtgcagatcggtcgaaggatcgtgcggcttt

SEQ ID NO: 10646 - DNA, 651 bp, Artificial Sequence
  derived and/or modified sequence
atggccacgggaagccgcacatctctgctgctcgcctttgggctcctgtgccttccctggctgcaggaaggcagcgcctttccaacaatccccctgtcacgactgtttgacaacgccatgctgcgagcacacaggttgcaccaactagctttcgatacataccaggaattcgaggaggcatacattccaaaggaacagaagtattctttcctgcagaatccccagacctcgttgtgcttttcagaatctattccaactccctctaacagggaggaaacacagcagaaaagtaacctagagcttctccgaatctccctgctgctgatccagtcctggctggaacccgtccagttcctgaggtccgtgtttgcaaatagtctagtgtatggtgcgagtgactcgaacgtttacgacttgttgaaggatctggaggaggggatacagaccctgatgggtagactggaagacggaagtccccgcacaggtcagatctttaagcagacctatagcaaatttgacacaaatagtcacaatgatgatgccttgctaaagaactacggattattgtattgcttccgtaaggatatggataaagtcgagacattcctgcgaattgtgcaatgtagatctgtagaaggctcttgtggcttc

SEQ ID NO: 10647 - DNA, 651 bp, Artificial Sequence
  derived and/or modified sequence
atggcgacggggagccgtactagccttctgcttgcatttggtttgctgtgtctgccatggctgcaagaaggatcggcatttcccaccatccccctgtcgcggctgtttgataacgcgatgcttagagcacataggcttcatcagctcgccttcgacacttaccaggaattcgaggaggcatacatcccaaaggaacagaagtattcctttctccagaacccccagacttccctgtgtttttccgaatccattcctaccccgtcaaatcgcgaagaaactcaacagaagtcaaatcttgaacttcttcggattagcctcctgctcatccagtcctggcttgaaccggtccagtttctccgatcggtgttcgctaactctctggtctacggagcatcggactctaacgtttacgatctcttgaaagacttggaagaaggtatccagacccttatgggtcgactcgaagatggatcgcctcggactggtcaaatcttcaagcaaacttatagcaagtttgataccaattcacataacgatgatgcactgcttaagaattacggtctgctgtactgtttccggaaggatatggataaggtggaaaccttccttcgcattgtgcaatgtagaagcgtggagggatcatgtggattc

SEQ ID NO: 10648 - DNA, 651 bp, Artificial Sequence
  derived and/or modified sequence
atggcgaccggctcacgcacttcgcttcttcttgcatttggattgctttgcttgccttggctgcaggaaggtagcgcctttcctactatcccactgtcccggctttttgacaacgcgatgctgagggcgcacaggcttcatcagttggcatttgacacctaccaggagttcgaggaagcgtacattcctaaagaacagaagtactcgtttctgcaaaaccctcaaactagtctttgttttagcgaatcgatccctaccccatcaaaccgagaagagactcaacaaaagagcaatctcgaacttctcaggatctcgttgcttctcatacaatcctggctggaaccagtgcaatttctgagaagcgtttttgcaaatagcctcgtgtacggagcgtcagatagcaacgtgtatgacctgctgaaggatctggaggagggcatacagacgctcatgggtcggctggaagatggatcaccccgcaccggccaaatctttaagcaaacctactccaaatttgataccaactcgcataacgacgacgcccttcttaagaactacggactgctgtactgctttaggaaggatatggataaggtggagactttccttcgaattgtccagtgtcgctcagtcgagggctcgtgtggtttt

SEQ ID NO: 10649 - DNA, 651 bp, Artificial Sequence
  derived and/or modified sequence
atggcgaccggcagccggacgtcactgttgctggcattcggcctgctctgcctgccctggctgcaagagggatcggcgttcccaacgatcccgctctcgagattgttcgacaacgctatgcttagagctcataggcttcaccagctcgccttcgacacttatcaagaatttgaagaggcatacatcccgaaagaacagaaatactcgttcctccagaacccgcagacttccctgtgcttctccgaatcgatccctacccctagcaaccgtgaagagactcaacaaaagtcaaacctggaattgctgcggatcagcctgctgctgatccagtcgtggctggagccggtgcagttcctccgctccgtttttgccaattctcttgtctacggggcctccgatagcaacgtgtacgacctgctgaaggacctcgaggagggaatccagacccttatgggacgcctcgaggacgggagcccacggactggacagattttcaagcaaacctactcgaagttcgataccaactcacacaatgacgatgccctcctgaaaaattacggcctcctgtactgcttccgaaaggatatggacaaggtcgaaacttttctgcgcattgtgcagtgtcgctccgtggaaggttcatgcggattt

SEQ ID NO: 10650 - DNA, 651 bp, Artificial Sequence
  derived and/or modified sequence
atggcaacaggatctagaacttcattacttctggcattcggattgttatgccttccatggttgcaagaaggatcagcgttccctacaattccactgtcacgactgttcgataatgctatgctcagagcacacagattgcatcagcttgcatttgacacataccaagagtttgaggaggcttacatcccaaaggagcaaaaatactcttttttgcaaaacccacaaacatccctctgtttctctgaatctattccaaccccttcaaatcgagaagaaacgcaacaaaagtcaaaccttgagttgcttcgcatttcattgcttttgatccagtcttggctggaacctgttcagttcctacgcagtgtgtttgctaactctttagtttatggagcttcggattcgaacgtttacgatttgcttaaggaccttgaagaaggtattcaaacattgatgggtagattagaggatgggtcaccaagaacaggacagatattcaaacaaacatactctaaattcgacacgaattcacacaacgacgacgctcttctgaagaattacggacttctatactgttttagaaaagatatggataaggtagagacgttcctacgcattgtccaatgtaggagcgttgagggaagctgcggtttt

SEQ ID NO: 10651 - DNA, 651 bp, Artificial Sequence
  derived and/or modified sequence
atggctaccggttcccggacttcactcctcctcgccttcggactgctgtgtttgccgtggctgcaggagggttccgccttcccgaccatccccctctctcggcttttcgacaatgccatgctgcgcgcccaccggctccaccagctggcgttcgacacctaccaggagtttgaagaagcgtacatcccgaaggagcaaaagtactccttcctgcaaaaccctcagacgtcactctgtttcagcgaatcgattccaaccccatctaacagggaagaaacccagcaaaaaagcaacctcgaactcctgcgcatctctctgctgctcatccagtcgtggctcgagccggtccaattcctgagaagcgtgttcgccaattcactcgtgtacggcgcatcagattcgaacgtgtatgacctgttgaaggaccttgaagagggcattcaaactttgatgggacggcttgaggatggatcaccaaggactggacaaatcttcaaacaaacgtactcaaagttcgacacgaactcacacaatgatgacgctctccttaagaattacgggctgctgtactgcttccgcaaggacatggataaggtcgagacttttctgcggattgtgcagtgccgctcggtggaaggatcttgcgggttc

SEQ ID NO: 10652 - DNA, 651 bp, Artificial Sequence
  derived and/or modified sequence
atggcaaccggctcccgcacttcgctgctgctggcatttggtttgctgtgtctcccatggctccaagaagggagcgcgttccctactatcccgttgtcccgtctttttgataacgcaatgctccgagcacataggctgcatcaactcgcatttgatacctaccaggaatttgaggaagcctacattcctaaggaacagaagtactcgttccttcagaaccctcaaacctccctgtgcttctcggaatcgatcccaactccgtccaaccgcgaggaaacgcaacagaaatccaacctcgagcttctccgaatctcactgctgttgattcaatcgtggcttgaacctgtgcaatttctgaggtctgtctttgcaaattcgcttgtctacggagcatccgattcgaacgtctacgatctgttgaaggaccttgaagaagggattcaaacccttatgggacggcttgaggacggtagccctcggaccggtcaaatcttcaaacagacgtacagcaagtttgatacgaactcacacaacgacgacgcgcttctcaagaactacgggctgctgtactgtttccgtaaggacatggataaggttgaaacctttctgcgcattgtgcagtgtcgctccgtggaaggctcatgtggcttc

SEQ ID NO: 10653 - DNA, 651 bp, Artificial Sequence
  derived and/or modified sequence
atggcgacgggttcgcgtacgtcgctactattagcgtttggtttattatgtctaccgtggttacaagaaggttcggcgtttccgacgataccgctatcgcgtctatttgataatgcgatgctacgtgcgcatcgactacatcaattagcgtttgatacgtatcaagaatttgaagaagcgtatataccgaaagaacaaaaatattcgtttttacaaaatccgcaaacgtcgttatgtttttcggaatcgataccgacgccgtcgaatcgtgaagaaacgcaacaaaaatcgaatttagaattactacgaatatcgttattattaatacaatcgtggctagaaccggtacaatttttacgttcggtatttgcgaattcgctagtttatggtgcgtcggattcgaatgtatatgatctattaaaagatttagaagaaggtatacaaacgctaatgggtcgattagaagatggttcgccgcgtacgggtcaaatatttaaacaaacgtattcgaaatttgatacgaattcgcataatgatgatgcgttattaaaaaattatggtttactatattgttttcgaaaagatatggataaagtagaaacgtttttacgtatagttcaatgtcgatcggtagaaggttcgtgtggtttt

SEQ ID NO: 10654 - DNA, 651 bp, Artificial Sequence
  derived and/or modified sequence
atggcaactggctctcgcacctccctgctgctggcctttggtctgctgtgcctgccctggttgcaagagggatccgcattccctaccattcctctgtcgcgtcttttcgataacgccatgctcagagcacataggctccatcagctggcatttgatacttaccaagaattcgaggaggcatacatacctaaggagcaaaagtactcatttcttcaaaatccacagaccagcttgtgtttttcagagtcgatacctaccccctctaaccgggaggaaacccagcaaaaatcgaatctggagcttttgcgcatttcccttctgctgatccaatcctggcttgagccagtccaatttcttagatcagtctttgctaactcactggtgtatggcgccagcgattccaatgtgtacgaccttctgaaggatcttgaagaaggaatccagactcttatgggtcgtctcgaggacggctccccccgtacgggccagatctttaaacagacttactcaaagtttgatactaattcccataacgacgatgcactcctgaagaactacggcttgctgtattgttttcgcaaggatatggataaggtggaaacttttctcaggatcgtgcagtgccgatcggtggaaggatcctgtggtttc

SEQ ID NO: 10655 - DNA, 651 bp, Artificial Sequence
  derived and/or modified sequence
atggctacgggatcacggacctcccttttgcttgcttttggcctgctttgtctcccttggctgcaagagggttccgccttcccaacgattcctctgtctaggttgtttgacaacgcaatgctcagagcgcatcgcctccaccagttggcgttcgacacctaccaggaatttgaagaagcgtacatccctaaggagcagaaatactcctttctgcaaaatcctcagacctccctctgcttttcggaatccattccaaccccgtccaatcgcgaagaaacccaacagaaatcgaatctggaactgctgagaatttctctcctgcttattcagtcctggcttgaacctgtgcagtttctgagatcagtgttcgcaaacagcctggtgtacggtgcatcggatagcaacgtgtacgatttgctgaaggacctggaggaaggaattcagactctgatgggcagactcgaagatggctccccgcgaaccgggcagattttcaaacaaacttacagcaagtttgacaccaactcgcataacgatgatgcactgcttaagaattacggactgctctactgttttcggaaggacatggataaggtcgaaacttttctccgcatcgtgcagtgcaggtcagtcgagggatcttgcggtttt

SEQ ID NO: 10656 - DNA, 651 bp, Artificial Sequence
  derived and/or modified sequence
atggccaccggttctagaacatctcttcttctcgctttcggactgttatgtcttccttggctacaggagggcagcgccttcccaaccattcctcttagtaggctttttgacaacgccatgcttcgtgctcatcgcttacatcaacttgcgttcgatacctaccaagagtttgaagaggcatacatccccaaagagcaaaagtactcttttctccagaacccacaaacctcactttgtttttcggaatcaatacccacgccctccaatcgcgaggagactcaacagaagagtaatcttgagctgttgaggatttccttattgctgatccaaagctggctggaacctgttcagtttcttagatcagttttcgcaaatagccttgtttatggggcaagtgattcaaacgtgtatgaccttttgaaggatctcgaggaaggtatacaaacgctgatgggaaggttagaggacggatcaccaaggactggtcagatcttcaagcagacttacagcaagtttgatactaacagccataacgatgatgcacttttgaaaaactacggtttattatattgtttcagaaaagatatggacaaggtagagacattcctcaggattgtccagtgtcgttcggtcgagggaagttgtggtttt

SEQ ID NO: 10657 - DNA, 651 bp, Artificial Sequence
  derived and/or modified sequence
atggccaccggctcccgaacttctctcctgctggcctttggacttctctgcctgccctggctgcaggagggatccgcatttcccaccatccccctctccaggctgtttgataatgcgatgcttagagcccaccgccttcatcaactggcgtttgacacgtaccaggagtttgaagaggcttacattccaaaagaacagaagtatagttttctccagaatccccagacgagcctttgctttagtgagtctatcccaactccctctaatcgggaagaaacgcagcagaagtctaatctggaattgctgaggatcagcttgctgctgatccagagttggctggaaccggtgcagtttctgcggagcgtgttcgctaattccttggtgtatggggcgtccgattctaacgtgtatgatctgctgaaggatctggaggaggggattcaaacattgatggggcgactggaggatggctctccacgcaccgggcagatcttcaagcagacctattcaaagttcgacaccaattcacataatgacgatgctctgttgaagaattatggcctcctgtactgcttccggaaggacatggacaaagtggagacctttcttcgcattgtccaatgtaggtcagtggagggcagctgcggattc

SEQ ID NO: 10658 - DNA, 651 bp, Artificial Sequence
  derived and/or modified sequence
atggccaccggaagtagaacgtctctgctgcttgcgtttgggctgctgtgtcttccatggctgcaggaagggtcagcttttcctaccataccgctcagtcgactgtttgataacgcaatgctgcgggctcataggttgcatcagttggctttcgacacttatcaggagtttgaggaggcatacatccccaaagagcaaaagtactccttcctgcagaacccccagaccagcttgtgtttttccgaatctattccaacaccttccaaccgggaggagacccaacagaagtccaacctggagctgctcagaatttccctgctgttgatccaaagctggctcgaacccgttcaattcctgaggtccgtatttgccaattccctcgtgtatggtgcctctgactcaaatgtttacgatttgcttaaggacctcgaagagggcatccagacacttatgggcaggctcgaggacggttctccaaggacaggccaaatattcaagcagacctacagtaagttcgatacgaattctcataacgatgatgccctgctgaagaactacgggctgctgtactgcttccggaaagatatggataaagtggaaacttttttgcggatagtccagtgcagaagcgtggaaggaagttgtgggttc

SEQ ID NO: 10659 - DNA, 651 bp, Artificial Sequence
  derived and/or modified sequence
atggctaccggatcaagaacctcacttctgctggccttcggcctgttgtgcctgccctggttgcaggaagggtctgccttccccacaattcctctgtctaggcttttcgacaatgcaatgctacgagctcatagactccatcagctggcattcgatacgtaccaagaatttgaagaagcatatataccaaaggagcagaagtactcctttctgcagaacccacagacaagcctgtgcttcagcgaatctattccaaccccatcaaaccgagaggaaacgcagcagaagtcaaatcttgaactgctgcgaatcagtctcctgctgatccaatcatggctggagccggtgcagttcctccgatccgtcttcgcaaattctctcgtgtatggtgcgagtgattctaacgtgtatgacctgctaaaggatctcgaagagggcatccaaaccttgatgggcagactagaggatggatcacccagaactggacaaatattcaaacagacatactcgaagtttgacacaaactcccataatgatgatgcattgctgaagaactatggcctactgtattgctttagaaaggacatggataaggtggaaaccttccttcgcatcgtgcagtgcaggtcagtagaaggaagttgcggcttt

SEQ ID NO: 10660 - DNA, 651 bp, Artificial Sequence
  derived and/or modified sequence
atggcaacagggtcccggacatccctgctgcttgcttttgggttactgtgccttccatggctccaagagggaagcgcgttccctacaattccgctatcccgactctttgataacgcaatgctgagggctcacaggctgcaccaactcgctttcgatacatatcaggaattcgaagaagcttatatacctaaggagcagaagtacagcttccttcaaaatcctcagacgtcactgtgcttctcagagtcaattccaaccccatctaaccgggaggagacccagcagaaaagcaacctagaacttctgaggatctccctgctcctaattcagagttggctggaaccagttcagttcctcaggtccgtgttcgcaaactctctcgtgtatggagccagtgatagcaatgtgtacgacctgctaaaggatctggaagaggggatccagacattaatgggaagacttgaggacgggagcccccgcaccggccagatctttaagcagacctacagcaagttcgatactaactcccacaatgatgacgctcttctgaaaaattacgggttactgtactgttttaggaaggatatggacaaggtggaaacatttttacgaattgtgcagtgcaggtccgttgagggatcatgcgggttc

SEQ ID NO: 10661 - DNA, 651 bp, Artificial Sequence
  derived and/or modified sequence
atggccactgggtccaggacgtcgctgcttctcgcgttcggtctgttgtgccttccttggcttcaggaagggtcggcattcccaactattcctctttcccgtttgttcgataatgcaatgcttagagcacatcgcctgcatcagctggcatttgatacgtaccaggaatttgaagaggcctacattcccaaagaacaaaagtactccttcttgcagaacccccagacttcgctttgctttagcgaatcaatccccacgcccagcaatcgtgaggaaactcaacaaaagtcaaacctggagcttctgagaatttcactgctccttattcaatcctggcttgaacctgtccaatttctgagatccgtttttgctaactcgctggtctacggggccagtgactcgaacgtgtacgatcttctcaaggacctggaggaaggaatccagaccctcatgggtagactggaagatgggtcgccccggaccgggcagattttcaaacaaacctactccaaattcgataccaactcgcacaatgacgacgcgctgcttaagaattacggactcctgtactgttttagaaaggacatggacaaggtggaaactttcctcaggatagtccagtgccgaagcgtcgaaggatcctgtggattt

SEQ ID NO: 10662 - DNA, 651 bp, Artificial Sequence
  derived and/or modified sequence
atggctaccggatcgcggacctccctactgctggccttcgggctgctgtgcctcccatggctgcaggagggcagcgcgtttcctacaataccattaagccgcttgtttgacaacgctatgctgcgggcccacagactgcaccagctcgcctttgacacctatcaggaattcgaagaagcctacatccccaaagagcagaaatactcattcctgcaaaatccccagacctccctctgcttctccgaatcaatccccactccatcgaatagggaggagacacagcagaagtctaatctggagctactgcgaatctctctactgctcattcagagctggctagagcccgtgcagttcctccggtcggtcttcgccaacagccttgtatacggcgcttctgactccaacgtgtatgacctgttgaaggatttggaggagggaatacagacattaatgggtcgcctcgaggacggttctcctaggacaggacagatttttaagcagacatatagtaaatttgacacaaactctcacaatgacgacgctctgcttaagaactacggccttctttattgttttcggaaggatatggataaggtggagacgttcttgcgtatcgtgcaatgcagaagcgtagaagggagctgcggcttc

SEQ ID NO: 10663 - DNA, 651 bp, Artificial Sequence
  derived and/or modified sequence
atggctaccggatcccgaaccagcctgctcctcgcatttggcctgttgtgcctgccgtggctgcaggaaggctcagcatttcccactatcccactgagtcgtctgtttgacaacgcaatgctgcgcgcccaccgcctgcaccagctagccttcgatacctaccaggagtttgaagaagcctatatcccaaaggagcagaagtactcatttcttcagaatcctcagacctccttgtgtttcagcgagtccattccaacaccgtctaatcgggaagagacccagcagaagagcaatctggaacttctgcgaattagcctgctgcttattcagagttggctggagccagtgcagttcctccgtagtgtgttcgcaaatagcttggtgtacggagcctccgatagcaatgtttacgatttgctgaaagatctggaggaaggaatccaaacgttgatgggacgcctggaggatggcagcccacgtacaggacaaatttttaagcagacgtactctaaatttgacacaaacagccacaacgacgacgcattattgaagaattacgggctgctgtactgcttccgcaaagatatggacaaagttgaaacttttctgcgtattgtgcaatgtcgtagcgttgaggggtcatgcggtttc

SEQ ID NO: 10664 - DNA, 651 bp, Artificial Sequence
  derived and/or modified sequence
atggctaccggcagccggactagcctgctgctggccttcgggcttctttgtcttccctggttgcaggaagggtcagctttccccactatcccactctcgcgcttgttcgataacgctatgctgagagcccacagattgcaccagctggccttcgacacctaccaggagtttgaggaagcctacataccaaaagaacagaaatattcttttttgcagaacccccagacgtcgctctgcttctccgagtctatccccactccgagcaatcgcgaggaaacccagcagaagtccaatttagaactcctgaggatttccctcctactgatccaaagttggttggaacccgtgcagtttctgcgctctgtctttgccaacagcttagtctacggcgcctcagacagcaatgtgtatgatctgctgaaggacctggaagaaggcatccaaaccctcatggggcgcctcgaggacggttctcctcgcaccggccaaatattcaagcagacctatagcaaatttgacacgaattctcataacgacgatgccctgttgaagaattatgggttgttgtattgttttcgcaaggatatggataaagtggagactttcttgcgaatcgtgcagtgcaggtccgtggaagggtcatgtggcttc

SEQ ID NO: 10665 - DNA, 651 bp, Artificial Sequence
  derived and/or modified sequence
atggctacaggcagtagaacctcgctgcttttggcgttcggcctgctctgtctcccatggttgcaagaaggctctgcatttcctaccattcccctatccaggctattcgacaatgcgatgctgcgggcccacagactgcaccagctggccttcgacacatatcaagaatttgaagaggcttacattcccaaggagcagaagtactctttcctgcaaaacccccagacctcactctgtttctctgagtctatccccactccatccaacagggaagaaacccagcagaagagcaatctagagttgctgcggatttcactgctgttaatccagtcctggttagagcccgttcagtttttacgatctgtgttcgctaattctttagtctacggtgcatcagactcgaacgtctatgacctgctgaaagatctggaggagggcattcaaacactcatgggccgtctcgaggacggatcccccaggactggccaaattttcaagcagacatactccaagttcgatacaaatagtcacaatgacgatgctctgctgaagaattacgggctactgtactgcttccggaaggacatggataaggtggagacatttctgcggattgttcagtgtcggtctgtggaagggagctgtgggttc

SEQ ID NO: 10666 - DNA, 651 bp, Artificial Sequence
  derived and/or modified sequence
atggccacggggtcaaggacctccctgctgttggccttcggtctgctgtgtcttccatggctccaagaaggaagcgcattccctaccattccattgtcacgactgttcgacaatgcaatgctcagagcccatcgtctgcatcagcttgccttcgacacctatcaggagtttgaagaggcgtatattcctaaggagcagaagtacagctttttgcagaacccacagacaagcttgtgcttcagcgaatctatacccacaccctcgaaccgcgaggagactcagcaaaaaagcaatctggagctccttcgcatctctctattgcttatccagtcgtggctagaacccgttcagttcttaaggtccgtcttcgccaacagtcttgtctacggcgcctccgactctaacgtgtacgatctccttaaggatctggaggagggtatccagactctcatgggccggctggaggacggctctcctagaaccggtcagatcttcaagcagacttattctaagtttgatacgaactctcacaatgacgacgccctactgaaaaattacgggctcctgtactgttttcgaaaggacatggataaagtcgaaacattcttgcgcatcgtacagtgtcggtcagttgagggatcctgcgggttc

SEQ ID NO: 10667 - DNA, 651 bp, Artificial Sequence
  derived and/or modified sequence
atggcaacaggaagccggacaagtcttttgttggcttttggcctgctgtgtctgccgtggctgcaggaggggagcgctttccccaccatccccctctctcgcctcttcgacaacgctatgttgcgggctcaccggcttcatcaactggctttcgacacttatcaggaattcgaagaagcttacattcccaaggagcagaagtacagtttcctccagaacccgcagacgagcttgtgtttcagtgagtctattccaactcctagcaatcgtgaggaaactcaacagaaatcaaacctagagctcctcagaatctctctgctgctgatccagtcttggcttgaacccgttcagtttctgagaagtgtgtttgctaacagcctggtctatggagcctctgactcaaatgtgtatgatcttctgaaggacctggaggagggaatccagaccttgatggggagactggaggatggtagccctaggacaggccaaatcttcaagcagacatattctaaattcgatactaattcccataatgacgacgccctcctgaagaactacggcctgctctattgttttcggaaagatatggacaaggttgaaacgttcctccgaattgttcagtgtcggtcagtcgagggatcgtgcggtttc

SEQ ID NO: 10668 - DNA, 651 bp, Artificial Sequence
  derived and/or modified sequence
atggccactggatcccggacctcgctcctcctggcctttggtctgctgtgcctgccgtggctccaggaaggatcagcgtttccaactatccctctctcccggttgtttgacaatgcgatgttgcgggctcatcggctccaccagttggcgtttgacacctatcaggaattcgaagaggcgtacatccctaaagagcagaagtacagctttctgcagaatccacagactagcctctgcttctcggaatcgatcccgaccccatctaaccgggaagagacgcaacagaagtcgaatcttgaattgctccgcatctccctgctcttgattcaaagctggctggagcccgtgcagttcttgcggtcagtgttcgccaattccctggtgtacggagcaagcgattcgaacgtgtatgacctcctgaaggacttggaagaaggcatccaaaccctgatgggccgcctggaagacggcagcccacggaccggacaaatcttcaagcagacttacagcaagtttgataccaactcccacaatgatgacgctttgctgaagaactacggactcctgtactgtttcagaaaggatatggacaaagtggaaaccttcctccgcattgtgcaatgcagatcagtggaagggtcatgtggcttc

SEQ ID NO: 10669 - DNA, 797 bp, Artificial Sequence
  derived and/or modified sequence
gggaaataagagagaaaagaagagtaagaagaaatataagagccaccatggccactgggtcgaggaccagcctgttgttggcctttgggctgctttgtctgccatggctccaagagggatccgcattcccgacaattcccctctcaagactgtttgataacgctatgctccgagcccaccggctgcaccagctggcgttcgatacataccaagaattcgaggaagcatacatccccaaagagcagaagtattcgttccttcaaaatcctcagacatcgctttgtttctcggagtcaattccgacgcccagcaatagggaagaaacgcagcagaagtcgaaccttgagttgttgcggattagcttgctcctgatccagtcatggctcgaaccggtgcagttcttgcgctcggtgtttgcgaactccctggtatatggtgcgtccgattcaaatgtctacgacttgctcaaggatcttgaagaggggatccaaactctcatgggtaggcttgaggacggctcgcctcgcacgggacagatctttaagcagacgtattcgaaatttgacaccaattcacataacgacgacgcgttgctcaaaaactatggattgctctactgctttcggaaggacatggataaagtggagacattcttgagaatcgtccagtgcagatccgtagagggatcatgcggtttttgataagctgccttctgcggggcttgccttctggccatgcccttcttctctcccttgcacctgtacctcttggtctttgaataaagcctgagtaggaag

SEQ ID NO: 10670 - DNA, 654 bp, Artificial Sequence
  derived and/or modified sequence
atggccaccggcagcagaaccagcctgctgctggccttcggcctgctgtgcctgccctggctgcaggagggcagcgccttccccaccatccccctgagcagactgttcgacaacgccatgctgagagcccacagactgcaccagctggccttcgacacctaccaggagttcgaggaggcctacatccccaaggagcagaagtacagcttcctgcagaacccccagaccagcctgtgcttcagcgagagcatccccacccccagcaacagagaggagacccagcagaagagcaacctggagctgctgagaatcagcctgctgctgatccagagctggctggagcccgtgcagttcctgagaagcgtgttcgccaacagcctggtgtacggcgccagcgacagcaacgtgtacgacctgctgaaggacctggaggagggcatccagaccctgatgggcagactggaggacggcagccccagaaccggccagatcttcaagcagacctacagcaagttcgacaccaacagccacaacgacgacgccctgctgaagaactacggcctgctgtactgcttcagaaaggacatggacaaggtggagaccttcctgagaatcgtgcagtgcagaagcgtggagggcagctgcggcttctag

SEQ ID NO: 10671 - DNA, 654 bp, Artificial Sequence
  derived and/or modified sequence
atggcaacagggagcaggacttctctgctgctcgcctttgggctactttgcctcccatggttacaggaggggagtgcatttccaacaattccactctccaggcttttcgacaatgctatgctcagggcgcaccggctccaccaattagccttcgatacgtaccaggagttcgaagaggcctacattcccaaagagcaaaagtactctttcctacagaacccacaaacctccctttgctttagcgaatcaatccctacaccatctaatcgcgaggagacacagcagaagtccaatctagaactccttcggattagccttctgctcatccagtcttggcttgagccggttcagttcttgagatccgtctttgcaaattcgctcgtgtacggagcaagcgattccaacgtttacgacctgctgaaggacttagaggaagggatccagacccttatgggaaggctagaagacggctcccctcggacaggtcagatcttcaaacagacttatagtaagtttgatacgaactcccacaatgacgacgctctactcaagaattacggattgctttattgtttccgcaaagatatggacaaggtggagacctttctcagaattgttcagtgcaggagcgtggagggctcttgtgggttctag

SEQ ID NO: 10672 - DNA, 654 bp, Artificial Sequence
  derived and/or modified sequence
atggccaccggcagcaggaccagcctgctgctggccttcggcctgctgtgcctgccctggctgcaggagggcagcgccttccccaccatccccctgagccggctgtttgacaatgccatgctgcgggcccaccggctgcaccagctggcctttgacacctaccaggagtttgaggaggcctacatccccaaggagcagaagtacagcttcctgcagaacccccagaccagcctgtgcttcagcgagagcatccccacccccagcaaccgggaggagacccagcagaagagcaacctggagctgctgcgcatcagcctgctgctgatccagagctggctggagcctgtgcagttcctgcggtctgtgtttgccaacagcctggtgtatggagccagtgacagcaatgtgtatgacctgctgaaggacctggaggagggcatccagaccctgatgggccgcctggaggatggcagccccaggacaggccagatcttcaagcagacctacagcaagtttgacaccaacagccacaatgatgatgccctgctgaagaactacggcctgctgtactgcttcaggaaggacatggacaaggtggagaccttcctgagaattgtgcagtgccgctctgtggagggcagctgtggcttctag

SEQ ID NO: 10673 - DNA, 654 bp, Artificial Sequence
  derived and/or modified sequence
atggccaccggcagccggaccagcctgctgctggccttcggcctgctctgtctgccgtggctccaggaaggctctgcctttcctactattcccctgagtagactgttcgacaatgccatgctccgggcccaccggctgcaccagcttgcgtttgacacttaccaagagttcgaggaggcctacatccctaaggagcagaagtactcatttctacagaatcctcagacctccctgtgcttcagtgaatcgattcctactccatcaaacagagaggaaacccagcaaaagagtaacctagagttactgcgaattagtctgctcctgatccagagttggcttgaacccgtgcagtttttacgatctgtttttgcaaactcgctggtctatggcgcttcagattccaacgtctacgacctgctaaaagacctcgaagagggcattcagacactcatgggaaggcttgaggacgggagccccaggacggggcaaatcttcaagcagacatattctaaattcgacactaatagtcataatgatgacgcactgctcaaaaactatgggctgttgtattgcttcaggaaggacatggataaggtcgaaacttttctgaggattgtgcaatgccgttctgtggagggcagttgcgggttctag

SEQ ID NO: 10674 - DNA, 803 bp, Artificial Sequence
  derived and/or modified sequence
ccccgaaccactcagggtcctgtggacagctcacctagctgcaatggctacaggctcccggacgtccctgctcctggcttttggcctgctctgcctgccctggcttcaagagggcagtgccttcccaaccattcccttatccaggctttttgacaacgctatgctccgcgcccatcgtctgcaccagctggcctttgacacctaccaggagtttgaagaagcctatatcccaaaggaacagaagtattcattcctgcagaacccccagacctccctctgtttctcagagtctattccgacaccctccaacagggaggaaacacaacagaaatccaacctagagctgctccgcatctccctgctgctcatccagtcgtggctggagcccgtgcagttcctcaggagtgtcttcgccaacagcctggtgtacggcgcctctgacagcaacgtctatgacctcctaaaggacctagaggaaggcatccaaacgctgatggggaggctggaagatggcagcccccggactgggcagatcttcaagcagacctacagcaagttcgacacaaactcacacaacgatgacgcactactcaagaactacgggctgctctactgcttcaggaaggacatggacaaggtcgagacattcctgcgcatcgtgcagtgccgctctgtggagggcagctgtggcttctagctgcccgggtggcatccctgtgacccctccccagtgcctctcctggccctggaagttgccactccagtgcccaccagccttgtcctaataaaattaagttgcatca

SEQ ID NO: 10675 - DNA, 654 bp, Artificial Sequence
  derived and/or modified sequence
atggctactgggtcacggaccagcctcttactcgcctttggactgttgtgcctgccctggttgcaggaaggcagtgcattccccacaattccactcagccggctgttcgataatgcgatgcttcgggcacacagactccaccagctggcctttgatacttaccaggaattcgaggaggcctacatccccaaagaacagaaatatagcttcctccaaaaccctcagacttccctgtgcttctcggaatctattcccaccccaagtaaccgcgaggagacgcaacagaagagcaacctggagctgttgcggattagcctgctcttgatacagtcctggttagagcccgtgcaattccttagaagcgttttcgcgaattcactggtgtacggcgctagcgactctaacgtgtatgatctgctgaaagacttggaagaaggcattcaaaccctgatgggcaggctggaggacggttccccccgaacaggtcaaatttttaagcagacctacagcaagtttgatactaactcccataacgatgacgctctgctgaaaaactatggtttgctttactgtttcagaaaggacatggacaaggtggagacatttctgcggatagtgcaatgccgctctgtggaggggtcttgtggtttctag

SEQ ID NO: 10676 - DNA, 654 bp, Artificial Sequence
  derived and/or modified sequence
atggctacaggatctaggacatctcttctgctggctttcgggttgctatgcttaccctggctccaagagggtagcgcatttcctacgatcccactgtcccggctttttgacaacgccatgcttcgggcccaccgcctgcatcaattggccttcgatacctaccaggagttcgaagaagcctacatccctaaagagcagaagtattcctttctccaaaacccccagacatctctttgcttcagtgaatccatacccactccgtcaaaccgggaggagacccaacagaaatctaatctcgagctcctgagaatctcactcctacttatccagagttggctggagcccgtccagttccttcgtagtgtgtttgccaatagtctagtatacggcgctagcgatagcaacgtctatgatctcctgaaagacctagaggaaggcatacagaccctcatgggtcgcctggaggatggttctcctcggactgggcaaatcttcaagcaaacgtactctaaattcgataccaacagccacaacgacgatgctctcttgaagaattatgggcttttgtattgtttcagaaaggatatggataaagtcgaaacattcctgaggatagttcagtgcagatctgtagaggggtcctgcggattttag

SEQ ID NO: 10677 - DNA, 654 bp, Artificial Sequence
  derived and/or modified sequence
atggccacagggtcccgtacctcactacttctcgccttcggcctattgtgtctgccttggctccaggaaggtagtgcattcccgacaatcccactctcaagattgttcgataacgcaatgttaagagcacatcgcctacaccagctggccttcgatacttaccaggaatttgaagaagcgtacatacccaaggagcaaaaatattccttcctgcagaaccctcagacatctctttgcttcagcgagtccatccccaccccttctaaccgagaagaaactcagcaaaagtccaacttggaattgttgaggatttcattactgctgatacagtcatggcttgaacctgtgcaattcctccgatcagtgtttgctaattctctcgtgtatggggctagcgactcaaacgtgtacgatcttctgaaagacctagaagagggcatccagactttgatgggccgtttggaggatggcagcccaaggaccgggcagatctttaaacagacgtattccaaattcgacaccaactcccacaatgacgacgccctcctgaaaaactacggccttctgtactgttttcgtaaagacatggacaaagtggaaacgtttttacgaatagtgcaatgtaggagtgtggaaggaagctgcgggttttag

SEQ ID NO: 10678 - DNA, 3435 bp, Artificial Sequence
  derived and/or modified sequence
cctcaaataagagccacaaacgtggaagatatatccaaaggaaccaaattaaaggactggagaaagtctaggtgagatggctttgtcccgttgcaggcgagttccaagcacagagaaccaaatggtttccacagagaacatgtgtagaagggattgtaacccacaactgtctgaacccaagcactaagcttcaaaccagactctgtgctgcttctgctttatacacaggccctggctgaaaacccttgactttaccaggcatgcaaggagatgctaagtccactttggctgcagatctctaaacgaccacggcccgaagtgtcagtttcaaatgcttgtttcagctctgccctccccacatcaaatcccacctctctcacgctaaagcatcataatatatttgtgctgagagttgccttagaaatcattcagtattcagttcacgggggaagaaacagaaagcccctagaggtgacctcattagcctacagttgccctgagaactggtggcagaagcagattggtgtccagcctcctgatgtacatgccagtgctctttcccccaagccatgtgtctcctggtcacgccctttgtccttgctgtcctctactattctcttctggaagactcacgatgagagagccgacttctccaagctgcactcctagctctctgggacccagcagggaccgctgccttccagccagcagtttgaagaaggacagctaccatcaaacacagacttacagcctccctgatgccctggatgccaggaaatgtctggaccagtcaagataagagcaaggcagagccaggaagaaatggggacaggagttcctatttaaatatataaagaatcctttcctaggtagagaaaagtcatctagcaatgtgactgatcacctctccgtttatctgtttgatcaactggaatttctatacagaaggtttatacaaagaagccacaaacaaccattgtcacaatgacccctacataattccttgtgtaaatgctctggaaatgcacccagaagtctggagaaggtccaatcaaactgggtggcaggaagaagcaagctctgttctcagatcttcaacagaatcacctggaccctggggttgccaccacgctaagccaaggaggcctctgaatgcacgggagtgcagggtctgaagggagttgttaaaaggtgtttcttgatccaggaccatgtaaagacccaggagaaataggtatcccaaagagaacagcgtataagattcacaaaccaatgacaaacacgctgggttcgctgctggtctccacagttggttggttctgtagggctcagctgcctctttctctctacttctggtttcagaaaacacgagagagaagccgagtgctcatggagtttcctcaaagactcagcaaaaactaggctttgtgttctgagatcaggaagtaacagtgagagtccaaaattttcttccctgacaatgtctcctactcaagcagggcctggaagtcaccccctagaatcaaagccttgacatatgcaagctcatagtttattgcttcttctcccatctgcccgttgacagataaatcccagagggaataaaaacacattgccctcagcagattattcttcactgaagaataccagtcttttaacactccgctacagaaatagctttctgccggctgatggcttgttgcgctgcactaagagagcccgcacacctcgaagcttcgtcaagcaaagcctatgatttcacagacccagaaatgttttctttctctaagccaataacatatgcttgggtttatgccaactctaccagaggcgcacagatacaatgaggcatgaagttcagaataatagaaagtagagagttggaaagcacaggagaacccatctagaccaacctgttttgttgaaaaaggagctccctgacccagagaggttaagggtttgctgtgagacggtgcccctggttaaaggcagcatgagatgctgtcctctgatccccagcttcctagggctcttgcctctaggtcacactgccttgaggccaggagctgatattgattgaacagatgtgaaaacagaagaaaaaaaaattgtggtgactgccctctgacaattttccactttctttggaccaattttctttgccattatctggaaaaaaaaaaaatgtccagaagagcattttaaattcaggaagtggttctggaactaggagaagacacaccttgatgacagtaatattgtctaagtgagaaggaacaagctcttgaatgtttctagaaaaaccaaatatgataggagaccataaaattatacttcgtcatatggatttccagtttgagaaaacttagtggctaaacaaaggtgccgcttgagagatgcagacagaaatcagcctctgctttaagaacaagttgctacgctgaagaatgagaagaggaatggggcccagaggctgaaggtctggaccaatctcccttcccagataagcgcctggaccctcgttcctcagaagccacgtgtaattaccagctctttttggctacagagcacatgcccaggaggcttggagaagcaggaatttaaaacatgctagtttcagagccaagattggtgacaacaccatcagttactgtttgggcttcgggaagccgtgggctgcagcactgggtctggtgtcctgggctgtgtgggacctcagcaaggttgtttcctgaaatgaaagctcctcttctgggggatgacacaccaggaccacctgcagatgatgtttatgaatcccccagcaggggtggattgatcttacaatgggactgtgtaatataaacatttcattattctacaaaagaatacacacaataccacctaagggtctctaagaatagggttggagagtgacaatgagaaaatgccactcaaaaagaaatagagccgcattccttctacacaacattaatattaactttacatacaggggaaaaaaatggcattttaccttaagagttatttgtaaactctctccacaccatgagataaaatcagtgcagagctcagagctctgaatttcctcatttgggggctaatagactttaatgggggctcttcttggcatgcaaatgaacgtgtgtgtctctgagtgcatgtgtctgtgtgtgtacacacgtccctttgaagtttatttacttggtagcactaattgtaaaagggcacacccaggggaatttaatgaggcgacatgctagaatatagacattagaaagggaattaatattttcctcataatagcaagtaggtgaagtcaagtatgaggacagaaggaaagaaaaaggaaggcagggaaagagggaaggagaggagaggaacaggttttgatgatcgtagataagaaccaataaacactgttgcttcacactcccg

SEQ ID NO: 10679 - DNA, 1060 bp, Artificial Sequence
  derived and/or modified sequence
gggaaataagagagaaaagaagagtaagaagaaatataagagccaccatggccactgggtcgaggaccagcctgttgttggcctttgggctgctttgtctgccatggctccaagagggatccgcatcatcctcgagcaaggcccctccgccctcactgccatcgccaagccgcctgccgggaccttccgacaccccgatcctcccgcagttcccgacaattcccctctcaagactgtttgataacgctatgctccgagcccaccggctgcaccagctggcgttcgatacataccaagaattcgaggaagcatacatccccaaagagcagaagtattcgttccttcaaaatcctcagacatcgctttgtttctcggagtcaattccgacgcccagcaatagggaagaaacgcagcagaagtcgaaccttgagttgttgcggattagcttgctcctgatccagtcatggctcgaaccggtgcagttcttgcgctcggtgtttgcgaactccctggtatatggtgcgtccgattcaaatgtctacgacttgctcaaggatcttgaagaggggatccaaactctcatgggtaggcttgaggacggctcgcctcgcacgggacagatctttaagcagacgtattcgaaatttgacaccaattcacataacgacgacgcgttgctcaaaaactatggattgctctactgctttcggaaggacatggataaagtggagacattcttgagaatcgtccagtgcagatccgtagagggatcatgcggtttttcatcctcgagcaaggcccctccgccctcactgccatcgccaagccgcctgccgggaccttccgacaccccgatcctcccgcagtcatcctcgagcaaggcccctccgccctcactgccatcgccaagccgcctgccgggaccttccgacaccccgatcctcccgcaggctggagcctcggtggccatgcttcttgccccttgggcctccccccagcccctcctccccttcctgcacccgtacccccgtggtctttgaataaagtctgagtgggcggc

SEQ ID NO: 10680 - DNA, 817 bp, Artificial Sequence
  derived and/or modified sequence
gggaaataagagagaaaagaagagtaagaagaaatataagagccaccatggccactgggtcgaggaccagcctgttgttggcctttgggctgctttgtctgccatggctccaagagggatccgcattcccgacaattcccctctcaagactgtttgataacgctatgctccgagcccaccggctgcaccagctggcgttcgatacataccaagaattcgaggaagcatacatccccaaagagcagaagtattcgttccttcaaaatcctcagacatcgctttgtttctcggagtcaattccgacgcccagcaatagggaagaaacgcagcagaagtcgaaccttgagttgttgcggattagcttgctcctgatccagtcatggctcgaaccggtgcagttcttgcgctcggtgtttgcgaactccctggtatatggtgcgtccgattcaaatgtctacgacttgctcaaggatcttgaagaggggatccaaactctcatgggtaggcttgaggacggctcgcctcgcacgggacagatctttaagcagacgtattcgaaatttgacaccaattcacataacgacgacgcgttgctcaaaaactatggattgctctactgctttcggaaggacatggataaagtggagacattcttgagaatcgtccagtgcagatccgtagagggatcatgcggtttttgataataggctggagcctcggtggccatgcttcttgccccttgggcctccccccagcccctcctccccttcctgcacccgtacccccgtggtctttgaataaagtctgagtgggcggc

SEQ ID NO: 10681 - DNA, 1069 bp, Artificial Sequence
  derived and/or modified sequence
gggaaataagagagaaaagaagagtaagaagaaatataagagccaccatggccactgggtcgaggaccagcctgttgttggcctttgggctgctttgtctgccatggctccaagagggatccgcatcatcctcgagcaaggcccctccgccctcactgccatcgccaagccgcctgccgggaccttccgacaccccgatcctcccgcagttcccgacaattcccctctcaagactgtttgataacgctatgctccgagcccaccggctgcaccagctggcgttcgatacataccaagaattcgaggaagcatacatccccaaagagcagaagtattcgttccttcaaaatcctcagacatcgctttgtttctcggagtcaattccgacgcccagcaatagggaagaaacgcagcagaagtcgaaccttgagttgttgcggattagcttgctcctgatccagtcatggctcgaaccggtgcagttcttgcgctcggtgtttgcgaactccctggtatatggtgcgtccgattcaaatgtctacgacttgctcaaggatcttgaagaggggatccaaactctcatgggtaggcttgaggacggctcgcctcgcacgggacagatctttaagcagacgtattcgaaatttgacaccaattcacataacgacgacgcgttgctcaaaaactatggattgctctactgctttcggaaggacatggataaagtggagacattcttgagaatcgtccagtgcagatccgtagagggatcatgcggtttttcatcctcgagcaaggcccctccgccctcactgccatcgccaagccgcctgccgggaccttccgacaccccgatcctcccgcagtcatcctcgagcaaggcccctccgccctcactgccatcgccaagccgcctgccgggaccttccgacaccccgatcctcccgcagtgataataggctggagcctcggtggccatgcttcttgccccttgggcctccccccagcccctcctccccttcctgcacccgtacccccgtggtctttgaataaagtctgagtgggcggc

SEQ ID NO: 10682 - RNA, 797 nt, Artificial Sequence
  derived and/or modified sequence
gggaaauaagagagaaaagaagaguaagaagaaauauaagagccaccauggccacugggucgaggaccagccuguuguuggccuuugggcugcuuugucugccauggcuccaagagggauccgcauucccgacaauuccccucucaagacuguuugauaacgcuaugcuccgagcccaccggcugcaccagcuggcguucgauacauaccaagaauucgaggaagcauacauccccaaagagcagaaguauucguuccuucaaaauccucagacaucgcuuuguuucucggagucaauuccgacgcccagcaauagggaagaaacgcagcagaagucgaaccuugaguuguugcggauuagcuugcuccugauccagucauggcucgaaccggugcaguucuugcgcucgguguuugcgaacucccugguauauggugcguccgauucaaaugucuacgacuugcucaaggaucuugaagaggggauccaaacucucauggguaggcuugaggacggcucgccucgcacgggacagaucuuuaagcagacguauucgaaauuugacaccaauucacauaacgacgacgcguugcucaaaaacuauggauugcucuacugcuuucggaaggacauggauaaaguggagacauucuugagaaucguccagugcagauccguagagggaucaugcgguuuuugauaagcugccuucugcggggcuugccuucuggccaugcccuucuucucucccuugcaccuguaccucuuggucuuugaauaaagccugaguaggaag

SEQ ID NO: 10683 - RNA, 654 nt, Artificial Sequence
  derived and/or modified sequence
auggcuacaggaucuaggacaucucuucugcuggcuuucggguugcuaugcuuacccuggcuccaagaggguagcgcauuuccuacgaucccacugucccggcuuuuugacaacgccaugcuucgggcccaccgccugcaucaauuggccuucgauaccuaccaggaguucgaagaagccuacaucccuaaagagcagaaguauuccuuucuccaaaacccccagacaucucuuugcuucagugaauccauacccacuccgucaaaccgggaggagacccaacagaaaucuaaucucgagcuccugagaaucucacuccuacuuauccagaguuggcuggagcccguccaguuccuucguaguguguuugccaauagucuaguauacggcgcuagcgauagcaacgucuaugaucuccugaaagaccuagaggaaggcauacagacccucaugggucgccuggaggaugguucuccucggacugggcaaaucuucaagcaaacguacucuaaauucgauaccaacagccacaacgacgaugcucucuugaagaauuaugggcuuuuguauuguuucagaaaggauauggauaaagucgaaacauuccugaggauaguucagugcagaucuguagagggguccugcggauuuuag

SEQ ID NO: 10684 - RNA, 654 nt, Artificial Sequence
  derived and/or modified sequence
auggccacagggucccguaccucacuacuucucgccuucggccuauugugucugccuuggcuccaggaagguagugcauucccgacaaucccacucucaagauuguucgauaacgcaauguuaagagcacaucgccuacaccagcuggccuucgauacuuaccaggaauuugaagaagcguacauacccaaggagcaaaaauauuccuuccugcagaacccucagacaucucuuugcuucagcgaguccauccccaccccuucuaaccgagaagaaacucagcaaaaguccaacuuggaauuguugaggauuucauuacugcugauacagucauggcuugaaccugugcaauuccuccgaucaguguuugcuaauucucucguguauggggcuagcgacucaaacguguacgaucuucugaaagaccuagaagagggcauccagacuuugaugggccguuuggaggauggcagcccaaggaccgggcagaucuuuaaacagacguauuccaaauucgacaccaacucccacaaugacgacgcccuccugaaaaacuacggccuucuguacuguuuucguaaagacauggacaaaguggaaacguuuuuacgaauagugcaauguaggaguguggaaggaagcugcggguuuuag

SEQ ID NO: 10685 - protein, 394 aa, Artificial Sequence
  derived and/or modified sequence
MGCLGNSKTEDQRNEEKAQREANKKIEKQLQKDKQVYRATHRLLLLGAGESGKSTIVKQMRILHVNGFNGEGGEEDPQAARSNSDGEKATKVQDIKNNLKEAIETIVAAMSNLVPPVELANPENQFRVDYILSVMNVPDFDFPPEFYEHAKALWEDEGVRACYERSNEYQLIDCAQYFLDKIDVIKQADYVPSDQDLLRCRVLTSGIFETKFQVDKVNFHMFDVGGQRDERRKWIQCFNDVTAIIFVVASSSYNMVIREDNQTNRLQEALNLFKSIWNNRWLRTISVILFLNKQDLLAEKVLAGKSKIEDYFPEFARYTTPEDATPEPGEDPRVTRAKYFIRDEFLRISTASGDGRHYCYPHFTCAVDTENIRRVFNDCRDIIQRMHLRQYELL

SEQ ID NO: 10686 - DNA, 1185 bp, Artificial Sequence
  derived and/or modified sequence
atgggttgcctaggcaactctaagacagaggaccagaggaacgaggaaaaagcccagcgggaagccaataaaaagatcgagaaacaactgcagaaagacaagcaagtttacagggccacacatagactgctgctgctaggagcaggcgagagcggaaagagcactatcgtgaagcaaatgcgtattttgcatgttaatggctttaacggggagggcggagaggaagatcctcaggctgcccggagtaattccgacggcgaaaaagccacaaaagtacaggatatcaagaacaacttgaaagaggcgatagagacaattgtcgcagccatgagtaatctggtgccgcctgtggaacttgccaaccccgaaaatcaatttcgggtggactacattctcagcgttatgaatgtgccagattttgactttccccccgagttctacgagcatgcaaaagcactgtgggaagacgaaggggtccgggcttgctacgagcgttccaatgagtatcagcttatagactgcgcccaatattttttggataaaatagatgtgatcaagcaagccgactatgtgccatcagatcaggatttactccgctgccgagttctgacctctgggatctttgagacgaaatttcaggtcgacaaggtcaatttccatatgtttgatgtaggcgggcaacgcgacgagcgcaggaaatggatacagtgttttaatgacgtgaccgctataattttcgtagtagctagcagtagctacaacatggtgataagggaagataatcagaccaacagattgcaggaagccctgaatctattcaagagcatttggaataaccgatggttacggaccatctctgttattctttttctgaataaacaggatctgctggctgaaaaggtcctcgcggggaagagcaaaatcgaggactatttccccgagttcgctaggtacaccactcctgaagacgctacccccgaaccgggagaagaccccagggtgacaagggctaagtactttatcagagacgagtttctgcggatttctaccgcctcgggggatggcaggcactattgctacccccactttacctgcgcggtagataccgagaatatcagaagggtgttcaacgattgtcgggatataatccagagaatgcacctaaggcagtatgaattgctgtag

SEQ ID NO: 10687 - DNA, 2578 bp, Artificial Sequence
  derived and/or modified sequence
agaacctcactgcccgtccctcctcgcctcagtctcctctgtcctctcccaggcaagaggaccggcggaggcacctctctcgagtcttaggctgcggaatctaagactcagcgagaggagcccgggaggagacagaactttccccttttttcccatcccttcttcttgctcagagaggcaagcaaggcgcggagctttagaaagttcttaagtggtcaggaaggtaggtgcttccctttttctcctcacaaggaggtgaggctgggacctccgggccagcttctcacctcatagggtgtacctttcccggctccagcagccaatgtgcttcggagccactctctgcagagccagagggcaggccggcttctcggtgtgtgcctaagaggatggatcggaggtcccgggctcagcagtggcgccgagctcgccataattacaacgacctgtgcccgcccataggccgccgggcagccaccgcgctcctctggctctcctgctccatcgcgctcctccgcgcccttgccacctccaacgcccgtgcccagcagcgcgcggctgcccaacagcgccggagcttccttaacgcccaccaccgctccggcgcccaggtattccctgagtcccccgaatcggaatctgaccacgagcacgaggaggcagaccttgagctgtccctccccgagtgcctagagtacgaggaagagttcgactacgagaccgagagcgagaccgagtccgaaatcgagtccgagaccgacttcgagaccgagcctgagaccgcccccaccactgagcccgagaccgagcctgaagacgatcgcggcccggtggtgcccaagcactccaccttcggccagtccctcacccagcgtctgcacgctctcaagttgcgaagccccgacgcctccccaagtcgcgcgccgcccagcactcaggagccccagagccccagggaaggggaggagctcaagcccgaggacaaagatccaagggaccccgaagagtcgaaggagcccaaggaggagaagcagcggcgtcgctgcaagccaaagaagcccacccgccgtgacgcgtccccggagtccccttccaaaaagggacccatccccatccggcgtcactaatggaggacgccgtccagattctccttgttttcatggattcaggtgctggagaatctggtaaaagcaccattgtgaagcagatgaggatcctgcatgttaatgggtttaatggagagggcggcgaagaggacccgcaggctgcaaggagcaacagcgatggtgagaaggcaaccaaagtgcaggacatcaaaaacaacctgaaagaggcgattgaaaccattgtggccgccatgagcaacctggtgccccccgtggagctggccaaccccgagaaccagttcagagtggactacatcctgagtgtgatgaacgtgcctgactttgacttccctcccgaattctatgagcatgccaaggctctgtgggaggatgaaggagtgcgtgcctgctacgaacgctccaacgagtaccagctgattgactgtgcccagtacttcctggacaagatcgacgtgatcaagcaggctgactatgtgccgagcgatcaggacctgcttcgctgccgtgtcctgacttctggaatctttgagaccaagttccaggtggacaaagtcaacttccacatgtttgacgtgggtggccagcgcgatgaacgccgcaagtggatccagtgcttcaacgatgtgactgccatcatcttcgtggtggccagcagcagctacaacatggtcatccgggaggacaaccagaccaaccgcctgcaggaggctctgaacctcttcaagagcatctggaacaacagatggctgcgcaccatctctgtgatcctgttcctcaacaagcaagatctgctcgctgagaaagtccttgctgggaaatcgaagattgaggactactttccagaatttgctcgctacactactcctgaggatgctactcccgagcccggagaggacccacgcgtgacccgggccaagtacttcattcgagatgagtttctgaggatcagcactgccagtggagatgggcgtcactactgctaccctcatttcacctgcgctgtggacactgagaacatccgccgtgtgttcaacgactgccgtgacatcattcagcgcatgcaccttcgtcagtacgagctgctctaagaagggaacccccaaatttaattaaagccttaagcacaattaattaaaagtgaaacgtaattgtacaagcagttaatcacccaccatagggcatgattaacaaagcaacctttcccttcccccgagtgattttgcgaaacccccttttcccttcagcttgcttagatgttccaaatttagaaagcttaaggcggcctacagaaaaaggaaaaaaggccacaaaagttccctctcactttcagtaaaaataaataaaacagcagcagcaaacaaataaaatgaaataaaagaaacaaatgaaataaatattgtgttgtgcagcattaaaaaaaatcaaaataaaaattaaatgtgagcaaagaa

SEQ ID NO: 10688 - DNA, 1972 bp, Artificial Sequence
  derived and/or modified sequence
tcgccgccgccgcctcctcctccccccgcctccccccgcccgccgcggcgcttttggctcggggcggcggcgggggcccggccgaggcaataagagcggcggcggcggcagcggcggcagcagctcccgcagctcctgctctggtccgcctcggcccggcggcggccatcagccccctcggcctcggctcgaggggcggggagctgcgcgcgcccctcggtccgaccgacaccctccccttcccgcccgtccgcgcgccccgcggcccgcggcccgcagtccgccccgcgcgctccttgccgaggagccgagcccgcgcccggcccgcccgcccggcgctgccccggccctcccggcccgcgtgaggccgcccgcgcccgccgccgccgcagcccggccgcgccccgccgccgccgccgccgccatgggctgcctcgggaacagtaagaccgaggaccagcgcaacgaggagaaggcgcagcgtgaggccaacaaaaagatcgagaagcagctgcagaaggacaagcaggtctaccgggccacgcaccgcctgctgctgctgggtgctggagaatctggtaaaagcaccattgtgaagcagatgaggatcctgcatgttaatgggtttaatggagagggcggcgaagaggacccgcaggctgcaaggagcaacagcgatggtgagaaggcaaccaaagtgcaggacatcaaaaacaacctgaaagaggcgattgaaaccattgtggccgccatgagcaacctggtgccccccgtggagctggccaaccccgagaaccagttcagagtggactacatcctgagtgtgatgaacgtgcctgactttgacttccctcccgaattctatgagcatgccaaggctctgtgggaggatgaaggagtgcgtgcctgctacgaacgctccaacgagtaccagctgattgactgtgcccagtacttcctggacaagatcgacgtgatcaagcaggctgactatgtgccgagcgatcaggacctgcttcgctgccgtgtcctgacttctggaatctttgagaccaagttccaggtggacaaagtcaacttccacatgtttgacgtgggtggccagcgcgatgaacgccgcaagtggatccagtgcttcaacgatgtgactgccatcatcttcgtggtggccagcagcagctacaacatggtcatccgggaggacaaccagaccaaccgcctgcaggaggctctgaacctcttcaagagcatctggaacaacagatggctgcgcaccatctctgtgatcctgttcctcaacaagcaagatctgctcgctgagaaagtccttgctgggaaatcgaagattgaggactactttccagaatttgctcgctacactactcctgaggatgctactcccgagcccggagaggacccacgcgtgacccgggccaagtacttcattcgagatgagtttctgaggatcagcactgccagtggagatgggcgtcactactgctaccctcatttcacctgcgctgtggacactgagaacatccgccgtgtgttcaacgactgccgtgacatcattcagcgcatgcaccttcgtcagtacgagctgctctaagaagggaacccccaaatttaattaaagccttaagcacaattaattaaaagtgaaacgtaattgtacaagcagttaatcacccaccatagggcatgattaacaaagcaacctttcccttcccccgagtgattttgcgaaacccccttttcccttcagcttgcttagatgttccaaatttagaaagcttaaggcggcctacagaaaaaggaaaaaaggccacaaaagttccctctcactttcagtaaaaataaataaaacagcagcagcaaacaaataaaatgaaataaaagaaacaaatgaaataaatattgtgttgtgcagcattaaaaaaaatcaaaataaaaattaaatgtgagcaaagaa

SEQ ID NO: 10689 - DNA, 1185 bp, Artificial Sequence
  derived and/or modified sequence
atgggctgcctgggcaacagcaagacagaggaccagagaaatgaggagaaggcccagcgggaggccaacaagaagattgagaagcagctgcagaaggacaagcaggtgtaccgggccacccaccggctgctgctgctgggcgctggggagagcggcaagagcaccatcgtgaagcagatgaggatcctgcacgtgaatggcttcaatggagagggcggggaggaggacccccaggccgcccggagcaacagtgatggagagaaggccaccaaggtgcaggacatcaagaacaacctgaaggaggccatcgagaccatcgtggccgccatgagcaacctggtgccccctgtggagctggccaaccctgagaaccagttccgggtggactacatcctgtctgtgatgaatgtgcctgactttgacttccccccagagttctatgaacatgccaaggccctgtgggaggatgagggcgtgcgggcctgctatgaaagaagcaatgagtaccagctgattgactgtgcccagtacttcctggacaagattgatgtgatcaagcaggccgactatgtgcccagcgaccaggacctgctgcgctgccgggtgctgaccagcggcatctttgagaccaagttccaggtggacaaggtgaacttccacatgtttgatgtgggcggccagagagatgaaagaaggaagtggatccagtgcttcaatgatgtgacagccatcatctttgtggtggccagcagcagctacaacatggtgatccgggaggacaaccagaccaaccggctgcaggaggccctgaacctcttcaagagcatctggaacaaccgctggctgcggaccatcagcgtcatcctcttcctgaacaagcaggacctgctggccgagaaggtgctggccggcaagagcaagattgaggactacttccctgagtttgcccgctacaccaccccagaagatgccaccccagagcccggggaggacccccgggtgacccgggccaagtacttcatcagagatgagttcctgcgcatcagcacagccagcggagatggccgccactactgctacccccacttcacctgtgctgtggacacagagaacatcagaagagtcttcaatgactgccgggacatcatccagaggatgcacctgcggcagtatgagctgctgtag

SEQ ID NO: 10690 - DNA, 1185 bp, Artificial Sequence
  derived and/or modified sequence
atgggctgcctgggcaacagcaagaccgaggaccagcggaacgaggagaaggcgcagcgggaggccaacaaaaaaatcgagaagcaattgcaaaaagataagcaggtgtaccgcgccacgcacaggttactccttctgggtgctggggagagtggaaaaagcaccatcgtcaagcagatgagaattcttcacgtgaatgggttcaatggtgaggggggtgaggaggatcctcaagccgctcggtcaaattctgacggggagaaagccaccaaagtgcaagatataaaaaacaacctcaaagaggccatagaaaccatagttgccgccatgagcaacctcgtgcctcctgtagagctcgctaaccccgagaaccagttccgtgtggactatattttatctgttatgaacgtccctgatttcgattttcctccagagttttatgagcacgccaaggctttatgggaagacgagggtgttcgcgcttgttacgaacgctccaacgagtatcagttgattgattgtgcccagtactttctggacaagattgacgtgatcaagcaggccgactacgtgccttccgaccaggacctgctgagatgccgggttctgacaagcggtatcttcgaaaccaaattccaagtggacaaggtcaactttcacatgttcgacgtgggagggcagagggatgagcgcagaaaatggattcaatgtttcaatgatgtgacggctataatcttcgtggtggcttccagcagctacaatatggtcatccgtgaggataatcagacaaacaggctgcaggaagcactcaatctttttaagagcatctggaacaataggtggcttaggaccatctctgtgatcctgtttcttaacaagcaggacctgttagccgagaaagttctggccggcaaatctaaaatagaggactactttcccgagtttgctcgatatacaacccctgaagatgctacccccgaacctggggaggaccctagggtgactagggccaagtatttcataagagatgaattcctccggatctccaccgcttccggcgatggacgccattactgctacccacattttacctgcgctgtggatactgaaaacatcagacgcgtgtttaatgactgtagggacatcattcaacggatgcatctgcggcagtatgagttactgtag

SEQ ID NO: 10691 - DNA, 1185 bp, Artificial Sequence
  derived and/or modified sequence
atggggtgccttgggaatagcaagaccgaggatcaaaggaatgaagaaaaggcccagcgcgaggcaaacaagaagatcgaaaaacagctgcagaaggataagcaggtgtacagggccacacacaggttactgctcctgggggcaggtgagtctggtaaaagcaccattgtgaagcagatgaggatcctccatgtgaacggcttcaacggtgaaggtggagaggaggatccacaggccgctaggtcgaactccgatggggaaaaggccacaaaggtccaagacatcaaaaataatctcaaggaagcgattgaaactatcgtggctgcaatgtccaatcttgtgccccctgtggagctagcaaaccctgagaaccagtttcgcgtagattacatcctgtccgttatgaatgttccggactttgatttccccccagagttctatgagcacgcaaaggctctgtgggaggatgaaggggtccgcgcatgctatgagagatccaacgagtaccaactgattgactgcgctcagtatttcttagataagattgacgtgattaaacaggcagattacgtacccagcgatcaggatctactgcggtgccgtgtgctcacttccggcatcttcgagactaagttccaggtggataaggttaacttccacatgttcgacgtgggtgggcagagggacgagagacggaaatggattcagtgttttaatgatgtgacagccatcattttcgtcgtcgcctccagttcttataatatggtgatccgggaagataaccagaccaatcgacttcaggaggcgctgaatttatttaagagcatctggaataacaggtggctacgcaccatcagtgtaattttgttcctcaacaaacaggatctcctggctgaaaaggtgctcgccggaaaaagcaagattgaagactacttcccagagttcgccagatacaccactccagaggacgctaccccggagccgggtgaggatccaagagtgacccgagctaaatactttattcgggacgagtttctgcggatatcgactgcctccggtgacgggaggcactactgctacccgcacttcacatgtgctgtggatactgaaaatatccgaagggtctttaatgattgcagagatatcatacagagaatgcatctgcgccagtacgaactcctgtag

SEQ ID NO: 10692 - DNA, 1185 bp, Artificial Sequence
  derived and/or modified sequence
atgggctgcctgggcaacagcaagaccgaggaccagagaaacgaggagaaggcccagagagaggccaacaagaagatcgagaagcagctgcagaaggacaagcaggtgtacagagccacccacagactgctgctgctgggcgccggcgagagcggcaagagcaccatcgtgaagcagatgagaatcctgcacgtgaacggcttcaacggcgagggcggcgaggaggacccccaggccgccagaagcaacagcgacggcgagaaggccaccaaggtgcaggacatcaagaacaacctgaaggaggccatcgagaccatcgtggccgccatgagcaacctggtgccccccgtggagctggccaaccccgagaaccagttcagagtggactacatcctgagcgtgatgaacgtgcccgacttcgacttcccccccgagttctacgagcacgccaaggccctgtgggaggacgagggcgtgagagcctgctacgagagaagcaacgagtaccagctgatcgactgcgcccagtacttcctggacaagatcgacgtgatcaagcaggccgactacgtgcccagcgaccaggacctgctgagatgcagagtgctgaccagcggcatcttcgagaccaagttccaggtggacaaggtgaacttccacatgttcgacgtgggcggccagagagacgagagaagaaagtggatccagtgcttcaacgacgtgaccgccatcatcttcgtggtggccagcagcagctacaacatggtgatcagagaggacaaccagaccaacagactgcaggaggccctgaacctgttcaagagcatctggaacaacagatggctgagaaccatcagcgtgatcctgttcctgaacaagcaggacctgctggccgagaaggtgctggccggcaagagcaagatcgaggactacttccccgagttcgccagatacaccacccccgaggacgccacccccgagcccggcgaggaccccagagtgaccagagccaagtacttcatcagagacgagttcctgagaatcagcaccgccagcggcgacggcagacactactgctacccccacttcacctgcgccgtggacaccgagaacatcagaagagtgttcaacgactgcagagacatcatccagagaatgcacctgagacagtacgagctgctgtag

SEQ ID NO: 10693 - protein, 142 aa, Artificial Sequence
  derived and/or modified sequence
MVLSPADKTNVKAAWGKVGAHAGEYGAEALERMFLSFPTTKTYFPHFDLSHGSAQVKGHGKKVADALTNAVAHVDDMPNALSALSDLHAHKLRVDPVNFKLLSHCLLVTLAAHLPAEFTPAVHASLDKFLASVSTVLTSKYR

SEQ ID NO: 10694 - protein, 110 aa, Artificial Sequence
  derived and/or modified sequence
MFLSFPTTKTYFPHFDLSHGSAQVKGHGKKVADALTNAVAHVDDMPNALSALSDLHAHKLRVDPVNFKLLSHCLLVTLAAHLPAEFTPAVHASLDKFLASVSTVLTSKYR

SEQ ID NO: 10695 - DNA, 429 bp, Artificial Sequence
  derived and/or modified sequence
atggtcctgtccccggccgacaagaccaatgtgaaggccgcgtggggaaaagtaggggcgcatgccggagaatacggagctgaagcgcttgagcgcatgttcttaagcttccctacaacgaaaacatacttccctcactttgatctttctcatggctccgcacaggtgaaaggacacggaaagaaagtagccgatgcgttgacaaatgcagtcgcacatgtggacgatatgccaaacgctctaagtgccctgtccgatctgcacgcacacaagcttcgggttgacccagtgaactttaagctactgagtcattgcctgctggtgaccctcgctgcccatctcccagcagagttcactccagctgtccacgcctctctagacaagttcctggccagcgtctctaccgttctgacatctaagtacagatag

SEQ ID NO: 10696 - DNA, 429 bp, Artificial Sequence
  derived and/or modified sequence
atggttctcagccctgcagataagaccaacgtgaaagccgcttggggcaaggtaggagctcatgccggcgaatatggcgccgaggctcttgagaggatgtttctttcatttcctactactaagacctacttcccacactttgacctgtctcatggctctgctcaggtgaaaggtcacggaaaaaaggttgccgacgcactgacaaacgctgtggctcacgtcgatgatatgcctaatgccctctccgcgctctcagaccttcacgcgcataagctcagggtggatcccgtgaacttcaagctgctgtcccactgcctgttggtcactttggccgcccatttgccggcagagtttacccctgccgtgcacgccagtctggataaattccttgccagtgtgagtaccgtgctgacttccaagtatcgctag

SEQ ID NO: 10697 - DNA, 333 bp, Artificial Sequence
  derived and/or modified sequence
atgtttctgtcattcccaactacaaaaacatactttcctcacttcgacctgtcccacgggtcggctcaagtgaaggggcatgggaaaaaggtcgccgacgctctcactaacgctgttgcccatgtagatgacatgcctaatgctctcagcgctctgagcgatttgcacgcacacaagctgagagtggatccagtgaatttcaagctgcttagtcactgcctgctggtgacgctggcagcgcatctgcccgccgagttcacgccagcggtccacgccagccttgacaagttcttggctagcgtgtctaccgtcctcaccagtaaatatagatag

SEQ ID NO: 10698 - DNA, 577 bp, Artificial Sequence
  derived and/or modified sequence
actcttctggtccccacagactcagagagaacccaccatggtgctgtctcctgccgacaagaccaacgtcaaggccgcctggggtaaggtcggcgcgcacgctggcgagtatggtgcggaggccctggagaggatgttcctgtccttccccaccaccaagacctacttcccgcacttcgacctgagccacggctctgcccaggttaagggccacggcaagaaggtggccgacgcgctgaccaacgccgtggcgcacgtggacgacatgcccaacgcgctgtccgccctgagcgacctgcacgcgcacaagcttcgggtggacccggtcaacttcaagctcctaagccactgcctgctggtgaccctggccgcccacctccccgccgagttcacccctgcggtgcacgcctccctggacaagttcctggcttctgtgagcaccgtgctgacctccaaataccgttaagctggagcctcggtggccatgcttcttgccccttgggcctccccccagcccctcctccccttcctgcacccgtacccccgtggtctttgaataaagtctgagtgggcggca

SEQ ID NO: 10699 - DNA, 605 bp, Artificial Sequence
  derived and/or modified sequence
cataaaccctggcgcgctcgcgggccggcactcttctggtccccacagactcagagagaacccaccatggtgctgtctcctgccgacaagaccaacgtcaaggccgcctggggtaaggtcggcgcgcacgctggcgagtatggtgcggaggccctggagaggatgttcctgtccttccccaccaccaagacctacttcccgcacttcgacctgagccacggctctgcccaggttaagggccacggcaagaaggtggccgacgcgctgaccaacgccgtggcgcacgtggacgacatgcccaacgcgctgtccgccctgagcgacctgcacgcgcacaagcttcgggtggacccggtcaacttcaagctcctaagccactgcctgctggtgaccctggccgcccacctccccgccgagttcacccctgcggtgcacgcctccctggacaagttcctggcttctgtgagcaccgtgctgacctccaaataccgttaagctggagcctcggtagccgttcctcctgcccgctgggcctcccaacgggccctcctcccctccttgcaccggcccttcctggtctttgaataaagtctgagtgggcagca

SEQ ID NO: 10700 - DNA, 429 bp, Artificial Sequence
  derived and/or modified sequence
atggtgctgagccctgctgacaagaccaacgtgaaggccgcctggggcaaggtgggcgcccacgccggggagtatggagctgaggccctggagaggatgttcctgtccttccccaccaccaagacctacttcccccactttgacctgagccacggcagcgcccaggtgaagggccacggcaagaaggtggctgatgccctgaccaatgctgtggcccacgtggatgacatgcccaatgccctgagcgccctgagtgacctgcacgcccacaagctgcgggtggaccctgtgaacttcaagctgctgagccactgcctgctggtgaccctggccgcccacctgcctgctgagttcaccccagctgtgcacgccagcctggacaagttcctggcctctgtgtccacagtgctgaccagcaagtacagatag

SEQ ID NO: 10701 - DNA, 333 bp, Artificial Sequence
  derived and/or modified sequence
atgttcctgtccttccccaccaccaagacctacttcccccactttgacctgagccacggcagcgcccaggtgaagggccacggcaagaaggtggctgatgccctgaccaatgctgtggcccacgtggatgacatgcccaatgccctgagcgccctgagtgacctgcacgcccacaagctgcgggtggaccctgtgaacttcaagctgctgagccactgcctgctggtgaccctggccgcccacctgcctgctgagttcaccccagctgtgcacgccagcctggacaagttcctggcctctgtgtccacagtgctgaccagcaagtacagatag

SEQ ID NO: 10702 - DNA, 429 bp, Artificial Sequence
  derived and/or modified sequence
atggtgctgagccccgccgacaagaccaacgtgaaggccgcctggggcaaagtgggtgcccacgctggagaatacggggccgaggctttagagcgaatgtttctgtcttttccgacaaccaaaacatactttcctcacttcgatttgagtcacggcagcgcccaggtgaaggggcatgggaagaaagtcgccgatgccctgacaaacgccgtcgcgcatgtggatgacatgcctaatgccctatcagcgttgtcagaccttcacgcgcacaagctgcgtgttgatccagttaactttaagttactgagtcactgtctcttggttacccttgctgcccatctgcctgccgagtttactccagcggtccacgcctcccttgacaagttcctggcttccgtgtcaacagttctgaccagtaaatacagatag

SEQ ID NO: 10703 - DNA, 429 bp, Artificial Sequence
  derived and/or modified sequence
atggtgctgagccccgccgacaagaccaacgtgaaggccgcctggggaaaggtgggggcccacgcgggcgaatacggcgccgaggccctcgagaggatgttcctgagctttcccactactaagacctacttcccccatttcgacctttcccacggcagcgcgcaggttaagggccatgggaaaaaggtagcagatgctctcactaacgctgttgctcacgtagacgacatgccaaacgctctgtcagctctttccgacctgcatgcccataagttacgggtggacccagtgaatttcaaattgctaagtcactgtttgcttgtgactcttgcggcccatctacccgctgagttcacccctgctgtgcacgccagtctcgacaagtttctggcctccgtcagtacggttctgacaagtaagtaccggtag

SEQ ID NO: 10704 - DNA, 333 bp, Artificial Sequence
  derived and/or modified sequence
atgttcctgagcttccccaccaccaagacctacttcccccacttcgacttatctcatggctcagcacaagtgaaaggtcatggcaaaaaggtggctgacgccctaacaaacgccgttgcacacgtggatgacatgcccaacgccttatcagcactgtcggacttacatgcgcacaaacttagggtggacccggtgaactttaaactgctgtctcattgtttactcgtcacactcgcggcgcatcttccagcggagtttacaccagctgtgcatgcgagtctcgacaagttcctggcgtctgtcagtactgttctgaccagtaaatataggtag

SEQ ID NO: 10705 - DNA, 429 bp, Artificial Sequence
  derived and/or modified sequence
atggtcttatcgcctgccgataaaaccaacgtgaaggctgcttgggggaaagtcggagcacatgctggtgaatacggcgctgaagctctggaacggatgttcctcagttttccgacgacaaagacgtacttccctcacttcgaccttagccacggttcggcccaagtcaaaggccatggaaagaaagtggcagacgcactaactaatgccgtagctcatgtggacgatatgccaaatgccctatcagccctgagtgacctccatgcccataaactccgggttgatccagttaactttaaactgctgtcgcattgtctgcttgtgacactcgcagctcatctcccggctgagtttacccccgctgtacacgcatctctggacaagtttctggctagtgtgtcgacggtcctgacttcaaaatatcgttag

SEQ ID NO: 10706 - DNA, 429 bp, Artificial Sequence
  derived and/or modified sequence
atggttctatctccagctgacaagacaaacgtcaaagccgcatgggggaaagttggtgctcacgcgggagaatacggcgctgaggcattagaacgcatgtttctttctttcccgacgacaaaaacctatttcccgcatttcgacctgtcgcatggatcagcccaggtgaaaggccatgggaaaaaggtggctgatgcactgacgaatgctgtcgcccacgtggacgatatgccaaacgctttgtcagcactatcagacttacacgcccacaagttgcgggtcgatccagttaacttcaaacttctgagccattgccttctggtaaccctcgcagcacatctgcccgctgaatttacccccgcagtacatgcctctttggacaagttcctcgcctccgtcagtacagttttgacaagcaagtatcgctag

SEQ ID NO: 10707 - DNA, 333 bp, Artificial Sequence
  derived and/or modified sequence
atgtttttgagttttccgactacgaagacgtacttccctcactttgatctgtcacatgggtccgcccaggtgaaaggacatggcaaaaaagtggctgacgccctgacgaatgctgtcgctcatgtcgacgacatgcctaacgccctctcggccctttcggacctgcacgctcacaaactcagagtcgaccccgtgaacttcaaacttttgagtcactgcctgctggtaaccctagctgcgcacctgccagctgagtttacaccagcagtccatgcatcattggataagtttttggcctcggtgtctactgttttgacctccaagtatcggtag

SEQ ID NO: 10708 - DNA, 429 bp, Artificial Sequence
  derived and/or modified sequence
atggtgctgagccccgccgacaagaccaacgtgaaggccgcctggggcaaggtgggcgcccacgccggcgagtacggcgccgaggccctggagagaatgttcctgagcttccccaccaccaagacctacttcccccacttcgacctgagccacggcagcgcccaggtgaagggccacggcaagaaggtggccgacgccctgaccaacgccgtggcccacgtggacgacatgcccaacgccctgagcgccctgagcgacctgcacgcccacaagctgagagtggaccccgtgaacttcaagctgctgagccactgcctgctggtgaccctggccgcccacctgcccgccgagttcacccccgccgtgcacgccagcctggacaagttcctggccagcgtgagcaccgtgctgaccagcaagtacagatag

SEQ ID NO: 10709 - DNA, 333 bp, Artificial Sequence
  derived and/or modified sequence
atgttcctgagcttccccaccaccaagacctacttcccccacttcgacctgagccacggcagcgcccaggtgaagggccacggcaagaaggtggccgacgccctgaccaacgccgtggcccacgtggacgacatgcccaacgccctgagcgccctgagcgacctgcacgcccacaagctgagagtggaccccgtgaacttcaagctgctgagccactgcctgctggtgaccctggccgcccacctgcccgccgagttcacccccgccgtgcacgccagcctggacaagttcctggccagcgtgagcaccgtgctgaccagcaagtacagatag

SEQ ID NO: 10710 - protein, 16 aa, Artificial Sequence
  derived and/or modified sequence
LLGNVLVCVLAHHFGK

SEQ ID NO: 10711 - protein, 147 aa, Artificial Sequence
  derived and/or modified sequence
MVHLTPEEKSAVTALWGKVNVDEVGGEALGRLLVVYPWTQRFFESFGDLSTPDAVMGNPKVKAHGKKVLGAFSDGLAHLDNLKGTFATLSELHCDKLHVDPENFRLLGNVLVCVLAHHFGKEFTPPVQAAYQKVVAGVANALAHKYH

SEQ ID NO: 10712 - protein, 90 aa, Artificial Sequence
  derived and/or modified sequence
MVHLTPEEKSAVTALWGKVNVDEVGGEALGRLLVVYPWTQRFFESFGDLSTPDAVMGNPKVKAHGKKVLGAFSDGLAHLDNLKGTFATLS

SEQ ID NO: 10713 - DNA, 602 bp, Artificial Sequence
  derived and/or modified sequence
gggaaataagagagaaaagaagagtaagaagaaatataagagccaccatggtgcatctgaccccagaagagaagagcgcggtgactgccctttggggaaaggtcaacgtggatgaagtgggaggagaagctctcggcagactccttgtggtgtacccgtggacgcaacgcttctttgagtcatttggcgacctgtcgacccctgatgccgtcatgggtaatcctaaggttaaggcacatggaaagaaggtgctgggcgcattttcggatgggcttgcacatcttgataatcttaaaggtacttttgcaactctctccgaactgcactgtgacaagctgcatgtggaccccgagaacttccggctccttggtaacgtcctggtctgcgtgttggctcatcactttgggaaagaattcaccccacctgtccaggcggcataccaaaaggtggtcgccggagtggcaaacgcactggcccacaaataccattgataataggctggagcctcggtggccatgcttcttgccccttgggcctccccccagcccctcctccccttcctgcacccgtacccccgtggtctttgaataaagtctgagtgg

SEQ ID NO: 10714 - DNA, 444 bp, Artificial Sequence
  derived and/or modified sequence
atggtgcatctcacccccgaagagaaaagcgcagtcaccgccctctggggaaaggtgaatgtggacgaagtgggaggagaagccctgggtaggttgttggtcgtttacccctggacccagcgcttctttgagtctttcggagatctctctaccccagatgccgtcatgggtaatcccaaggtcaaggctcacgggaagaaggttctgggagcctttagtgacgggttggctcacctggataacctcaagggaacgttcgcgactctgtccgaactgcattgcgacaagctgcacgtggatcctgaaaattttcgattattaggaaatgtgctcgtctgtgttttagcacatcatttcggcaaagaattcaccccgccagtgcaggctgcgtatcaaaaggtggtggcaggagtcgccaatgccttggcccacaagtatcactag

SEQ ID NO: 10715 - DNA, 273 bp, Artificial Sequence
  derived and/or modified sequence
atggtgcaccttaccccagaagagaaaagtgcggtgacagctttgtggggaaaggtgaacgttgatgaagtgggcggagaggccctggggcggctgctcgtagtttatccctggactcagagattttttgagtctttcggtgacctctcaaccccagacgctgtcatgggcaatcctaaggtcaaagcacacggcaagaaggtcctaggagccttttctgacgggcttgcccacctggataacctgaaaggcacttttgccacactatcatag

SEQ ID NO: 10716 - DNA, 754 bp, Artificial Sequence
  derived and/or modified sequence
cggctgtcatcacttagacctcaccctgtggagccacaccctagggttggccaatctactcccaggagcagggagggcaggagccagggctgggcataaaagtcagggcagagccatctattgcttacatttgcttctgacacaactgtgttcactagcaacctcaaacagacaccatggtgcatctgactcctgaggagaagtctgccgttactgccctgtggggcaaggtgaacgtggatgaagttggtggtgaggccctgggcaggctgctggtggtctacccttggacccagaggttctttgagtcctttggggatctgtccactcctgatgctgttatgggcaaccctaaggtgaaggctcatggcaagaaagtgctcggtgcctttagtgatggcctggctcacctggacaacctcaagggcacctttgccacactgagtgagctgcactgtgacaagctgcacgtggatcctgagaacttcaggctcctgggcaacgtgctggtctgtgtgctggcccatcactttggcaaagaattcaccccaccagtgcaggctgcctatcagaaagtggtggctggtgtggctaatgccctggcccacaagtatcactaagctcgctttcttgctgtccaatttctattaaaggttcctttgttccctaagtccaactactaaactgggggatattatgaagggccttgagcatctggattctgcctaataaaaaacatttattttcattgcaa

SEQ ID NO: 10717 - DNA, 502 bp, Artificial Sequence
  derived and/or modified sequence
ttggaaaagcaacccctgccttgaagccaggatgatggtatctgcagcagttgccaacacaagagaaggatccatagttcatcatttaaaaaagaaaacaaaatagaaaaaggaaaactatttctgagcataagaagttgtaggaaggttttaatccaaataaggagaagatatgcttagaaccgaggtagagttttcatccattctgtcctcaacctcaaacagacaccatggtgcatctgactcctgaggagaagtctgccgttactgccctgtggggcaaggtgaacgtggatgaagttggtggtgaggccctgggcaggctgctggtggtctacccttggacccagaggttctttgagtcctttggggatctgtccactcctgatgctgttatgggcaaccctaaggtgaaggctcatggcaagaaagtgctcggtgcctttagtgatggcctggctcacctggacaacctcaagggcacctttgccacactgagtga

SEQ ID NO: 10718 - DNA, 444 bp, Artificial Sequence
  derived and/or modified sequence
atggtgcacctgaccccagaggagaagtctgctgtgacagccctgtggggcaaggtgaatgtggatgaggtgggcggggaggccctgggccgcctgctggtggtgtacccctggacccagcgcttctttgagagctttggagacctgagcaccccagatgctgtgatgggcaaccccaaggtgaaggcccacggcaagaaggtgctgggcgccttcagtgatggcctggcccacctggacaacctgaagggcacctttgccaccctgtctgagctgcactgtgacaagctgcacgtggaccctgagaacttccggctgctgggcaatgtgctggtgtgtgtgctggcccaccactttgggaaggagttcaccccacctgtgcaggccgcctaccagaaggtggtggccggcgtggccaatgccctggcccacaagtaccactag

SEQ ID NO: 10719 - DNA, 273 bp, Artificial Sequence
  derived and/or modified sequence
atggtgcacctgaccccagaggagaagtctgctgtgacagccctgtggggcaaggtgaatgtggatgaggtgggcggggaggccctgggccgcctgctggtggtgtacccctggacccagcgcttctttgagagctttggagacctgagcaccccagatgctgtgatgggcaaccccaaggtgaaggcccacggcaagaaggtgctgggcgccttcagtgatggcctggcccacctggacaacctgaagggcacctttgccaccctgtcctag

SEQ ID NO: 10720 - DNA, 444 bp, Artificial Sequence
  derived and/or modified sequence
atggtgcacctgacccccgaggagaagagcgccgtgaccgccctgtggggaaaagtgaacgtggatgaggtgggcggggaggctctgggccgcctacttgttgtgtatccatggactcaacggttcttcgagtcctttggcgatctaagcacgcccgatgctgtcatgggaaacccgaaagttaaagcccacggaaaaaaggtactgggggctttctccgatgggctggctcatctcgataatttaaaggggacattcgctaccctgtctgagctccactgtgacaaactgcatgtcgacccagagaactttaggcttctgggaaatgtgctagtgtgtgtgctggcccaccacttcggtaaggaatttactccaccggtgcaggctgcttatcagaaagttgtggctggagtagctaacgccttggcacacaagtatcactag

SEQ ID NO: 10721 - DNA, 273 bp, Artificial Sequence
  derived and/or modified sequence
atggtgcacctgacccccgaggagaagagcgccgtgaccgccctgtgggggaaagttaacgtggatgaggtggggggagaggcattgggccgcttgctagtagtgtacccttggacgcagcgattcttcgagtcatttggagatctttccactcctgatgccgtgatgggaaacccaaaggtgaaggcccatgggaagaaggtcttgggcgccttcagcgatgggctggcacaccttgataaccttaaaggcacttttgcaacgcttagttag

SEQ ID NO: 10722 - DNA, 444 bp, Artificial Sequence
  derived and/or modified sequence
atggtgcacctgactcccgaagaaaagtccgcagttaccgcactgtgggggaaggtcaatgtcgacgaagtaggcggagaggccctcggcagactcctggtggtctatccatggacacagcggttcttcgagtctttcggtgatcttagcacccctgacgccgttatgggtaatcctaaggtgaaagcacatgggaagaaggtgcttggggcattttccgatggccttgcccacttggataatttaaaagggactttcgctacgctgagtgagctgcactgtgacaaattgcacgttgatcctgaaaattttaggctcctaggcaatgtgctggtttgtgtcctggcccaccacttcgggaaagagttcaccccaccggtgcaggctgcttatcagaaagtagttgccggagttgccaacgcactagcccacaagtatcactag

SEQ ID NO: 10723 - DNA, 273 bp, Artificial Sequence
  derived and/or modified sequence
atggtgcacctgaccccagaggaaaaaagcgcggttactgcactgtggggcaaggtgaatgtcgatgaagtggggggagaagctctcggcaggttactggtggtgtatccctggactcagagatttttcgagtctttcggcgacttgtccacccccgacgcagtcatgggcaatccaaaagttaaggcacatgggaaaaaagtgctgggagccttctctgacggcctagcacacctggacaatctcaagggcactttcgctacactctcatag

SEQ ID NO: 10724 - DNA, 441 bp, Artificial Sequence
  derived and/or modified sequence
atggtccatctgactccggaagagaaatcagcggttaccgccctttggggaaaggtcaacgtggatgaagtcggaggcgaagccctgggtcgcctgctggtcgtgtacccatggactcaacggttcttcgaatcgttcggtgacctctccaccccagacgccgtcatgggtaacccgaaggtgaaggcccacggaaagaaggtgctgggggcgttttccgatggactggcgcatttggacaatctcaagggaactttcgccaccctgtccgagctgcactgcgataagctccacgtcgatccggagaactttcgcctgctcggaaacgtgcttgtgtgtgtgttggcccaccattttggaaaggagttcactccgcctgtccaagctgcctatcagaaggttgtggctggagtcgcgaatgccctggcccacaagtaccac

SEQ ID NO: 10725 - DNA, 441 bp, Artificial Sequence
  derived and/or modified sequence
atggtgcacctgacccccgaagaaaagagcgccgtgaccgcgctttggggtaaagtgaatgtcgacgaagttggaggtgaagcgttggggcggctgctcgtggtgtatccctggactcagcgctttttcgagtctttcggagatctgtccacgccggatgctgtcatgggaaacccgaaggtcaaggctcatgggaagaaagtgctgggagcattctccgacggcctggcgcatctggacaatctgaagggcaccttcgccaccctttcggagttgcactgtgacaaattgcacgtggacccggaaaacttcaggctgcttggaaacgtgctcgtgtgcgtgcttgcacatcactttggaaaagagttcactccaccggtccaggcagcgtaccaaaaggtggtcgccggcgtcgccaacgcattggcacacaagtaccat

SEQ ID NO: 10726 - DNA, 441 bp, Artificial Sequence
  derived and/or modified sequence
atggtgcatctgacccctgaggaaaaatcggcggttacggcgctgtggggaaaagtcaatgtggatgaggttggcggtgaagcactcggacgcctgcttgtcgtctacccgtggactcagcggtttttcgaatccttcggagatttgagcaccccggacgcggtgatgggaaaccccaaggtgaaggctcacgggaagaaggtgttgggagcattctcggacggcctggctcaccttgacaacctgaagggcacctttgccactttgtccgaattgcattgtgataagctccacgtcgacccggagaacttcagactcttggggaatgtgcttgtctgcgtgctggcacaccatttcggaaaagagttcactccacctgtgcaggccgcataccaaaaggtagtcgccggagtggcaaacgctcttgcccacaagtaccat

SEQ ID NO: 10727 - DNA, 441 bp, Artificial Sequence
  derived and/or modified sequence
atggtgcacctgacgcctgaggaaaagtcagccgtgactgctctgtggggaaaggtgaatgtggatgaagtgggcggagaagcattgggccggctcctcgtggtctacccatggacccagaggttcttcgagtcatttggtgacctctcgaccccggacgccgtgatgggaaatccgaaagtgaaggcgcacggcaagaaagtgctgggcgccttctcagacggactcgcccatctcgataacctcaagggaacttttgcaaccctgagcgaactgcactgcgacaagctgcacgtggaccctgaaaacttccgcctgctcggtaacgtgctggtgtgcgtgctggcgcatcattttggaaaggaattcactccgccggtgcaggccgcataccaaaaagtcgtggcgggagtggccaatgccctggcacacaagtaccat

SEQ ID NO: 10728 - DNA, 441 bp, Artificial Sequence
  derived and/or modified sequence
atggtgcatcttacccccgaagagaaatctgctgtcaccgcgctctggggtaaggtgaatgtcgacgaagtcggtggtgaggcacttggccgtttgcttgtcgtctacccgtggacacagcggttcttcgagagttttggggatctatctacacccgacgcagtcatggggaaccctaaggtcaaggcgcatggcaagaaagttttgggtgcattcagtgatggtctcgctcatttagataacctgaagggaaccttcgcaaccctgtcggaattacactgtgataaactgcacgttgaccctgaaaacttccgcctgctcggtaacgtcctcgtctgcgtcctggcacatcatttcggtaaagagtttacacctccagttcaggcggcatatcagaaggtagtggctggcgtggcaaacgccttggcacacaaatatcac

SEQ ID NO: 10729 - DNA, 441 bp, Artificial Sequence
  derived and/or modified sequence
atggttcatctcacacctgaggagaagagtgccgtgacagctctctggggcaaggtgaatgttgatgaagtcggcggcgaggccttagggcgactgctggtggtgtacccctggacccagaggttcttcgaatcattcggggacctgagcaccccagatgccgtcatgggcaatcccaaagtaaaagctcatggcaaaaaagtgttaggggcattctctgatggcctcgcccacttggacaatctgaagggtacatttgccactctgtcagagctgcattgcgataagctacatgttgaccccgagaattttaggctgctcggcaatgtgctggtctgtgttttagctcaccactttggcaaggagtttaccccacccgtgcaggccgcctatcagaaagtggtggcaggtgtggccaatgctctcgcccataagtaccac

SEQ ID NO: 10730 - DNA, 441 bp, Artificial Sequence
  derived and/or modified sequence
atggttcacctgaccccagaggaaaagagcgctgtgactgctctctggggcaaggtgaatgtggatgaggtcggtggggaggcccttggcaggctgctggtggtgtacccgtggactcaacgcttcttcgagtcttttggggacctctctacccccgatgccgttatggggaatccgaaagtgaaagcccacggcaagaaagtactaggcgccttctctgatggtttagcacacctggataacctgaagggcacatttgccacattgtcagagttgcactgtgataagctacacgttgatccagagaacttcaggctgctgggcaatgtcctcgtttgtgtactagctcatcattttggtaaagagtttaccccacccgttcaggcggcttaccagaaggtggtggctggcgtggccaatgcactagcacataaatatcac

SEQ ID NO: 10731 - DNA, 441 bp, Artificial Sequence
  derived and/or modified sequence
atggtgcatctgaccccagaggagaagtccgcagtcactgcactttggggcaaggtgaatgtggatgaagtcggcggggaagcacttggacgactcctcgtggtgtacccttggacccaacgcttttttgaatcgtttggggacttgtccacccccgacgcggtaatggggaacccaaaggtgaaagcacacggcaagaaggtgcttggagcgttctcagatggactcgcacaccttgacaatctgaaggggacttttgccaccctctcagaacttcactgtgataagctgcatgtggatccggagaactttagactgctgggtaacgtgctggtgtgcgttcttgcgcaccatttcggtaaggagttcactcctccagtgcaggcagcctatcagaaggtggtcgcgggcgttgcaaacgcgctggcacacaaataccac

SEQ ID NO: 10732 - DNA, 441 bp, Artificial Sequence
  derived and/or modified sequence
atggtccacctgactcccgaagaaaaatctgccgttaccgctctgtggggcaaggttaatgtagacgaggtagggggagaagcactggggagactactagtcgtgtatccctggactcagaggttctttgagtcctttggtgacctgtcaactccagacgccgttatgggaaatcctaaggtgaaggcacacgggaaaaaggttctcggcgctttttctgacgggttggcccacctggataatctcaagggcacttttgctacgctctcggagctccattgcgacaagctgcatgtggatccggaaaatttcagattgcttggcaatgtcctggtatgcgtgcttgcccaccacttcggcaaggagtttaccccaccagtgcaagctgcctaccaaaaggtcgtggcaggcgtggccaatgccctggcccataaatatcac

SEQ ID NO: 10733 - DNA, 441 bp, Artificial Sequence
  derived and/or modified sequence
atggtccatttgaccccagaggagaagtccgctgttaccgcactctggggcaaggtgaacgtggacgaagttggaggagaagcgttgggaagactcttggtcgtatacccatggacgcagaggttctttgagtcgttcggggacctttcaactcctgatgcggtgatgggtaaccctaaagtgaaggctcacggcaagaaagtgctgggggccttctcggatggactggcgcatttggacaatctgaagggtaccttcgcaaccctgagcgaacttcattgcgataaacttcacgtagacccagaaaacttccgcctgctgggaaatgtcctcgtgtgtgttctcgcacaccacttcggcaaggagttcactccgccggtgcaagcggcctatcagaaagtggtcgccggggtggccaacgccctggcacataagtaccac

SEQ ID NO: 10734 - DNA, 441 bp, Artificial Sequence
  derived and/or modified sequence
atggttcatctcacccccgaagaaaagtccgctgtgaccgctctgtggggcaaggttaacgtcgacgaggtcggaggagaagcccttggacggctgctggttgtctacccgtggactcagcgcttcttcgagagcttcggggacctgtccacgccagatgcagtgatgggaaatcccaaggtgaaagcgcacgggaagaaagtccttggcgctttctcagatggactcgcccaccttgataacctcaaaggaactttcgccaccctgagcgaactccactgcgacaagctccatgtggacccagagaacttcagactgttgggtaatgtccttgtgtgcgtgctggcgcaccattttggaaaggagttcacccctcctgtccaagctgcataccagaaggtggtcgctggtgtcgccaacgccctggcccacaaataccac

SEQ ID NO: 10735 - DNA, 441 bp, Artificial Sequence
  derived and/or modified sequence
atggttcatctgacacctgaagaaaagtctgctgtgacagccttatgggggaaagtaaatgttgacgaggtcggaggagaagcactgggacggcttctggtagtctacccctggactcagagattttttgaatccttcggggacttatctacacctgacgccgtcatgggaaatcccaaagttaaagcacacggaaaaaaagtgctaggggctttctctgatgggctggcacacctggataatctcaaagggacattcgctacactatctgaattacactgcgataaacttcacgtcgatcccgagaatttcagattgctgggaaacgtgctcgtgtgtgtccttgcccaccacttcgggaaagaattcacacccccagtacaggccgcataccagaaagtggtcgcgggagtcgccaacgcattagcacataaatatcac

SEQ ID NO: 10736 - DNA, 441 bp, Artificial Sequence
  derived and/or modified sequence
atggtgcacttaacaccagaagagaagtcggcagtgacagctctgtggggaaaggtaaatgtcgacgaggtgggcggcgaggctttaggacggctgcttgtggtgtatccctggactcagaggttttttgagtcctttggagacctgtcgacgccagatgcagtaatgggcaaccccaaggtgaaggctcatggcaagaaggtgctgggcgctttttctgacggcttagctcacttggacaatcttaaaggaacatttgctactctttccgagctgcattgtgataagctgcatgtagatccagaaaactttagactgctgggaaacgttctcgtctgcgttctggcccatcactttgggaaggagttcacaccgccggtccaggctgcctatcagaaggtggttgctggagtggctaatgcacttgcccacaaatatcat

SEQ ID NO: 10737 - DNA, 441 bp, Artificial Sequence
  derived and/or modified sequence
atggtgcacttgacacctgaagagaagtccgccgtaacggccttgtgggggaaggtcaacgtggacgaagtgggcggcgaggctttaggccgtctgttggttgtctacccctggacacagagattcttcgagtcattcggcgatctgtcaacgcctgatgctgttatgggcaaccccaaagtaaaggcccacgggaaaaaagtactgggggccttctctgacggacttgcgcacctagataatctcaaagggacttttgcaacgctgtctgagcttcactgcgataaacttcatgtcgatcccgagaactttaggctgctcggcaatgtgttggtgtgcgttctggcccaccattttgggaaggaatttactccgcccgtgcaagcggcttaccagaaggtagtggcaggagtcgctaacgcgctggctcacaagtaccat

SEQ ID NO: 10738 - DNA, 441 bp, Artificial Sequence
  derived and/or modified sequence
atggttcacttaacccctgaagaaaagtctgccgtaactgcgctctggggcaaagtgaacgtggatgaggtagggggtgaggctttaggacggctgctggtggtctacccgtggacgcagagattttttgaaagctttggcgatctgagtacaccagatgccgtgatggggaaccccaaggttaaggcccatggtaaaaaggtgcttggagctttttctgacggcctggcccatctggacaatttgaagggcacttttgccacactttcagagctgcactgtgataagctccatgtggatcccgagaacttccgcctgcttggaaacgtcctggtctgcgtactggcccaccacttcggtaaggaattcactcctcccgttcaggctgcataccagaaagtcgtcgctggagttgccaacgctctggcccataaataccac

SEQ ID NO: 10739 - DNA, 441 bp, Artificial Sequence
  derived and/or modified sequence
atggtgcatctcacccccgaggagaagagcgctgtcaccgccctgtggggtaaagtgaatgtggacgaggtcggaggcgaggctcttggtcgtctcctggtggtatatccctggacacagcgtttcttcgaatcattcggagatctcagtaccccagatgccgtcatgggcaatcctaaggtgaaggcacatggtaagaaagtcctgggtgccttctccgacggcctggcccacttggacaacttgaagggcacatttgctacactgtctgaattgcactgcgacaagctgcacgtggatcctgaaaattttagactgctcggcaacgtactggtttgcgtccttgcccatcattttggtaaggaattcacccctcccgttcaggctgcataccagaaagttgtcgcaggcgtcgcaaacgccctggctcacaagtaccac

SEQ ID NO: 10740 - DNA, 441 bp, Artificial Sequence
  derived and/or modified sequence
atggtacatctgaccccggaggaaaaatctgccgttacagctttgtgggggaaggtgaacgttgacgaagtcggaggtgaagcattgggcaggctcctcgtggtctatccatggacacagcgtttcttcgagtcttttggggacctgagcacccccgacgccgtgatgggaaatcccaaggtgaaggcgcacggcaagaaggttctgggggctttttcagacgggctagcccacctcgataatctaaaaggcacgttcgcaactctatccgaattgcactgcgacaaactgcacgtagaccctgagaacttccgactgctgggcaacgtcctggtgtgtgtgctggctcatcatttcggtaaggagttcacccccccggttcaggctgcctatcagaaagttgtcgctggcgtcgccaatgccctcgcccataaataccat

SEQ ID NO: 10741 - DNA, 441 bp, Artificial Sequence
  derived and/or modified sequence
atggtgcatcttactccggaggagaagtcagctgtgactgcactctggggaaaggtcaacgtggacgaagtgggaggagaagcactcgggcgcctgctggtggtttacccttggacccaacgcttcttcgaatcgttcggtgacctctcgacccctgacgcagtgatgggtaacccgaaggtcaaggcccacgggaaaaaggtcctcggcgccttttcggatggcctcgcccatctcgacaacctcaaaggaactttcgctaccttgtctgaactgcactgcgacaaacttcacgtcgaccccgagaacttcagactgcttggtaatgtgctggtgtgtgtgctcgctcaccacttcggcaaggagttcaccccgccggtgcaggcagcataccagaaagtggtggccggggtggccaacgccctggcgcacaagtaccac

SEQ ID NO: 10742 - DNA, 441 bp, Artificial Sequence
  derived and/or modified sequence
atggtgcacctgacccctgaggaaaagagcgcggttaccgcactgtggggaaaggtcaacgtggacgaagtggggggtgaagccctgggccgcctcctggtggtgtatccctggacacagcgattttttgagagttttggtgacctcagcacacccgatgcagtgatggggaatccaaaagtaaaagcacacggtaagaaggttctgggggcttttagtgacggactagcccatttggataatctaaagggaacgtttgctactctctcagagttacattgtgacaaactccatgtcgatccggagaatttccgattgctgggaaacgtgctagtatgtgtcctcgctcaccacttcgggaaagagtttacccctcctgtgcaagcagcataccagaaagttgtggccggggtcgcgaacgccctggctcacaagtaccat

SEQ ID NO: 10743 - DNA, 441 bp, Artificial Sequence
  derived and/or modified sequence
atggtgcacctgactccggaagagaaaagcgccgtgaccgcactgtggggtaaggtgaacgtggacgaggtgggaggagaggcactgggacggttgctggtggtctacccgtggacgcagcggttcttcgagtccttcggcgatctctcaactccggatgccgtgatgggtaacccgaaggtgaaagcccacggaaagaaggtcctgggagctttttctgatggcctggcgcatctcgacaacctcaagggaactttcgcaaccctttcggaactccactgcgataagctccacgtggatcctgagaactttaggctgctggggaatgtgctcgtgtgcgtcctcgcccatcacttcggcaaggagttcaccccgccggtgcaggctgcataccagaaggtggtcgctggggtggccaatgccctggcgcacaaataccac

SEQ ID NO: 10744 - DNA, 441 bp, Artificial Sequence
  derived and/or modified sequence
atggtccatttgacaccggaagagaaatcagctgtcacggcgctgtgggggaaggttaatgtggatgaagtggggggggaggctctgggcagactcttggttgtctatccgtggactcagcgattcttcgagtcttttggtgatttatcgactccggatgcagtgatgggaaatccaaaagtcaaagcccacggtaagaaagtgctgggggcattcagtgacggcctggcccatctcgacaatcttaagggcactttcgcaacactgtccgagctacactgtgacaaactgcacgtggatccagaaaacttcaggctcctgggtaatgtgctcgtgtgtgtgctagctcaccattttggaaaggaattcacgccccccgtgcaagctgcttaccagaaagtggtagccggagtcgccaacgccctcgctcataagtaccac

SEQ ID NO: 10745 - DNA, 441 bp, Artificial Sequence
  derived and/or modified sequence
atggtgcacttgactccagaagagaagtccgctgttaccgctttgtggggaaaagtcaacgttgacgaggttggcggcgaggcgctgggccgtctgctggtcgtctacccctggacccagcgcttcttcgagtcctttggtgacctatccactcctgatgccgttatgggcaaccccaaggtcaaggcccacggtaagaaggtcctgggtgccttctccgatggactggcacacctggacaacctgaagggcacgtttgctaccctctcggagctccactgcgataaattgcacgtggaccctgagaacttccggctcctaggtaacgtcctcgtctgtgtgctggcgcaccacttcggtaaggagttcacgccgcccgtgcaggccgcttaccaaaaggtcgtggccggggtggccaacgcgctggcccacaagtaccac

SEQ ID NO: 10746 - DNA, 441 bp, Artificial Sequence
  derived and/or modified sequence
atggtacatctgaccccagaagagaagagcgcagtgacagctctgtggggaaaggtcaacgtcgacgaggtgggtggcgaagctctgggacgtctgcttgtcgtctacccctggacccaacggttctttgaaagtttcggcgatttgtccactcccgacgctgttatgggaaaccccaaggttaaagctcatggcaagaaggtgctgggcgccttcagcgacgggctcgcccacttagacaatctgaaaggaactttcgccactctgagtgaacttcattgtgataaacttcatgtggatcctgaaaattttaggcttttaggcaacgttcttgtgtgtgtgctcgcacaccatttcggaaaggaattcaccccgcctgtgcaagcagcatatcagaaggttgtagctggtgtggcaaatgctctggcgcacaagtatcac

SEQ ID NO: 10747 - DNA, 441 bp, Artificial Sequence
  derived and/or modified sequence
atggtgcatttgacacctgaggaaaaaagcgcagtcacagcattgtggggaaaagtgaacgttgatgaagtaggcggcgaagcattgggaagacttctagttgtatatccgtggacacaacgattctttgaatctttcggggatctttcaaccccggatgcggtcatgggcaatccgaaagtcaaagcccatgggaagaaggttctgggagcttttagcgacggtctggcgcatttggataacttgaagggcacgtttgccacattgtccgaattgcactgcgacaaattgcatgtcgatcccgagaatttccgtttattaggaaatgtccttgtgtgcgttttggctcatcattttggcaaagagttcacgcctccagtgcaggctgcttaccaaaaagttgttgctggagtagctaatgctctagcgcataaataccat

SEQ ID NO: 10748 - DNA, 441 bp, Artificial Sequence
  derived and/or modified sequence
atggtgcatttgacacccgaagagaagagcgctgtaacagcattgtggggcaaagtaaacgttgacgaggtcggcggggaggccctgggaagactcctcgtggtgtatccttggacccagcgcttttttgagtcgttcggtgacctttctacaccagacgccgttatggggaaccccaaggtgaaagctcacggcaagaaagtgctaggtgcattttctgacgggctggcacaccttgacaacctgaagggaacctttgcgaccctgtcggagcttcattgtgacaaactgcatgtcgatccggaaaatttccgcttgctgggcaatgtgcttgtctgcgtgctggcacatcatttcggaaaggaatttacgccaccagtacaggcggcgtatcagaaggtcgtcgccggtgtggcaaacgcccttgcacataaatatcac

SEQ ID NO: 10749 - DNA, 441 bp, Artificial Sequence
  derived and/or modified sequence
atggtacacttgactcctgaggaaaaatcagccgtgaccgctctctgggggaaggtgaacgtggacgaggtgggcggagaggctcttggtaggctcctcgtcgtgtatccttggacacaacgcttctttgagagtttcggcgatctctctacccccgacgctgtgatgggcaaccccaaggttaaagcccacggaaagaaagtgcttggggccttctctgacggcctggcacacctggataatcttaaggggacttttgccactctgtccgagctgcactgtgacaagctgcatgttgatcccgagaatttcagattgctgggtaatgtgctggtgtgcgtgctggcccaccatttcggcaaggagttcacccctccagtgcaggcagcatatcagaaagtggtagccggtgtggcaaacgcgctggcccacaagtatcac

SEQ ID NO: 10750 - DNA, 441 bp, Artificial Sequence
  derived and/or modified sequence
atggtgcaccttacccccgaggaaaagtccgccgtgaccgcactgtggggtaaggtgaacgtggatgaagtgggtggcgaggccctgggtaggctgctggtggtctacccttggacgcagagatttttcgaatcctttggagatctcagcacccctgatgcagtgatgggaaaccccaaggtgaaagcacatgggaaaaaggtgttgggagccttctcggacgggcttgcacatcttgataacctgaagggtacctttgccacccttagcgaactgcactgtgataagttgcatgtggatccggagaattttcggcttctgggcaacgtgctggtgtgtgtgctggctcaccattttggtaaggagtttaccccgccagtccaggcggcctaccagaaagtcgtcgctggggtggcaaacgccctcgcacacaagtaccac

SEQ ID NO: 10751 - DNA, 441 bp, Artificial Sequence
  derived and/or modified sequence
atggtgcacctcactcctgaggaaaagtccgcggtgaccgcgctgtggggtaaggtgaatgtggatgaggtgggaggcgaagccctgggtcggctgctggtcgtgtacccctggacccaacgcttcttcgaatctttcggggacctgtccaccccggatgctgtcatgggaaaccctaaggtgaaagcacacggcaaaaaggtgctcggagctttttcggacgggctcgcccatcttgacaatcttaagggcaccttcgctacgctgtcggaactgcattgcgataaactgcatgttgacccggagaactttaggctgctcggcaacgtgctcgtgtgtgtgttggcccaccactttggaaaggagttcaccccgcctgtgcaggccgcataccaaaaagtcgtggctggagtggccaacgccctggcccataagtatcat

SEQ ID NO: 10752 - DNA, 441 bp, Artificial Sequence
  derived and/or modified sequence
atggttcacctgacccccgaggaaaaatccgcagtcacggccttatggggaaaggtaaacgtagatgaagtgggaggtgaggcattgggtagactactggtggtttacccatggacccagcgctttttcgagtccttcggggacctgtcgacccctgacgccgtgatgggtaatcccaaggtcaaggcccatgggaagaaagtgcttggggctttctcagacggattagcccatctcgataatctaaagggtacatttgctaccctttctgagttgcactgtgacaaattgcacgtggaccccgagaatttccggctgcttggaaatgtcctcgtgtgcgttctggcccaccattttggcaaggagtttacgccacctgttcaagctgcgtaccagaaagtggtggccggcgtcgcaaacgcactcgcacataagtaccac

SEQ ID NO: 10753 - DNA, 441 bp, Artificial Sequence
  derived and/or modified sequence
atggtccatcttacccctgaagaaaagtccgcggtcacggctctgtgggggaaggtgaacgtggatgaagtcggaggagaagcactgggccgccttctggtggtctacccgtggacgcaacgcttttttgagagctttggagacttgtcaacccccgacgcggtcatgggcaaccctaaagtgaaagcccatggtaaaaaggtgctcggagcattctcggacgggcttgcacacctggacaatctgaaaggaaccttcgcaaccctcagcgaactgcactgcgacaagctgcacgtcgatcctgaaaactttcgacttctcggtaacgtgctggtgtgcgtgctggcacatcatttcggaaaagagtttactccaccggtgcaggcagcatatcaaaaagtcgtggcaggtgtggccaatgcactcgcacataagtaccat

SEQ ID NO: 10754 - DNA, 441 bp, Artificial Sequence
  derived and/or modified sequence
atggtgcatctgactcctgaggagaaatccgcggtgacggcgctgtggggtaaggtgaacgtggatgaggttggcggtgaagccctggggcgcctccttgtcgtgtatccttggacccagcgcttcttcgagtctttcggggatcttagtacgccagacgcagtgatggggaatcctaaagttaaagctcatgggaaaaaagtactgggtgccttcagcgatgggttggcgcatctcgacaacctgaagggaacattcgctaccttatccgaattgcactgtgacaaactgcatgtggacccagagaattttcgtctcctgggtaatgtcctggtgtgtgtgttggcccatcactttggaaaggaattcaccccgccagttcaagctgcataccagaaggtcgtagctggagtagccaacgcattggcgcataagtatcac

SEQ ID NO: 10755 - DNA, 441 bp, Artificial Sequence
  derived and/or modified sequence
atggtccacctgacgccagaggagaagtctgccgttaccgcgctgtggggcaaggttaatgttgacgaagtcggaggcgaagcgctcgggcggctgctggttgtgtatccttggactcaacgctttttcgagtcattcggggatctgtccacaccggatgcggtcatgggtaacccaaaggtcaaagcccacggtaagaaggttctgggcgccttcagcgacggcctagctcacctggacaacctaaagggaactttcgcaacactgtcagagctgcactgcgacaaactgcacgtcgatccggaaaacttccggctcctgggtaacgtcctggtctgtgtgcttgcgcaccattttggaaaggagtttactccaccagtgcaagctgcctatcagaaagtggtggctggggtggctaatgcgttggctcacaagtaccat

SEQ ID NO: 10756 - DNA, 441 bp, Artificial Sequence
  derived and/or modified sequence
atggtacatctaacaccggaggagaagtctgcggtcacagctctgtgggggaaagtgaatgtggatgaagttgggggggaagccctggggaggctgctggtggtgtacccatggacacagaggttcttcgaatcctttggtgacctgtccacccctgatgcggtgatggggaatccaaaggtgaaggcccatgggaagaaagtgctcggtgccttcagcgacggactagcacatcttgataatctgaagggaaccttcgctacactaagtgagcttcactgtgataagctccacgtcgaccccgaaaacttccggctcctcggaaacgtattggtatgtgtacttgctcaccatttcggaaaggaattcactccacccgtgcaggctgcctaccagaaggtggtcgccggagtggctaacgcccttgcgcacaaatatcat

SEQ ID NO: 10757 - DNA, 441 bp, Artificial Sequence
  derived and/or modified sequence
atggtgcacctgacccccgaggagaagtcagctgtgacggcgctgtggggtaaggtgaatgtcgacgaagtgggcggcgaagcactcggacggttgctcgtggtgtacccttggacccagagattcttcgagtccttcggtgacctcagcaccccagacgcggtgatgggaaatcctaaagtgaaggcccacgggaaaaaggttctcggcgccttttcagacggcctggcacacctcgacaaccttaaaggcactttcgcgaccctgtcggagctgcattgcgataaactgcacgttgacccagagaactttcgcttgctggggaacgttctcgtgtgtgttctcgcccatcacttcggaaaggagttcacgccacctgtccaggcggcctaccaaaaggtcgtcgccggcgtcgctaatgcactggcccataagtaccat

SEQ ID NO: 10758 - DNA, 441 bp, Artificial Sequence
  derived and/or modified sequence
atggttcacttgactcccgaagaaaagtccgcagtcaccgccttgtgggggaaggtcaatgtagatgaggttgggggggaggctctcggacgactgctggtcgtttatccgtggactcagaggtttttcgaaagcttcggtgatctgagcactcccgacgctgtgatggggaaccccaaggtcaaggcacacgggaagaaagtcctgggagccttttcagacgggctggcccacctcgacaacctgaagggcacctttgccacactgtcagagttgcactgcgacaaactccatgtggaccccgaaaatttccgtcttctcggcaacgtgttggtttgcgtgcttgctcaccactttggaaaggaatttacacctcctgtacaggctgcctaccagaaagttgtggccggcgttgcgaacgcactggcgcataaataccac

SEQ ID NO: 10759 - DNA, 441 bp, Artificial Sequence
  derived and/or modified sequence
atggtacatttaacgccggaagaaaaatcggcggttacggcgctatggggtaaagtaaatgtagatgaagtaggtggtgaagcgctaggtcgattattagttgtatatccgtggacgcaacgtttttttgaatcgtttggtgatttatcgacgccggatgcggttatgggtaatccgaaagtaaaagcgcatggtaaaaaagtactaggtgcgttttcggatggtttagcgcatctagataatttaaaaggtacgtttgcgacgttatcggaattacattgtgataaattacatgtagatccggaaaattttcgtttattaggtaatgtattagtatgtgttttagcgcatcattttggtaaagaatttacgccgccggtacaagcggcgtatcaaaaagttgtagcgggtgtagcgaatgcgttagcgcataaatatcat

SEQ ID NO: 10760 - DNA, 441 bp, Artificial Sequence
  derived and/or modified sequence
atggtgcatttgactcccgaggagaagtctgcagttaccgcactctggggcaaggtcaacgtcgacgaggtgggcggagaggcccttggtagactcctggtggtgtacccatggacacagagatttttcgagtcttttggggatctgagcacacctgacgccgttatggggaaccctaaggttaaggcacacggaaaaaaagtgctgggagcattcagcgatggactcgctcacctggacaatctgaagggtacgtttgcaaccctcagcgaactgcattgcgataagctgcatgtggacccggagaatttcagactgctcgggaatgtattggtgtgcgtcctggcccaccatttcggcaaggaattcactcctcccgtccaggctgcttatcagaaggtcgtggcgggagtcgccaacgccctggcccataagtaccat

SEQ ID NO: 10761 - DNA, 441 bp, Artificial Sequence
  derived and/or modified sequence
atggtgcacctgacccccgaggagaaaagcgcagtgaccgcactctggggtaaagtgaacgtcgacgaggtcggtggcgaggcactcggcagactgctcgtggtgtacccgtggacccaaaggttctttgagtcgttcggcgacctctctacgccggacgccgtgatgggaaacccgaaggtgaaagcccatggaaaaaaggtcctcggagccttctcagatggcctggcccatttggacaacttgaaggggacttttgccactctgagcgaactgcactgcgataagctgcatgtggacccagaaaacttcaggcttctgggcaacgtccttgtgtgcgttctcgcgcaccattttgggaaggagtttactccacctgtccaagctgcctatcagaaggtggtggcgggagtggccaatgcgttggcgcacaagtaccac

SEQ ID NO: 10762 - DNA, 441 bp, Artificial Sequence
  derived and/or modified sequence
atggtgcatctgactcctgaagaaaaatccgcggtgaccgcactttggggtaaagttaacgtcgacgaagtgggcggggaagcactgggacgtctccttgttgtgtacccatggactcaacgcttctttgaatcctttggggatctgtcaactccggacgcagtcatgggaaaccccaaggtgaaagcacatggtaaaaaggtgctgggcgcattttcagacggactggcacacctggataaccttaaaggaacctttgcgactctgtcggaactgcactgcgataagctgcatgtggacccagaaaactttcgtcttttgggaaatgtccttgtgtgtgtgcttgcccatcacttcggtaaggagttcacccctcctgtgcaggcagcctaccaaaaagtcgtggcaggagtcgcgaatgccctggcacataagtaccat

SEQ ID NO: 10763 - DNA, 441 bp, Artificial Sequence
  derived and/or modified sequence
atggtgcacctgacaccggaagaaaagagtgctgtgacggccctgtggggaaaggtgaacgtggatgaagttggaggtgaagcactcggtagactcttggtggtatatccctggacccagagattttttgagagctttggtgacctgagtacacccgatgccgtaatgggaaaccccaaagtgaaggcccatgggaaaaaggtgctgggggctttctctgatggtctggctcacctcgataatctgaaggggactttcgctacactgtccgagctgcactgtgacaagctgcatgtagatccagagaattttaggctgcttggcaacgtcctggtctgcgtgctagcccaccactttggaaaggagttcacaccgcctgttcaggctgcctaccaaaaagtagtggcgggcgtggcgaatgcgctggcacataaataccac

SEQ ID NO: 10764 - DNA, 441 bp, Artificial Sequence
  derived and/or modified sequence
atggtgcatttgacccctgaggaaaaatctgcggtaaccgctctatggggcaaagttaacgtcgatgaagttgggggggaagctctgggaagacttctggttgtttatccgtggactcagcgtttctttgagagttttggagatctgagtaccccagacgctgtgatgggtaacccaaaagtaaaagctcatggaaagaaggttttgggagccttctcagatgggttggctcatctggataatttgaagggtacctttgccacactgtctgagcttcattgtgataagcttcatgttgatcctgaaaattttagactcttgggtaatgtcttagtttgcgttctcgctcaccattttgggaaggagttcacacctccggttcaagccgcctatcaaaaggttgttgctggggtggctaacgctttagcgcataagtaccat

SEQ ID NO: 10765 - DNA, 441 bp, Artificial Sequence
  derived and/or modified sequence
atggtgcatctgactcccgaggaaaagtcagccgtgactgcactgtggggtaaagtgaatgtggacgaagtgggaggagaggcactgggcaggctgcttgtggtgtatccatggactcaaaggtttttcgagagcttcggagatctgtcgactccggatgctgtgatggggaaccctaaagtgaaagcccatggaaagaaggtgctcggagcattttcggacggacttgcccaccttgacaacctgaagggtacctttgccaccctctcggagctgcactgcgacaagctgcatgtcgatcctgagaactttcgccttctgggtaacgttttggtctgtgtcctggcccatcatttcggcaaggagtttaccccacctgtgcaagcagcgtaccagaaggtcgtggcaggagtcgcaaatgctctggcgcataagtaccac

SEQ ID NO: 10766 - DNA, 441 bp, Artificial Sequence
  derived and/or modified sequence
atggtgcatttgactcccgaagagaaatccgcagttacagccctctggggcaaagtcaacgtggacgaggtcggaggggaggcgttgggacggctgttggtcgtgtacccgtggacacagcggttctttgagagctttggggacctttcgacgcctgacgcagtgatgggcaacccgaaggtaaaagcccacgggaagaaagtgctgggggccttttccgatggcctggcacacctagataacctgaagggaacatttgcgacgctgtctgaattgcattgcgacaaacttcacgtagatccagagaatttccgactgttgggcaacgtgctcgtctgtgtgctggcccatcatttcggaaaagaatttaccccacccgttcaggccgcctatcagaaagtggtagctggtgtggccaatgccctagctcacaaataccat

SEQ ID NO: 10767 - DNA, 441 bp, Artificial Sequence
  derived and/or modified sequence
atggtgcatctgactccggaggaaaagagtgcagttactgctttatgggggaaagttaacgtagacgaagtgggcggggaagcattggggcgcctgttagttgtttatccatggacacaacggttttttgaatcattcggagatttaagcacgccggatgctgttatgggaaatccaaaagttaaagcacacggaaagaaggttttgggtgctttctcagatggattggctcacctggacaatttgaagggaactttcgcaaccctttccgaattgcattgtgacaagctgcatgtagatccagagaactttagattgctggggaacgttttagtttgtgttcttgcccatcatttcggaaaagagttcacacctccagttcaagctgcatatcaaaaagttgttgccggtgtcgccaatgcacttgcacacaagtatcac

SEQ ID NO: 10768 - DNA, 441 bp, Artificial Sequence
  derived and/or modified sequence
atggtgcatctgacccctgaggaaaagtcagccgtcacggcattgtggggaaaggtgaacgtcgacgaagtgggcggcgaggcccttggacgccttttggtggtgtacccatggacccaaagattcttcgaatcttttggggatctgtccactcccgatgcagtgatgggtaatccaaaagtgaaggcacatggcaaaaaggtgcttggtgccttttccgacgggctggcacacctcgataatctcaaaggaacttttgcaactctctcggaacttcactgtgataagctccatgtcgaccctgagaatttcaggctccttggtaatgtcctcgtctgtgtgcttgcccaccattttggaaaggaattcactcccccagtgcaggcagcataccagaaagttgtcgcaggtgtggctaatgcattggcacacaaataccac

SEQ ID NO: 10769 - DNA, 441 bp, Artificial Sequence
  derived and/or modified sequence
atggtgcatttaacgcccgaagaaaaatctgccgtgacagctctatgggggaaggtcaacgtcgacgaagttgggggggaagccctggggcgcttgcttgtcgtgtatccttggactcaaaggtttttcgaatccttcggggatttgtctactcctgatgcagtgatggggaatccaaaagtaaaagcacacggaaaaaaagtgttaggggcgttctccgatggacttgcacatctggacaacctgaaaggaactttcgccactctttcagaactccactgcgataaattacacgtcgatcccgaaaactttcgactgctgggaaatgtgcttgtgtgcgtccttgcacaccactttggaaaagaatttacacctcctgtacaggctgcctatcagaaagttgtggccggagtggctaatgccctggctcacaagtaccac

SEQ ID NO: 10770 - DNA, 441 bp, Artificial Sequence
  derived and/or modified sequence
atggtccacctgactcccgaagaaaagtcagctgtgaccgcattgtggggtaaagttaacgtcgatgaagtgggaggggaagccttggggcggctcttggtcgtgtacccatggacacaacgcttctttgagtcctttggagacctatctactccggatgctgtgatggggaaccctaaagtgaaggctcatgggaagaaggtgctaggcgccttttcggacggcctggcgcacctagataatctgaaaggcacctttgcgaccctttccgagctccactgtgataagctgcacgttgatcccgagaattttcgtttgctgggcaatgtccttgtgtgcgtgttagcacaccattttgggaaggagtttacgccacctgtccaagcagcataccaaaaagtcgtagctggcgtggctaacgcgcttgcacacaaataccat

SEQ ID NO: 10771 - DNA, 441 bp, Artificial Sequence
  derived and/or modified sequence
atggtgcatctcactcccgaggaaaagtctgcagtgaccgctctgtggggaaaagtgaacgtggacgaagtgggaggagaggctttggggcgtctcctggtggtgtacccttggacccagcgatttttcgaatcgtttggtgatctttccacccctgatgcagtgatgggaaatcctaaggtcaaggcccatggaaaaaaggtcctcggagcattttccgatggactggctcacctggataacctcaaaggcacttttgccactctgtccgaacttcattgcgataagttgcatgtggacccggagaactttcgcctgctgggaaacgtccttgtgtgtgtcctggcccaccactttggtaaggagtttacgcctcccgtgcaagccgcgtaccagaaggttgtggcaggtgtggcgaacgcgctcgcacataagtaccat

SEQ ID NO: 10772 - DNA, 441 bp, Artificial Sequence
  derived and/or modified sequence
atggtgcatctcacccccgaagagaagtcagccgtgactgctctgtggggtaaagtcaacgtggacgaagtcggtggagaagcacttggacgcttgctggtggtttacccgtggacgcagcgattcttcgaatcctttggtgatctttcgactcccgacgcggtcatgggcaatcctaaggtcaaagcacacggaaaaaaggtgcttggagccttttcggatggcctcgctcatcttgataacttgaaaggaacgtttgcgaccctgagcgaactccattgtgataagctgcatgttgacccagagaattttcggcttctcgggaacgtactggtgtgcgttttggcacaccacttcggcaaggaatttacccctccagtgcaagcagcttaccaaaaggtagtggcaggagtggcgaatgccctcgcccacaaataccat

SEQ ID NO: 10773 - DNA, 441 bp, Artificial Sequence
  derived and/or modified sequence
atggttcacttgacccccgaagaaaagtccgctgttaccgctctctggggtaaggtcaacgtcgatgaagtgggaggagaagctctgggtcggttgctcgttgtctatccctggacccagcgtttcttcgagtctttcggtgatctgtcgactcctgatgctgtgatgggtaatccaaaggtgaaagctcacggaaagaaagtgctgggcgccttttcagatggcctggcccatctcgacaacttgaaggggaccttcgcaacactctccgagctgcactgtgataaattgcatgtggaccctgagaacttccggcttctcgggaatgtcctggtatgtgttttggctcaccacttcggaaaggaattcaccccccccgtacaagctgcgtaccaaaaagttgttgcaggcgtcgccaacgctctggctcacaagtatcat

SEQ ID NO: 10774 - DNA, 441 bp, Artificial Sequence
  derived and/or modified sequence
atggtccatctcaccccggaagagaagtccgcggtaaccgctctttggggaaaggtgaacgtggatgaagtgggcggagaagcactcggacggcttttggtggtctacccttggactcaaagattctttgagagctttggcgatctctcaacgccagacgcggtaatgggaaatcccaaagtgaaggcacacggtaagaaggtgctgggggcgttcagcgacggccttgcccatcttgataacctgaaaggtactttcgctaccctgtccgagctgcattgtgacaaactgcatgtggacccagagaattttcgtttgcttggcaacgttttggtttgcgtcctggcccaccatttcggaaaggaatttactcctccagtccaagcagcttaccagaaggtcgtcgcgggagtggcaaacgcacttgcacacaaataccat

SEQ ID NO: 10775 - DNA, 441 bp, Artificial Sequence
  derived and/or modified sequence
atggtacatttgaccccagaggagaagagcgcagtgaccgccctgtgggggaaggtcaatgtggacgaggtgggaggtgaggcgttgggacgcctattggttgtgtacccatggacgcagcgcttttttgaatcattcggagacctgtccacgcctgacgctgtgatggggaacccaaaggtcaaagctcatggaaagaaagtgttaggtgcatttagcgacggcttggctcatcttgacaacttgaagggaacgtttgcaacgctgtctgagttacattgcgataagctacacgtagaccctgaaaattttcgcttactcggcaacgtccttgtgtgcgtgctagctcaccactttgggaaggagttcacacctcccgtgcaagccgcataccagaaagtggtggctggtgtggccaacgcgctggcacacaagtaccat

SEQ ID NO: 10776 - DNA, 441 bp, Artificial Sequence
  derived and/or modified sequence
atggtccacttgacgccagaggagaagagcgctgtgaccgcactatggggcaaggtaaacgttgacgaggtgggaggagaggccctgggacggctcttggtcgtatatccttggactcagcgattcttcgagtcattcggtgaccttagtactccagacgcagttatggggaatcccaaggtgaaggctcacggaaagaaggtgctgggggcctttagtgatggtttagctcacctggacaacctgaagggtacgttcgcaacactttccgaattacactgtgacaagctgcatgtcgatcctgagaactttcgactgctaggcaatgtacttgtctgtgtcctggctcatcactttgggaaagaatttaccccccctgttcaggcagcctaccaaaaagtggtggccggagttgctaacgcattggcacataagtaccac

SEQ ID NO: 10777 - DNA, 441 bp, Artificial Sequence
  derived and/or modified sequence
atggtgcacctgactccggaggagaagagcgccgtgacagctctttggggtaaggtaaacgttgacgaggtcggcggcgaggcccttggaaggctcctggtcgtgtatccctggacccagcggttcttcgagtcatttggcgatctctctacccccgatgcggtgatgggcaatcccaaagtgaaagcccacgggaagaaagtgcttggcgcgttttccgacggcctggcccacctggacaacttgaagggtacctttgcaacgctttctgagctgcattgtgataagctccacgtggacccagaaaattttagactgctgggtaatgtgctggtgtgtgtgttggcccaccatttcgggaaagagtttaccccccccgtacaggccgcttaccagaaggtggtcgcaggagtcgccaacgccctagcacacaagtaccat

SEQ ID NO: 10778 - DNA, 441 bp, Artificial Sequence
  derived and/or modified sequence
atggtgcatctgacacccgaggagaagagtgcagtgactgctctgtggggcaaggtgaacgtggacgaggtgggaggagaagcgcttggacggctcctcgtcgtttatccctggacacagaggtttttcgagtccttcggcgatttgtctaccccagacgccgtaatgggcaaccccaaggtgaaagcacatgggaaaaaggtcctaggtgcgttttcagatggtctcgctcatcttgataacctaaagggaacgttcgcaaccttgtcagagttgcactgtgataaacttcacgtcgacccagagaatttccgccttttgggaaatgtgctggtgtgtgtccttgcgcatcatttcggcaaagaattcaccccccccgtgcaggcggcttaccagaaggttgtcgccggagtggccaacgccttagcgcacaagtatcat

SEQ ID NO: 10779 - DNA, 441 bp, Artificial Sequence
  derived and/or modified sequence
atggtccacctgaccccagaagagaagagcgcggtcacggccctgtggggcaaggtcaacgtggatgaagtgggaggtgaagctctggggcggttgttggtggtgtacccctggacccaaagattcttcgagtcattcggtgacctgtccactccagacgccgtgatggggaaccctaaggtgaaggcgcacggaaaaaaggtgcttggagcattctcggatggactggcacatctcgacaacctgaagggaacttttgccactctctcggagctgcactgtgacaaactgcatgtggatccggaaaacttccgcctgctcggaaatgtgctcgtttgcgtgcttgcacatcactttggcaaagagttcaccccgccggttcaggcggcttaccagaaggtggtcgccggcgtcgccaatgctctcgcccataagtaccac

SEQ ID NO: 10780 - DNA, 441 bp, Artificial Sequence
  derived and/or modified sequence
atggtccacctcacgccagaagagaaatcggctgttactgcactatggggaaaggttaacgtggatgaagtgggcggcgaggctttggggagattgttggttgtttatccttggacccagaggttcttcgaatcttttggcgatctgagcaccccagatgcagtgatgggaaaccctaaagtgaaagctcacgggaaaaaagttctgggcgccttttcagacggactggctcatctagacaatcttaaaggcacctttgctacactgtcagagctgcattgtgacaaactgcatgtggatcccgaaaacttcaggctgttaggcaacgtgctggtgtgcgtgctggcccaccacttcggaaaggaattcacccctcctgtccaggccgcatatcagaaggttgttgctggggtggctaacgcgctcgcacataaataccat

SEQ ID NO: 10781 - DNA, 441 bp, Artificial Sequence
  derived and/or modified sequence
atggtgcatcttacacctgaggaaaagtccgccgtcaccgctctgtgggggaaagtgaacgtcgatgaagtaggaggagaggccctgggccgattactggttgtttacccatggactcaaagattctttgagtctttcggcgatctatcgacacccgatgctgtaatgggtaacccaaaggtgaaggcacatgggaagaaagtgctcggcgcattcagtgacggtctagctcatttggataatctaaaaggaaccttcgccacgctgagtgagttgcattgcgataaactgcacgtagatccagagaacttccggttgctcggtaatgtgttggtgtgcgtgctagctcaccacttcggaaaggagttcacccctcccgtgcaggctgcttatcaaaaggtggtggcaggcgtcgcgaacgcccttgcccacaaatatcac

SEQ ID NO: 10782 - DNA, 441 bp, Artificial Sequence
  derived and/or modified sequence
atggttcacttaacccccgaggagaagtctgcagtgacagcactgtggggaaaagtgaatgtcgatgaagttggaggagaagctctgggaaggctgctggttgtttatccatggacccagaggttctttgagtccttcggtgacttatccaccccagacgccgtgatgggaaaccccaaagtgaaggcacacgggaagaaagtgctcggagcgttttccgatgggctggcccaccttgataacctgaaaggaacattcgcaaccttgagcgaactacactgtgataaactgcacgtcgacccggagaactttcggctgttaggaaacgtacttgtttgcgtgctagcgcatcacttcgggaaagagttcacacctccagtgcaagccgcataccagaaagtggtggccggcgtggcaaacgccctggctcataagtatcac

SEQ ID NO: 10783 - DNA, 441 bp, Artificial Sequence
  derived and/or modified sequence
atggtccatctgactccagaggaaaagagcgcggtcacggccctctggggaaaggtgaacgtggatgaagtgggaggtgaagccctgggccgcctgctggtcgtgtacccctggactcagcgcttcttcgagtcgtttggagatctcagcacgccggacgcagtcatgggcaaccccaaggtcaaggcgcacgggaagaaggtgctcggggcattttcagacggactggcccatttggacaacctgaagggcacttttgccaccctgtccgaactgcactgcgataagctgcatgtcgaccctgagaacttcaggcttcttggtaatgtgcttgtgtgcgtgctggcacaccatttcggtaaggaattcaccccaccagttcaagcggcgtaccagaaggtggttgcaggggtggcaaacgcattggcccacaaataccat

SEQ ID NO: 10784 - DNA, 441 bp, Artificial Sequence
  derived and/or modified sequence
atggtacacctgactcctgaagagaagagcgcagtaacggccctttggggtaaggtcaatgtggacgaggttggcggcgaggctttgggccgcctactggtggtgtatccctggacccagcggttctttgagtcctttggagacctgagtacacctgatgctgtcatggggaacccaaaggtgaaggcacatggcaagaaagttctcggggccttcagcgacgggttggcccatttagacaatctgaagggaaccttcgccacactgtccgaactgcattgtgataagttgcatgtcgaccccgagaacttcaggctgctagggaatgtgctggtttgtgtgctggcccaccactttggtaaggagttcacgccgcctgtgcaagctgcctatcagaaggtggtcgccggggttgccaacgctcttgctcacaagtatcac

SEQ ID NO: 10785 - DNA, 441 bp, Artificial Sequence
  derived and/or modified sequence
atggtgcatttgacacctgaggaaaaaagtgcagtgaccgcactttggggaaaggtcaatgttgatgaagtgggtggcgaggcacttgggcgcctgcttgtggtgtacccttggacccagcgcttctttgaatcttttggcgacctatctacacctgacgccgtgatgggtaaccccaaggtcaaagcccacggtaagaaggtcctgggcgccttttcagatgggctcgctcatttggataacctgaagggtacattcgccaccctctctgaattgcattgcgataaactccacgtggatcctgagaatttcaggcttctcggcaacgtgctggtgtgcgtgctcgctcatcacttcggaaaggagtttactcctcccgtccaggcagcataccagaaggttgtggccggagtggctaacgctctggcacataagtatcac

SEQ ID NO: 10786 - DNA, 441 bp, Artificial Sequence
  derived and/or modified sequence
atggtgcacctcaccccagaagagaagtcagcggtcactgctctctggggtaaagtgaatgtggatgaggtgggaggggaggcgcttggtcgcctgctggtggtgtacccatggacccaacggttcttcgagtccttcggagacttgtcgactccagacgcggtgatgggaaatccaaaagtcaaggcccacggaaagaaggtcctgggcgcatttagcgatggactggctcatctcgataacctcaagggaacctttgccacgctttctgagctccattgcgacaagctgcacgtggacccggaaaacttcagactgctgggcaacgttctggtgtgcgtgctggcccaccactttgggaaggagttcaccccgcccgtgcaagcggcctaccagaaggtcgtcgcaggagtcgcgaatgccctcgcgcacaaataccat

SEQ ID NO: 10787 - DNA, 441 bp, Artificial Sequence
  derived and/or modified sequence
atggtgcacctgacacctgaagaaaagagtgcggtaacggctctttggggtaaggtgaatgtggatgaagtcggaggcgaagccctggggaggttgctggttgtatacccttggactcaacgtttcttcgaatccttcggggatcttagcacccccgatgccgtgatgggaaaccccaaagtgaaggcccacgggaagaaggtcctcggggccttctctgatggcctggcccaccttgataacctcaagggtaccttcgccacgctcagcgaactccattgtgacaagcttcacgttgaccctgagaattttagactcctgggaaacgtactcgtgtgtgttttggcccatcacttcggcaaggagttcaccccgcccgtgcaggccgcataccagaaagtcgtcgcaggggttgccaacgcccttgctcacaagtaccac

SEQ ID NO: 10788 - DNA, 441 bp, Artificial Sequence
  derived and/or modified sequence
atggtgcacctcacaccagaagagaagagtgcagtcaccgctctctggggtaaagtgaacgtagatgaggtgggaggagaggctcttgggagactgttggtggtctatccttggactcagcgcttttttgaatctttcggtgacctatccacaccggatgccgttatgggcaacccaaaggttaaggcccatggcaagaaagtactgggagccttctccgacggcttggctcacctcgacaacctgaaaggaacctttgctacgctatctgagctgcattgtgataaactgcatgtcgaccccgagaactttcgactcttggggaatgtgctggtgtgtgtcttggcccatcacttcggcaaggagttcactcccccagtgcaggctgcctaccagaaggttgtggccggagtggcgaacgccctcgcccacaaatatcac

SEQ ID NO: 10789 - DNA, 441 bp, Artificial Sequence
  derived and/or modified sequence
atggtccacctgactccagaggaaaagtctgccgtgactgcactctgggggaaggtcaatgttgacgaagtgggtggggaagcacttggccgactgctcgtggtgtatccctggacgcaaagatttttcgagtcattcggagatctttcgacccctgatgcagtgatgggcaacccaaaggtgaaggctcacggaaaaaaggtgcttggtgcatttagcgatggtctggctcatcttgacaacttgaaagggactttcgctaccctctccgagctccactgtgataagttgcatgtcgatccggaaaactttcggcttctcggaaatgtgcttgtctgcgtcctcgcacaccatttcggaaaggaatttaccccaccggtgcaagccgcataccagaaagtggtggcgggagtggcgaacgccctggcacacaagtaccac

SEQ ID NO: 10790 - DNA, 441 bp, Artificial Sequence
  derived and/or modified sequence
atggtgcacttgactcctgaggaaaaaagcgccgttacggccctctgggggaaggtgaacgtggacgaggtcggaggagaagccctgggacgcctcctcgtggtgtacccatggacccaacggttcttcgaatcattcggcgacctgtcgactccggacgccgtcatgggcaatcctaaggtcaaggcgcatggtaagaaagtgctgggagcattcagcgatggtttggcgcatctcgataatctgaaagggactttcgcgaccttgagcgagctgcactgcgataagttgcatgtggacccggaaaacttcaggctgctggggaacgtgctggtgtgcgtcctcgcccatcatttcggcaaagagttcactccaccggtccaggcggcttaccaaaaagtggtcgccggggtcgccaacgcattggcacacaagtaccac

SEQ ID NO: 10791 - DNA, 441 bp, Artificial Sequence
  derived and/or modified sequence
atggtgcatcttacccccgaagagaagtcagctgtgaccgccctctgggggaaagtgaacgtggacgaggtggggggagaagcactgggccggctccttgtcgtttatccttggacccaaagatttttcgagtcgttcggagatctgtcaactcctgatgctgtgatgggtaatccgaaggtcaaagcacatggaaaaaaggtgcttggagcgttttcggatggattggcacacctcgacaatctcaaagggaccttcgccacgttgtccgaacttcactgtgacaagttgcatgtggatccagagaactttcgactgctgggcaacgttctcgtgtgcgtgcttgctcatcactttggaaaggaatttactcctcctgtgcaggcagcgtaccaaaaggtcgttgcaggcgtcgcgaacgcacttgcccataagtaccat

SEQ ID NO: 10792 - DNA, 441 bp, Artificial Sequence
  derived and/or modified sequence
atggtgcacttgacccctgaggaaaaaagcgccgtaactgcactctggggaaaggtgaatgtggacgaagtgggaggagaagcattgggtcggcttcttgtcgtttacccttggactcaaaggttcttcgagtcatttggagatctgtcgaccccagatgcagtcatgggtaatcctaaagtcaaggcacatgggaagaaggtcctcggtgcattttctgatggcctggcccatcttgataatcttaaaggaacctttgccaccctgtcggaacttcactgcgacaaactgcatgtggacccggaaaacttcagacttttgggcaacgtgctcgtttgtgtgctggcacatcatttcggaaaagagtttacgcccccagtgcaagccgcctaccagaaggtggtggctggggtcgcaaacgcacttgcgcacaaatatcat

SEQ ID NO: 10793 - DNA, 441 bp, Artificial Sequence
  derived and/or modified sequence
atggtgcacctcacaccagaggaaaagtccgcagtgacagcgctttgggggaaggtgaatgtggacgaggtgggtggagaggccctgggcaggctgttggtcgtgtatccttggactcagcggttctttgaatccttcggagatttatcgacacctgacgcagtgatgggaaaccccaaggtaaaggcacacggcaagaaggtgctcggcgctttctctgatggactcgcacaccttgataatctgaaggggactttcgccacactcagcgaactacattgcgacaagcttcatgtggatccagagaactttaggctactaggaaatgtgttagtctgtgtcctcgcccatcattttggcaaggagttcacaccacccgtacaggcagcataccagaaagtggttgccggggtggctaacgcactggctcataaataccac

SEQ ID NO: 10794 - DNA, 441 bp, Artificial Sequence
  derived and/or modified sequence
atggttcatctcaccccagaagaaaaatccgcggtgactgccctttggggcaaagtgaatgtagacgaggtgggtggggaagccctgggtagactcctcgtggtctacccatggacacagcgctttttcgagtctttcggagacctgtctacaccagatgctgtgatgggcaatccgaaggtgaaggcacatgggaagaaagtgctcggggccttctccgacggtcttgcccacctggacaatctgaaaggcacttttgctactctgagcgagctgcattgtgacaagctgcatgtggaccctgagaattttaggcttcttggcaacgttcttgtgtgcgtactggctcatcatttcggaaaagagtttacgccgcccgttcaggcggcatatcagaaggtggtagctggcgtggcaaatgccctggcccacaagtatcat

SEQ ID NO: 10795 - DNA, 441 bp, Artificial Sequence
  derived and/or modified sequence
atggtgcatctgactcccgaggagaagtctgcggttaccgcgctttggggcaaggttaacgtggacgaggtaggtggtgaggcgctgggcagattgctggtggtgtatccatggactcagcgcttctttgaaagttttggtgacctctccacgcccgatgctgtaatgggaaaccccaaagtaaaagcccacggaaaaaaggtgctgggtgccttttccgacggcttggcccatctggataatcttaaaggtaccttcgccacgctgtcagagcttcattgcgataaactccacgtcgaccctgaaaatttcaggctgctcggcaatgtgctggtgtgcgtccttgctcaccactttggcaaggagttcacgcctcccgtccaagcagcctatcagaaggtggtcgccggtgtggccaatgcacttgcgcacaaataccat

SEQ ID NO: 10796 - DNA, 441 bp, Artificial Sequence
  derived and/or modified sequence
atggtgcatcttactccagaagagaaaagcgcagtgaccgctctctggggcaaggtgaatgtggatgaggtcgggggcgaggctctcggtcgcttgctcgtggtctacccctggacccagcgcttcttcgagtccttcggagatctctcaactcctgatgccgtgatgggcaatccgaaggtgaaagcgcacggaaaaaaggtcctgggggcattctccgatggactggcgcacctggataatctgaaaggaaccttcgcaacgctttcggagcttcactgtgataagctgcacgtcgacccggaaaacttccgcctgttggggaacgtgctggtgtgcgttctggcgcatcattttggcaaggagtttaccccgcccgtgcaagccgcataccagaaggtggtcgctggtgtcgccaatgcgctggcccacaagtaccat

SEQ ID NO: 10797 - DNA, 441 bp, Artificial Sequence
  derived and/or modified sequence
atggttcacctcaccccggaggaaaagtcggcagtgactgcgctgtggggcaaggtgaacgtggatgaggtcggaggcgaggctttgggaaggctcctggtggtttacccatggacccaacggttcttcgaatccttcggagatttgtcgaccccggacgcggtgatggggaatcctaaggtcaaggcccacgggaaaaaggtgttgggggcattttcagacggtctggcacatctcgataatctcaagggcactttcgccactctgagcgagctgcactgcgacaaacttcatgttgacccagaaaacttcagactgcttggtaacgtcctggtgtgtgtacttgcccaccatttcggaaaagaatttacgcccccggtgcaggcggcctaccagaaggtcgtcgctggagtagcgaacgccctcgctcataagtatcac

SEQ ID NO: 10798 - DNA, 441 bp, Artificial Sequence
  derived and/or modified sequence
atggtgcatctgacccctgaagagaaaagtgctgtgacagcactgtggggtaaggtcaatgtggacgaagtcgggggcgaggccctgggacgcctgttggtagtgtatccatggactcaaaggttttttgagtctttcggcgacctgtcaactcccgacgccgttatggggaatcccaaggttaaagcgcacgggaagaaagtgctcggagccttctccgatggcttggctcacctggacaatctaaagggtaccttcgcgactctgtcagaacttcactgtgacaagctgcacgtagaccccgagaactttaggttactcgggaatgtgctggtgtgcgtgctcgctcatcactttggaaaagagttcactcctcccgtccaagccgcctaccagaaggtggttgcaggggtggctaacgctctggctcacaaataccac

SEQ ID NO: 10799 - DNA, 441 bp, Artificial Sequence
  derived and/or modified sequence
atggttcacctgactccagaggaaaagtcagcagtcactgcactttgggggaaggtcaacgtagatgaggtcgggggggaggcgcttgggcgcctgttagtggtttatccttggacccagcgtttttttgagtcgtttggtgatctgtccacacccgacgccgtgatgggaaatcctaaggtgaaagcccatgggaagaaggtgctgggagccttttctgatggactcgctcacctggacaatttgaaaggaaccttcgctaccctgagcgaactgcattgcgataagctgcacgtggaccccgaaaactttcgtctgttaggtaacgtcctggtatgtgttctggctcatcatttcggaaaagaatttactcctcctgtgcaggcggcttatcagaaagtggtggccggagtcgccaacgcgctcgcccataagtatcat

SEQ ID NO: 10800 - DNA, 441 bp, Artificial Sequence
  derived and/or modified sequence
atggtgcatctgactccggaagaaaaatcagccgtgactgccctgtggggaaaagtgaacgtggacgaggtcggaggcgaagctcttggccggctgctggtggtctatccatggactcagagatttttcgaatcctttggtgacctcagcaccccggatgctgtcatgggaaatcctaaagtgaaggcgcacggaaaaaaggtgcttggggcgttttcggatgggctggcgcaccttgacaacctgaaaggaaccttcgctactctgtcagaactgcactgtgataagctgcacgtggaccccgagaactttcggctgctgggcaacgtcctggtctgcgtgctggcccatcacttcgggaaggagtttactccgccggtgcaagccgcataccagaaggtggtggcgggagtggcgaacgccctggcgcataagtaccac

SEQ ID NO: 10801 - DNA, 441 bp, Artificial Sequence
  derived and/or modified sequence
atggtccacctcacccccgaggaaaagagcgcagtcaccgccctttgggggaaggtgaacgttgacgaagttggcggcgaggccctgggaaggttgttagtggtgtacccctggactcagcgttttttcgagagtttcggcgacttgagtacacccgatgcggttatgggaaacccgaaagtcaaagcccatggaaagaaagtcctcggggcattttccgatggccttgcccacctggataaccttaaaggcacattcgcaacactgagtgagcttcattgtgataagctgcacgttgaccccgaaaactttcgtctgctgggcaacgtacttgtctgtgtgctggctcatcactttggtaaggagttcacccctcccgttcaagccgcatatcagaaggtcgtagccggtgtggcaaacgcattagcacataaataccac

SEQ ID NO: 10802 - DNA, 441 bp, Artificial Sequence
  derived and/or modified sequence
atggtgcacctcacccctgaagagaagagcgctgtgaccgcattatggggtaaggttaatgtcgatgaagtcggcggtgaagctcttggccggctgctggtcgtgtatccctggacacaacgattcttcgaatcattcggagacctgtcaacccccgacgctgtcatgggcaacccgaaggtgaaagcccacggcaagaaggtcctgggggccttctcggacgggctagcgcatctggacaaccttaaaggaacattcgcaactttgtccgaactgcactgcgacaagctgcacgtcgaccccgagaacttccggctcctagggaatgttttagtgtgtgtgctggcacatcacttcggtaaagaattcaccccccccgttcaagctgcttaccagaaagttgtcgcgggagttgccaacgcgcttgcccataaataccac

SEQ ID NO: 10803 - DNA, 441 bp, Artificial Sequence
  derived and/or modified sequence
atggtccatctgacgcctgaggaaaagtcagcagtgactgcgctctggggtaaggtgaacgtcgacgaggtcgggggagaggctctggggcgccttcttgtggtgtacccttggacccagcgcttctttgaatcgtttggcgatcttagcaccccagacgccgtgatggggaatcccaaggtaaaggcacacggtaaaaaggtcctgggtgccttttcggacggactggcccaccttgataacctgaagggaacttttgcaactttgagcgagctgcattgtgataaactgcacgtggatcctgagaacttccggctgctgggtaatgtcctcgtctgcgtcctcgctcatcattttggtaaggagtttacgcctcctgtgcaggcggcctaccaaaaggttgtggcaggtgtggcgaacgcacttgcccataagtaccac

SEQ ID NO: 10804 - DNA, 441 bp, Artificial Sequence
  derived and/or modified sequence
atggtgcaccttactcccgaagagaaaagtgcggtgaccgcactgtggggaaaagtcaacgtggacgaggtcggtggtgaagcactgggacggctccttgtcgtgtatccatggacccaaagattctttgagtcgttcggtgatttgtcgaccccagatgcagtgatgggcaatcctaaggttaaagcgcatggcaagaaggtcttgggagccttttccgatggcctcgcccatctggataacctgaagggtacttttgcaactctgtcagaacttcactgcgacaagttgcatgtcgatccagaaaacttccgcctgcttggcaacgttctggtgtgtgttttggcgcatcattttgggaaggagtttacgcctcctgtccaagccgcataccagaaggtggtagctggggtggcaaatgcactcgcacataagtaccac

SEQ ID NO: 10805 - DNA, 441 bp, Artificial Sequence
  derived and/or modified sequence
atggtccaccttactccggaggagaaatcggctgtgaccgccctgtggggcaaggtgaacgtggacgaagttgggggagaagccctgggacggctgctggtcgtgtacccatggactcagcggttctttgagagctttggcgacctttccactcccgacgctgtcatgggaaacccgaaggtcaaggctcacggcaagaaagtgctgggagctttctcggacggactggcgcatctcgataatctcaaggggacctttgcgactctcagcgaacttcactgtgacaagctccacgtcgacccagaaaactttagactcctggggaacgtgctcgtctgcgtcctggcccatcacttcggaaaggagttcactccgcccgtccaggcggcctaccaaaaggtggtggccggagtggccaacgcactggcgcacaaatatcac

SEQ ID NO: 10806 - DNA, 441 bp, Artificial Sequence
  derived and/or modified sequence
atggtccacttgaccccagaggagaagagcgccgtcactgccctgtggggcaaggtgaatgtggacgaagttggcggagaagcgttggggcggctcctggtggtgtacccatggactcaaagattcttcgagtcctttggagacttgtcaactccggatgcggtcatgggaaacccgaaggtcaaagcacacgggaaaaaagtcctcggagcgttctcggacggcctcgcgcacctggataacctcaagggaaccttcgcgactttgagcgaacttcactgcgacaagctgcatgtggaccctgaaaacttccgactgctgggaaacgtgttggtgtgtgtgcttgcgcatcactttggtaaggagttcaccccaccggttcaggccgcgtaccagaaggtggtggctggggttgcgaacgccctcgcccataagtaccac

SEQ ID NO: 10807 - DNA, 441 bp, Artificial Sequence
  derived and/or modified sequence
atggtgcacctgacccctgaagaaaagtcagccgttacggcgctgtggggtaaagttaacgttgacgaagtggggggagaggcacttggaagattgctcgtggtctacccttggactcaacggttttttgagtcattcggtgatttgtcgaccccggatgcggtgatgggtaatccaaaagtgaaagcccacgggaagaaggtgctgggtgctttttccgacggactggcccacctggataaccttaagggaacctttgctacgctgtcagagcttcattgtgataaactccacgtggatccagaaaacttcaggctcctgggaaacgtcctggtgtgcgtgctggcgcatcatttcggaaaggaatttactcctcctgtgcaagcagcttatcagaaagtggtcgcaggtgtggcaaacgcgcttgcacataagtaccat

SEQ ID NO: 10808 - DNA, 441 bp, Artificial Sequence
  derived and/or modified sequence
atggtgcatcttacccccgaagaaaagagcgcagtgactgcactctggggaaaggtgaacgtggatgaagtcggtggagaggctctgggacggctgctggttgtgtatccatggacccaacgctttttcgagtcatttggagatcttagcactccagatgcggtgatgggaaaccccaaggtgaaggcacatgggaagaaagtccttggtgcctttagtgacggactcgcccatcttgataacttgaagggcacctttgcgacgctgtcagaactccattgtgacaagctgcacgtcgatcctgagaactttcgactgctcggtaatgtgcttgtctgtgtgcttgcacaccattttggcaaagaatttaccccaccggtacaagccgcgtaccagaaggtcgtggcgggggtcgcgaacgctctggcacacaaataccac

SEQ ID NO: 10809 - DNA, 441 bp, Artificial Sequence
  derived and/or modified sequence
atggttcatttaactccagaagaaaagtcagcagtcactgctttatggggaaaagttaatgttgatgaagttggaggagaggcattaggaagattattagttgtttatccttggactcaaagattttttgaaagcttcggagatttatctacaccagatgcagttatgggaaatccaaaagtaaaggctcatggaaagaaagttcttggagctttttctgatggattagctcatttagacaatcttaaaggaacttttgctactttaagtgaattgcattgtgacaaattacatgttgatcctgaaaattttagacttttaggaaatgttttagtttgtgttttagctcatcatttcggaaaagaatttacacctccagttcaagcagcttatcaaaaagttgttgctggagtagctaatgccttagctcataaataccat

SEQ ID NO: 10810 - DNA, 444 bp, Artificial Sequence
  derived and/or modified sequence
atggtgcacctgacccccgaggagaagagcgccgtgaccgccctgtggggcaaggtgaacgtggacgaggtgggcggcgaggccctgggcagactgctggtggtgtacccctggacccagagattcttcgagagcttcggcgacctgagcacccccgacgccgtgatgggcaaccccaaggtgaaggcccacggcaagaaggtgctgggcgccttcagcgacggcctggcccacctggacaacctgaagggcaccttcgccaccctgagcgagctgcactgcgacaagctgcacgtggaccccgagaacttcagactgctgggcaacgtgctggtgtgcgtgctggcccaccacttcggcaaggagttcaccccccccgtgcaggccgcctaccagaaggtggtggccggcgtggccaacgccctggcccacaagtaccactag

SEQ ID NO: 10811 - DNA, 273 bp, Artificial Sequence
  derived and/or modified sequence
atggtgcacctgacccccgaggagaagagcgccgtgaccgccctgtggggcaaggtgaacgtggacgaggtgggcggcgaggccctgggcagactgctggtggtgtacccctggacccagagattcttcgagagcttcggcgacctgagcacccccgacgccgtgatgggcaaccccaaggtgaaggcccacggcaagaaggtgctgggcgccttcagcgacggcctggcccacctggacaacctgaagggcaccttcgccaccctgagctag

SEQ ID NO: 10812 - RNA, 602 nt, Artificial Sequence
  derived and/or modified sequence
gggaaauaagagagaaaagaagaguaagaagaaauauaagagccaccauggugcaucugaccccagaagagaagagcgcggugacugcccuuuggggaaaggucaacguggaugaagugggaggagaagcucucggcagacuccuugugguguacccguggacgcaacgcuucuuugagucauuuggcgaccugucgaccccugaugccgucauggguaauccuaagguuaaggcacauggaaagaaggugcugggcgcauuuucggaugggcuugcacaucuugauaaucuuaaagguacuuuugcaacucucuccgaacugcacugugacaagcugcauguggaccccgagaacuuccggcuccuugguaacguccuggucugcguguuggcucaucacuuugggaaagaauucaccccaccuguccaggcggcauaccaaaagguggucgccggaguggcaaacgcacuggcccacaaauaccauugauaauaggcuggagccucgguggccaugcuucuugccccuugggccuccccccagccccuccuccccuuccugcacccguacccccguggucuuugaauaaagucugagugg

SEQ ID NO: 10813 - protein, 16 aa, Artificial Sequence
  derived and/or modified sequence
VLGAFSDGLAHLDNLK

SEQ ID NO: 10814 - protein, 141 aa, Artificial Sequence
  derived and/or modified sequence
MVHLTPEEKTAVNALWGKVNVDAVGGEALGRLLVVYPWTQRFFESFGDLSSPDAVMGNPKVKAHGKKVLGAFSDGLAHLDNLKGTFSQLSELHCDKLHVDPENFRVCKKVPEALQIGSTCLFYKEYMGKEKSKGTVQGING

SEQ ID NO: 10815 - protein, 147 aa, Artificial Sequence
  derived and/or modified sequence
MVHLTPEEKTAVNALWGKVNVDAVGGEALGRLLVVYPWTQRFFESFGDLSSPDAVMGNPKVKAHGKKVLGAFSDGLAHLDNLKGTFSQLSELHCDKLHVDPENFRLLGNVLVCVLARNFGKEFTPQMQAAYQKVVAGVANALAHKYH

SEQ ID NO: 10816 - protein, 104 aa, Artificial Sequence
  derived and/or modified sequence
MVHLTPEEKTAVNALWGKVNVDAVGGEALGRLLVVYPWTQRFFESFGDLSSPDAVMGNPKVKAHGKKVLGAFSDGLAHLDNLKGTFSQLSELHCDKLHVDPENF

SEQ ID NO: 10817 - DNA, 426 bp, Artificial Sequence
  derived and/or modified sequence
atggtgcacctcactccagaggaaaagaccgctgtgaacgctctgtggggtaaggtcaatgtcgatgccgtcggtggggaagccttggggagattattggtcgtttatccctggacccagcggttttttgaatcttttggcgatctgagcagtccagatgctgtgatgggcaaccctaaggtgaaggcacatggcaaaaaggtgctgggcgcctttagcgatggtctcgcccacctcgataaccttaagggcacattcagccagctgagcgaactgcattgtgacaaactgcacgtcgatcccgagaattttcgcgtgtgtaagaaggtgcccgaggccctccagatcgggtccacctgcctgttctataaagagtatatgggcaaagagaagtcgaagggcacggtccagggaattaacggctag

SEQ ID NO: 10818 - DNA, 444 bp, Artificial Sequence
  derived and/or modified sequence
atggtacacctgacgcccgaagagaaaaccgctgtgaacgcattgtgggggaaggtgaatgtggacgctgtgggcggcgaggctttaggccgccttctggttgtgtatccatggacacaacgtttcttcgaaagctttggagacctttcttcccccgatgcagtaatgggaaaccctaaagtcaaggcccatggcaagaaggttctcggggctttcagtgacggattggcgcacttagacaatctcaaaggcacatttagtcaattaagcgagctccactgcgacaaactccacgtggaccctgagaatttccgactgttagggaatgtgctggtttgtgtcctggcgcggaactttgggaaggaatttactcctcagatgcaagccgcctatcagaaagtcgttgccggcgtggcaaatgccctggctcacaaataccattag

SEQ ID NO: 10819 - DNA, 315 bp, Artificial Sequence
  derived and/or modified sequence
atggtgcacctgacccctgaagaaaagactgctgtcaacgctctgtgggggaaggtgaacgtggatgcagtggggggggaggcgctcgggagattgctagtggtgtacccttggactcaaaggttctttgaatccttcggagacctctcatcacccgacgccgttatggggaatcctaaggtgaaggctcatgggaaaaaggttcttggcgcattctctgacggacttgcccatctagataatctaaagggtacattctcccagctgagtgaactacattgcgataagctccatgtcgatccggaaaacttctag

SEQ ID NO: 10820 - DNA, 486 bp, Artificial Sequence
  derived and/or modified sequence
acactttcttctgacataacagtgttcactagcaacctcaaacagacaccatggtgcatctgactcctgaggagaagactgctgtcaatgccctgtggggcaaagtgaacgtggatgcagttggtggtgaggccctgggcagattactggtggtctacccttggacccagaggttctttgagtcctttggggatctgtcctctcctgatgctgttatgggcaaccctaaggtgaaggctcatggcaagaaggtgctaggtgcctttagtgatggcctggctcacctggacaacctcaagggcactttttctcagctgagtgagctgcactgtgacaagctgcacgtggatcctgagaacttcagggtgtgtaagaaggttcctgaggctctacagatagggagcacttgtttattttacaaagagtacatgggaaaagagaaaagcaagggaaccgtacaaggcattaatgggtgacacttctacc

SEQ ID NO: 10821 - DNA, 785 bp, Artificial Sequence
  derived and/or modified sequence
atgacagaacagccaatctcagggcaagttaagggaatagtggaatgaaggttcatttttcattctcacaaactaatgaaaccctgcttatcttaaaccaacctgctcactggagcagggaggacaggaccagcataaaaggcagggcagagtcgactgttgcttacactttcttctgacataacagtgttcactagcaacctcaaacagacaccatggtgcatctgactcctgaggagaagactgctgtcaatgccctgtggggcaaagtgaacgtggatgcagttggtggtgaggccctgggcagattactggtggtctacccttggacccagaggttctttgagtcctttggggatctgtcctctcctgatgctgttatgggcaaccctaaggtgaaggctcatggcaagaaggtgctaggtgcctttagtgatggcctggctcacctggacaacctcaagggcactttttctcagctgagtgagctgcactgtgacaagctgcacgtggatcctgagaacttcaggctcttgggcaatgtgctggtgtgtgtgctggcccgcaactttggcaaggaattcaccccacaaatgcaggctgcctatcagaaggtggtggctggtgtggctaatgccctggctcacaagtaccattgagatcctggactgtttcctgataaccataagaagaccctatttccctagattctattttctgaacttgggaacacaatgcctacttcaagggtatggcttctgcctaataaagaatgttcagctcaa

SEQ ID NO: 10822 - DNA, 566 bp, Artificial Sequence
  derived and/or modified sequence
attgtggcattatttgaattcagaaaagagtgaaaaactactgggatcttcattcctgggtctaattccacatttttttttaagaacacatctgtaaaaatgttctgtactagcatattcccaggaacttcgttaaatttaatctggctgaatatgggaggacaggaccagcataaaaggcagggcagagtcgactgttgcttacactttcttctgacataacagtgttcactagcaacctcaaacagacaccatggtgcatctgactcctgaggagaagactgctgtcaatgccctgtggggcaaagtgaacgtggatgcagttggtggtgaggccctgggcagattactggtggtctacccttggacccagaggttctttgagtcctttggggatctgtcctctcctgatgctgttatgggcaaccctaaggtgaaggctcatggcaagaaggtgctaggtgcctttagtgatggcctggctcacctggacaacctcaagggcactttttctcagctgagtgagctgcactgtgacaagctgcacgtggatcctgagaacttca

SEQ ID NO: 10823 - DNA, 426 bp, Artificial Sequence
  derived and/or modified sequence
atggtgcacctgaccccagaggagaagacagctgtgaatgccctgtggggcaaggtgaatgtggatgctgtgggcggggaggccctgggccgcctgctggtggtgtacccctggacccagcgcttctttgagagctttggagacctgagcagcccagatgctgtgatgggcaaccccaaggtgaaggcccacggcaagaaggtgctgggcgccttcagtgatggcctggcccacctggacaacctgaagggcaccttcagccagctgtctgagctgcactgtgacaagctgcacgtggaccctgagaacttccgggtgtgcaagaaggtgcctgaggccctgcagatcggcagcacctgcctcttctacaaggagtacatgggcaaggagaagagcaaaggaacagtgcagggcatcaatggatag

SEQ ID NO: 10824 - DNA, 444 bp, Artificial Sequence
  derived and/or modified sequence
atggtgcacctgaccccagaggagaagacagctgtgaatgccctgtggggcaaggtgaatgtggatgctgtgggcggggaggccctgggccgcctgctggtggtgtacccctggacccagcgcttctttgagagctttggagacctgagcagcccagatgctgtgatgggcaaccccaaggtgaaggcccacggcaagaaggtgctgggcgccttcagtgatggcctggcccacctggacaacctgaagggcaccttcagccagctgtctgagctgcactgtgacaagctgcacgtggaccctgagaacttccggctgctgggcaatgtgctggtgtgtgtgctggccaggaactttgggaaggagttcaccccccagatgcaggccgcctaccagaaggtggtggccggcgtggccaatgccctggcccacaagtaccactag

SEQ ID NO: 10825 - DNA, 315 bp, Artificial Sequence
  derived and/or modified sequence
atggtgcacctgaccccagaggagaagacagctgtgaatgccctgtggggcaaggtgaatgtggatgctgtgggcggggaggccctgggccgcctgctggtggtgtacccctggacccagcgcttctttgagagctttggagacctgagcagcccagatgctgtgatgggcaaccccaaggtgaaggcccacggcaagaaggtgctgggcgccttcagtgatggcctggcccacctggacaacctgaagggcaccttcagccagctgtctgagctgcactgtgacaagctgcacgtggaccctgagaacttctag

SEQ ID NO: 10826 - DNA, 426 bp, Artificial Sequence
  derived and/or modified sequence
atggtgcacctgacccccgaggagaagaccgccgtgaacgccctgtgggggaaggtgaatgttgacgccgtgggcggggaagccctaggaaggctgctggtagtgtacccgtggacccaacggttctttgagtcttttggcgacctgtctagtcctgatgccgtcatgggcaacccaaaggtgaaggcgcatggcaagaaggtgcttggggctttctcggatggccttgcccatctggacaacctaaaggggactttctctcagctgagcgaactgcattgcgacaagctacacgtcgaccccgagaacttccgcgtgtgtaagaaggtcccggaggctttacagatcggctctacatgtctgttctacaaggagtatatgggcaaggaaaaaagcaagggtacagttcagggaataaatgggtag

SEQ ID NO: 10827 - DNA, 444 bp, Artificial Sequence
  derived and/or modified sequence
atggtgcacctgacccccgaggagaagaccgccgtgaacgccctgtgggggaaggtgaacgtggatgccgttggaggtgaggcactcggacggctgcttgtggtctacccgtggacacagcgtttcttcgagagctttggagatttgagttcacccgacgcagtgatgggaaaccccaaagtgaaggctcatggtaaaaaggttctcggagcctttagcgacggactggcgcatctggacaatctgaaggggacattctcccagcttagtgaactgcactgtgacaaattgcacgtagaccctgaaaactttcggctgctgggaaatgtcctggtgtgtgtgttagccaggaattttggaaaagaattcactccccaaatgcaggcagcataccaaaaggtggttgctggcgttgccaatgccctggcgcataagtatcactag

SEQ ID NO: 10828 - DNA, 315 bp, Artificial Sequence
  derived and/or modified sequence
atggtgcacctgacccccgaggagaagaccgccgtgaacgccctgtggggcaaagtgaacgtcgacgctgtgggaggcgaggctttgggcaggctgctggttgtgtacccctggacacagcgtttttttgaatcctttggagacctgagcagccccgatgcagtgatgggcaatcccaaagtgaaagcgcacggtaagaaggtgctcggcgcctttagtgacggactggcacatctcgacaatcttaaaggaaccttttcccagttgtcagaactccattgcgacaagctgcatgtggatcccgagaatttttag

SEQ ID NO: 10829 - DNA, 426 bp, Artificial Sequence
  derived and/or modified sequence
atggtacacctaacgccagaggaaaagactgcagtgaacgccctgtgggggaaggtaaacgtggatgcggtcgggggagaagcattaggcagactgttggttgtctacccctggacacagcggtttttcgaatcctttggagacttgtcgagccccgatgccgtgatgggtaatcccaaggtgaaggcacatggcaagaaagtcctgggcgcatttagtgacgggctagcgcacttagataaccttaaagggacattttcgcagctgtccgaactgcattgtgacaagctccacgtggatccagaaaatttccgcgtgtgcaagaaggtacccgaagcgcttcaaattggttccacgtgtctgttctataaggaatacatgggaaaggagaagtccaaaggcactgtccaaggtatcaacggctag

SEQ ID NO: 10830 - DNA, 444 bp, Artificial Sequence
  derived and/or modified sequence
atggtgcacctgacccctgaagagaagacagcggtcaatgccttgtggggcaaagtgaatgtagatgcggtcggcggagaagcactcggtcgactgttagtagtgtacccatggacgcaaaggttcttcgagagcttcggcgacctgtcaagccccgatgccgtgatggggaaccctaaagtcaaggcacatggaaaaaaggtgctcggtgcgttctccgatggcctggcccatctagataatttgaaagggacatttagtcagctgagcgagttacattgcgacaaactgcatgtggatcccgagaatttcagactcctgggcaatgtcctggtgtgcgtcctggccagaaactttggaaaagaattcacgcctcagatgcaggctgcctaccaaaaagttgtggccggagtggccaatgctctcgcccacaagtatcactag

SEQ ID NO: 10831 - DNA, 315 bp, Artificial Sequence
  derived and/or modified sequence
atggtccatctcactcccgaggagaaaacggctgttaatgccttatggggcaaggtgaacgtggacgccgtgggaggagaggcgttaggacgcctgttggtcgtgtatccctggacacaacgcttcttcgagtccttcggggacctaagtagtcccgatgccgtgatgggaaatcccaaagtgaaagcccacgggaaaaaggtgctaggggcattctccgacggtctcgcacaccttgacaatttgaaggggaccttcagtcaactgtcggagctccattgcgacaaattgcatgtcgaccctgaaaacttctag

SEQ ID NO: 10832 - DNA, 426 bp, Artificial Sequence
  derived and/or modified sequence
atggtgcacctgacccccgaggagaagaccgccgtgaacgccctgtggggcaaggtgaacgtggacgccgtgggcggcgaggccctgggcagactgctggtggtgtacccctggacccagagattcttcgagagcttcggcgacctgagcagccccgacgccgtgatgggcaaccccaaggtgaaggcccacggcaagaaggtgctgggcgccttcagcgacggcctggcccacctggacaacctgaagggcaccttcagccagctgagcgagctgcactgcgacaagctgcacgtggaccccgagaacttcagagtgtgcaagaaggtgcccgaggccctgcagatcggcagcacctgcctgttctacaaggagtacatgggcaaggagaagagcaagggcaccgtgcagggcatcaacggctag

SEQ ID NO: 10833 - DNA, 444 bp, Artificial Sequence
  derived and/or modified sequence
atggtgcacctgacccccgaggagaagaccgccgtgaacgccctgtggggcaaggtgaacgtggacgccgtgggcggcgaggccctgggcagactgctggtggtgtacccctggacccagagattcttcgagagcttcggcgacctgagcagccccgacgccgtgatgggcaaccccaaggtgaaggcccacggcaagaaggtgctgggcgccttcagcgacggcctggcccacctggacaacctgaagggcaccttcagccagctgagcgagctgcactgcgacaagctgcacgtggaccccgagaacttcagactgctgggcaacgtgctggtgtgcgtgctggccagaaacttcggcaaggagttcaccccccagatgcaggccgcctaccagaaggtggtggccggcgtggccaacgccctggcccacaagtaccactag

SEQ ID NO: 10834 - DNA, 315 bp, Artificial Sequence
  derived and/or modified sequence
atggtgcacctgacccccgaggagaagaccgccgtgaacgccctgtggggcaaggtgaacgtggacgccgtgggcggcgaggccctgggcagactgctggtggtgtacccctggacccagagattcttcgagagcttcggcgacctgagcagccccgacgccgtgatgggcaaccccaaggtgaaggcccacggcaagaaggtgctgggcgccttcagcgacggcctggcccacctggacaacctgaagggcaccttcagccagctgagcgagctgcactgcgacaagctgcacgtggaccccgagaacttctag

SEQ ID NO: 10835 - protein, 529 aa, Artificial Sequence
  derived and/or modified sequence
MTSSRLWFSLLLAAAFAGRATALWPWPQNFQTSDQRYVLYPNNFQFQYDVSSAAQPGCSVLDEAFQRYRDLLFGSGSWPRPYLTGKRHTLEKNVLVVSVVTPGCNQLPTLESVENYTLTINDDQCLLLSETVWGALRGLETFSQLVWKSAEGTFFINKTEIEDFPRFPHRGLLLDTSRHYLPLSSILDTLDVMAYNKLNVFHWHLVDDPSFPYESFTFPELMRKGSYNPVTHIYTAQDVKEVIEYARLRGIRVLAEFDTPGHTLSWGPGIPGLLTPCYSGSEPSGTFGPVNPSLNNTYEFMSTFFLEVSSVFPDFYLHLGGDEVDFTCWKSNPEIQDFMRKKGFGEDFKQLESFYIQTLLDIVSSYGKGYVVWQEVFDNKVKIQPDTIIQVWREDIPVNYMKELELVTKAGFRALLSAPWYLNRISYGPDWKDFYIVEPLAFEGTPEQKALVIGGEACMWGEYVDNTNLVPRLWPRAGAVAERLWSNKLTSDLTFAYERLSHFRCELLRRGVQAQPLNVGFCEQEFEQT

SEQ ID NO: 10836 - protein, 301 aa, Artificial Sequence
  derived and/or modified sequence
MMTSVYSSLRLSGELSEDVMAYNKLNVFHWHLVDDPSFPYESFTFPELMRKGSYNPVTHIYTAQDVKEVIEYARLRGIRVLAEFDTPGHTLSWGPGIPGLLTPCYSGSEPSGTFGPVNPSLNNTYEFMSTFFLEVSSVFPDFYLHLGGDEVDFTCWKSNPEIQDFMRKKGFGEDFKQLESFYIQTLLDIVSSYGKGYVVWQEVFDNKVKIQPDTIIQVWREDIPVNYMKELELVTKAGFRALLSAPWYLNRISYGPDWKDFYIVEPLAFEGTPEQKALVIGGEACMWGEYVDNTNLVPRLW

SEQ ID NO: 10837 - protein, 168 aa, Artificial Sequence
  derived and/or modified sequence
MAYNKLNVFHWHLVDDPSFPYESFTFPELMRKGSYNPVTHIYTAQDVKEVIEYARLRGIRVLAEFDTPGHTLSWGPGIPGLLTPCYSGSEPSGTFGPVNPSLNNTYEFMSTFFLEVSSVFPDFYLHLGGDEVDFTCWKSNPEIQDFMRKKGFGEDFKQLESFYIQTYP

SEQ ID NO: 10838 - DNA, 2437 bp, Artificial Sequence
  derived and/or modified sequence
agttgccgacgcccggcacaatccgctgcacgtagcaggagcctcaggtccaggccggaagtgaaagggcagggtgtgggtcctcctggggtcgcaggcgcagagccgcctctggtcacgtgattcgccgataagtcacgggggcgccgctcacctgaccagggtctcacgtggccagccccctccgagaggggagaccagcgggccatgacaagctccaggctttggttttcgctgctgctggcggcagcgttcgcaggacgggcgacggccctctggccctggcctcagaacttccaaacctccgaccagcgctacgtcctttacccgaacaactttcaattccagtacgatgtcagctcggccgcgcagcccggctgctcagtcctcgacgaggccttccagcgctatcgtgacctgcttttcggttccgggtcttggccccgtccttacctcacagggaaacggcatacactggagaagaatgtgttggttgtctctgtagtcacacctggatgtaaccagcttcctactttggagtcagtggagaattataccctgaccataaatgatgaccagtgtttactcctctctgagactgtctggggagctctccgaggtctggagacttttagccagcttgtttggaaatctgctgagggcacattctttatcaacaagactgagattgaggactttccccgctttcctcaccggggcttgctgttggatacatctcgccattacctgccactctctagcatcctggacactctggatgtcatggcgtacaataaattgaacgtgttccactggcatctggtagatgatccttccttcccatatgagagcttcacttttccagagctcatgagaaaggggtcctacaaccctgtcacccacatctacacagcacaggatgtgaaggaggtcattgaatacgcacggctccggggtatccgtgtgcttgcagagtttgacactcctggccacactttgtcctggggaccaggtatccctggattactgactccttgctactctgggtctgagccctctggcacctttggaccagtgaatcccagtctcaataatacctatgagttcatgagcacattcttcttagaagtcagctctgtcttcccagatttttatcttcatcttggaggagatgaggttgatttcacctgctggaagtccaacccagagatccaggactttatgaggaagaaaggcttcggtgaggacttcaagcagctggagtccttctacatccagacgctgctggacatcgtctcttcttatggcaagggctatgtggtgtggcaggaggtgtttgataataaagtaaagattcagccagacacaatcatacaggtgtggcgagaggatattccagtgaactatatgaaggagctggaactggtcaccaaggccggcttccgggcccttctctctgccccctggtacctgaaccgtatatcctatggccctgactggaaggatttctacatagtggaacccctggcatttgaaggtacccctgagcagaaggctctggtgattggtggagaggcttgtatgtggggagaatatgtggacaacacaaacctggtccccaggctctggcccagagcaggggctgttgccgaaaggctgtggagcaacaagttgacatctgacctgacatttgcctatgaacgtttgtcacacttccgctgtgaattgctgaggcgaggtgtccaggcccaacccctcaatgtaggcttctgtgagcaggagtttgaacagacctgagccccaggcaccgaggagggtgctggctgtaggtgaatggtagtggagccaggcttccactgcatcctggccaggggacggagccccttgccttcgtgccccttgcctgcgtgcccctgtgcttggagagaaaggggccggtgctggcgctcgcattcaataaagagtaatgtggcatttttctataataaacatggattacctgtgtttaaaaaaaaaagtgtgaatggcgttagggtaagggcacagccaggctggagtcagtgtctgcccctgaggtcttttaagttgagggctgggaatgaaacctatagcctttgtgctgttctgccttgcctgtgagctatgtcactcccctcccactcctgaccatattccagacacctgccctaatcctcagcctgctcacttcacttctgcattatatctccaaggcgttggtatatggaaaaagatgtaggggcttggaggtgttctggacagtggggagggctccagacccaacctggtcacagaagagcctctcccccatgcatactcatccacctccctcccctagagctattctcctttgggtttcttgctgcttcaattttatacaaccattatttaaatattattaaacacatattgttctcta

SEQ ID NO: 10839 - DNA, 1590 bp, Artificial Sequence
  derived and/or modified sequence
atgacttctagtaggctctggttttcactcctactggctgccgcctttgcgggcagagccactgcgctgtggccctggccacagaatttccagactagcgaccaacgctatgttctgtatcccaacaactttcaatttcagtatgacgtcagcagcgcggcccaacccggctgcagcgtgctggatgaagccttccagcggtaccgggatttgttgtttggttcaggttcctggcctagaccctatctgaccggtaagaggcacacactggaaaagaatgttctggttgttagcgtagtgaccccaggttgtaatcagctgccaaccttggaatccgttgaaaattatacccttactatcaacgacgatcaatgccttctgttgtcagaaacagtctggggcgccctcaggggattagaaactttctctcaactcgtatggaaatcggccgagggcacctttttcatcaataaaacagaaattgaggattttccgcgcttcccccacagaggactgctgctggatacgtccagacactatctgcctctgtcctcaatattagataccctcgacgtaatggcttataacaaactgaacgtgttccattggcatttagtggacgacccatcatttccatacgagtcgttcacatttcccgagcttatgaggaagggaagttacaatccagtaacacacatctacacggctcaggatgtgaaggaagttattgaatatgcgaggctgaggggaatccgagtactggctgaatttgacaccccaggccacacactgagctggggtcctggcatacccgggttactgactccatgttattccggctctgaaccttccgggaccttcggaccagttaacccttcccttaataatacttacgagtttatgagtacatttttcttggaggtatccagcgtctttcccgacttctatctgcacctgggaggagatgaagtagactttacatgctggaagagcaaccccgagatccaggacttcatgagaaaaaaagggtttggtgaggacttcaaacagctggaatccttctacatacagactctcctggacattgtgagcagctatgggaagggatacgttgtctggcaggaggtatttgacaataaggtgaagatacagccggacacaattatacaggtttggcgggaggatatccccgtgaactacatgaaagaattggaactggtcaccaaggctggcttccgtgccctgctgtccgcaccttggtacctcaaccgcatatcttacgggcctgattggaaagatttctacatcgttgagcctctggcattcgagggcaccccagagcagaaagcccttgttatcggtggtgaggcctgtatgtggggcgagtatgtggacaatacgaacctcgtgccgaggctttggccacgggccggagctgtcgctgaaagactgtggagcaataagcttacctccgatctgacctttgcatacgaacggctttcccattttcggtgcgagctcctgcgtaggggtgtccaggcacagccgctcaacgtaggcttttgcgagcaagagtttgaacagacttag

SEQ ID NO: 10840 - DNA, 906 bp, Artificial Sequence
  derived and/or modified sequence
atgatgacgtctgtctacagcagtttaagactctcaggagaactgagcgaagacgtcatggcatacaataagctcaacgtattccattggcatcttgtggatgatccaagtttcccctatgagtcttttacctttcctgagttaatgcgcaaaggctcttacaatcccgtgacccacatctataccgcacaggacgtgaaggaggtgattgagtatgcacgcctgaggggaatccgcgttcttgcagagttcgataccccaggccataccctgagttggggtccgggtatccccggtctgctgaccccctgttacagcggcagtgagccttccggcacatttgggcccgttaatccttccctaaacaacacctacgaattcatgtcaacattttttttggaggtgtcaagcgtcttccctgatttttacctacacctgggcggggatgaggtcgatttcacatgctggaagtctaatcctgagatacaggactttatgagaaaaaaaggattcggcgaagattttaaacagcttgaatcgttttatatccagacattactcgatatcgtgagttcttatggcaagggatatgtggtctggcaagaggtgttcgacaataaagtcaaaatccagcctgatactatcatccaagtgtggcgagaggacattccggtgaactacatgaaagagctggaactggtgacgaaagccggcttccgcgcactgctgtccgccccttggtacctgaacagaatttcctatggaccggattggaaagacttttacatcgtcgagcccctggcctttgagggaactccagaacagaaagccctggtaattgggggcgaggcttgcatgtggggtgaatacgtggataatactaatcttgtgcccagactatggtag

SEQ ID NO: 10841 - DNA, 507 bp, Artificial Sequence
  derived and/or modified sequence
atggcctacaacaagcttaacgtttttcattggcacctcgttgatgatccaagtttcccttacgagtcatttaccttccctgagctcatgcggaagggttcgtacaacccagtgacacatatttatacagcacaagacgttaaggaggtgatcgaatatgcccgcctccgagggatcagggtcctagctgaattcgataccccaggacatacactatcctggggaccaggaatcccaggcctcctcactccctgctattctggctcagagccttcagggaccttcggacctgtcaatccctcactgaacaatacgtacgagttcatgagcacgttttttttggaagtgtcttcagtgttccccgacttctacttacaccttgggggagatgaggtcgacttcacttgttggaaaagtaacccagaaattcaagattttatgcgtaaaaaaggctttggggaagacttcaaacagctggaaagcttctacattcagacctatccttag

SEQ ID NO: 10842 - DNA, 2737 bp, Artificial Sequence
  derived and/or modified sequence
atttcacatcacaacgacttgtggttttaatcctccgtttttctgcttctgaagttacttcagcctggcaagtcctttacctccccgtaggcctggcgagctgcatcacaacattcaagattcaccctagagccatctgggaaactttcttctccaggtcgccctgcgtcctcgcctccccaccccgttcttctcgagtcgggtgagctgtctagttccatcacggccggcacggccgcaggggtggccggttatttactgctctactgggcccgtgaacagtctggcgagccgagcagttgccgacgcccggcacaatccgctgcacgtagcaggagcctcaggtccaggccggaagtgaaagggcagggtgtgggtcctcctggggtcgcaggcgcagagccgcctctggtcacgtgattcgccgataagtcacgggggcgccgctcacctgaccagggtctcacgtggccagccccctccgagaggggagaccagcgggccatgacaagctccaggctttggttttcgctgctgctggcggcagcgttcgcaggacgggcgacggccctctggccctggcctcagaacttccaaacctccgaccagcgctacgtcctttacccgaacaactttcaattccagtacgatgtcagctcggccgcgcagcccggctgctcagtcctcgacgaggccttccagcgctatcgtgacctgcttttcggttccgggtcttggccccgtccttacctcacagggaaacggcatacactggagaagaatgtgttggttgtctctgtagtcacacctggatgtaaccagcttcctactttggagtcagtggagaattataccctgaccataaatgatgaccagtgtttactcctctctgagactgtctggggagctctccgaggtctggagacttttagccagcttgtttggaaatctgctgagggcacattctttatcaacaagactgagattgaggactttccccgctttcctcaccggggcttgctgttggatacatctcgccattacctgccactctctagcatcctggacactctggatgtcatggcgtacaataaattgaacgtgttccactggcatctggtagatgatccttccttcccatatgagagcttcacttttccagagctcatgagaaaggggtcctacaaccctgtcacccacatctacacagcacaggatgtgaaggaggtcattgaatacgcacggctccggggtatccgtgtgcttgcagagtttgacactcctggccacactttgtcctggggaccaggtatccctggattactgactccttgctactctgggtctgagccctctggcacctttggaccagtgaatcccagtctcaataatacctatgagttcatgagcacattcttcttagaagtcagctctgtcttcccagatttttatcttcatcttggaggagatgaggttgatttcacctgctggaagtccaacccagagatccaggactttatgaggaagaaaggcttcggtgaggacttcaagcagctggagtccttctacatccagacgctgctggacatcgtctcttcttatggcaagggctatgtggtgtggcaggaggtgtttgataataaagtaaagattcagccagacacaatcatacaggtgtggcgagaggatattccagtgaactatatgaaggagctggaactggtcaccaaggccggcttccgggcccttctctctgccccctggtacctgaaccgtatatcctatggccctgactggaaggatttctacatagtggaacccctggcatttgaaggtacccctgagcagaaggctctggtgattggtggagaggcttgtatgtggggagaatatgtggacaacacaaacctggtccccaggctctggcccagagcaggggctgttgccgaaaggctgtggagcaacaagttgacatctgacctgacatttgcctatgaacgtttgtcacacttccgctgtgaattgctgaggcgaggtgtccaggcccaacccctcaatgtaggcttctgtgagcaggagtttgaacagacctgagccccaggcaccgaggagggtgctggctgtaggtgaatggtagtggagccaggcttccactgcatcctggccaggggacggagccccttgccttcgtgccccttgcctgcgtgcccctgtgcttggagagaaaggggccggtgctggcgctcgcattcaataaagagtaatgtggcatttttctataataaacatggattacctgtgtttaaaaaaaaaagtgtgaatggcgttagggtaagggcacagccaggctggagtcagtgtctgcccctgaggtcttttaagttgagggctgggaatgaaacctatagcctttgtgctgttctgccttgcctgtgagctatgtcactcccctcccactcctgaccatattccagacacctgccctaatcctcagcctgctcacttcacttctgcattatatctccaaggcgttggtatatggaaaaagatgtaggggcttggaggtgttctggacagtggggagggctccagacccaacctggtcacagaagagcctctcccccatgcatactcatccacctccctcccctagagctattctcctttgggtttcttgctgcttcaattttatacaaccattatttaaatattattaaacacatattgttctctaggc

SEQ ID NO: 10843 - DNA, 1397 bp, Artificial Sequence
  derived and/or modified sequence
agccccctccgagaggggagaccagcgggccatgacaagctccaggctttggttttcgctgctgctggcggcagcgttcgcaggacgggcgacggccctctggccctggcctcagaacttccaaacctccgaccagcgctacgtcctttacccgaacaactttcaattccagtacgatgtcagctcggccgcgcagcccggctgctcagtcctcgacgaggccttccagcgctatcgtgacctgcttttcggttccgggtcttggccccgtccttacctcacagggaaacggcatacactggagaagaatgtgttggttgtctctgtagtcacacctggatgtaaccagcttcctactttggagtcagtggagaattataccctgaccataaatgatgaccagtgtttactcctctctgagactgtctggggagctctccgaggatgtcatggcgtacaataaattgaacgtgttccactggcatctggtagatgatccttccttcccatatgagagcttcacttttccagagctcatgagaaaggggtcctacaaccctgtcacccacatctacacagcacaggatgtgaaggaggtcattgaatacgcacggctccggggtatccgtgtgcttgcagagtttgacactcctggccacactttgtcctggggaccaggtatccctggattactgactccttgctactctgggtctgagccctctggcacctttggaccagtgaatcccagtctcaataatacctatgagttcatgagcacattcttcttagaagtcagctctgtcttcccagatttttatcttcatcttggaggagatgaggttgatttcacctgctggaagtccaacccagagatccaggactttatgaggaagaaaggcttcggtgaggacttcaagcagctggagtccttctacatccagacgctgctggacatcgtctcttcttatggcaagggctatgtggtgtggcaggaggtgtttgataataaagtaaagattcagccagacacaatcatacaggtgtggcgagaggatattccagtgaactatatgaaggagctggaactggtcaccaaggccggcttccgggcccttctctctgccccctggtacctgaaccgtatatcctatggccctgactggaaggatttctacatagtggaacccctggcatttgaaggtacccctgagcagaaggctctggtgattggtggagaggcttgtatgtggggagaatatgtggacaacacaaacctggtccccaggctctggtaagggttttcgggggggaggtggagggttgggcctgagagcaggagttctcccttagagacccaatcccatctagccacctctggactagtacccttcttt

SEQ ID NO: 10844 - DNA, 1383 bp, Artificial Sequence
  derived and/or modified sequence
ctttcaattccagtacgatgtcagctcggccgcgcagcccggctgctcagtcctcgacgaggccttccagcgctatcgtgacctgcttttcggttccgggtcttggccccgtccttacctcacagggaaacggcatacactggagaagaatgtgttggttgtctctgtagtcacacctggatgtaaccagcttcctactttggagtcagtggagaattataccctgaccataaatgatgaccagtgtttactcctctctgagactgtctggggagctctccgaggtctggagacttttagccagcttgtttggaaatctgctgagggcacattctttatcaacaagactgagattgaggactttccccgctttcctcaccggggcttgctgttggatacatctcgccattacctgccactctctagcatcctggacactctggatgtcatggcgtacaataaattgaacgtgttccactggcatctggtagatgatccttccttcccatatgagagcttcacttttccagagctcatgagaaaggggtcctacaaccctgtcacccacatctacacagcacaggatgtgaaggaggtcattgaatacgcacggctccggggtatccgtgtgcttgcagagtttgacactcctggccacactttgtcctggggaccaggtatccctggattactgactccttgctactctgggtctgagccctctggcacctttggaccagtgaatcccagtctcaataatacctatgagttcatgagcacattcttcttagaagtcagctctgtcttcccagatttttatcttcatcttggaggagatgaggttgatttcacctgctggaagtccaacccagagatccaggactttatgaggaagaaaggcttcggtgaggacttcaagcagctggagtccttctacatccagacgtacccctgagcagaaggctctggtgattggtggagaggcttgtatgtggggagaatatgtggacaacacaaacctggtccccaggctctggcccagagcaggggctgttgccgaaaggctgtggagcaacaagttgacatctgacctgacatttgcctatgaacgtttgtcacacttccgctgtgaattgctgaggtaagcaagctgtggggccttcgcaaggcggagcaggccagatccagggctggggaaccccttagagagaggaagacaataattaacaatagctaacacttacagaggcttatagtcagccctcatccacggattcaaccaactgcgataaaaagtattcaggaaaaaaaaaatacaacaaaaaatggtacaaataaaaaatactgtataacaactatttacatagcatttatattgtatta

SEQ ID NO: 10845 - DNA, 1590 bp, Artificial Sequence
  derived and/or modified sequence
atgaccagcagccggctgtggttcagcctgctgctggccgccgcctttgctggccgggccacagccctgtggccctggccccagaacttccagaccagtgaccagagatatgtgctgtaccccaacaacttccagttccagtatgatgtgagcagcgctgcccagcccggctgcagcgtgctggatgaggccttccagcgctacagagacctgctgtttggaagtggctcctggccccggccctacctgaccgggaagaggcacaccctggagaagaatgtgctggtggtgtctgtggtgaccccaggctgcaaccagctgcccaccctggagagcgtggagaactacaccctgaccatcaatgatgaccagtgcctgctgctgtctgaaacagtgtggggcgccctgcggggcctggagaccttcagccagctggtgtggaagtctgctgagggcaccttcttcatcaacaagacagaaattgaggacttcccccgcttcccccaccggggcctgctgctggacaccagccgccactacctgcccctgagcagcatcctggacaccctggatgtgatggcctacaacaagctgaatgtgttccactggcacctggtggatgaccccagcttcccctatgagagcttcaccttccctgagctgatgaggaagggcagctacaaccctgtgacccacatctacacagcccaggatgtgaaggaggtgattgaatatgcccggctgcggggcatccgggtgctggccgagtttgacaccccaggccacaccctgtcctggggccctggcatccctggcctgctgaccccctgctacagcggcagcgagcccagcggcacctttggacctgtgaaccccagcctgaacaacacctatgagttcatgagcaccttcttcctggaggtgagcagcgtcttcccagacttctacctgcacctgggcggagatgaggtggacttcacctgctggaagagcaaccctgagatccaggacttcatgaggaagaagggctttggagaggacttcaagcagctggagagcttctacatccagaccctgctggacatcgtgtcctcctatggcaagggctacgtggtgtggcaggaggtgtttgacaacaaggtgaagatccagcctgacaccatcatccaggtgtggagggaggacatccctgtgaactacatgaaggagctggagctggtgaccaaggccggcttccgggccctgctgagcgccccctggtacctgaaccgcatctcctatggccctgactggaaggacttctacatcgtggagcccctggcctttgagggcaccccagagcagaaggccctggtgattggaggagaggcctgcatgtggggcgagtatgtggacaacaccaacctggtgccccggctgtggcccagggctggagctgtggccgagcggctgtggagcaacaagctgaccagtgacctgacctttgcctatgagcggctgagccacttccgctgtgagctgctgcggcggggcgtgcaggcccagcccctgaatgtgggcttctgtgagcaggagtttgagcagacctag

SEQ ID NO: 10846 - DNA, 906 bp, Artificial Sequence
  derived and/or modified sequence
atgatgacctctgtgtacagcagcctgcggctgagcggggagctgtctgaagatgtgatggcctacaacaagctgaatgtgttccactggcacctggtggatgaccccagcttcccctatgagagcttcaccttccctgagctgatgaggaagggcagctacaaccctgtgacccacatctacacagcccaggatgtgaaggaggtgattgaatatgcccggctgcggggcatccgggtgctggccgagtttgacaccccaggccacaccctgtcctggggccctggcatccctggcctgctgaccccctgctacagcggcagcgagcccagcggcaccttcggccctgtgaaccccagcctgaacaacacctatgagttcatgagcaccttcttcctggaggtgtcctctgtgtttcctgacttctacctgcacctgggcggagatgaggtggacttcacctgctggaagagcaaccctgagatccaggacttcatgaggaagaagggctttggagaggacttcaagcagctggagagcttctacatccagaccctgctggacatcgtgagcagctatggcaagggctacgtggtgtggcaggaggtgtttgacaacaaggtgaagatccagcctgacaccatcatccaggtgtggagggaggacatccctgtgaactacatgaaggagctggagctggtgaccaaggccggcttccgggccctgctgagcgccccctggtacctgaaccgcatctcctatggccctgactggaaggacttctacatcgtggagcccctggcctttgagggcaccccagagcagaaggccctggtgattggaggagaggcctgcatgtggggcgagtatgtggacaacaccaacctggtgccccggctgtggtag

SEQ ID NO: 10847 - DNA, 507 bp, Artificial Sequence
  derived and/or modified sequence
atggcctacaacaagctgaatgtgttccactggcacctggtggatgaccccagcttcccctatgagagcttcaccttccctgagctgatgaggaagggcagctacaaccctgtgacccacatctacacagcccaggatgtgaaggaggtgattgaatatgcccggctgcggggcatccgggtgctggccgagtttgacaccccaggccacaccctgtcctggggccctggcatccctggcctgctgaccccctgctacagcggcagcgagcccagcggcacctttggacctgtgaaccccagcctgaacaacacctatgagttcatgagcaccttcttcctggaggtgagcagcgtcttcccagacttctacctgcacctgggcggagatgaggtggacttcacctgctggaagagcaaccctgagatccaggacttcatgaggaagaagggctttggagaggacttcaagcagctggagagcttctacatccagacctacccctag

SEQ ID NO: 10848 - DNA, 1590 bp, Artificial Sequence
  derived and/or modified sequence
atgaccagcagccggctgtggttcagcctgctgctggccgccgcctttgccggccgcgctactgccctttggccatggccccaaaactttcagacttccgatcagaggtatgtactgtatcctaataatttccaatttcaatatgacgtttccagcgcggctcagccagggtgctccgtactggacgaggccttccagagatatagagatctgctatttgggtccggatcttggccccgaccatacctcaccggtaagcggcatactctggagaaaaacgttctcgtggtttccgtcgtaaccccaggttgcaaccaacttccaaccctggagagcgttgagaactatacactcacaattaacgatgaccagtgtttgcttctttctgaaaccgtctggggcgccttacgtggactcgagactttttctcaactggtgtggaagagcgccgaaggtacttttttcattaacaaaactgaaatcgaggactttcctaggttccctcatcgcggtttgctcctcgatacaagtcgccattatttacctctgagctctattctggatactctcgacgttatggcatataacaagctgaatgtgttccactggcacctcgtggatgacccctccttcccgtacgagtctttcacattccctgagctgatgagaaagggctcatataatccggtgacccacatctacacagcacaggatgtgaaggaggtgatcgaatatgcaaggttgcgcgggatccgggtcctcgctgaattcgacactcccggccatacattgtcgtggggccctggcataccaggattgttgaccccatgctactctggaagcgagcctagcgggaccttcggcccagttaatcctagcctgaacaacacgtatgaatttatgtcaacatttttcctggaagtgagcagcgtgttcccagatttttatctacacttggggggggacgaagtggatttcacgtgctggaagtcaaatcccgagatccaggatttcatgcgcaagaaaggctttggcgaagacttcaagcaactggagtccttctatattcaaacactgctcgacatagtgagtagctatggcaagggatacgtggtttggcaagaagtgttcgacaacaaggtcaaaattcaacctgacacaatcatccaggtctggagagaagatattcccgtgaactacatgaaggagctggagctagtgacaaaggcgggattcagagctctgctttcagcaccttggtacctaaacaggatcagttacggtcctgactggaaagatttttacatcgtggagccactcgctttcgagggtacacctgaacagaaggcattggtgatcgggggcgaagcctgcatgtggggggaatatgttgacaatactaacttagtaccacggctctggcctcgagcgggagccgtggccgaacgtctctggtcaaataaactaaccagtgatctcacgttcgcatacgaaaggttatctcatttcagatgcgagttgctgagaagaggtgttcaggcacagcctctaaacgtgggtttctgtgaacaggagtttgagcagacctag

SEQ ID NO: 10849 - DNA, 906 bp, Artificial Sequence
  derived and/or modified sequence
atgatgaccagcgtgtacagcagcctgcggctgagcggcgagctgtccgaggatgtgatggcctataataagttgaacgtttttcactggcacctggttgatgacccaagcttcccctacgagtctttcaccttccctgaactaatgagaaagggcagttataatccagtcactcatatctatactgcacaggacgtgaaggaggtcattgaatacgccagattgcgcggaataagagttctggcagagttcgacacaccgggtcatacactgtcctggggccccggaatcccagggctgcttactccgtgttatagcggatctgaaccttccggcacctttggcccagtcaatccaagtttgaacaatacatacgaatttatgagcacctttttcctggaggtttcttcagtgttccctgacttctacctgcatctgggcggagatgaggtcgacttcacatgttggaagtccaatccagaaattcaggacttcatgagaaagaagggattcggcgaagacttcaaacaactggagagtttttatattcagactctgctggatattgtgagttcctatggcaaggggtacgtggtgtggcaggaggtattcgacaacaaggtgaaaatccagcccgacaccatcattcaggtttggcgggaggatattcctgtgaactatatgaaggagctggagctcgttactaaggcaggattccgagcgcttctgtcagcgccctggtatctgaataggatctcttatgggccagactggaaagacttctacatcgtggagcctctggccttcgaagggacaccagaacaaaaggcacttgtgattggaggtgaagcttgcatgtggggcgagtatgttgataatactaacctcgtgcctcgtctttggtag

SEQ ID NO: 10850 - DNA, 507 bp, Artificial Sequence
  derived and/or modified sequence
atggcctacaacaagctgaacgtgttccactggcacctggtggacgaccccagctttccttacgaatcttttacttttcccgagctgatgagaaaaggctcctacaatccagtgacgcacatttatacggcgcaagacgtcaaggaggtaatcgaatatgcacgcctgcgaggcatacgcgtgcttgccgagtttgacactcccgggcacactctgtcatgggggcccggcatcccgggcctcctgacaccatgctatagcgggagcgagccctcggggactttcggccctgtgaacccgtccctgaataatacttacgagtttatgtcgacattcttccttgaggtttctagcgtattccccgatttctatctgcacctcggcggcgatgaggtagactttacgtgctggaaaagcaatcccgaaattcaggactttatgaggaagaagggcttcggcgaagattttaagcaactggaatccttctacatccaaacttacccctag

SEQ ID NO: 10851 - DNA, 1590 bp, Artificial Sequence
  derived and/or modified sequence
atgacatcttcaaggctttggttctctttattgctggccgcagcttttgctggccgagcgaccgcactctggccctggcctcagaatttccagacttcggatcagcgttacgtcctgtaccccaacaattttcaatttcagtacgacgtaagttcagccgcacagccaggatgcagtgtgctggatgaggcgttccagaggtacagggacctgctgtttgggagcggatcctggcccagaccctatctgactggcaaaagacataccctggaaaagaacgtgcttgtcgtttccgtagtgacgccaggttgcaaccagctccccaccctcgaatctgtcgagaactacacactgaccattaacgacgaccagtgtcttcttcttagcgagactgtgtggggcgcactgaggggattggaaacattcagccagttggtctggaaaagcgctgagggcactttctttatcaacaagaccgagattgaggactttccacggttcccacataggggactcttactggatactagtagacattacctgcctctcagttccatattggataccctcgacgtgatggcttacaataagcttaatgtattccactggcacttggtagacgatccctcttttccctatgaatctttcaccttcccggagctcatgaggaaggggagctacaatccagtcacacacatttacacagcccaggatgtgaaagaggttattgaatatgcacgactgcgaggaattcgtgttttggccgagttcgacacccccggacacaccctgagctgggggcctggaattccaggactgctcaccccatgttactctgggtccgaaccaagcgggacctttggaccagtgaatccttctctcaacaatacctatgaatttatgtccacctttttcctggaagtgagcagtgtgttccctgatttctacttgcacctgggcggagacgaggtggattttacttgctggaagagcaaccccgagattcaggacttcatgagaaagaagggcttcggcgaagacttcaagcagctcgagagcttttatatccagactctgctggacatcgtaagcagttacggtaagggctacgtggtgtggcaagaggtctttgacaacaaggtaaaaattcagcccgacacgattatacaggtctggagagaggatatccctgttaattacatgaaagagttggagctcgtgaccaaggcgggatttagagcacttctctccgcaccttggtacctgaaccggattagttatgggcctgactggaaagatttttacattgtggagcccctggccttcgaaggtactcctgagcaaaaagccctagtgattggaggcgaggcatgcatgtggggggagtatgttgataatacaaacctcgttcctaggctctggccacgggctggagcagtcgctgaacgcttgtggtcgaacaagctgacgagtgatctgaccttcgcatacgaaagactgagccattttcgctgtgagctccttcgcaggggtgtccaggcacagcctctgaatgttggattttgtgaacaagagttcgaacagacttag

SEQ ID NO: 10852 - DNA, 906 bp, Artificial Sequence
  derived and/or modified sequence
atgatgactagtgtgtattcaagcctgagactgtcaggcgaactgtccgaagacgtgatggcatataacaaactgaatgtctttcactggcatctcgtcgatgacccgtccttcccatacgaatctttcaccttcccagagctcatgcgcaagggctcatacaaccccgttacgcatatctatacagcgcaagacgtaaaagaggtgatcgagtacgctcgactgagaggcattcgcgtgttggccgaatttgatactcccggtcataccctctcgtggggccctgggatccctggcctgctcactccatgttacagcggatccgaaccgtccggcaccttcgggcctgtgaatcccagcctcaataacacttatgagttcatgagcacgttctttctggaggtctcttctgtttttccagacttttacctccatctcggcggagacgaggttgattttacatgctggaagagcaatcctgaaatacaggacttcatgcgtaaaaaaggctttggtgaggactttaagcagctcgaatcattctatattcagacactgctggatattgtgagttcatacggaaaggggtatgtggtttggcaggaagtgtttgacaataaagtgaaaatccagcccgatactataatccaggtgtggagagaggacatcccagttaactacatgaaagagttagagttggtgacaaaggctggcttcagggctcttctgtcagccccatggtaccttaaccgaatcagctatgggccagactggaaagacttttacatcgtggagcccctggcattcgaggggacaccggagcagaaagccctggtgatcggtggggaggcttgtatgtggggggagtacgtagacaataccaaccttgtccctcggctgtggtag

SEQ ID NO: 10853 - DNA, 507 bp, Artificial Sequence
  derived and/or modified sequence
atggcgtacaacaagctaaatgtattccactggcacctggtcgatgatcctagcttcccttacgaatctttcacctttccagaactgatgagaaagggaagctacaaccccgtcacccacatctatactgcacaggatgtgaaggaggtcatagagtacgctcggttgcggggaatacgagtgctagccgaatttgatactccgggacatacactgtcttggggcccaggaatccctgggctcctgacgccatgttatagtggatccgagcccagcggaacgtttggacctgtcaaccccagtcttaataatacttacgaattcatgtctaccttctttctggaggtgagcagtgttttcccagacttttatctgcatctgggaggcgatgaggtggactttacctgctggaagagcaatccggagatacaggattttatgcgcaagaaaggcttcggcgaggacttcaagcagctagaatctttctacatacaaacttatccttag

SEQ ID NO: 10854 - DNA, 1590 bp, Artificial Sequence
  derived and/or modified sequence
atgaccagcagcagactgtggttcagcctgctgctggccgccgccttcgccggcagagccaccgccctgtggccctggccccagaacttccagaccagcgaccagagatacgtgctgtaccccaacaacttccagttccagtacgacgtgagcagcgccgcccagcccggctgcagcgtgctggacgaggccttccagagatacagagacctgctgttcggcagcggcagctggcccagaccctacctgaccggcaagagacacaccctggagaagaacgtgctggtggtgagcgtggtgacccccggctgcaaccagctgcccaccctggagagcgtggagaactacaccctgaccatcaacgacgaccagtgcctgctgctgagcgagaccgtgtggggcgccctgagaggcctggagaccttcagccagctggtgtggaagagcgccgagggcaccttcttcatcaacaagaccgagatcgaggacttccccagattcccccacagaggcctgctgctggacaccagcagacactacctgcccctgagcagcatcctggacaccctggacgtgatggcctacaacaagctgaacgtgttccactggcacctggtggacgaccccagcttcccctacgagagcttcaccttccccgagctgatgagaaagggcagctacaaccccgtgacccacatctacaccgcccaggacgtgaaggaggtgatcgagtacgccagactgagaggcatcagagtgctggccgagttcgacacccccggccacaccctgagctggggccccggcatccccggcctgctgaccccctgctacagcggcagcgagcccagcggcaccttcggccccgtgaaccccagcctgaacaacacctacgagttcatgagcaccttcttcctggaggtgagcagcgtgttccccgacttctacctgcacctgggcggcgacgaggtggacttcacctgctggaagagcaaccccgagatccaggacttcatgagaaagaagggcttcggcgaggacttcaagcagctggagagcttctacatccagaccctgctggacatcgtgagcagctacggcaagggctacgtggtgtggcaggaggtgttcgacaacaaggtgaagatccagcccgacaccatcatccaggtgtggagagaggacatccccgtgaactacatgaaggagctggagctggtgaccaaggccggcttcagagccctgctgagcgccccctggtacctgaacagaatcagctacggccccgactggaaggacttctacatcgtggagcccctggccttcgagggcacccccgagcagaaggccctggtgatcggcggcgaggcctgcatgtggggcgagtacgtggacaacaccaacctggtgcccagactgtggcccagagccggcgccgtggccgagagactgtggagcaacaagctgaccagcgacctgaccttcgcctacgagagactgagccacttcagatgcgagctgctgagaagaggcgtgcaggcccagcccctgaacgtgggcttctgcgagcaggagttcgagcagacctag

SEQ ID NO: 10855 - DNA, 906 bp, Artificial Sequence
  derived and/or modified sequence
atgatgaccagcgtgtacagcagcctgagactgagcggcgagctgagcgaggacgtgatggcctacaacaagctgaacgtgttccactggcacctggtggacgaccccagcttcccctacgagagcttcaccttccccgagctgatgagaaagggcagctacaaccccgtgacccacatctacaccgcccaggacgtgaaggaggtgatcgagtacgccagactgagaggcatcagagtgctggccgagttcgacacccccggccacaccctgagctggggccccggcatccccggcctgctgaccccctgctacagcggcagcgagcccagcggcaccttcggccccgtgaaccccagcctgaacaacacctacgagttcatgagcaccttcttcctggaggtgagcagcgtgttccccgacttctacctgcacctgggcggcgacgaggtggacttcacctgctggaagagcaaccccgagatccaggacttcatgagaaagaagggcttcggcgaggacttcaagcagctggagagcttctacatccagaccctgctggacatcgtgagcagctacggcaagggctacgtggtgtggcaggaggtgttcgacaacaaggtgaagatccagcccgacaccatcatccaggtgtggagagaggacatccccgtgaactacatgaaggagctggagctggtgaccaaggccggcttcagagccctgctgagcgccccctggtacctgaacagaatcagctacggccccgactggaaggacttctacatcgtggagcccctggccttcgagggcacccccgagcagaaggccctggtgatcggcggcgaggcctgcatgtggggcgagtacgtggacaacaccaacctggtgcccagactgtggtag

SEQ ID NO: 10856 - DNA, 507 bp, Artificial Sequence
  derived and/or modified sequence
atggcctacaacaagctgaacgtgttccactggcacctggtggacgaccccagcttcccctacgagagcttcaccttccccgagctgatgagaaagggcagctacaaccccgtgacccacatctacaccgcccaggacgtgaaggaggtgatcgagtacgccagactgagaggcatcagagtgctggccgagttcgacacccccggccacaccctgagctggggccccggcatccccggcctgctgaccccctgctacagcggcagcgagcccagcggcaccttcggccccgtgaaccccagcctgaacaacacctacgagttcatgagcaccttcttcctggaggtgagcagcgtgttccccgacttctacctgcacctgggcggcgacgaggtggacttcacctgctggaagagcaaccccgagatccaggacttcatgagaaagaagggcttcggcgaggacttcaagcagctggagagcttctacatccagacctacccctag

SEQ ID NO: 10857 - protein, 556 aa, Artificial Sequence
  derived and/or modified sequence
MELCGLGLPRPPMLLALLLATLLAAMLALLTQVALVVQVAEAARAPSVSAKPGPALWPLPLLVKMTPNLLHLAPENFYISHSPNSTAGPSCTLLEEAFRRYHGYIFGFYKWHHEPAEFQAKTQVQQLLVSITLQSECDAFPNISSDESYTLLVKEPVAVLKANRVWGALRGLETFSQLVYQDSYGTFTINESTIIDSPRFSHRGILIDTSRHYLPVKIILKTLDAMAFNKFNVLHWHIVDDQSFPYQSITFPELSNKGSYSLSHVYTPNDVRMVIEYARLRGIRVLPEFDTPGHTLSWGKGQKDLLTPCYSRQNKLDSFGPINPTLNTTYSFLTTFFKEISEVFPDQFIHLGGDEVEFKCWESNPKIQDFMRQKGFGTDFKKLESFYIQKVLDIIATINKGSIVWQEVFDDKAKLAPGTIVEVWKDSAYPEELSRVTASGFPVILSAPWYLDLISYGQDWRKYYKVEPLDFGGTQKQKQLFIGGEACLWGEYVDATNLTPRLWPRASAVGERLWSSKDVRDMDDAYDRLTRHRCRMVERGIAAQPLYAGYCNHENM

SEQ ID NO: 10858 - protein, 331 aa, Artificial Sequence
  derived and/or modified sequence
MAFNKFNVLHWHIVDDQSFPYQSITFPELSNKGSYSLSHVYTPNDVRMVIEYARLRGIRVLPEFDTPGHTLSWGKGQKDLLTPCYSRQNKLDSFGPINPTLNTTYSFLTTFFKEISEVFPDQFIHLGGDEVEFKCWESNPKIQDFMRQKGFGTDFKKLESFYIQKVLDIIATINKGSIVWQEVFDDKAKLAPGTIVEVWKDSAYPEELSRVTASGFPVILSAPWYLDLISYGQDWRKYYKVEPLDFGGTQKQKQLFIGGEACLWGEYVDATNLTPRLWPRASAVGERLWSSKDVRDMDDAYDRLTRHRCRMVERGIAAQPLYAGYCNHENM

SEQ ID NO: 10859 - DNA, 1919 bp, Artificial Sequence
  derived and/or modified sequence
gcagtcatctgactcggtgactcacccgcggccgcgcttcctctgatccgggccgggcgggaagtcgggtcccgaggctccggctcggcagaccgggcggaaagcagccgagcggccatggagctgtgcgggctggggctgccccggccgcccatgctgctggcgctgctgttggcgacactgctggcggcgatgttggcgctgctgactcaggtggcgctggtggtgcaggtggcggaggcggctcgggccccgagcgtctcggccaagccggggccggcgctgtggcccctgccgctctcggtgaagatgaccccgaacctgctgcatctcgccccggagaacttctacatcagccacagccccaattccacggcgggcccctcctgcaccctgctggaggaagcgtttcgacgatatcatggctatatttttggtttctacaagtggcatcatgaacctgctgaattccaggctaaaacccaggttcagcaacttcttgtctcaatcacccttcagtcagagtgtgatgctttccccaacatatcttcagatgagtcttatactttacttgtgaaagaaccagtggctgtccttaaggccaacagagtttggggagcattacgaggtttagagacctttagccagttagtttatcaagattcttatggaactttcaccatcaatgaatccaccattattgattctccaaggttttctcacagaggaattttgattgatacatccagacattatctgccagttaagattattcttaaaactctggatgccatggcttttaataagtttaatgttcttcactggcacatagttgatgaccagtctttcccatatcagagcatcacttttcctgagttaagcaataaaggaagctattctttgtctcatgtttatacaccaaatgatgtccgtatggtgattgaatatgccagattacgaggaattcgagtcctgccagaatttgatacccctgggcatacactatcttggggaaaaggtcagaaagacctcctgactccatgttacagtagacaaaacaagttggactcttttggacctataaaccctactctgaatacaacatacagcttccttactacatttttcaaagaaattagtgaggtgtttccagatcaattcattcatttgggaggagatgaagtggaatttaaatgttgggaatcaaatccaaaaattcaagatttcatgaggcaaaaaggctttggcacagattttaagaaactagaatctttctacattcaaaaggttttggatattattgcaaccataaacaagggatccattgtctggcaggaggtttttgatgataaagcaaagcttgcgccgggcacaatagttgaagtatggaaagacagcgcatatcctgaggaactcagtagagtcacagcatctggcttccctgtaatcctttctgctccttggtacttagatttgattagctatggacaagattggaggaaatactataaagtggaacctcttgattttggcggtactcagaaacagaaacaacttttcattggtggagaagcttgtctatggggagaatatgtggatgcaactaacctcactccaagattatggcctcgggcaagtgctgttggtgagagactctggagttccaaagatgtcagagatatggatgacgcctatgacagactgacaaggcaccgctgcaggatggtcgaacgtggaatagctgcacaacctctttatgctggatattgtaaccatgagaacatgtaaaaaatggaggggaaaaaggccacagcaatctgtactacaatcaactttattttgaaatcatgtaaaataagatattagactgttttttgaataaaatatttttattgattgaaaaaaaaaaaaaaaaaaaa

SEQ ID NO: 10860 - DNA, 1671 bp, Artificial Sequence
  derived and/or modified sequence
atggagctctgcgggctcggcctccctaggccaccaatgttgctggcactactgctcgccactctgttagcggcgatgcttgctctgctgacacaagtggccctggtggtccaggtggccgaggccgcccgcgcgccaagcgtgtcagctaaacccggccctgccctgtggcctctgccactactcgttaaaatgacacccaacctgctgcacctggccccggagaatttttatatttcccactccccaaatagtaccgcaggcccgagctgtaccctgctagaagaggccttcagaagatatcacggctatattttcggattctacaagtggcaccacgagccagctgagttccaggccaagacacaggtccaacagctgttagtgagcattacactgcagagcgagtgtgatgcattccctaatatatcaagtgacgagtcctacactctgctggtcaaagagccggttgctgtgcttaaggctaatcgtgtgtggggagctctacgcggtctagaaacattctcccaactggtgtaccaggactcctatgggaccttcacaattaacgaaagcacaatcatcgattcaccccggttctctcaccgcggaatacttatcgatacctccaggcattatctccctgtgaagattatcttaaaaactctggacgccatggccttcaacaagttcaacgtcctgcactggcacattgtggacgatcaaagtttcccatatcaatcaatcacgtttccagagctgagcaacaaggggagctactccctcagccacgtttacacccctaacgatgtcaggatggtgatcgaatacgcgagactgcgagggataagggtcctcccagagtttgacacccccgggcacactctatcttggggaaagggccagaaagacctgctcaccccgtgttacagcaggcaaaacaagctcgacagtttcggacctataaaccctacattgaataccacgtacagctttctgacaaccttttttaaggagataagcgaggtcttcccggatcagtttatccatttaggtggagatgaagtggaatttaagtgctgggagagcaaccccaaaatccaggattttatgcgccaaaaaggattcggcacagacttcaaaaaattggagagcttttacatccagaaggtgctcgacataattgcaacaattaataaaggctccatagtctggcaggaggtcttcgacgacaaggccaagctcgcccccgggaccatagtcgaggtatggaaagactctgcgtaccctgaggagctctcacgggtcacagccagtggatttcccgtgatcttgtccgctccgtggtacttagatcttatcagttatggccaggactggaggaaatactataaagtggaacctctggatttcggtggcactcagaagcaaaagcagttgtttattggcggagaggcctgtctgtggggggaatacgtggatgctacgaacctgaccccccgtctctggccgagagcctccgctgtgggcgagcgattatggtcttctaaagacgtgcgtgatatggatgatgcctacgatcgccttaccaggcacagatgtcggatggtcgagcgcggcatcgccgcccaaccgttatatgcagggtattgcaatcatgaaaatatgtag

SEQ ID NO: 10861 - DNA, 1901 bp, Artificial Sequence
  derived and/or modified sequence
gcagtcatctgactcggtgactcacccgcggccgcgcttcctctgatccgggccgggcgggaagtcgggtcccgaggctccggctcggcagaccgggcggaaagcagccgagcggccatggagctgtgcgggctggggctgccccggccgcccatgctgctggcgctgctgttggcgacactgctggcggcgatgttggcgctgctgactcaggtggcgctggtggtgcaggtggcggaggcggctcgggccccgagcgtctcggccaagccggggccggcgctgtggcccctgccgctcttggtgaagatgaccccgaacctgctgcatctcgccccggagaacttctacatcagccacagccccaattccacggcgggcccctcctgcaccctgctggaggaagcgtttcgacgatatcatggctatatttttggtttctacaagtggcatcatgaacctgctgaattccaggctaaaacccaggttcagcaacttcttgtctcaatcacccttcagtcagagtgtgatgctttccccaacatatcttcagatgagtcttatactttacttgtgaaagaaccagtggctgtccttaaggccaacagagtttggggagcattacgaggtttagagacctttagccagttagtttatcaagattcttatggaactttcaccatcaatgaatccaccattattgattctccaaggttttctcacagaggaattttgattgatacatccagacattatctgccagttaagattattcttaaaactctggatgccatggcttttaataagtttaatgttcttcactggcacatagttgatgaccagtctttcccatatcagagcatcacttttcctgagttaagcaataaaggaagctattctttgtctcatgtttatacaccaaatgatgtccgtatggtgattgaatatgccagattacgaggaattcgagtcctgccagaatttgatacccctgggcatacactatcttggggaaaaggtcagaaagacctcctgactccatgttacagtagacaaaacaagttggactcttttggacctataaaccctactctgaatacaacatacagcttccttactacatttttcaaagaaattagtgaggtgtttccagatcaattcattcatttgggaggagatgaagtggaatttaaatgttgggaatcaaatccaaaaattcaagatttcatgaggcaaaaaggctttggcacagattttaagaaactagaatctttctacattcaaaaggttttggatattattgcaaccataaacaagggatccattgtctggcaggaggtttttgatgataaagcaaagcttgcgccgggcacaatagttgaagtatggaaagacagcgcatatcctgaggaactcagtagagtcacagcatctggcttccctgtaatcctttctgctccttggtacttagatttgattagctatggacaagattggaggaaatactataaagtggaacctcttgattttggcggtactcagaaacagaaacaacttttcattggtggagaagcttgtctatggggagaatatgtggatgcaactaacctcactccaagattatggcctcgggcaagtgctgttggtgagagactctggagttccaaagatgtcagagatatggatgacgcctatgacagactgacaaggcaccgctgcaggatggtcgaacgtggaatagctgcacaacctctttatgctggatattgtaaccatgagaacatgtaaaaaatggaggggaaaaaggccacagcaatctgtactacaatcaactttattttgaaatcatgtaaaataagatattagactgttttttgaataaaatatttttattgattgaa

SEQ ID NO: 10862 - DNA, 2021 bp, Artificial Sequence
  derived and/or modified sequence
gtatccttagctcggctcctcgcttccccagcggctcgccccagacattgcaccgcggaggggaggccggtcgacctctccggcgatgcccggcttctgcctgctgtgggagggcagcggcgggcaccgtgatctccgcaccgagaagagctccccttgccctctagtcgaagctcccgagtgctcggagcacgctcacccctcgcgaacacacccctgcagccgaagcagcccctgaagcccgcagcgcctgcaacaggtccggggcagtgggggaaacttacagcagtggcgactggccgcaacgcacaactgagttctagcgacggtcacgggcaaggaggcgacgaaccggtcgtctcagcccagggaagcggtggcgaatgccccggagaaaggagggccagccggggagaggactgcgccccgaacgatggctcgcggaccggctaccgatggcgttcgcctccgtctgtcgtccccacgccgcggacccggtgtccaggacccgcagagcgtctccggagcgcgtcacgatatcatggctatatttttggtttctacaagtggcatcatgaacctgctgaattccaggctaaaacccaggttcagcaacttcttgtctcaatcacccttcagtcagagtgtgatgctttccccaacatatcttcagatgagtcttatactttacttgtgaaagaaccagtggctgtccttaaggccaacagagtttggggagcattacgaggtttagagacctttagccagttagtttatcaagattcttatggaactttcaccatcaatgaatccaccattattgattctccaaggttttctcacagaggaattttgattgatacatccagacattatctgccagttaagattattcttaaaactctggatgccatggcttttaataagtttaatgttcttcactggcacatagttgatgaccagtctttcccatatcagagcatcacttttcctgagttaagcaataaaggaagctattctttgtctcatgtttatacaccaaatgatgtccgtatggtgattgaatatgccagattacgaggaattcgagtcctgccagaatttgatacccctgggcatacactatcttggggaaaaggtcagaaagacctcctgactccatgttacagtagacaaaacaagttggactcttttggacctataaaccctactctgaatacaacatacagcttccttactacatttttcaaagaaattagtgaggtgtttccagatcaattcattcatttgggaggagatgaagtggaatttaaatgttgggaatcaaatccaaaaattcaagatttcatgaggcaaaaaggctttggcacagattttaagaaactagaatctttctacattcaaaaggttttggatattattgcaaccataaacaagggatccattgtctggcaggaggtttttgatgataaagcaaagcttgcgccgggcacaatagttgaagtatggaaagacagcgcatatcctgaggaactcagtagagtcacagcatctggcttccctgtaatcctttctgctccttggtacttagatttgattagctatggacaagattggaggaaatactataaagtggaacctcttgattttggcggtactcagaaacagaaacaacttttcattggtggagaagcttgtctatggggagaatatgtggatgcaactaacctcactccaagattatggcctcgggcaagtgctgttggtgagagactctggagttccaaagatgtcagagatatggatgacgcctatgacagactgacaaggcaccgctgcaggatggtcgaacgtggaatagctgcacaacctctttatgctggatattgtaaccatgagaacatgtaaaaaatggaggggaaaaaggccacagcaatctgtactacaatcaactttattttgaaatcatgtaaaataagatattagactgttttttgaataaaatatttttattgattgaa

SEQ ID NO: 10863 - DNA, 1671 bp, Artificial Sequence
  derived and/or modified sequence
atggagctgtgtggcctgggcctgcccaggcctcccatgctgctggccctgctgctggccaccctgctggccgccatgctggccctgctgacccaggtggccctggtggtgcaggtggccgaggccgcccgggcccccagcgtgtctgccaagccaggccctgccctgtggcccctgcccctgctggtgaagatgacccccaacctgctgcacctggcccctgagaacttctacatcagccacagccccaacagcacagctggccccagctgcaccctgctggaggaggccttccgccgctaccacggctacatcttcggcttctacaagtggcaccacgagcctgctgagttccaggccaagacccaggtgcagcagctgctggtgtccatcaccctgcagagtgaatgtgatgccttccccaacatcagcagtgatgagagctacaccctgctggtgaaggagcctgtggccgtgctgaaggccaacagagtgtggggcgccctgcggggcctggagaccttcagccagctggtgtaccaggacagctatggcaccttcaccatcaatgaaagcaccatcatcgacagcccccgcttcagccaccggggcatcctgattgacaccagccgccactacctgcctgtgaagatcatcctgaagaccctggatgccatggccttcaacaagttcaacgtgctgcactggcacatcgtggatgaccagagcttcccctaccagagcatcaccttccctgagctgagcaacaagggcagctacagcctgagccacgtgtacaccccaaatgatgtgaggatggtgattgaatatgcccggctgcggggcatccgggtgctgcctgagtttgacaccccaggccacaccctgtcctggggcaagggccagaaggacctgctgaccccctgctacagccggcagaacaagctggacagctttggccccatcaaccccaccctgaacaccacctacagcttcctgaccaccttcttcaaggagatcagcgaggtgtttcctgaccagttcatccacctgggcggagatgaggtggagttcaagtgctgggagagcaaccccaagatccaggacttcatgaggcagaagggcttcggcacagacttcaagaagctggagagcttctacatccagaaggtgctggacatcatcgccaccatcaacaagggcagcatcgtgtggcaggaggtgtttgatgacaaggccaagctggcccctggcaccatcgtggaggtgtggaaggacagcgcctacccagaggagctgagccgggtgacagccagcggcttccctgtgatcctgagcgccccctggtacctggacctgatctcctatggccaggactggaggaagtactacaaggtggagcccctggactttggaggcacccagaagcagaagcagctgttcatcggcggggaggcctgcctgtggggcgagtatgtggatgccaccaacctgaccccccggctgtggccccgggccagcgctgtgggggagcggctgtggagcagcaaggatgtgcgggacatggatgatgcctatgaccggctgaccaggcaccgctgcaggatggtggagcggggcattgctgcccagcccctgtatgccggctactgcaaccacgagaacatgtag

SEQ ID NO: 10864 - DNA, 1671 bp, Artificial Sequence
  derived and/or modified sequence
atggagctgtgcggcctgggcctgccccggccccccatgctgctggcattactgctggctacactgcttgccgcaatgctcgccctgttgactcaagtcgccctggtggtccaggtcgctgaggctgcgcgtgctccctctgttagcgccaagcctggccccgcgctttggccgctgcctctactcgtgaagatgaccccaaacctcttgcatctggccccggaaaatttttacatcagccactcccccaactctacagctggaccaagttgtaccctgctggaagaggctttcaggaggtatcatgggtacatattcggattttataagtggcatcacgaaccagctgagtttcaggctaaaacccaagtgcaacaactgcttgtatccatcacattacaaagcgagtgcgatgctttccctaacattagttcagacgagtcttatacactccttgtgaaggaacctgttgcagtactgaaagccaaccgggtttggggcgcattgcgcggcctggagacattctctcagcttgtctaccaagacagctacggaacctttaccattaacgagtctacaatcatagactctcctaggtttagccatcgagggattcttattgatacaagcagacactacctgccagtaaaaataattctcaaaacattggatgctatggctttcaacaagtttaatgtactgcactggcatattgtcgacgaccaatccttcccttaccagtctatcaccttccccgagctatctaataaaggctcttattcactcagccacgtctatacccctaatgatgttagaatggtgattgaatacgctcgcctgagaggcatccgcgtactccccgagttcgataccccaggccataccctcagctggggcaaaggccagaaagacttactgactccatgttacagccggcagaacaaactggactcatttggcccaatcaatcccacgcttaacacgacctactcatttctgacaacattctttaaagaaatctctgaagtgtttcccgaccaattcatccacctgggcggggatgaggtcgagttcaagtgttgggagtccaatcccaagattcaggactttatgcggcaaaaagggttcgggacagatttcaaaaagctagaatcattttacatccagaaagtcctcgatatcattgcaactattaataaggggagcatcgtgtggcaagaagtctttgacgacaaggcaaaattagctcctggtaccatcgttgaggtctggaaagactcagcatatcccgaggaacttagccgcgtaacggccagcgggttccccgttattttgagcgctccatggtatctcgacctaatctcttacggtcaggattggagaaagtactacaaggtcgaacctttagatttcggaggcacacaaaaacagaaacagctgttcatcggcggagaggcctgtctctggggggagtatgtggacgctacgaatctgacgcctagactgtggcccagggcgtccgcggtcggcgagcggctatggtcctcgaaggatgttcgagatatggatgacgcttatgaccgactgacccgccataggtgtaggatggtggagcgggggattgctgcgcagccactttatgcaggatactgtaatcacgaaaatatgtag

SEQ ID NO: 10865 - DNA, 1671 bp, Artificial Sequence
  derived and/or modified sequence
atggagctgtgcggactgggcctgccgagaccacccatgcttttagccctgttactggccaccctgctcgcggctatgctcgccctgcttacgcaggtcgcgcttgtcgtgcaggtggccgaagccgcaagggctcccagcgtgtccgcaaaacctggcccagcgctatggccgctgccacttctagttaagatgactcctaacctgttgcacctcgctcctgagaatttctacatttctcattctcccaactctaccgccggaccatcttgtacactgctagaggaagcctttcgacggtaccacgggtacatattcgggttctacaaatggcaccacgaaccggcagagtttcaggctaagacacaagtccagcaattgctcgtgtccattaccctgcaaagcgagtgcgatgcttttcccaatataagtagtgacgagtcgtataccttgcttgttaaagagcccgttgctgtattgaaagctaatcgcgtatggggagctcttcggggactggagacattcagtcagctggtctaccaggatagctatggaacattcacaatcaacgagtccaccatcattgacagtcctcggttttctcatcgcggaattctgatcgatacgagtagacattacctacccgtcaagatcatcttaaagaccctggacgccatggccttcaataagtttaatgtcctgcactggcacatagtcgatgaccaatcttttccataccagagtataacctttcctgaactgtccaataagggcagttattctctgagccacgtgtacaccccaaacgacgtgaggatggtgatcgagtacgctcggctccgcggaatcagagttctgccagaatttgacactcctggtcacactctctcatgggggaagggccaaaaggatctgctgactccttgttattctcgccagaataaacttgactctttcgggcctatcaaccccacgctgaataccacgtactcttttctgactacctttttcaaggaaatatccgaggtctttcccgaccagttcatccacctgggaggcgacgaggtggagttcaagtgttgggagagcaatcctaagatccaggactttatgcgacaaaaaggattcgggaccgattttaaaaagcttgagtcattctatatccagaaagtgctagacatcatcgcgaccatcaacaaaggcagcatcgtatggcaggaggtgtttgatgataaggctaaactcgcacccggaacaatcgttgaagtgtggaaagactccgcgtaccccgaggaactgtctcgggtgactgcttccggatttcccgtgatcttgtccgctccatggtacctagatttgatcagctatggccaggactggcgaaaatactataaagttgagcctctcgattttggtggcactcagaagcagaagcagctgtttatcggcggtgaggcctgtctttggggcgagtacgttgacgcgacaaacctcacacctagactgtggcccagggcgtccgcagttggagaaaggttgtggtcatctaaagatgttagagacatggacgatgcatatgacagactgactcggcaccgctgtcggatggtcgagagaggaatagccgcacagcctctttacgccggatattgcaatcacgaaaatatgtag

SEQ ID NO: 10866 - DNA, 1671 bp, Artificial Sequence
  derived and/or modified sequence
atggagctgtgcggcctgggcctgcccagaccccccatgctgctggccctgctgctggccaccctgctggccgccatgctggccctgctgacccaggtggccctggtggtgcaggtggccgaggccgccagagcccccagcgtgagcgccaagcccggccccgccctgtggcccctgcccctgctggtgaagatgacccccaacctgctgcacctggcccccgagaacttctacatcagccacagccccaacagcaccgccggccccagctgcaccctgctggaggaggccttcagaagataccacggctacatcttcggcttctacaagtggcaccacgagcccgccgagttccaggccaagacccaggtgcagcagctgctggtgagcatcaccctgcagagcgagtgcgacgccttccccaacatcagcagcgacgagagctacaccctgctggtgaaggagcccgtggccgtgctgaaggccaacagagtgtggggcgccctgagaggcctggagaccttcagccagctggtgtaccaggacagctacggcaccttcaccatcaacgagagcaccatcatcgacagccccagattcagccacagaggcatcctgatcgacaccagcagacactacctgcccgtgaagatcatcctgaagaccctggacgccatggccttcaacaagttcaacgtgctgcactggcacatcgtggacgaccagagcttcccctaccagagcatcaccttccccgagctgagcaacaagggcagctacagcctgagccacgtgtacacccccaacgacgtgagaatggtgatcgagtacgccagactgagaggcatcagagtgctgcccgagttcgacacccccggccacaccctgagctggggcaagggccagaaggacctgctgaccccctgctacagcagacagaacaagctggacagcttcggccccatcaaccccaccctgaacaccacctacagcttcctgaccaccttcttcaaggagatcagcgaggtgttccccgaccagttcatccacctgggcggcgacgaggtggagttcaagtgctgggagagcaaccccaagatccaggacttcatgagacagaagggcttcggcaccgacttcaagaagctggagagcttctacatccagaaggtgctggacatcatcgccaccatcaacaagggcagcatcgtgtggcaggaggtgttcgacgacaaggccaagctggcccccggcaccatcgtggaggtgtggaaggacagcgcctaccccgaggagctgagcagagtgaccgccagcggcttccccgtgatcctgagcgccccctggtacctggacctgatcagctacggccaggactggagaaagtactacaaggtggagcccctggacttcggcggcacccagaagcagaagcagctgttcatcggcggcgaggcctgcctgtggggcgagtacgtggacgccaccaacctgacccccagactgtggcccagagccagcgccgtgggcgagagactgtggagcagcaaggacgtgagagacatggacgacgcctacgacagactgaccagacacagatgcagaatggtggagagaggcatcgccgcccagcccctgtacgccggctactgcaaccacgagaacatgtag

SEQ ID NO: 10867 - protein, 343 aa, Artificial Sequence
  derived and/or modified sequence
MSRAGSWDMDGLRADGGGAGGAPASSSSSSVAAAAASGQCRGFLSAPVFAGTHSGRAAAAAAAAAAAAAAASGFAYPGTSERTGSSSSSSSSAVVAARPEAPPAKECPAPTPAAAAAAPPSAPALGYGYHFGNGYYSCRMSHGVGLQQNALKSSPHASLGGFPVEKYMDVSGLASSSVPANEVPARAKEVSFYQGYTSPYQHVPGYIDMVSTFGSGEPRHEAYISMEGYQSWTLANGWNSQVYCTKDQPQGSHFWKSSFPGDVALNQPDMCVYRRGRKKRVPYTKLQLKELENEYAINKFINKDKRRRISAATNLSERQVTIWFQNRRVKDKKIVSKLKDTVS

SEQ ID NO: 10868 - DNA, 2341 bp, Artificial Sequence
  derived and/or modified sequence
gagaaaggagaggagggaggaggcgcgccgcgccatggtgtcctgcgcggggccagggccagggccggggccgggccaggccgggccatgagccgcgccgggagctgggacatggacgggctgcgggcagacggcgggggcgccggtggcgccccggcctcttcctcctcctcatcggtggcggcggcggcggcgtcaggccagtgccgcggctttctctccgcgcctgtgttcgccgggacgcattcggggcgggcggcggcggcggcagcggcggctgcggcggcggcggcggcagcctccggctttgcgtaccccgggacctctgagcgcacgggctcttcctcgtcgtcgtcctcttctgccgttgtagcggcgcgcccggaggctcccccagccaaagagtgcccagcacccacgcctgcagcggccgctgcagcgcccccgagcgctccagcgctgggctacggctaccacttcggcaacggctactacagctgccgtatgtcgcacggcgtgggcttacagcagaatgcgctcaagtcatcgccgcacgcctcgctgggaggctttcccgtggagaagtacatggacgtgtcaggcctggcgagcagcagcgtaccggccaacgaggtgccagcgcgagccaaggaggtatccttctaccagggctatacgagcccttaccagcacgtgcccggctatatcgacatggtgtccactttcggctccggggagcctcggcacgaggcctacatctccatggaggggtaccagtcctggacgctggctaacgggtggaacagccaggtgtactgcaccaaggaccagccacaggggtcccacttttggaaatcttcctttccaggggatgtggctctaaatcagccggacatgtgcgtctaccgaagagggaggaagaagagagtgccttacaccaaactgcagcttaaagaactggagaacgagtatgccattaacaaattcattaacaaggacaagcggcggcgtatctcggctgctacgaacctatctgagagacaagtgaccatttggtttcagaaccgaagagtgaaggacaagaaaattgtctccaagctcaaagatactgtctcctgatgtggtccaggttggccacagacagcttagaagccattcggttgtctccaaaaggcctttggaaagacttgaatatgtatttaattccccccaccccctgccaatggtggcaaattttgtgaattgtttttctctcttccccttatctggctctaaaaccttctgctgcccaacctgactttgtagttctgatttttacttgtttattattggttttgttcttgcctagggtttttaaaatatctgtttttaatgttttgtttctccctccaggccagtataaagggacttgaagtattttttaataatccgccccccaatgaacttcagaagtgccattctgatttaagggtttttttaaaaaattactttatttgttcattcccagcactgattatcttcataatccattaggacagaatggttttcagtcgttcatatcctgtaattaggtaattgaatcattagctctcagcagttgccctgaggcaagtggaaaggcaggcagtgctctggggtcaccgagaaagtctaaaaacaggaggctgaaggtactgtgatggctttaaaaatggccaccttattaaatagggattgtatcaatattgaaatgaagacaatctttccaactttgggtgtttcacttgctgttttaattgtttgtttttaacactttgtaggtttgtgttttcataatctttaatttgaaactcatgtgtcctcatggatcgtggatgccttcatttcttgagctctcaatgcagacatttaaatggctgcaatcagtagagtgacccgcggatggcataaatgcacctccttttcttggccttggatctatgggtctgggattgtggtcatctcctcaatcctcaaaaagaggctgaatcaatgtggccgtgggtgggaacttacatacagaacccaatgaagaacttgactgtctaaacaagggggcctcgcatggagctgtaaagcatctaacaaatatgaaaaatgtgaagttccaaggtccaagaagaaaaataatgatgtttctgaaagtgatgataaataattacttttaaagtgctgcatatttatacaattgagagattatttttgtaaatgcaatgtctgtgagctgggatacatgggcagtgcttcagacatttaaaaatcactttttactcctagggagatgccaataaacagaactcttttgtttcaaaaaaaaaaaaaa

SEQ ID NO: 10869 - DNA, 1032 bp, Artificial Sequence
  derived and/or modified sequence
atgtccagagccggaagctgggatatggatgggctgagagccgatggagggggcgccggcggagctcctgcttccagcagctcaagctccgtggcagcagctgccgcaagcgggcagtgccggggtttcctcagtgccccagtgtttgccggcacccattctggccgagccgctgccgccgccgcagctgctgccgccgctgccgccgccgccagtgggtttgcttatccagggaccagcgagcgaacgggttcaagctcttccagctcgagctcagcagtggtggccgctcgaccggaggccccccccgccaaagagtgcccagctcccactcccgcggcggccgcggcagctccgccatcagcgcctgctttggggtatggctaccattttgggaacgggtattatagttgtagaatgagccacggggtggggctccaacagaatgctctgaagtcctcaccccatgcatcgctgggtggctttcctgtcgaaaaatacatggacgtctcaggtttggctagctcttcagtacctgcaaatgaggtgccagctcgcgccaaggaggtttctttttaccaaggatacacgagcccataccagcacgtgccaggctacattgatatggtctctacgttcgggtccggggagccacggcacgaagcttatatttctatggagggatatcaatcttggaccttagccaacggatggaactctcaggtgtactgcactaaggaccaaccccagggttcacatttctggaagtcatccttccccggcgacgtagccctgaaccagcccgacatgtgcgtataccgcagagggcgaaaaaagcgcgtgccctacaccaagctgcaattgaaggagctcgaaaacgaatatgcgataaacaagttcataaacaaggataaaagacgccggattagtgccgcaactaatttgagtgagcgccaggtcactatctggtttcagaatcgaagagtgaaggataagaagatcgtctctaagttgaaggacacagtcagctag

SEQ ID NO: 10870 - DNA, 1032 bp, Artificial Sequence
  derived and/or modified sequence
atgagccgggccggctcctgggacatggatggcctgcgggcagatggcggcggggccggcggggccccagccagcagcagcagcagctctgtggccgctgctgctgccagcggccagtgccggggcttcctgagcgcccctgtgtttgctggcacccacagcggccgggctgctgctgctgctgctgctgctgctgctgctgctgctgctgccagcggctttgcctacccaggcaccagcgagaggacaggcagcagcagcagcagcagcagcagcgctgtggtggccgcccggcctgaggcccccccagccaaggagtgcccagcccccaccccagctgctgctgctgctgcccctccttctgccccagccctgggctacggctaccactttggaaatggctactacagctgcaggatgagccacggcgtgggcctgcagcagaatgccctgaagagcagcccccacgccagcctgggcggcttccctgtggagaagtacatggatgtgtctggcctggccagcagctctgtgcctgccaatgaggtgcctgcccgggccaaggaggtgtccttctaccagggctacaccagcccctaccagcacgtgcccggctacatcgacatggtgtccacctttggaagtggagagcccaggcatgaggcctacatctccatggagggctaccagagctggaccctggccaacggctggaacagccaggtgtactgcaccaaggaccagccccagggcagccacttctggaagagcagcttccctggagatgtggccctgaaccagcctgacatgtgtgtgtaccgccggggcaggaagaagagggtgccctacaccaagctgcagctgaaggagctggagaatgaatatgccatcaacaagttcatcaacaaggacaagagaagacgcatctctgctgccaccaacctgtctgagcggcaggtgaccatctggttccagaacagaagagtgaaggacaagaagatcgtgtccaagctgaaggacacagtgtcctag

SEQ ID NO: 10871 - DNA, 1032 bp, Artificial Sequence
  derived and/or modified sequence
atgagccgggccggcagctgggacatggacggcctgcgggccgacggcggtggcgccggtggcgccccagccagttctagcagcagttctgtggccgcagcggcagcctctggccagtgtagaggttttctgtctgcgcctgtcttcgcaggaactcactctggcagggccgctgcagcagctgcggcggctgccgccgccgcagccgccgcatccgggttcgcttatcccgggacctctgagaggaccggatcgtcatccagctcctctagctcagccgtagtggccgccagaccggaagcaccaccagctaaagaatgccctgcccctactcctgccgccgcagctgccgcaccaccaagcgcgccagctctgggatacggctatcacttcggcaatggctattattcttgcagaatgtcccacggcgttggactacagcaaaacgccttgaaatctagtccacacgctagcctgggcggcttccctgtggaaaaatatatggacgtgagtgggttagcaagctcctccgtgcccgctaatgaagttcctgctagggccaaggaagtctccttttaccagggatatacatcgccatatcagcatgtcccaggctacattgatatggtgtccacattcggatccggcgaaccccggcatgaagcttacatctcaatggagggttaccagtcttggacacttgccaatggctggaattcccaggtttattgcactaaagatcaaccccagggatctcacttctggaagagctctttccccggggatgtggcgcttaatcagcccgacatgtgcgtctataggcgggggcgcaaaaagcgggtgccatatacaaagttacaactcaaagagctggagaatgaatatgcgatcaataagttcattaacaaagacaagcgacgacggatttccgctgctaccaatctgtccgagaggcaggtcaccatctggtttcaaaatcggcgcgtcaaggacaaaaaaatcgtcagtaagctgaaggataccgtgtcctag

SEQ ID NO: 10872 - DNA, 1032 bp, Artificial Sequence
  derived and/or modified sequence
atgtcaagagccggttcatgggacatggacggtctgagagccgatggagggggagcgggtggcgctccagcttcgagcagttcttcttccgtcgctgccgctgcagcaagtggccagtgcagggggtttctgagcgcccctgtatttgcagggacccactctggacgagccgcagcagcagcagctgccgctgcagccgctgctgcagcggcttccgggttcgcatacccagggacctctgaacgaactgggtcctcgtccagctcaagttcctccgccgttgttgccgcacgccctgaggctcccccagcaaaggagtgcccggctccaacaccagccgctgcagccgctgcaccgccatccgcccctgcactcggttacggctaccatttcgggaacggttactattcctgccgcatgtcgcatggggtcggcctgcagcaaaacgcacttaagagttcccctcacgcgtcccttggtggcttcccagtggaaaagtacatggacgtcagcggactggcctcaagttccgtacctgcaaacgaagtacctgcacgcgcaaaagaagtgtccttttatcaaggatacactagcccctatcagcatgttccaggatatatcgatatggtgtcaacctttggctcaggcgagcctcgccacgaagcatacatcagcatggaggggtatcagtcttggactctcgccaatgggtggaacagccaggtgtattgcacaaaggaccagccacagggaagccacttttggaaaagctccttccccggtgacgtcgcccttaaccagcccgacatgtgtgtctataggcgaggcagaaaaaagagggtaccttatacgaaacttcagttgaaggagcttgaaaacgaatacgctatcaacaaattcatcaacaaggacaaacgaagacgaatctctgcagctacaaacctgtcagaacgccaggtcacgatctggttccagaataggcgggtaaaagacaagaaaattgttagtaagctcaaagacactgtgtcctag

SEQ ID NO: 10873 - DNA, 1032 bp, Artificial Sequence
  derived and/or modified sequence
atgagcagagccggcagctgggacatggacggcctgagagccgacggcggcggcgccggcggcgcccccgccagcagcagcagcagcagcgtggccgccgccgccgccagcggccagtgcagaggcttcctgagcgcccccgtgttcgccggcacccacagcggcagagccgccgccgccgccgccgccgccgccgccgccgccgccgccgccagcggcttcgcctaccccggcaccagcgagagaaccggcagcagcagcagcagcagcagcagcgccgtggtggccgccagacccgaggccccccccgccaaggagtgccccgcccccacccccgccgccgccgccgccgccccccccagcgcccccgccctgggctacggctaccacttcggcaacggctactacagctgcagaatgagccacggcgtgggcctgcagcagaacgccctgaagagcagcccccacgccagcctgggcggcttccccgtggagaagtacatggacgtgagcggcctggccagcagcagcgtgcccgccaacgaggtgcccgccagagccaaggaggtgagcttctaccagggctacaccagcccctaccagcacgtgcccggctacatcgacatggtgagcaccttcggcagcggcgagcccagacacgaggcctacatcagcatggagggctaccagagctggaccctggccaacggctggaacagccaggtgtactgcaccaaggaccagccccagggcagccacttctggaagagcagcttccccggcgacgtggccctgaaccagcccgacatgtgcgtgtacagaagaggcagaaagaagagagtgccctacaccaagctgcagctgaaggagctggagaacgagtacgccatcaacaagttcatcaacaaggacaagagaagaagaatcagcgccgccaccaacctgagcgagagacaggtgaccatctggttccagaacagaagagtgaaggacaagaagatcgtgagcaagctgaaggacaccgtgagctag

SEQ ID NO: 10874 - DNA, 2240 bp, Artificial Sequence
  derived and/or modified sequence
atgagccgcgccgggagctgggacatggacgggctgcgggcagacggcgggggcgccggtggcgccccggcctcttcctcctcctcatcggtggcggcggcggcggcgtcaggccagtgccgcggctttctctccgcgcctgtgttcgccgggacgcattcggggcgggcggcggcggcggcagcggcggctgcggcggcggcggcggcagcctccggctttgcgtaccccgggacctctgagcgcacgggctcttcctcgtcgtcgtcctcttctgccgttgtagcggcgcgcccggaggctcccccagccaaagagtgcccagcacccacgcctgcagcggccgctgcagcgcccccgagcgctccagcgctgggctacggctaccacttcggcaacggctactacagctgccgtatgtcgcacggcgtgggcttacagcagaatgcgctcaagtcatcgccgcacgcctcgctgggaggctttcccgtggagaagtacatggacgtgtcaggcctggcgagcagcagcgtaccggccaacgaggtgccagcgcgagccaaggaggtatccttctaccagggctatacgagcccttaccagcacgtgcccggctatatcgacatggtgtccactttcggctccggggagcctcggcacgaggcctacatctccatggaggggtaccagtcctggacgctggctaacgggtggaacagccaggtgtactgcaccaaggaccagccacaggggtcccacttttggaaatcttcctttccaggggatgtggctctaaatcagccggacatgtgcgtctaccgaagagggaggaagaagagagtgccttacaccaaactgcagcttaaagaactggagaacgagtatgccattaacaaattcattaacaaggacaagcggcggcgtatctcggctgctacgaacctatctgagagacaagtgaccatttggtttcagaaccgaagagtgaaggacaagaaaattgtctccaagctcaaagatactgtctcctgatgtggtccaggttggccacagacagcttagaagccattcggttgtctccaaaaggcctttggaaagacttgaatatgtatttaattccccccaccccctgccaatggtggcaaattttgtgaattgtttttctctcttccccttatctggctctaaaaccttctgctgcccaacctgactttgtagttctgatttttacttgtttattattggttttgttcttgcctagggtttttaaaatatctgtttttaatgttttgtttctccctccaggccagtataaagggacttgaagtattttttaataatccgccccccaatgaacttcagaagtgccattctgatttaagggtttttttaaaaaattactttatttgttcattcccagcactgattatcttcataatccattaggacagaatggttttcagtcgttcatatcctgtaattaggtaattgaatcattagctctcagcagttgccctgaggcaagtggaaaggcaggcagtgctctggggtcaccgagaaagtctaaaaacaggaggctgaaggtactgtgatggctttaaaaatggccaccttattaaatagggattgtatcaatattgaaatgaagacaatctttccaactttgggtgtttcacttgctgttttaattgtttgtttttaacactttgtaggtttgtgttttcataatctttaatttgaaactcatgtgtcctcatggatcgtggatgccttcatttcttgagctctcaatgcagacatttaaatggctgcaatcagtagagtgacccgcggatggcataaatgcacctccttttcttggccttggatctatgggtctgggattgtggtcatctcctcaatcctcaaaaagaggctgaatcaatgtggccgtgggtgggaacttacatacagaacccaatgaagaacttgactgtctaaacaagggggcctcgcatggagctgtaaagcatctaacaaatatgaaaaatgtgaagttccaaggtccaagaagaaaaataatgatgtttctgaaagtgatgataaataattacttttaaagtgctgcatatttatacaattgagagattatttttgtaaatgcaatgtctgtgagctgggatacatgggcagtgcttcagacatttaaaaatcactttttactcctagggagatgccaataaacagaactcttttgtttc

SEQ ID NO: 10875 - protein, 422 aa, Artificial Sequence
  derived and/or modified sequence
MDVLSPGQGNNTTSPPAPFETGGNTTGISDVTVSYQVITSLLLGTLIFCAVLGNACVVAAIALERSLQNVANYLIGSLAVTDLMVSVLVLPMAALYQVLNKWTLGQVTCDLFIALDVLCCTSSILHLCAIALDRYWAITDPIDYVNKRTPRRAAALISLTWLIGFLISIPPMLGWRTPEDRSDPDACTISKDHGYTIYSTFGAFYIPLLLMLVLYGRIFRAARFRIRKTVKKVEKTGADTRHGASPAPQPKKSVNGESGSRNWRLGVESKAGGALCANGAVRQGDDGAALEVIEVHRVGNSKEHLPLPSEAGPTPCAPASFERKNERNAEAKRKMALARERKTVKTLGIIMGTFILCWLPFFIVALVLPFCESSCHMPTLLGAIINWLGYSNSLLNPVIYAYFNKDFQNAFKKIIKCKFCRQ

SEQ ID NO: 10876 - protein, 42 aa, Artificial Sequence
  derived and/or modified sequence
MDVLSPGQGNNTTSPPAPFETGGNTTGISDVTVSYQVITSLL

SEQ ID NO: 10877 - DNA, 1269 bp, Artificial Sequence
  derived and/or modified sequence
atggatgttctctctcccggccagggaaacaacacgacttctccacccgcgccctttgaaacaggcgggaacacaacgggcatttccgatgtgacagttagttatcaggtcattacaagccttttgctcggaacattaattttctgtgcagtgttagggaatgcgtgtgtggtcgccgctattgccctggaaaggagtcttcagaatgtggcaaattacctgatcggctctctcgctgtgaccgacctcatggtctccgtgttggtgctcccaatggccgctctgtaccaagtgctgaacaagtggacattgggacaggtgacatgtgacttgtttatcgctctcgatgtgctgtgctgtacatcctccatattacatctatgtgccattgctctcgaccgatactgggcaatcacggatcccatagactacgttaacaagcggacccctaggcgcgctgcagccctgataagtctgacctggctgattggctttctcatttcaatcccacctatgctggggtggcgcacccccgaggacagatctgatccggatgcttgtactattagtaaggaccatggctacactatctattctacattcggtgccttctatattccactgctgctgatgctagttttatatggaaggatttttagggcagctcgctttcgaattcgcaagactgttaaaaaggtagaaaagacaggagcagataccaggcacggagcttctcccgccccgcagccaaaaaagtctgtcaacggagagagcgggtcccggaattggcgtctgggagtagaaagtaaggccggcggggccttgtgtgctaacggagcagtgcggcaaggcgacgacggggcagccctggaagtgattgaagttcatcgtgtggggaactctaaggaacacttacccctgcccagtgaagccggaccaacaccctgcgcgcccgcatcattcgagagaaagaatgagaggaacgctgaagccaagcggaagatggcgctcgctcgtgagcgtaaaaccgttaaaactctggggattattatgggaacttttattctgtgctggctgcctttctttatcgtcgctttggtgctgcctttctgtgaaagttcgtgccacatgccaacgctgttgggtgccatcatcaattggctgggatactcaaacagtcttcttaacccagttatatacgcttacttcaataaggactttcagaatgcctttaagaagataattaagtgtaagttttgtcggcagtag

SEQ ID NO: 10878 - DNA, 129 bp, Artificial Sequence
  derived and/or modified sequence
atggacgttctgtcccccggacaggggaacaacacaaccagcccccctgctccttttgaaaccggggggaatacaacaggcatttctgacgtcaccgttagctatcaggttatcacttcactattgtag

SEQ ID NO: 10879 - DNA, 1269 bp, Artificial Sequence
  derived and/or modified sequence
atggatgtgctgagccctggccagggcaacaacaccaccagccccccagccccctttgaaacaggaggcaacaccaccggcatcagtgatgtgacagtgtcctaccaggtgatcaccagcctgctgctgggcaccctcatcttctgtgctgtgctgggcaatgcctgtgtggtggccgccatcgccctggagaggagcctgcagaatgtggccaactacctgattggcagcctggccgtgacagacctgatggtgtctgtgctggtgctgcccatggccgccctgtaccaggtgctgaacaagtggaccctgggccaggtgacctgtgacctcttcatcgccctggatgtgctgtgctgcaccagcagcatcctgcacctgtgtgccatcgccctggaccgctactgggccatcacagaccccatcgactatgtgaacaagaggaccccaagaagagctgctgccctgatcagcctgacctggctgattggcttcctgatcagcatcccccccatgctgggctggaggaccccagaagatagaagtgaccctgatgcctgcaccatcagcaaggaccacggctacaccatctacagcacctttggagccttctacatccccctgctgctgatgctggtgctgtatggccgcatcttccgggccgcccgcttccgcatcaggaagacagtgaagaaggtggagaagacaggagctgacaccaggcatggagccagccctgccccccagcccaagaagtctgtgaatggagagagcggcagcaggaactggaggctgggcgtggagagcaaggccggcggggccctgtgtgccaacggggctgtgcggcagggagatgatggagctgccctggaggtgattgaggtgcaccgggtgggcaacagcaaggagcacctgcccctgcccagcgaggccggccccaccccctgtgccccagccagctttgagaggaagaatgaaagaaatgctgaggccaagaggaagatggccctggcccgggagaggaagacagtgaagaccctgggcatcatcatgggcaccttcatcctgtgctggctgcccttcttcatcgtggccctggtgctgcccttctgtgagagcagctgccacatgcccaccctgctgggcgccatcatcaactggctgggctacagcaacagcctgctgaaccctgtgatctatgcctacttcaacaaggacttccagaatgccttcaagaagatcatcaagtgcaagttctgccggcagtag

SEQ ID NO: 10880 - DNA, 129 bp, Artificial Sequence
  derived and/or modified sequence
atggatgtgctgagccctggccagggcaacaacaccaccagccccccagccccctttgaaacaggaggcaacaccaccggcatcagtgatgtgacagtgtcctaccaggtgatcaccagcctgctgtag

SEQ ID NO: 10881 - DNA, 1269 bp, Artificial Sequence
  derived and/or modified sequence
atggacgtgctgagccccggccagggcaacaacaccaccagcccccctgcaccctttgaaaccgggggaaacactacaggcatctcagacgttacagtgagctaccaggtcatcacttccctcctgttaggcactctgattttctgtgctgtgctgggcaatgcctgcgtcgtggcggctatagcactggagagaagtctacagaacgtagctaattacctgatagggtcgctggctgtgaccgacctgatggtgagtgtacttgtgctgcccatggccgctttgtatcaggtcctgaataagtggacccttgggcaggtgacctgcgacttattcattgctctagatgtgctgtgttgtactagttcaatactgcatctgtgcgccatcgcattagatcgctattgggccataaccgatcctatcgattatgtgaacaaaaggacaccgcggagagctgctgcactcatttcactcacctggctcattggctttcttatctcaatcccaccaatgctcggctggaggactcctgaggatagatccgatccggacgcatgtaccatctccaaggatcacggatatacaatctattccactttcggggcattctatatccctttgctgctcatgctggtcttatacgggcgcatcttcagggctgccagatttaggatccgcaagactgttaaaaaggtcgaaaaaacgggagccgacacccgacatggtgctagcccagccccccaacccaagaaatccgtcaatggtgagtccggaagcaggaattggcgcctaggagtcgaaagcaaagcgggcggcgctctctgcgcaaacggcgctgtgcgccaaggtgatgatggagccgccctggaagtgatcgaggtgcatagggtgggcaattcaaaagagcaccttccactgcccagcgaggccggacctaccccatgtgcccccgcctcttttgagaggaagaatgaacgtaacgccgaagccaagaggaaaatggcactcgcccgagaacgcaagactgtaaagacattgggtatcatcatgggaaccttcatattatgctggctgccattctttatcgttgcccttgtcctgcctttttgcgaatcttcttgtcatatgcccactctgttgggcgcaattattaattggttgggttatagtaacagcttgctgaatccagtgatctacgcctattttaataaagatttccagaatgcctttaagaagatcatcaaatgcaagttctgtaggcagtag

SEQ ID NO: 10882 - DNA, 129 bp, Artificial Sequence
  derived and/or modified sequence
atggacgtgctgagccccggccagggcaacaacaccaccagcccccccgcccccttcgagactggcggtaatacaacaggcatctccgatgtcaccgtttcttaccaggtgataacatccttgctatag

SEQ ID NO: 10883 - DNA, 1269 bp, Artificial Sequence
  derived and/or modified sequence
atggatgtgttatccccgggacagggcaacaatacaactagccctccggcacctttcgaaacgggcggtaatacgacaggtatctctgacgtgactgtgagttaccaggttatcactagccttcttctcgggactttgatattctgtgccgtacttggcaacgcatgtgtcgttgcagccattgccctggaacgcagcctgcaaaacgttgccaattacctgattgggtcattggccgtaaccgacctcatggtgtctgttttggttctccctatggccgcattgtaccaggttctgaacaagtggacccttggccaggttacttgtgacctcttcatcgcgctggacgttttgtgttgcacatcatcaatactgcacctatgcgctattgcactggacagatattgggctattacagatcctatagattatgtcaacaagcgtacaccaagaagggccgctgccctgattagtttaacgtggctgattgggtttttgatcagcattccgcctatgttgggctggcgtactcctgaagaccggagcgaccctgacgcttgtaccattagcaaggatcacgggtatacaatctactccacatttggcgcattctacatccccctgctgttgatgttagtattatatggaagaatcttccgcgcagcaagattccgaattcgcaagaccgttaagaaggttgaaaagaccggggctgatacaaggcacggtgcctcccccgctccccagccaaagaaatccgtgaacggcgagtctggaagtagaaactggcgtctgggggtggagtccaaagccggaggtgccttgtgcgctaacggcgcagtgcgccaaggcgatgatggagccgctttagaggtgatagaggtccatagagtgggaaactctaaggaacacctgccactcccttccgaggcgggaccgacgccctgcgccccagcatcctttgagagaaaaaacgaaagaaacgccgaggctaagagaaagatggcacttgcgagggaacgcaaaaccgtgaaaacactgggtatcatcatggggacttttattctctgctggttgccatttttcattgtggcactggtcctgccgttttgcgaaagcagttgccacatgccaacgctgctcggagcgatcattaattggctgggatactcaaattccctcctgaatccagtcatctatgcctatttcaacaaagatttccagaacgcctttaaaaagatcatcaagtgtaagttctgccgccaatag

SEQ ID NO: 10884 - DNA, 129 bp, Artificial Sequence
  derived and/or modified sequence
atggacgttctgtccccaggccaaggcaataatacaacctctccccctgcaccattcgaaacaggcggaaacactaccgggattagtgacgtgactgtgagctaccaggttatcacttccttgctgtag

SEQ ID NO: 10885 - DNA, 1598 bp, Artificial Sequence
  derived and/or modified sequence
agtttcccagctggagcttctgaacgcgctggactgcgagagcccagggagcgcctgaaagctgctcctcggagatacccttcgccgaagcagtaagaacttcctgcttgggtctctgcattcccttcctccgaaacttcccaggagaagggcggaagaccccaggggaaggggcgaggcgaatcttcgcgctgctttttcttccctcccccttcccgcgccgggcgcgcaggcatggatgtgctcagccctggtcagggcaacaacaccacatcaccaccggctccctttgagaccggcggcaacactactggtatctccgacgtgaccgtcagctaccaagtgatcacctctctgctgctgggcacgctcatcttctgcgcggtgctgggcaatgcgtgcgtggtggctgccatcgccttggagcgctccctgcagaacgtggccaattatcttattggctctttggcggtcaccgacctcatggtgtcggtgttggtgctgcccatggccgcgctgtatcaggtgctcaacaagtggacactgggccaggtaacctgcgacctgttcatcgccctcgacgtgctgtgctgcacctcatccatcttgcacctgtgcgccatcgcgctggacaggtactgggccatcacggaccccatcgactacgtgaacaagaggacgccccggcgcgccgctgcgctcatctcgctcacttggcttattggcttcctcatctctatcccgcccatgctgggctggcgcaccccggaagaccgctcggaccccgacgcatgcaccattagcaaggatcatggctacactatctattccacctttggagctttctacatcccgctgctgctcatgctggttctctatgggcgcatattccgagctgcgcgcttccgcatccgcaagacggtcaaaaaggtggagaagaccggagcggacacccgccatggagcatctcccgccccgcagcccaagaagagtgtgaatggagagtcggggagcaggaactggaggctgggcgtggagagcaaggctgggggtgctctgtgcgccaatggcgcggtgaggcaaggtgacgatggcgccgccctggaggtgatcgaggtgcaccgagtgggcaactccaaagagcacttgcctctgcccagcgaggctggtcctaccccttgtgcccccgcctctttcgagaggaaaaatgagcgcaacgccgaggcgaagcgcaagatggccctggcccgagagaggaagacagtgaagacgctgggcatcatcatgggcaccttcatcctctgctggctgcccttcttcatcgtggctcttgttctgcccttctgcgagagcagctgccacatgcccaccctgttgggcgccataatcaattggctgggctactccaactctctgcttaaccccgtcatttacgcatacttcaacaaggactttcaaaacgcgtttaagaagatcattaagtgtaagttctgccgccagtgatgacggaggagtagccggccagtcgaggctacaggatccgtcccattcactatgcttcccccaaccctagggaatcaacacttaagataattcgc

SEQ ID NO: 10886 - DNA, 553 bp, Artificial Sequence
  derived and/or modified sequence
tttgttacaaccttggtctgaccggcagggatctggtgtgtatatttctgggattggagactgtttgctagtggggagactccagctccggcagccagttcgggagcggcaaagtaaaatggacagcgacagacagacgttccagccacctctccgccgccgggagatcctggagctgctttcaggccaactccagtttcccagctggagcttctgaacgcgctggactgcgagagcccagggagcgcctgaaagctgctcctcggagatacccttcgccgaagcagtaagaacttcctgcttgggtctctgcattcccttcctccgaaacttcccaggagaagggcggaagaccccaggggaaggggcgaggcgaatcttcgcgctgctttttcttccctcccccttcccgcgccgggcgcgcaggcatggatgtgctcagccctggtcagggcaacaacaccacatcaccaccggctccctttgagaccggcggcaacactactggtatctccgacgtgaccgtcagctaccaagtgatcacctctctgct

SEQ ID NO: 10887 - DNA, 1269 bp, Artificial Sequence
  derived and/or modified sequence
atggacgtgctgagccccggccagggcaacaacaccaccagcccccccgcccccttcgagaccggcggcaacaccaccggcatcagcgacgtgaccgtgagctaccaggtgatcaccagcctgctgctgggcaccctgatcttctgcgccgtgctgggcaacgcctgcgtggtggccgccatcgccctggagagaagcctgcagaacgtggccaactacctgatcggcagcctggccgtgaccgacctgatggtgagcgtgctggtgctgcccatggccgccctgtaccaggtgctgaacaagtggaccctgggccaggtgacctgcgacctgttcatcgccctggacgtgctgtgctgcaccagcagcatcctgcacctgtgcgccatcgccctggacagatactgggccatcaccgaccccatcgactacgtgaacaagagaacccccagaagagccgccgccctgatcagcctgacctggctgatcggcttcctgatcagcatcccccccatgctgggctggagaacccccgaggacagaagcgaccccgacgcctgcaccatcagcaaggaccacggctacaccatctacagcaccttcggcgccttctacatccccctgctgctgatgctggtgctgtacggcagaatcttcagagccgccagattcagaatcagaaagaccgtgaagaaggtggagaagaccggcgccgacaccagacacggcgccagccccgccccccagcccaagaagagcgtgaacggcgagagcggcagcagaaactggagactgggcgtggagagcaaggccggcggcgccctgtgcgccaacggcgccgtgagacagggcgacgacggcgccgccctggaggtgatcgaggtgcacagagtgggcaacagcaaggagcacctgcccctgcccagcgaggccggccccaccccctgcgcccccgccagcttcgagagaaagaacgagagaaacgccgaggccaagagaaagatggccctggccagagagagaaagaccgtgaagaccctgggcatcatcatgggcaccttcatcctgtgctggctgcccttcttcatcgtggccctggtgctgcccttctgcgagagcagctgccacatgcccaccctgctgggcgccatcatcaactggctgggctacagcaacagcctgctgaaccccgtgatctacgcctacttcaacaaggacttccagaacgccttcaagaagatcatcaagtgcaagttctgcagacagtag

SEQ ID NO: 10888 - DNA, 129 bp, Artificial Sequence
  derived and/or modified sequence
atggacgtgctgagccccggccagggcaacaacaccaccagcccccccgcccccttcgagaccggcggcaacaccaccggcatcagcgacgtgaccgtgagctaccaggtgatcaccagcctgctgtag

SEQ ID NO: 10889 - protein, 390 aa, Artificial Sequence
  derived and/or modified sequence
MLSRKGIIPEEYVLTRLAEDPAKPRYRARQRRARFVSKKGNCNVAHKNIREQGRFLQDVFTTLVDLKWPHTLLIFTMSFLCSWLLFAMAWWLIAFAHGDLAPSEGTAEPCVTSIHSFSSAFLFSIEVQVTIGFGGRMVTEECPLAILILIVQNIVGLMINAIMLGCIFMKTAQAHRRAETLIFSKHAVIALRHGRLCFMLRVGDLRKSMIISATIHMQVVRKTTSPEGEVVPLHQVDIPMENGVGGNSIFLVAPLIIYHVIDANSPLYDLAPSDLHHHQDLEIIVILEGVVETTGITTQARTSYLADEILWGQRFVPIVAEEDGRYSVDYSKFGNTVKVPTPLCTARQLDEDHSLLEALTLASARGPLRKRSVPMAKAKPKFSISPDSLS

SEQ ID NO: 10890 - DNA, 1173 bp, Artificial Sequence
  derived and/or modified sequence
atgctgtcccggaaggggataatcccggaggagtatgtgctcacgcgtctcgccgaggacccagccaaacccaggtaccgagccaggcaacgccgggcccgctttgtttccaagaagggcaactgtaacgtggcccataagaatatccgggagcagggaaggtttctccaggatgtgtttacaaccctagtggacctgaaatggccacacactcttttgatattcacaatgtctttcctgtgcagctggcttctgtttgccatggcctggtggctgattgctttcgctcatggagacctggccccttccgaaggtaccgcagagccctgtgtcacgtcgatccattctttcagttctgcatttttgtttagcattgaggtgcaggtcacgatcggctttgggggccgaatggtgacagaggagtgtcctttggctattctcatcttgatcgtccaaaatatagtcggactcatgatcaatgcaataatgctgggttgcattttcatgaagacagctcaggctcatcgtcgagctgagacccttattttcagtaagcatgccgtgatcgccctgcggcacggccggctgtgttttatgctccgggtcggcgatctgagaaagtcaatgatcatcagcgctacaatacacatgcaggttgtgcgcaaaactacctccccagaaggcgaagttgtacctctgcaccaggtggatattcctatggagaatggcgtcggtggcaactccatcttcctggtcgcaccactgataatctaccacgttatagacgcaaacagccctctgtacgacctggctcctagcgatcttcatcatcaccaggatctggaaatcatcgtgattctagaaggggtcgtagaaactactggcattaccacacaggcccggacatcttacctcgctgatgagatcctgtggggacagaggttcgtacccatagttgccgaagaggatggccgttactctgtggactattccaagttcggtaacactgtgaaggttccaacgcccctctgcacagcacgccagctggatgaagaccatagcctgttggaggccctcactttggcatctgcccgtgggcctttgagaaagcgctccgtcccgatggccaaggccaagccaaagttttctatctctcctgacagcctgtcctag

SEQ ID NO: 10891 - DNA, 1173 bp, Artificial Sequence
  derived and/or modified sequence
atgctgagcaggaagggcatcatccctgaggagtatgtgctgacccggctggctgaagatcctgccaagccccgctaccgggcccggcagaggcgggccaggtttgtgtccaagaagggcaactgcaatgtggcccacaagaacatccgggagcagggccgcttcctgcaggatgtgttcaccaccctggtggacctgaagtggccccacaccctgctgatcttcaccatgtccttcctgtgctcctggctgctgtttgccatggcctggtggctgattgcctttgcccatggagacctggcccccagcgagggcacagctgagccctgtgtgaccagcatccacagcttcagcagcgccttcctgttcagcattgaggtgcaggtgaccatcggctttggaggccgcatggtgacagaagaatgtcccctggccatcctgatcctgattgtgcagaacatcgtgggcctgatgatcaatgccatcatgctgggctgcatcttcatgaagacagcccaggcccaccggcgggcagagaccctcatcttcagcaagcatgctgtgattgccctgcggcacggccgcctgtgcttcatgctgcgggtgggggacctgaggaagtccatgatcatcagcgccaccatccacatgcaggtggtgaggaagaccaccagccctgagggggaggtggtgcccctgcaccaggtggacatccccatggagaatggagtgggcggcaacagcatcttcctggtggcccccctcatcatctaccacgtgattgatgccaacagccccctgtatgacctggcccccagcgacctgcaccaccaccaggacctggagatcatcgtcatcctggagggcgtggtggagaccaccggcatcaccacccaggcccggaccagctacctggctgatgagatcctgtggggccagagatttgtgcccatcgtggccgaggaggatggccgctacagcgtggactacagcaagtttggaaacacagtgaaggtgcccacccccctgtgcacagcccggcagctggatgaggaccacagcctgctggaggccctgaccctggccagcgcccggggccccctgaggaagaggtctgtgcccatggccaaggccaagcccaagttcagcatcagcccagacagcctgtcctag

SEQ ID NO: 10892 - DNA, 1173 bp, Artificial Sequence
  derived and/or modified sequence
atgctgagccggaagggcatcatccccgaggagtacgtgctgacccgtttagccgaggatccagcaaagcccaggtatcgtgcgcggcagaggcgagcgagattcgtgtctaagaagggtaactgcaacgtagcgcacaagaacatccgcgagcagggtaggtttctgcaggacgtgttcacaacattggtggatctgaaatggccacacaccttgctgatcttcacaatgtcttttctgtgttcttggttgctgtttgcgatggcatggtggctgattgctttcgcacacggtgacttagcacctagcgagggcacggctgagccctgtgtcacaagtatccattccttttcgtccgccttccttttctccattgaagtgcaagttaccatcggcttcggcggccgcatggtgacagaggaatgccctcttgctatcctcatactgatcgtacaaaacatagttggcctcatgattaatgccattatgttgggctgcatttttatgaagactgcacaagcccaccgccgtgcagagaccctgattttcagtaagcatgccgttatcgcactacggcatgggcgcttgtgtttcatgctgagggtgggggaccttcgtaagtcgatgatcatcagcgccacaatccatatgcaggttgttagaaaaacgacatcccctgaaggggaagtggttcccctccaccaggtcgatatccctatggagaatggggtgggcggcaactcaatcttccttgtggccccacttattatctaccacgtgatagacgctaatagtcccctttacgacctcgcgccatcagacctgcaccaccatcaagatctggagataatagtgattcttgagggcgttgtggagacaaccggcattactacacaagcccggacgtcttatctggcggatgagatcttgtgggggcagaggttcgtgccaattgtggcagaggaggatggcaggtactccgtggactattcaaagttcggaaatactgtcaaggtccccacgcctctttgtaccgcccggcaactggacgaggatcacagcctgttggaagctctgaccctggcttccgctagaggacccctgcgtaagaggagcgtacctatggctaaggccaagcccaagtttagtatctcaccagactccctcagttag

SEQ ID NO: 10893 - DNA, 2146 bp, Artificial Sequence
  derived and/or modified sequence
gtgcgcccccctcccgccgtcctagacccctgcctagcccaggtcggtctccgcggacccacggacggacagacagacgggaggacggccagccgcgagcgcccgggcggcgggagggggcggggaggcgacggccgtggcgtgaggagcaggagcagctggctgctcttcgccatggcctggtggctcatcgccttcgcccacggtgacctggcccccagcgagggcactgctgagccctgtgtcaccagcatccactccttctcgtctgccttccttttctccattgaggtccaagtgactattggctttggggggcgcatggtgactgaggagtgcccactggccatcctgatcctcatcgtgcagaacatcgtggggctcatgatcaacgccatcatgcttggctgcatcttcatgaagactgcccaagcccaccgcagggctgagaccctcatcttcagcaagcatgcggtgatcgccctgcgccacggccgcctctgcttcatgctacgtgtgggtgacctccgcaagagcatgatcatcagcgccaccatccacatgcaggtggtacgcaagaccaccagccccgagggcgaggtggtgcccctccaccaggtggacatccccatggagaacggcgtgggtggcaacagcatcttcctggtggccccgctgatcatctaccatgtcattgatgccaacagcccactctacgacctggcacccagcgacctgcaccaccaccaggacctcgagatcatcgtcatcctggaaggcgtggtggaaaccacgggcatcaccacccaggcccgcacctcctacctggccgatgagatcctgtggggccagcgctttgtgcccattgtagctgaggaggacggacgttactctgtggactactccaagtttggcaacaccgtcaaagtgcccacaccactctgcacggcccgccagcttgatgaggaccacagcctactggaagctctgaccctcgcctcagcccgcgggcccctgcgcaagcgcagcgtgcccatggccaaggccaagcccaagttcagcatctctccagattccctgtcctgagccatggtctctcgggccccccacacgcgtgtgtacacacggaccatgtggtatgtagcccggccagggcctggtgtgaggctgggccagcctcagctcagcctccccctgctgctcatccagggtgttacaaggcacttgtcactatgctatttctggcctcagcaggaacctgtactgggttatttttgtccctgctcctcccaacccaattcaggactggctcacccctctcccccgcccaaggctgcagaggctgtgggaggtactgggccctagagctgtgcgtccagccagtcctgggtccccacgattgaccagccacactctgggccggtggctggggaagaacaatccccgagggctgctgctttgcgtctgtggctccaagaagtgcctgtggtcaggccccagctctacttggtccctgaaaaagcacctggctaagggctgggcctggccagcagggagggcagttgatgagagagggtgttcccgctggagggttggtgctgtggagcctacaccggcagggacagcctggggctgacagggctcccctccgagggccagtttcaggtctggaaggggaggaagcaggggaaggtgacctgaggaggctcggctttgtagagccccgctcaggcacagggaggaggagatgccagggctcctgccttttgccacatcggcctcgtgcagtgagggctctgtgggctggggctgctgcccctgcctacctcctgcctgtccccagaggctgaggagagggggtactgtgcccaccacacatgattaggcctcagacccaactctggtcctggctccacaacagtggctgccactcactttgtccagaaggtggcttgggggtggatatctttgggttgctggaaaaggtgtgggaaggttcaggatggtgggagggactgaggtccctgaggtgaagaggcccttggtcctgacgggtttgacccgtgcctggacccttggagcagtgttgtgtgaacttgcctagaactctgccttctccgttgtcaataaagcctccccctcatga

SEQ ID NO: 10894 - DNA, 2801 bp, Artificial Sequence
  derived and/or modified sequence
ggcagggttgggggctccctaggcgccaggcaggtgggctcaagggtgaggctgttttttttgttttgttttttgtttttgagacggagtctcgctctgtcgcccaggctggagtgcagtggcgtgatcttggctcactgcaacctccgcctctcgggttcaagcgattctcctgcctcagcttcctgagtagctgggattacaggtgcgcaccaccatgcccggctaacttttgtatttttagtagagatggggtttcaccatgttggtcaggctggtctcgaactcctgacctagtgatctgccctcctcagcctcccaacgtactgggattacaggcgtgagccaccgcgcccggcctgaggctggtattaagaagtgaagtgggacccaggtggaggtaaggaagagtctggtggggagttatctcagaagtgaggccagcacaggctgagtgcagccccagggtgagaaggtgcccaccgagaggactctgcagtgaggccctaggccacgtccgaggggtgcctccgatgggggaagcccctccctgggggtcaccggagccatgctgtcccgcaagggcatcatccccgaggaatacgtgctgacacgcctggcagaggaccctgccaagcccaggtaccgtgcccgccagcggagggcccgctttgtgtccaagaaaggcaactgcaacgtggcccacaagaacatccgggagcagggccgcttcctgcaggacgtgttcaccacgctggtggacctcaagtggccacacacattgctcatcttcaccatgtccttcctgtgcagctggctgctcttcgccatggcctggtggctcatcgccttcgcccacggtgacctggcccccagcgagggcactgctgagccctgtgtcaccagcatccactccttctcgtctgccttccttttctccattgaggtccaagtgactattggctttggggggcgcatggtgactgaggagtgcccactggccatcctgatcctcatcgtgcagaacatcgtggggctcatgatcaacgccatcatgcttggctgcatcttcatgaagactgcccaagcccaccgcagggctgagaccctcatcttcagcaagcatgcggtgatcgccctgcgccacggccgcctctgcttcatgctacgtgtgggtgacctccgcaagagcatgatcatcagcgccaccatccacatgcaggtggtacgcaagaccaccagccccgagggcgaggtggtgcccctccaccaggtggacatccccatggagaacggcgtgggtggcaacagcatcttcctggtggccccgctgatcatctaccatgtcattgatgccaacagcccactctacgacctggcacccagcgacctgcaccaccaccaggacctcgagatcatcgtcatcctggaaggcgtggtggaaaccacgggcatcaccacccaggcccgcacctcctacctggccgatgagatcctgtggggccagcgctttgtgcccattgtagctgaggaggacggacgttactctgtggactactccaagtttggcaacaccgtcaaagtgcccacaccactctgcacggcccgccagcttgatgaggaccacagcctactggaagctctgaccctcgcctcagcccgcgggcccctgcgcaagcgcagcgtgcccatggccaaggccaagcccaagttcagcatctctccagattccctgtcctgagccatggtctctcgggccccccacacgcgtgtgtacacacggaccatgtggtatgtagcccggccagggcctggtgtgaggctgggccagcctcagctcagcctccccctgctgctcatccagggtgttacaaggcacttgtcactatgctatttctggcctcagcaggaacctgtactgggttatttttgtccctgctcctcccaacccaattcaggactggctcacccctctcccccgcccaaggctgcagaggctgtgggaggtactgggccctagagctgtgcgtccagccagtcctgggtccccacgattgaccagccacactctgggccggtggctggggaagaacaatccccgagggctgctgctttgcgtctgtggctccaagaagtgcctgtggtcaggccccagctctacttggtccctgaaaaagcacctggctaagggctgggcctggccagcagggagggcagttgatgagagagggtgttcccgctggagggttggtgctgtggagcctacaccggcagggacagcctggggctgacagggctcccctccgagggccagtttcaggtctggaaggggaggaagcaggggaaggtgacctgaggaggctcggctttgtagagccccgctcaggcacagggaggaggagatgccagggctcctgccttttgccacatcggcctcgtgcagtgagggctctgtgggctggggctgctgcccctgcctacctcctgcctgtccccagaggctgaggagagggggtactgtgcccaccacacatgattaggcctcagacccaactctggtcctggctccacaacagtggctgccactcactttgtccagaaggtggcttgggggtggatatctttgggttgctggaaaaggtgtgggaaggttcaggatggtgggagggactgaggtccctgaggtgaagaggcccttggtcctgacgggtttgacccgtgcctggacccttggagcagtgttgtgtgaacttgcctagaactctgccttctccgttgtcaataaagcctccccctcatga

SEQ ID NO: 10895 - DNA, 1173 bp, Artificial Sequence
  derived and/or modified sequence
atgctctccaggaagggcattattccagaggagtacgttctgacgcgcctagcggaggatccagcaaagccacggtatcgtgccaggcagcgaagagctagatttgtctcaaagaagggaaattgtaatgtagcccacaaaaacatccgggagcagggaaggttcttgcaggacgtgtttactaccctggtggatctgaaatggcctcacacactgctcatctttacaatgagtttcctctgcagctggttgttgtttgctatggcatggtggctcatcgcttttgcccacggagatcttgccccttcggagggtaccgccgaaccctgtgtgacgtctattcacagcttttctagcgcatttctgttttctatagaggtacaagtgaccattggatttggtggacggatggtgaccgaagagtgccccctggcgattctcatcctgatcgtgcagaatattgttgggttgatgatcaacgccattatgctagggtgcatttttatgaaaacggcacaagcacacagacgagccgagaccttgattttctctaagcatgccgtgattgctcttcgccatgggaggctctgttttatgttacgggtgggcgatctccgcaagtccatgatcatcagtgcaaccattcatatgcaggtcgtgagaaagactacaagcccggagggggaggtggtgcccctgcaccaagtggacatacctatggaaaatggcgtgggcggaaacagcatctttttggtggctcctctgattatctatcatgtgattgacgccaatagccccctctatgatctggcgccatcggatttacaccatcatcaggaccttgagattatcgtaatccttgaaggcgtcgtcgagacaaccggaataaccacccaggccaggacatcctacttggccgatgaaattctctggggacagagatttgtccctatcgtggctgaagaagatggcagatacagcgttgactacagcaagttcggaaatacagtgaaggtccctactcccttgtgcacagcaaggcaattagatgaggatcactccttgttagaagccttaaccctggcgtccgcacgcggaccattgcgaaaacggtctgtgccaatggctaaggccaaaccaaaattctccatcagcccggacagcctctcttag

SEQ ID NO: 10896 - DNA, 1173 bp, Artificial Sequence
  derived and/or modified sequence
atgctgagcagaaagggcatcatccccgaggagtacgtgctgaccagactggccgaggaccccgccaagcccagatacagagccagacagagaagagccagattcgtgagcaagaagggcaactgcaacgtggcccacaagaacatcagagagcagggcagattcctgcaggacgtgttcaccaccctggtggacctgaagtggccccacaccctgctgatcttcaccatgagcttcctgtgcagctggctgctgttcgccatggcctggtggctgatcgccttcgcccacggcgacctggcccccagcgagggcaccgccgagccctgcgtgaccagcatccacagcttcagcagcgccttcctgttcagcatcgaggtgcaggtgaccatcggcttcggcggcagaatggtgaccgaggagtgccccctggccatcctgatcctgatcgtgcagaacatcgtgggcctgatgatcaacgccatcatgctgggctgcatcttcatgaagaccgcccaggcccacagaagagccgagaccctgatcttcagcaagcacgccgtgatcgccctgagacacggcagactgtgcttcatgctgagagtgggcgacctgagaaagagcatgatcatcagcgccaccatccacatgcaggtggtgagaaagaccaccagccccgagggcgaggtggtgcccctgcaccaggtggacatccccatggagaacggcgtgggcggcaacagcatcttcctggtggcccccctgatcatctaccacgtgatcgacgccaacagccccctgtacgacctggcccccagcgacctgcaccaccaccaggacctggagatcatcgtgatcctggagggcgtggtggagaccaccggcatcaccacccaggccagaaccagctacctggccgacgagatcctgtggggccagagattcgtgcccatcgtggccgaggaggacggcagatacagcgtggactacagcaagttcggcaacaccgtgaaggtgcccacccccctgtgcaccgccagacagctggacgaggaccacagcctgctggaggccctgaccctggccagcgccagaggccccctgagaaagagaagcgtgcccatggccaaggccaagcccaagttcagcatcagccccgacagcctgagctag

SEQ ID NO: 10897 - protein, 472 aa, Artificial Sequence
  derived and/or modified sequence
MTTCSRQFTSSSSMKGSCGIGGGIGGGSSRISSVLAGGSCRAPSTYGGGLSVSSSRFSSGGACGLGGGYGGGFSSSSSSFGSGFGGGYGGGLGAGLGGGFGGGFAGGDGLLVGSEKVTMQNLNDRLASYLDKVRALEEANADLEVKIRDWYQRQRPAEIKDYSPYFKTIEDLRNKILTATVDNANVLLQIDNARLAADDFRTKYETELNLRMSVEADINGLRRVLDELTLARADLEMQIESLKEELAYLKKNHEEEMNALRGQVGGDVNVEMDAAPGVDLSRILNEMRDQYEKMAEKNRKDAEEWFFTKTEELNREVATNSELVQSGKSEISELRRTMQNLEIELQSQLSMKASLENSLEETKGRYCMQLAQIQEMIGSVEEQLAQLRCEMEQQNQEYKILLDVKTRLEQEIATYRRLLEGEDAHLSSSQFSSGSQSSRDVTSSSRQIRTKVMDVHDGKVVSTHEQVLRTKN

SEQ ID NO: 10898 - DNA, 1419 bp, Artificial Sequence
  derived and/or modified sequence
atgaccacctgcagcagacagttcaccagcagcagcagcatgaagggcagctgcggcatcggcggcggcatcggcggcggcagcagcagaatcagcagcgtgctggccggcggcagctgcagagcccccagcacctacggcggcggcctgagcgtgagcagcagcagattcagcagcggcggcgcctgcggcctgggcggcggctacggcggcggcttcagcagcagcagcagcagcttcggcagcggcttcggcggcggctacggcggcggcctgggcgccggcctgggcggcggcttcggcggcggcttcgccggcggcgacggcctgctggtgggcagcgagaaggtgaccatgcagaacctgaacgacagactggccagctacctggacaaggtgagagccctggaggaggccaacgccgacctggaggtgaagatcagagactggtaccagagacagagacccgccgagatcaaggactacagcccctacttcaagaccatcgaggacctgagaaacaagatcctgaccgccaccgtggacaacgccaacgtgctgctgcagatcgacaacgccagactggccgccgacgacttcagaaccaagtacgagaccgagctgaacctgagaatgagcgtggaggccgacatcaacggcctgagaagagtgctggacgagctgaccctggccagagccgacctggagatgcagatcgagagcctgaaggaggagctggcctacctgaagaagaaccacgaggaggagatgaacgccctgagaggccaggtgggcggcgacgtgaacgtggagatggacgccgcccccggcgtggacctgagcagaatcctgaacgagatgagagaccagtacgagaagatggccgagaagaacagaaaggacgccgaggagtggttcttcaccaagaccgaggagctgaacagagaggtggccaccaacagcgagctggtgcagagcggcaagagcgagatcagcgagctgagaagaaccatgcagaacctggagatcgagctgcagagccagctgagcatgaaggccagcctggagaacagcctggaggagaccaagggcagatactgcatgcagctggcccagatccaggagatgatcggcagcgtggaggagcagctggcccagctgagatgcgagatggagcagcagaaccaggagtacaagatcctgctggacgtgaagaccagactggagcaggagatcgccacctacagaagactgctggagggcgaggacgcccacctgagcagcagccagttcagcagcggcagccagagcagcagagacgtgaccagcagcagcagacagatcagaaccaaggtgatggacgtgcacgacggcaaggtggtgagcacccacgagcaggtgctgagaaccaagaactag

SEQ ID NO: 10899 - DNA, 1419 bp, Artificial Sequence
  derived and/or modified sequence
atgactacctgctcgcgacagtttacctcctcctccagtatgaaaggttcctgtggcataggaggtggaatcgggggcggttctagccgcatcagcagtgtgctggcgggcggatcgtgtagagccccatccacatatggcggaggcctcagcgtctccagtagcaggttctctagcggcggcgcgtgcggcctgggtggcggatacgggggtgggttttcctcttcaagcagttcattcggcagtggattcggcggaggctacgggggagggctgggggccggcttgggcggcggcttcggaggcggcttcgccggaggagacgggctgttggtgggctcagaaaaggtgactatgcagaatcttaacgatcgactcgcctcatacctcgataaggttcgcgctctggaagaagccaacgccgacctggaggttaagatcagggactggtatcagagacagcgcccggctgaaatcaaggattacagcccatatttcaaaaccattgaagacctacggaacaagatcctcacagctactgtggacaacgctaatgtacttctgcaaattgataacgctagacttgccgcagacgacttcagaacaaaatatgagaccgagctcaatcttcgtatgtcagtggaggcagacattaatggactgagacgcgtgctggatgaattgacactggctcgggccgatctggagatgcagatcgagtcattgaaagaagaattagcctatctaaaaaagaatcatgaggaagagatgaacgcattgcgcggtcaagtgggcggcgatgtgaatgtcgagatggatgcggcgcctggtgtggatctgagcaggatcctaaatgagatgagggatcagtacgagaagatggcggaaaaaaaccggaaggatgcagaggagtggttcttcacaaagactgaagagctcaatcgcgaggttgctactaacagtgagctggttcaaagcggtaaaagcgagatatctgagctgcgccgcactatgcagaatttggaaattgaactgcagtcacagctgtctatgaaggccagcctggagaattctctagaggaaacgaaaggtaggtactgcatgcagctcgctcaaatccaggagatgatcggatccgtggaagagcagcttgctcaactgcggtgcgaaatggaacagcagaaccaagagtacaagatcctgctggacgtcaagactaggttagaacaggagattgccacctacagaaggttgctcgaaggagaggatgcccatctgtcctcatcccagttctcttcagggtcccagagcagtcgcgatgtgacttcctcttctcggcagatcagaactaaagttatggacgtgcacgatggtaaagttgtctctacccatgagcaggtgctgagaactaagaactag

SEQ ID NO: 10900 - DNA, 1419 bp, Artificial Sequence
  derived and/or modified sequence
atgaccacctgcagccggcagttcaccagcagcagctccatgaagggcagctgtggcatcggcggcggcatcggcggcggcagcagccgcatcagctctgtgctggccggcggcagctgccgggcccccagcacctacggcggcggcctgtctgtgagcagcagccgcttcagcagtggaggagcctgtggcctgggcggcggctatggaggcggcttcagcagcagcagcagcagctttggcagcggctttggaggcggctacggcggcggcctgggcgccggcctgggcggcggctttggaggcggctttgctggaggagatggcctgctggtgggcagcgagaaggtgaccatgcagaacctgaatgaccggctggccagctacctggacaaggtgcgggccctggaggaggccaatgctgacctggaggtgaagatccgggactggtaccagaggcagaggcctgctgagatcaaggactacagcccctacttcaagaccatcgaggacctgaggaacaagatcctgacagccaccgtggacaatgccaacgtgctgctgcagattgacaatgcccggctggccgcagatgacttccgcaccaagtatgaaacagagctgaacctgaggatgtctgtggaggccgacatcaatggcctgcggcgggtgctggatgagctgaccctggcccgggctgacctggagatgcagatcgagagcctgaaggaggagctggcctacctgaagaagaaccacgaggaggagatgaatgccctgcggggccaggtgggcggagatgtgaatgtggagatggatgctgcccctggggtggacctgagccgcatcctgaatgagatgagggaccagtatgagaagatggccgagaagaacaggaaggatgctgaggagtggttcttcaccaagacagaggagctgaaccgggaggtggccaccaacagcgagctggtgcagagcggcaagtctgagatcagcgagctgcggaggaccatgcagaacctggagattgagctgcagagccagctgtccatgaaggccagcctggagaacagcctggaggagaccaagggccgctactgcatgcagctggcccagatccaggagatgattggctctgtggaggagcagctggcccagctgcgctgtgagatggagcagcagaaccaggagtacaagatcctgctggatgtgaagacccggctggagcaggagatcgccacctaccgccgcctgctggagggggaggatgcccacctgagcagcagccagttcagcagcggcagccagagcagcagagatgtgaccagcagcagccggcagatccgcaccaaggtgatggatgtgcatgatggcaaggtggtgtccacccatgagcaggtgctgcggaccaagaactag

SEQ ID NO: 10901 - DNA, 1662 bp, Artificial Sequence
  derived and/or modified sequence
aaagcactcgcatccctttccaatttacccgagcaccttctcttcactcagccaactgctcgctcgctcacctccctcctctgcaccatgaccacctgcagccgccagttcacctcctccagctccatgaagggctcctgcggcatcgggggcggcatcgggggcggctccagccgcatctcctccgtcctggccggagggtcctgccgcgcccccagcacctacgggggcggcctgtctgtctcatcctcccgcttctcctctgggggagcctgcgggctggggggcggctatggcggtggcttcagcagcagcagcagcagctttggtagtggctttgggggaggatatggtggtggccttggtgctggcttgggtggtggctttggtggtggctttgctggtggtgatgggcttctggtgggcagtgagaaggtgaccatgcagaacctcaatgaccgcctggcctcctacctggacaaggtgcgtgctctggaggaggccaacgccgacctggaagtgaagatccgtgactggtaccagaggcagcggcctgctgagatcaaagactacagtccctacttcaagaccattgaggacctgaggaacaagattctcacagccacagtggacaatgccaatgtccttctgcagattgacaatgcccgtctggccgcggatgacttccgcaccaagtatgagacagagttgaacctgcgcatgagtgtggaagccgacatcaatggcctgcgcagggtgctggacgaactgaccctggccagagctgacctggagatgcagattgagagcctgaaggaggagctggcctacctgaagaagaaccacgaggaggagatgaatgccctgagaggccaggtgggtggagatgtcaatgtggagatggacgctgcacctggcgtggacctgagccgcattctgaacgagatgcgtgaccagtatgagaagatggcagagaagaaccgcaaggatgccgaggaatggttcttcaccaagacagaggagctgaaccgcgaggtggccaccaacagcgagctggtgcagagcggcaagagcgagatctcggagctccggcgcaccatgcagaacctggagattgagctgcagtcccagctcagcatgaaagcatccctggagaacagcctggaggagaccaaaggtcgctactgcatgcagctggcccagatccaggagatgattggcagcgtggaggagcagctggcccagctccgctgcgagatggagcagcagaaccaggagtacaagatcctgctggacgtgaagacgcggctggagcaggagatcgccacctaccgccgcctgctggagggcgaggacgcccacctctcctcctcccagttctcctctggatcgcagtcatccagagatgtgacctcctccagccgccaaatccgcaccaaggtcatggatgtgcacgatggcaaggtggtgtccacccacgagcaggtccttcgcaccaagaactgaggctgcccagccccgctcaggcctaggaggccccccgtgtggacacagatcccactggaagatcccctctcctgcccaagcacttcacagctggaccctgcttcaccctcaccccctcctggcaatcaatacagcttcattatctgagttgcataa

SEQ ID NO: 10902 - DNA, 1419 bp, Artificial Sequence
  derived and/or modified sequence
atgaccacctgcagccggcagttcaccagcagcagcagcatgaagggtagttgtggtattggcggtggcatcggggggggctctagcaggatctcctccgtgctcgcgggcgggtcctgtagagctccgagtacttacggaggggggctgagcgtcagctcgtcccgctttagcagtggcggagcctgcggactgggaggcggctacgggggtggtttcagtagcagttccagtagcttcggaagcggattcgggggaggatatggcggaggcctaggtgctggcttgggcggcggcttcggaggggggttcgccggcggagatggtctgctggtgggatcagagaaggtcaccatgcaaaatcttaacgaccggttggccagttacctggacaaggttcgagccttagaagaagctaatgctgatctggaggttaagatccgcgattggtaccagcggcagcgacctgcagagataaaagactacagcccttacttcaaaactatagaagacctgcgcaacaaaatcctaactgccacagtagacaatgcgaatgtgctgttacagatcgataacgcaaggttagctgccgatgatttccgcaccaaatacgaaaccgagctcaatcttcgcatgtctgtggaggcggacataaacggcctgagacgtgtcctggacgaactgactttagccagggctgatttggaaatgcaaattgagtcactgaaagaggagctagcctatctcaagaaaaaccacgaggaggaaatgaacgccctacggggtcaagtcgggggggacgtgaacgtggagatggacgcagcccccggcgtagatctctcaagaattcttaacgaaatgagagatcagtacgagaagatggctgaaaaaaacaggaaagacgccgaagagtggtttttcaccaagactgaggagctcaatagagaggttgccactaactcagagctggtgcagtcaggcaagagcgagatctccgaactgagacggactatgcaaaacctggagatcgagctgcaatctcagctttccatgaaagcctcgctcgagaactctctggaggaaacaaaaggacggtactgcatgcagctcgcccagatccaggaaatgatcgggtcagtcgaggaacaattagcacagctccgctgtgaaatggagcagcaaaaccaggaatacaaaattctcctggacgtgaagaccaggctggagcaggaaatagcaacctacagaagactcctggagggggaagatgcccatctgtcctcttcccagtttagctcagggtcacagtccagccgagacgtgacctccagctcccgccaaattcggaccaaggtgatggacgtacatgacggcaaagtggtgagcacacacgagcaggtgctacggaccaagaattag

SEQ ID NO: 10903 - DNA, 1419 bp, Artificial Sequence
  derived and/or modified sequence
atgactacctgctctcggcagttcacttctagctcaagtatgaaaggatcgtgtggaatcggagggggtataggagggggatctagccgcatcagctcggtgctggcaggtgggagctgtagagccccaagtacatatggtgggggtctgtccgtgagtagcagcaggttctcttctgggggtgcatgcggcctgggaggcggttacgggggagggttctcaagctcatccagtagcttcggaagcggttttggcggaggttacggcggtgggcttggtgcgggtctgggtggtgggtttgggggaggttttgctggaggggatgggctactcgtaggctcagagaaggtgaccatgcaaaatcttaatgacagactagcgtcttacctggataaagtgagagcgttggaagaagcgaacgctgatcttgaagtgaaaatcagagactggtatcagcgtcagagacccgcagagatcaaagattattctccctatttcaagactatagaagatctccgcaataagatcttgactgcgacagtcgacaacgcaaacgtgctattgcaaatcgataatgctcggctggccgcagatgacttccgaaccaaatatgagacggaactcaacctgaggatgtcagtggaagctgacataaatggcttgcggcgtgtgctggatgaattgaccctagctagggccgatctggagatgcaaattgagagtttgaaagaggagctggcctatttaaaaaagaaccatgaagaggaaatgaacgcgttacggggacaggtcggcggtgatgtcaatgtagaaatggatgctgcaccaggtgttgacctgagtcgcatcctcaatgaaatgagggatcaatacgagaaaatggcagagaagaaccgtaaagacgccgaggagtggttctttaccaagactgaggaactcaatagggaggtggcaacgaactccgagctcgtgcagagcgggaaaagcgaaatcagcgaattgaggaggaccatgcagaacctggaaatcgagcttcagtcacagctctctatgaaggcctcccttgaaaactccctggaagagactaagggcagatattgcatgcagctggcgcagatccaggagatgatcgggagcgttgaggaacagttggcgcagctgcggtgtgaaatggaacagcagaatcaggagtataagatcttgcttgatgtgaagacaaggctagagcaagagatcgcaacataccggagattgttggagggtgaggacgctcatctgagctccagccagttctcaagcggcagccagtctagcagagacgtgacctcttctagcagacaaatccgaaccaaggtaatggacgtccatgatgggaaggtggtgagcactcacgaacaggtactaagaacaaaaaattag

SEQ ID NO: 10904 - DNA, 1419 bp, Artificial Sequence
  derived and/or modified sequence
atgactacatgtagcaggcagtttacgtctagcagctcaatgaaggggtcctgcggcattgggggaggtatcgggggcggttcttctcggatcagtagcgtcctcgccggcggcagttgcagagccccgagcacatacgggggcggcctgagtgtgtcgagctctcgattcagcagcgggggtgcctgtgggctcggcggaggatacggcggcggattttcttcatcatcctcctcctttggctctggcttcggtggtgggtacggggggggtctgggtgccggattgggcggaggcttcggcggcgggttcgctgggggggacggtctccttgtcggttctgagaaagtgaccatgcaaaatctgaacgatcgattggcatcatatctggacaaggtgagagcgcttgaagaagccaatgcagacctggaagttaaaattagagactggtatcagcggcagcgtccagcggaaatcaaagattatagtccctacttcaaaacaatcgaggaccttagaaacaaaattcttaccgccacagtggacaacgctaatgttttgttgcaaattgataacgctcggctggctgccgatgacttccgcactaaatacgagaccgaactgaatctgaggatgtccgttgaggcagacatcaacggcttacggcgtgtcctggatgaattgacacttgctagagccgatctggagatgcagatcgaatcattgaaagaagaactcgcataccttaagaagaatcacgaggaagagatgaatgcacttagaggccaggtaggcggcgatgtcaatgtggaaatggatgccgctccgggtgtcgacttgtcccgcattctgaatgagatgagagaccagtacgaaaagatggccgaaaaaaatcggaaagacgccgaagaatggttctttaccaagacagaggaactcaacagggaggttgcgaccaacagtgagttagtgcaaagtggcaaatctgaaatctccgagctcagacgaactatgcagaaccttgagattgaactccagagccaattatccatgaaagccagtctcgagaacagtcttgaggagactaagggacgctattgcatgcagttggcgcagatacaggagatgattggaagcgttgaggagcagctggcccagttaaggtgtgagatggagcagcagaaccaagagtacaagatactgttggacgtaaaaactcgcttagagcaggagattgctacttatcggagattattggagggcgaggatgcacacctctcttcatcgcagttttcttccggttcacagtcctctagagatgtgacaagcagtagtcggcagattaggactaaggtgatggacgtgcacgacgggaaggtggtgtccacacacgagcaggtactgcgaacaaaaaactag

SEQ ID NO: 10905 - DNA, 1419 bp, Artificial Sequence
  derived and/or modified sequence
atgacaacttgctctagacagtttacaagtagctcttctatgaagggatcatgtggcataggaggcgggattggtggagggtctagtcggatcagctccgtccttgcaggagggagttgtcgcgcacctagtacttacggaggcggtctgtccgtgagcagcagtagattcagtagcgggggggcctgtggactcggaggcggatacggggggggtttttcaagcagctcaagctcattcgggagcggctttgggggggggtatggaggaggcctgggcgccgggctgggtggaggatttgggggaggctttgccggcggtgacggtttactggtcggctccgaaaaagtcaccatgcaaaatctaaatgatcgacttgcaagttacctagacaaggtacgcgcacttgaagaggcgaacgcggacttagaggtcaagattagggactggtatcagcggcaaagaccagcggaaattaaggattactcaccttattttaaaacaatagaagatcttaggaacaaaattctgacagccacggtagataacgctaacgtgctgctccagattgacaatgcaagactggcagccgacgacttccgcacgaagtatgaaacagaacttaacctgcggatgtccgttgaggctgatataaacggccttagacgcgtacttgatgagctgacattagcacgcgcagatttggagatgcagattgaaagcttgaaggaagaactggcctacctgaagaagaatcacgaggaggagatgaacgcgctgaggggccaggtggggggggatgtgaacgtggagatggacgccgctcctggggtcgacctgagcaggattctgaacgagatgagagaccaatacgagaaaatggctgaaaaaaacaggaaggacgccgaagaatggttctttactaagacggaggaactgaaccgggaagttgcgaccaactcagaactagttcagagcggaaagagcgagatctcagaacttcgccgcacaatgcagaatttagaaatcgagctgcagtcccagctgagtatgaaagcatcacttgaaaattctttggaggagaccaagggtagatactgtatgcaactggcacaaatccaggagatgatcgggagcgtcgaggagcaactggctcagcttagatgtgagatggaacaacagaaccaggagtataagatcctcttagatgttaagacgaggctcgaacaagaaatcgccacctacagacgcctcctcgaaggggaggacgcgcacctttctagcagccagttttcctcaggttcccagagctcaagagatgttactagttcttccagacaaattagaacaaaagtcatggacgttcacgacgggaaggtagtctcaacgcacgagcaggtgctgcgaactaaaaattag

SEQ ID NO: 10906 - RNA, 1419 nt, Artificial Sequence
  derived and/or modified sequence
augacuacauguagcaggcaguuuacgucuagcagcucaaugaagggguccugcggcauugggggagguaucgggggcgguucuucucggaucaguagcguccucgccggcggcaguugcagagccccgagcacauacgggggcggccugagugugucgagcucucgauucagcagcgggggugccugugggcucggcggaggauacggcggcggauuuucuucaucauccuccuccuuuggcucuggcuucggugguggguacggggggggucugggugccggauugggcggaggcuucggcggcggguucgcugggggggacggucuccuugucgguucugagaaagugaccaugcaaaaucugaacgaucgauuggcaucauaucuggacaaggugagagcgcuugaagaagccaaugcagaccuggaaguuaaaauuagagacugguaucagcggcagcguccagcggaaaucaaagauuauagucccuacuucaaaacaaucgaggaccuuagaaacaaaauucuuaccgccacaguggacaacgcuaauguuuuguugcaaauugauaacgcucggcuggcugccgaugacuuccgcacuaaauacgagaccgaacugaaucugaggauguccguugaggcagacaucaacggcuuacggcguguccuggaugaauugacacuugcuagagccgaucuggagaugcagaucgaaucauugaaagaagaacucgcauaccuuaagaagaaucacgaggaagagaugaaugcacuuagaggccagguaggcggcgaugucaauguggaaauggaugccgcuccgggugucgacuugucccgcauucugaaugagaugagagaccaguacgaaaagauggccgaaaaaaaucggaaagacgccgaagaaugguucuuuaccaagacagaggaacucaacagggagguugcgaccaacagugaguuagugcaaaguggcaaaucugaaaucuccgagcucagacgaacuaugcagaaccuugagauugaacuccagagccaauuauccaugaaagccagucucgagaacagucuugaggagacuaagggacgcuauugcaugcaguuggcgcagauacaggagaugauuggaagcguugaggagcagcuggcccaguuaaggugugagauggagcagcagaaccaagaguacaagauacuguuggacguaaaaacucgcuuagagcaggagauugcuacuuaucggagauuauuggagggcgaggaugcacaccucucuucaucgcaguuuucuuccgguucacaguccucuagagaugugacaagcaguagucggcagauuaggacuaaggugauggacgugcacgacgggaaggugguguccacacacgagcagguacugcgaacaaaaaacuag

SEQ ID NO: 10907 - RNA, 1419 nt, Artificial Sequence
  derived and/or modified sequence
augacaacuugcucuagacaguuuacaaguagcucuucuaugaagggaucauguggcauaggaggcgggauugguggagggucuagucggaucagcuccguccuugcaggagggaguugucgcgcaccuaguacuuacggaggcggucuguccgugagcagcaguagauucaguagcgggggggccuguggacucggaggcggauacgggggggguuuuucaagcagcucaagcucauucgggagcggcuuuggggggggguauggaggaggccugggcgccgggcuggguggaggauuugggggaggcuuugccggcggugacgguuuacuggucggcuccgaaaaagucaccaugcaaaaucuaaaugaucgacuugcaaguuaccuagacaagguacgcgcacuugaagaggcgaacgcggacuuagaggucaagauuagggacugguaucagcggcaaagaccagcggaaauuaaggauuacucaccuuauuuuaaaacaauagaagaucuuaggaacaaaauucugacagccacgguagauaacgcuaacgugcugcuccagauugacaaugcaagacuggcagccgacgacuuccgcacgaaguaugaaacagaacuuaaccugcggauguccguugaggcugauauaaacggccuuagacgcguacuugaugagcugacauuagcacgcgcagauuuggagaugcagauugaaagcuugaaggaagaacuggccuaccugaagaagaaucacgaggaggagaugaacgcgcugaggggccagguggggggggaugugaacguggagauggacgccgcuccuggggucgaccugagcaggauucugaacgagaugagagaccaauacgagaaaauggcugaaaaaaacaggaaggacgccgaagaaugguucuuuacuaagacggaggaacugaaccgggaaguugcgaccaacucagaacuaguucagagcggaaagagcgagaucucagaacuucgccgcacaaugcagaauuuagaaaucgagcugcagucccagcugaguaugaaagcaucacuugaaaauucuuuggaggagaccaaggguagauacuguaugcaacuggcacaaauccaggagaugaucgggagcgucgaggagcaacuggcucagcuuagaugugagauggaacaacagaaccaggaguauaagauccucuuagauguuaagacgaggcucgaacaagaaaucgccaccuacagacgccuccucgaaggggaggacgcgcaccuuucuagcagccaguuuuccucagguucccagagcucaagagauguuacuaguucuuccagacaaauuagaacaaaagucauggacguucacgacgggaagguagucucaacgcacgagcaggugcugcgaacuaaaaauuag

SEQ ID NO: 10908 - protein, 860 aa, Artificial Sequence [sequence omitted]

SEQ ID NO: 10909 - protein, 945 aa, Artificial Sequence
  derived and/or modified sequence
  misc_feature (1)..(1): Xaa can be any naturally occurring amino acid
XGRPGVPPRFLSQRRRQVPGPRSRLRDIHESPSVILGPPGEVPGFRCALWRHLRPHLVLGGALAPPAPIKFTEGPPATLKASVPYEVETLPQNLPAPPWSAAEIFSHVGDRCERNEFQCQDGKCISYKWVCDGSAECQDGSDESQETCLSVTCKSGDFSCGGRVNRCIPQFWRCDGQVDCDNGSDEQGCPPKTCSQDEFRCHDGKCISRQFVCDSDRDCLDGSDEASCPVLTCGPASFQCNSSTCIPQLWACDNDPDCEDGSDEWPQRCRGLYVFQGDSSPCSAFEFHCLSGECIHSSWRCDGGPDCKDKSDEENCAVATCRPDEFQCSDGNCIHGSRQCDREYDCKDMSDEVGCVNVTLCEGPNKFKCHSGECITLDKVCNMARDCRDWSDEPIKECGTNECLDNNGGCSHVCNDLKIGYECLCPDGFQLVAQRRCEDIDECQDPDTCSQLCVNLEGGYKCQCEEGFQLDPHTKACKAVGSIAYLFFTNRHEVRKMTLDRSEYTSLIPNLRNVVALDTEVASNRIYWSDLSQRMICSTQLDRAHGVSSYDTVISRDIQAPDGLAVDWIHSNIYWTDSVLGTVSVADTKGVKRKTLFRENGSKPRAIVVDPVHGFMYWTDWGTPAKIKKGGLNGVDIYSLVTENIQWPNGITLDLLSGRLYWVDSKLHSISSIDVNGGNRKTILEDEKRLAHPFSLAVFEDKVFWTDIINEAIFSANRLTGSDVNLLAENLLSPEDMVLFHNLTQPRGVNWCERTTLSNGGCQYLCLPAPQINPHSPKFTCACPDGMLLARDMRSCLTEAEAAVATQETSTVRLKVSSTAVRTQHTTTRPVPDTSRLPGATPGLTTVEIVTMSHQALGDVAGRGNEKKPSSVRALSIVLPIVLLVFLCLGVFLLWKNWRLKNINSINFDNPVYQKTTEDEVHICHNQDGYSYPSRQMVSLEDDVA

SEQ ID NO: 10910 - protein, 860 aa, Artificial Sequence
  derived and/or modified sequence
MGPWGWKLRWTVALLLAAAGTAVGDRCERNEFQCQDGKCISYKWVCDGSAECQDGSDESQETCLSVTCKSGDFSCGGRVNRCIPQFWRCDGQVDCDNGSDEQGCPPKTCSQDEFRCHDGKCISRQFVCDSDRDCLDGSDEASCPVLTCGPASFQCNSSTCIPQLWACDNDPDCEDGSDEWPQRCRGLYVFQGDSSPCSAFEFHCLSGECIHSSWRCDGGPDCKDKSDEENCAVATCRPDEFQCSDGNCIHGSRQCDREYDCKDMSDEVGCVNVTLCEGPNKFKCHSGECITLDKVCNMARDCRDWSDEPIKECGTNECLDNNGGCSHVCNELKIGYECLCPDGFQLVAQRRCEDIDECQDPDTCSQLCVNLEGGYKCQCEEGFQLDPHTKACKAVGSIAYLFFTNRHEVRKMTLDRSEYTSLIPNLRNVVALDTEVASNRIYWSDLSQRMICSTQLDRAHGVSSYDTVISRDIQAPDGLAVDWIHSNIYWTDSVLGTVSVADTKGVKRKTLFRENGSKPRAIVVDPVHGFMYWTDWGTPAKIKKGGLNGVDIYSLVTENIQWPNGITLDLLSGRLYWVDSKLHSISSIDVNGGNRKTILEDEKRLAHPFSLAVFEDKVFWTDIINEAIFSANRLTGSDVNLLAENLLSPEDMVLFHNLTQPRGVNWCERTTLSNGGCQYLCLPAPQINPHSPKFTCACPDGMLLARDMRSCLTEAEAAVATQETSTVRLKVSSTAVRTQHTTTRPVPDTSRLPGATPGLTTVEIVTMSHQALGDVAGRGNEKKPSSVRALSIVLPIVLLVFLCLGVFLLWKNWRLKNINSINFDNPVYQKTTEDEVHICHNQDGYSYPSRQMVSLEDDVA

SEQ ID NO: 10911 - protein, 860 aa, Artificial Sequence
  derived and/or modified sequence
MGPWGWKLRWTVALLLAAAGTAVGDRCERNEFQCQDGKCISYKWVCDGSAECQDGSDESQETCLSVTCKSGDFSCGGRVNRCIPQFWRCDGQVDCDNGSDEQGCPPKTCSQDEFRCHDGKCISRQFVCDSDRDCLDGSDEASCPVLTCGPASFQCNSSTCIPQLWACDNDPDCEDGSDEWPQRCRGLYVFQGDSSPCSAFEFHCLSGECIHSSWRCDGGPDCKDKSDEENCAVATCRPDEFQCSDGNCIHGSRQCDREYDCKDMSDEVGCVNVTLCEGPNKFKCHSGECITLDKVCNMARDCRDWSDEPIKECGTNECLDNNGGCSHVCNDLKIGYECDCPDGFQLVAQRRCEDIDECQDPDTCSQLCVNLEGGYKCQCEEGFQLDPHTKACKAVGSIAYLFFTNRHEVRKMTLDRSEYTSLIPNLRNVVALDTEVASNRIYWSDLSQRMICSTQLDRAHGVSSYDTVISRDIQAPDGLAVDWIHSNIYWTDSVLGTVSVADTKGVKRKTLFRENGSKPRAIVVDPVHGFMYWTDWGTPAKIKKGGLNGVDIYSLVTENIQWPNGITLDLLSGRLYWVDSKLHSISSIDVNGGNRKTILEDEKRLAHPFSLAVFEDKVFWTDIINEAIFSANRLTGSDVNLLAENLLSPEDMVLFHNLTQPRGVNWCERTTLSNGGCQYLCLPAPQINPHSPKFTCACPDGMLLARDMRSCLTEAEAAVATQETSTVRLKVSSTAVRTQHTTTRPVPDTSRLPGATPGLTTVEIVTMSHQALGDVAGRGNEKKPSSVRALSIVLPIVLLVFLCLGVFLLWKNWRLKNINSINFDNPVYQKTTEDEVHICHNQDGYSYPSRQMVSLEDDVA

SEQ ID NO: 10912 - protein, 860 aa, Artificial Sequence
  derived and/or modified sequence
MGPWGWKLRWTVALLLAAAGTAVGDRCERNEFQCQDGKCISYKWVCDGSAECQDGSDESQETCLSVTCKSGDFSCGGRVNRCIPQFWRCDGQVDCDNGSDEQGCPPKTCSQDEFRCHDGKCISRQFVCDSDRDCLDGSDEASCPVLTCGPASFQCNSSTCIPQLWACDNDPDCEDGSDEWPQRCRGLYVFQGDSSPCSAFEFHCLSGECIHSSWRCDGGPDCKDKSDEENCAVATCRPDEFQCSDGNCIHGSRQCDREYDCKDMSDEVGCVNVTLCEGPNKFKCHSGECITLDKVCNMARDCRDWSDEPIKECGTAECLDNNGGCSHVCNDLKIGYECLCPDGFQLVAQRRCEDIDECQDPDTCSQLCVNLEGGYKCQCEEGFQLDPHTKACKAVGSIAYLFFTNRHEVRKMTLDRSEYTSLIPNLRNVVALDTEVASNRIYWSDLSQRMICSTQLDRAHGVSSYDTVISRDIQAPDGLAVDWIHSNIYWTDSVLGTVSVADTKGVKRKTLFRENGSKPRAIVVDPVHGFMYWTDWGTPAKIKKGGLNGVDIYSLVTENIQWPNGITLDLLSGRLYWVDSKLHSISSIDVNGGNRKTILEDEKRLAHPFSLAVFEDKVFWTDIINEAIFSANRLTGSDVNLLAENLLSPEDMVLFHNLTQPRGVNWCERTTLSNGGCQYLCLPAPQINPHSPKFTCACPDGMLLARDMRSCLTEAEAAVATQETSTVRLKVSSTAVRTQHTTTRPVPDTSRLPGATPGLTTVEIVTMSHQALGDVAGRGNEKKPSSVRALSIVLPIVLLVFLCLGVFLLWKNWRLKNINSINFDNPVYQKTTEDEVHICHNQDGYSYPSRQMVSLEDDVA

SEQ ID NO: 10913 - protein, 860 aa, Artificial Sequence
  derived and/or modified sequence
MGPWGWKLRWTVALLLAAAGTAVGDRCERNEFQCQDGKCISYKWVCDGSAECQDGSDESQETCLSVTCKSGDFSCGGRVNRCIPQFWRCDGQVDCDNGSDEQGCPPKTCSQDEFRCHDGKCISRQFVCDSDRDCLDGSDEASCPVLTCGPASFQCNSSTCIPQLWACDNDPDCEDGSDEWPQRCRGLYVFQGDSSPCSAFEFHCLSGECIHSSWRCDGGPDCKDKSDEENCAVATCRPDEFQCSDGNCIHGSRQCDREYDCKDMSDEVGCVNVTLCEGPNKFKCHSGECITLDKVCNMARDCRDWSDEPIKECGTNACLDNNGGCSHVCNDLKIGYECLCPDGFQLVAQRRCEDIDECQDPDTCSQLCVNLEGGYKCQCEEGFQLDPHTKACKAVGSIAYLFFTNRHEVRKMTLDRSEYTSLIPNLRNVVALDTEVASNRIYWSDLSQRMICSTQLDRAHGVSSYDTVISRDIQAPDGLAVDWIHSNIYWTDSVLGTVSVADTKGVKRKTLFRENGSKPRAIVVDPVHGFMYWTDWGTPAKIKKGGLNGVDIYSLVTENIQWPNGITLDLLSGRLYWVDSKLHSISSIDVNGGNRKTILEDEKRLAHPFSLAVFEDKVFWTDIINEAIFSANRLTGSDVNLLAENLLSPEDMVLFHNLTQPRGVNWCERTTLSNGGCQYLCLPAPQINPHSPKFTCACPDGMLLARDMRSCLTEAEAAVATQETSTVRLKVSSTAVRTQHTTTRPVPDTSRLPGATPGLTTVEIVTMSHQALGDVAGRGNEKKPSSVRALSIVLPIVLLVFLCLGVFLLWKNWRLKNINSINFDNPVYQKTTEDEVHICHNQDGYSYPSRQMVSLEDDVA

SEQ ID NO: 10914 - protein, 860 aa, Artificial Sequence
  derived and/or modified sequence
MGPWGWKLRWTVALLLAAAGTAVGDRCERNEFQCQDGKCISYKWVCDGSAECQDGSDESQETCLSVTCKSGDFSCGGRVNRCIPQFWRCDGQVDCDNGSDEQGCPPKTCSQDEFRCHDGKCISRQFVCDSDRDCLDGSDEASCPVLTCGPASFQCNSSTCIPQLWACDNDPDCEDGSDEWPQRCRGLYVFQGDSSPCSAFEFHCLSGECIHSSWRCDGGPDCKDKSDEENCAVATCRPDEFQCSDGNCIHGSRQCDREYDCKDMSDEVGCVNVTLCEGPNKFKCHSGECITLDKVCNMARDCRDWSDEPIKECGTNECLDNNGGCSHVCNDLKIGAECLCPDGFQLVAQRRCEDIDECQDPDTCSQLCVNLEGGYKCQCEEGFQLDPHTKACKAVGSIAYLFFTNRHEVRKMTLDRSEYTSLIPNLRNVVALDTEVASNRIYWSDLSQRMICSTQLDRAHGVSSYDTVISRDIQAPDGLAVDWIHSNIYWTDSVLGTVSVADTKGVKRKTLFRENGSKPRAIVVDPVHGFMYWTDWGTPAKIKKGGLNGVDIYSLVTENIQWPNGITLDLLSGRLYWVDSKLHSISSIDVNGGNRKTILEDEKRLAHPFSLAVFEDKVFWTDIINEAIFSANRLTGSDVNLLAENLLSPEDMVLFHNLTQPRGVNWCERTTLSNGGCQYLCLPAPQINPHSPKFTCACPDGMLLARDMRSCLTEAEAAVATQETSTVRLKVSSTAVRTQHTTTRPVPDTSRLPGATPGLTTVEIVTMSHQALGDVAGRGNEKKPSSVRALSIVLPIVLLVFLCLGVFLLWKNWRLKNINSINFDNPVYQKTTEDEVHICHNQDGYSYPSRQMVSLEDDVA

SEQ ID NO: 10915 - protein, 860 aa, Artificial Sequence
  derived and/or modified sequence
MGPWGWKLRWTVALLLAAAGTAVGDRCERNEFQCQDGKCISYKWVCDGSAECQDGSDESQETCLSVTCKSGDFSCGGRVNRCIPQFWRCDGQVDCDNGSDEQGCPPKTCSQDEFRCHDGKCISRQFVCDSDRDCLDGSDEASCPVLTCGPASFQCNSSTCIPQLWACDNDPDCEDGSDEWPQRCRGLYVFQGDSSPCSAFEFHCLSGECIHSSWRCDGGPDCKDKSDEENCAVATCRPDEFQCSDGNCIHGSRQCDREYDCKDMSDEVGCVNVTLCEGPNKFKCHSGECITLDKVCNMARDCRDWSDEPIKECGTAACLDNNGGCSHVCNALKIGAECLCPDGFQLVAQRRCEDIDECQDPDTCSQLCVNLEGGYKCQCEEGFQLDPHTKACKAVGSIAYLFFTNRHEVRKMTLDRSEYTSLIPNLRNVVALDTEVASNRIYWSDLSQRMICSTQLDRAHGVSSYDTVISRDIQAPDGLAVDWIHSNIYWTDSVLGTVSVADTKGVKRKTLFRENGSKPRAIVVDPVHGFMYWTDWGTPAKIKKGGLNGVDIYSLVTENIQWPNGITLDLLSGRLYWVDSKLHSISSIDVNGGNRKTILEDEKRLAHPFSLAVFEDKVFWTDIINEAIFSANRLTGSDVNLLAENLLSPEDMVLFHNLTQPRGVNWCERTTLSNGGCQYLCLPAPQINPHSPKFTCACPDGMLLARDMRSCLTEAEAAVATQETSTVRLKVSSTAVRTQHTTTRPVPDTSRLPGATPGLTTVEIVTMSHQALGDVAGRGNEKKPSSVRALSIVLPIVLLVFLCLGVFLLWKNWRLKNINSINFDNPVYQKTTEDEVHICHNQDGYSYPSRQMVSLEDDVA

SEQ ID NO: 10916 - protein, 860 aa, Artificial Sequence
  derived and/or modified sequence
MGPWGWKLRWTVALLLAAAGTAVGDRCERNEFQCQDGKCISYKWVCDGSAECQDGSDESQETCLSVTCKSGDFSCGGRVNRCIPQFWRCDGQVDCDNGSDEQGCPPKTCSQDEFRCHDGKCISRQFVCDSDRDCLDGSDEASCPVLTCGPASFQCNSSTCIPQLWACDNDPDCEDGSDEWPQRCRGLYVFQGDSSPCSAFEFHCLSGECIHSSWRCDGGPDCKDKSDEENCAVATCRPDEFQCSDGNCIHGSRQCDREYDCKDMSDEVGCVNVTLCEGPNKFKCHSGECITLDKVCNMARDCRDWSDEPIKECGTAECLDNNGGCSHVCNDLKIGYECLCPDGFQLVAQRRCEDIDECQDPDTCSQLCVNLEGGYKCQCEEGFQLDPHTKACKAVGSIAYLFFTNRHEVRKMTLDRSEYTSLIPNLRNVVALDTEVASNRIYWSDLSQRMICSTQLDRAHGVSSYDTVISRDIQAPDGLAVDWIHSNIYWTDSVLGTVSVADTKGVKRKTLFRENGSKPRAIVVDPVHGFMYWTDWGTPAKIKKGGLNGVDIYSLVTENIQWPNGITLDLLSGRLYWVDSKLHSISSIDVNGGNRKTILEDEKRLAHPFSLAVFEDKVFWTDIINEAIFSANRLTGSDVNLLAENLLSPEDMVLFHNLTQPRGVNWCERTTLSNGGCQYLCLPAPQINPHSPKFTCACPDGMLLARDMRSCLTEAEAAVATQETSTVRLKVSSTAVRTQHTTTRPVPDTSRLPGATPGLTTVEIVTMSHQALGDVAGRGNEKKPSSVRALSIVLPIVLLVFLCLGVFLLWKNWRLKNINSINFDNPVYQRTTEDEVHIAHNQDGYSYPSRQMVSLEDDVA

SEQ ID NO: 10917 - protein, 860 aa, Artificial Sequence
  derived and/or modified sequence
MGPWGWKLRWTVALLLAAAGTAVGDRCERNEFQCQDGKCISYKWVCDGSAECQDGSDESQETCLSVTCKSGDFSCGGRVNRCIPQFWRCDGQVDCDNGSDEQGCPPKTCSQDEFRCHDGKCISRQFVCDSDRDCLDGSDEASCPVLTCGPASFQCNSSTCIPQLWACDNDPDCEDGSDEWPQRCRGLYVFQGDSSPCSAFEFHCLSGECIHSSWRCDGGPDCKDKSDEENCAVATCRPDEFQCSDGNCIHGSRQCDREYDCKDMSDEVGCVNVTLCEGPNKFKCHSGECITLDKVCNMARDCRDWSDEPIKECGTAECLDNNGGCSHVCNDLKIGYECLCPDGFQLVAQRRCEDIDECQDPDTCSQLCVNLEGGYKCQCEEGFQLDPHTKACKAVGSIAYLFFTNRHEVRKMTLDRSEYTSLIPNLRNVVALDTEVASNRIYWSDLSQRMICSTQLDRAHGVSSYDTVISRDIQAPDGLAVDWIHSNIYWTDSVLGTVSVADTKGVKRKTLFRENGSKPRAIVVDPVHGFMYWTDWGTPAKIKKGGLNGVDIYSLVTENIQWPNGITLDLLSGRLYWVDSKLHSISSIDVNGGNRKTILEDEKRLAHPFSLAVFEDKVFWTDIINEAIFSANRLTGSDVNLLAENLLSPEDMVLFHNLTQPRGVNWCERTTLSNGGCQYLCLPAPQINPHSPKFTCACPDGMLLARDMRSCLTEAEAAVATQETSTVRLKVSSTAVRTQHTTTRPVPDTSRLPGATPGLTTVEIVTMSHQALGDVAGRGNEKKPSSVRALSIVLPIVLLVFLCLGVFLLWKNWRLRNINSINFDNPVYQRTTEDEVHIAHNQDGYSYPSRQMVSLEDDVA

SEQ ID NO: 10918 - protein, 860 aa, Artificial Sequence
  derived and/or modified sequence
MGPWGWKLRWTVALLLAAAGTAVGDRCERNEFQCQDGKCISYKWVCDGSAECQDGSDESQETCLSVTCKSGDFSCGGRVNRCIPQFWRCDGQVDCDNGSDEQGCPPKTCSQDEFRCHDGKCISRQFVCDSDRDCLDGSDEASCPVLTCGPASFQCNSSTCIPQLWACDNDPDCEDGSDEWPQRCRGLYVFQGDSSPCSAFEFHCLSGECIHSSWRCDGGPDCKDKSDEENCAVATCRPDEFQCSDGNCIHGSRQCDREYDCKDMSDEVGCVNVTLCEGPNKFKCHSGECITLDKVCNMARDCRDWSDEPIKECGTNECLDNNGGCSHVCNDLKIGYECDCPDGFQLVAQRRCEDIDECQDPDTCSQLCVNLEGGYKCQCEEGFQLDPHTKACKAVGSIAYLFFTNRHEVRKMTLDRSEYTSLIPNLRNVVALDTEVASNRIYWSDLSQRMICSTQLDRAHGVSSYDTVISRDIQAPDGLAVDWIHSNIYWTDSVLGTVSVADTKGVKRKTLFRENGSKPRAIVVDPVHGFMYWTDWGTPAKIKKGGLNGVDIYSLVTENIQWPNGITLDLLSGRLYWVDSKLHSISSIDVNGGNRKTILEDEKRLAHPFSLAVFEDKVFWTDIINEAIFSANRLTGSDVNLLAENLLSPEDMVLFHNLTQPRGVNWCERTTLSNGGCQYLCLPAPQINPHSPKFTCACPDGMLLARDMRSCLTEAEAAVATQETSTVRLKVSSTAVRTQHTTTRPVPDTSRLPGATPGLTTVEIVTMSHQALGDVAGRGNEKKPSSVRALSIVLPIVLLVFLCLGVFLLWKNWRLKNINSINFDNPVYQRTTEDEVHIAHNQDGYSYPSRQMVSLEDDVA

SEQ ID NO: 10919 - protein, 860 aa, Artificial Sequence
  derived and/or modified sequence
MGPWGWKLRWTVALLLAAAGTAVGDRCERNEFQCQDGKCISYKWVCDGSAECQDGSDESQETCLSVTCKSGDFSCGGRVNRCIPQFWRCDGQVDCDNGSDEQGCPPKTCSQDEFRCHDGKCISRQFVCDSDRDCLDGSDEASCPVLTCGPASFQCNSSTCIPQLWACDNDPDCEDGSDEWPQRCRGLYVFQGDSSPCSAFEFHCLSGECIHSSWRCDGGPDCKDKSDEENCAVATCRPDEFQCSDGNCIHGSRQCDREYDCKDMSDEVGCVNVTLCEGPNKFKCHSGECITLDKVCNMARDCRDWSDEPIKECGTNECLDNNGGCSHVCNDLKIGYECDCPDGFQLVAQRRCEDIDECQDPDTCSQLCVNLEGGYKCQCEEGFQLDPHTKACKAVGSIAYLFFTNRHEVRKMTLDRSEYTSLIPNLRNVVALDTEVASNRIYWSDLSQRMICSTQLDRAHGVSSYDTVISRDIQAPDGLAVDWIHSNIYWTDSVLGTVSVADTKGVKRKTLFRENGSKPRAIVVDPVHGFMYWTDWGTPAKIKKGGLNGVDIYSLVTENIQWPNGITLDLLSGRLYWVDSKLHSISSIDVNGGNRKTILEDEKRLAHPFSLAVFEDKVFWTDIINEAIFSANRLTGSDVNLLAENLLSPEDMVLFHNLTQPRGVNWCERTTLSNGGCQYLCLPAPQINPHSPKFTCACPDGMLLARDMRSCLTEAEAAVATQETSTVRLKVSSTAVRTQHTTTRPVPDTSRLPGATPGLTTVEIVTMSHQALGDVAGRGNEKKPSSVRALSIVLPIVLLVFLCLGVFLLWKNWRLRNINSINFDNPVYQRTTEDEVHIAHNQDGYSYPSRQMVSLEDDVA

SEQ ID NO: 10920 - protein, 860 aa, Artificial Sequence
  derived and/or modified sequence
MGPWGWKLRWTVALLLAAAGTAVGDRCERNEFQCQDGKCISYKWVCDGSAECQDGSDESQETCLSVTCKSGDFSCGGRVNRCIPQFWRCDGQVDCDNGSDEQGCPPKTCSQDEFRCHDGKCISRQFVCDSDRDCLDGSDEASCPVLTCGPASFQCNSSTCIPQLWACDNDPDCEDGSDEWPQRCRGLYVFQGDSSPCSAFEFHCLSGECIHSSWRCDGGPDCKDKSDEENCAVATCRPDEFQCSDGNCIHGSRQCDREYDCKDMSDEVGCVNVTLCEGPNKFKCHSGECITLDKVCNMARDCRDWSDEPIKECGTNECLDNNGGCSHVCNDLKIGYECLCPDGFQLVAQRRCEDIDECQDPDTCSQLCVNLEGGYKCQCEEGFQLDPHTKACKAVGSIAYLFFTNRHEVRKMTLDRSEYTSLIPNLRNVVALDTEVASNRIYWSDLSQRMICSTQLDRAHGVSSYDTVISRDIQAPDGLAVDWIHSNIYWTDSVLGTVSVADTKGVKRKTLFRENGSKPRAIVVDPVHGFMYWTDWGTPAKIKKGGLNGVDIYSLVTENIQWPNGITLDLLSGRLYWVDSKLHSISSIDVNGGNRKTILEDEKRLAHPFSLAVFEDKVFWTDIINEAIFSANRLTGSDVNLLAENLLSPEDMVLFHNLTQPRGVNWCERTTLSNGGCQYLCLPAPQINPHSPKFTCACPDGMLLARDMRSCLTEAEAAVATQETSTVRLKVSSTAVRTQHTTTRPVPDTSRLPGATPGLTTVEIVTMSHQALGDVAGRGNEKKPSSVRALSIVLPIVLLVFLCLGVFLLWKNWRLKNINSINFDNPVYQRTTEDEVHIAHNQDGYSYPSRQMVSLEDDVA

SEQ ID NO: 10921 - protein, 860 aa, Artificial Sequence
  derived and/or modified sequence
MGPWGWKLRWTVALLLAAAGTAVGDRCERNEFQCQDGKCISYKWVCDGSAECQDGSDESQETCLSVTCKSGDFSCGGRVNRCIPQFWRCDGQVDCDNGSDEQGCPPKTCSQDEFRCHDGKCISRQFVCDSDRDCLDGSDEASCPVLTCGPASFQCNSSTCIPQLWACDNDPDCEDGSDEWPQRCRGLYVFQGDSSPCSAFEFHCLSGECIHSSWRCDGGPDCKDKSDEENCAVATCRPDEFQCSDGNCIHGSRQCDREYDCKDMSDEVGCVNVTLCEGPNKFKCHSGECITLDKVCNMARDCRDWSDEPIKECGTNECLDNNGGCSHVCNDLKIGYECLCPDGFQLVAQRRCEDIDECQDPDTCSQLCVNLEGGYKCQCEEGFQLDPHTKACKAVGSIAYLFFTNRHEVRKMTLDRSEYTSLIPNLRNVVALDTEVASNRIYWSDLSQRMICSTQLDRAHGVSSYDTVISRDIQAPDGLAVDWIHSNIYWTDSVLGTVSVADTKGVKRKTLFRENGSKPRAIVVDPVHGFMYWTDWGTPAKIKKGGLNGVDIYSLVTENIQWPNGITLDLLSGRLYWVDSKLHSISSIDVNGGNRKTILEDEKRLAHPFSLAVFEDKVFWTDIINEAIFSANRLTGSDVNLLAENLLSPEDMVLFHNLTQPRGVNWCERTTLSNGGCQYLCLPAPQINPHSPKFTCACPDGMLLARDMRSCLTEAEAAVATQETSTVRLKVSSTAVRTQHTTTRPVPDTSRLPGATPGLTTVEIVTMSHQALGDVAGRGNEKKPSSVRALSIVLPIVLLVFLCLGVFLLWKNWRLRNINSINFDNPVYQRTTEDEVHIAHNQDGYSYPSRQMVSLEDDVA

SEQ ID NO: 10922 - protein, 862 aa, Artificial Sequence
  derived and/or modified sequence
MSTADLMRRWVIALLLAAAGVAAEDSCSRNEFQCRDGKCIASKWVCDGSPECPDGSDESPETCMSVTCQSNQFSCGGRVSRCIPDSWRCDGQVDCENDSDEQGCPPKTCSQDDFRCQDGKCISPQFVCDGDRDCLDGSDEAHCQATTCGPAHFRCNSSICIPSLWACDGDVDCVDGSDEWPQNCQGRDTASKGVSSPCSSLEFHCGSSECIHRSWVCDGEADCKDKSDEEHCAVATCRPDEFQCADGSCIHGSRQCDREHDCKDMSDELGCVNVTQCDGPNKFKCHSGECISLDKVCDSARDCQDWSDEPIKECKTAECLDNNGGCSHICKDLKIGSECLCPSGFRLVDLHRCEDIDECQEPDTCSQLCVNLEGSYKCECQAGFHMDPHTRVCKAVGSIGYLLFTNRHEVRKMTLDRSEYTSLLPNLKNVVALDTEVTNNRIYWSDLSQKKIYSALMDQAPNLSYDTIISEDLHAPDGLAVDWIHRNIYWTDSVPGSVSVADTKGVKRRTLFQEAGSRPRAIVVDPVHGFMYWTDWGTPAKIKKGGLNGVDIHSLVTENIQWPNGITLDLSSGRLYWVDSKLHSISSIDVNGGNRKTILEDENRLAHPFSLAIYEDKVYWTDVINEAIFSANRLTGSDVNLVAENLLSPEDIVLFHKVTQPRGVNWCETTALLPNGGCQYLCLPAPQIGPHSPKFTCACPDGMLLAKDMRSCLTEVDTVLTTQGTSAVRPVVTASATRPPKHSEDLSAPSTPRQPVDTPGLSTVASVTVSHQVQGDMAGRGNEEQPHGMRFLSIFFPIALVALLVLGAVLLWRNWRLKNINSINFDNPVYQRTTEDELHIARSQDGYTYPSRQMVSLEDDVA

SEQ ID NO: 10923 - protein, 862 aa, Artificial Sequence
  derived and/or modified sequence
MSTADLMRRWVIALLLAAAGVAAEDSCSRNEFQCRDGKCIASKWVCDGSPECPDGSDESPETCMSVTCQSNQFSCGGRVSRCIPDSWRCDGQVDCENDSDEQGCPPKTCSQDDFRCQDGKCISPQFVCDGDRDCLDGSDEAHCQATTCGPAHFRCNSSICIPSLWACDGDVDCVDGSDEWPQNCQGRDTASKGVSSPCSSLEFHCGSSECIHRSWVCDGEADCKDKSDEEHCAVATCRPDEFQCADGSCIHGSRQCDREHDCKDMSDELGCVNVTQCDGPNKFKCHSGECISLDKVCDSARDCQDWSDEPIKECKTAECLDNNGGCSHICKDLKIGSECLCPSGFRLVDLHRCEDIDECQEPDTCSQLCVNLEGSYKCECQAGFHMDPHTRVCKAVGSIGYLLFTNRHEVRKMTLDRSEYTSLLPNLKNVVALDTEVTNNRIYWSDLSQKKIYSALMDQAPNLSYDTIISEDLHAPDGLAVDWIHRNIYWTDSVPGSVSVADTKGVKRRTLFQEAGSRPRAIVVDPVHGFMYWTDWGTPAKIKKGGLNGVDIHSLVTENIQWPNGITLDLSSGRLYWVDSKLHSISSIDVNGGNRKTILEDENRLAHPFSLAIYEDKVYWTDVINEAIFSANRLTGSDVNLVAENLLSPEDIVLFHKVTQPRGVNWCETTALLPNGGCQYLCLPAPQIGPHSPKFTCACPDGMLLAKDMRSCLTEVDTVLTTQGTSAVRPVVTASATRPPKHSEDLSAPSTPRQPVDTPGLSTVASVTVSHQVQGDMAGRGNEEQPHGMRFLSIFFPIALVALLVLGAVLLWRNWRLRNINSINFDNPVYQRTTEDELHIARSQDGYTYPSRQMVSLEDDVA

SEQ ID NO: 10924 - protein, 862 aa, Artificial Sequence
  derived and/or modified sequence
MSTADLMRRWVIALLLAAAGVAAEDSCSRNEFQCRDGKCIASKWVCDGSPECPDGSDESPETCMSVTCQSNQFSCGGRVSRCIPDSWRCDGQVDCENDSDEQGCPPKTCSQDDFRCQDGKCISPQFVCDGDRDCLDGSDEAHCQATTCGPAHFRCNSSICIPSLWACDGDVDCVDGSDEWPQNCQGRDTASKGVSSPCSSLEFHCGSSECIHRSWVCDGEADCKDKSDEEHCAVATCRPDEFQCADGSCIHGSRQCDREHDCKDMSDELGCVNVTQCDGPNKFKCHSGECISLDKVCDSARDCQDWSDEPIKECKTNECLDNNGGCSHICKDLKIGSECDCPSGFRLVDLHRCEDIDECQEPDTCSQLCVNLEGSYKCECQAGFHMDPHTRVCKAVGSIGYLLFTNRHEVRKMTLDRSEYTSLLPNLKNVVALDTEVTNNRIYWSDLSQKKIYSALMDQAPNLSYDTIISEDLHAPDGLAVDWIHRNIYWTDSVPGSVSVADTKGVKRRTLFQEAGSRPRAIVVDPVHGFMYWTDWGTPAKIKKGGLNGVDIHSLVTENIQWPNGITLDLSSGRLYWVDSKLHSISSIDVNGGNRKTILEDENRLAHPFSLAIYEDKVYWTDVINEAIFSANRLTGSDVNLVAENLLSPEDIVLFHKVTQPRGVNWCETTALLPNGGCQYLCLPAPQIGPHSPKFTCACPDGMLLAKDMRSCLTEVDTVLTTQGTSAVRPVVTASATRPPKHSEDLSAPSTPRQPVDTPGLSTVASVTVSHQVQGDMAGRGNEEQPHGMRFLSIFFPIALVALLVLGAVLLWRNWRLKNINSINFDNPVYQRTTEDELHIARSQDGYTYPSRQMVSLEDDVA

SEQ ID NO: 10925 - protein, 862 aa, Artificial Sequence
  derived and/or modified sequence
MSTADLMRRWVIALLLAAAGVAAEDSCSRNEFQCRDGKCIASKWVCDGSPECPDGSDESPETCMSVTCQSNQFSCGGRVSRCIPDSWRCDGQVDCENDSDEQGCPPKTCSQDDFRCQDGKCISPQFVCDGDRDCLDGSDEAHCQATTCGPAHFRCNSSICIPSLWACDGDVDCVDGSDEWPQNCQGRDTASKGVSSPCSSLEFHCGSSECIHRSWVCDGEADCKDKSDEEHCAVATCRPDEFQCADGSCIHGSRQCDREHDCKDMSDELGCVNVTQCDGPNKFKCHSGECISLDKVCDSARDCQDWSDEPIKECKTNECLDNNGGCSHICKDLKIGSECDCPSGFRLVDLHRCEDIDECQEPDTCSQLCVNLEGSYKCECQAGFHMDPHTRVCKAVGSIGYLLFTNRHEVRKMTLDRSEYTSLLPNLKNVVALDTEVTNNRIYWSDLSQKKIYSALMDQAPNLSYDTIISEDLHAPDGLAVDWIHRNIYWTDSVPGSVSVADTKGVKRRTLFQEAGSRPRAIVVDPVHGFMYWTDWGTPAKIKKGGLNGVDIHSLVTENIQWPNGITLDLSSGRLYWVDSKLHSISSIDVNGGNRKTILEDENRLAHPFSLAIYEDKVYWTDVINEAIFSANRLTGSDVNLVAENLLSPEDIVLFHKVTQPRGVNWCETTALLPNGGCQYLCLPAPQIGPHSPKFTCACPDGMLLAKDMRSCLTEVDTVLTTQGTSAVRPVVTASATRPPKHSEDLSAPSTPRQPVDTPGLSTVASVTVSHQVQGDMAGRGNEEQPHGMRFLSIFFPIALVALLVLGAVLLWRNWRLRNINSINFDNPVYQRTTEDELHIARSQDGYTYPSRQMVSLEDDVA

SEQ ID NO: 10926 - protein, 862 aa, Artificial Sequence
  derived and/or modified sequence
MSTADLMRRWVIALLLAAAGVAAEDSCSRNEFQCRDGKCIASKWVCDGSPECPDGSDESPETCMSVTCQSNQFSCGGRVSRCIPDSWRCDGQVDCENDSDEQGCPPKTCSQDDFRCQDGKCISPQFVCDGDRDCLDGSDEAHCQATTCGPAHFRCNSSICIPSLWACDGDVDCVDGSDEWPQNCQGRDTASKGVSSPCSSLEFHCGSSECIHRSWVCDGEADCKDKSDEEHCAVATCRPDEFQCADGSCIHGSRQCDREHDCKDMSDELGCVNVTQCDGPNKFKCHSGECISLDKVCDSARDCQDWSDEPIKECKTNECLDNNGGCSHICKDLKIGSECLCPSGFRLVDLHRCEDIDECQEPDTCSQLCVNLEGSYKCECQAGFHMDPHTRVCKAVGSIGYLLFTNRHEVRKMTLDRSEYTSLLPNLKNVVALDTEVTNNRIYWSDLSQKKIYSALMDQAPNLSYDTIISEDLHAPDGLAVDWIHRNIYWTDSVPGSVSVADTKGVKRRTLFQEAGSRPRAIVVDPVHGFMYWTDWGTPAKIKKGGLNGVDIHSLVTENIQWPNGITLDLSSGRLYWVDSKLHSISSIDVNGGNRKTILEDENRLAHPFSLAIYEDKVYWTDVINEAIFSANRLTGSDVNLVAENLLSPEDIVLFHKVTQPRGVNWCETTALLPNGGCQYLCLPAPQIGPHSPKFTCACPDGMLLAKDMRSCLTEVDTVLTTQGTSAVRPVVTASATRPPKHSEDLSAPSTPRQPVDTPGLSTVASVTVSHQVQGDMAGRGNEEQPHGMRFLSIFFPIALVALLVLGAVLLWRNWRLKNINSINFDNPVYQRTTEDELHIARSQDGYTYPSRQMVSLEDDVA

SEQ ID NO: 10927 - protein, 862 aa, Artificial Sequence
  derived and/or modified sequence
MSTADLMRRWVIALLLAAAGVAAEDSCSRNEFQCRDGKCIASKWVCDGSPECPDGSDESPETCMSVTCQSNQFSCGGRVSRCIPDSWRCDGQVDCENDSDEQGCPPKTCSQDDFRCQDGKCISPQFVCDGDRDCLDGSDEAHCQATTCGPAHFRCNSSICIPSLWACDGDVDCVDGSDEWPQNCQGRDTASKGVSSPCSSLEFHCGSSECIHRSWVCDGEADCKDKSDEEHCAVATCRPDEFQCADGSCIHGSRQCDREHDCKDMSDELGCVNVTQCDGPNKFKCHSGECISLDKVCDSARDCQDWSDEPIKECKTNECLDNNGGCSHICKDLKIGSECLCPSGFRLVDLHRCEDIDECQEPDTCSQLCVNLEGSYKCECQAGFHMDPHTRVCKAVGSIGYLLFTNRHEVRKMTLDRSEYTSLLPNLKNVVALDTEVTNNRIYWSDLSQKKIYSALMDQAPNLSYDTIISEDLHAPDGLAVDWIHRNIYWTDSVPGSVSVADTKGVKRRTLFQEAGSRPRAIVVDPVHGFMYWTDWGTPAKIKKGGLNGVDIHSLVTENIQWPNGITLDLSSGRLYWVDSKLHSISSIDVNGGNRKTILEDENRLAHPFSLAIYEDKVYWTDVINEAIFSANRLTGSDVNLVAENLLSPEDIVLFHKVTQPRGVNWCETTALLPNGGCQYLCLPAPQIGPHSPKFTCACPDGMLLAKDMRSCLTEVDTVLTTQGTSAVRPVVTASATRPPKHSEDLSAPSTPRQPVDTPGLSTVASVTVSHQVQGDMAGRGNEEQPHGMRFLSIFFPIALVALLVLGAVLLWRNWRLRNINSINFDNPVYQRTTEDELHIARSQDGYTYPSRQMVSLEDDVA

SEQ ID NO: 10928 - protein, 862 aa, Artificial Sequence
  derived and/or modified sequence
MSTADLMRRWVIALLLAAAGVAAEDSCSRNEFQCRDGKCIASKWVCDGSPECPDGSDESPETCMSVTCQSNQFSCGGRVSRCIPDSWRCDGQVDCENDSDEQGCPPKTCSQDDFRCQDGKCISPQFVCDGDRDCLDGSDEAHCQATTCGPAHFRCNSSICIPSLWACDGDVDCVDGSDEWPQNCQGRDTASKGVSSPCSSLEFHCGSSECIHRSWVCDGEADCKDKSDEEHCAVATCRPDEFQCADGSCIHGSRQCDREHDCKDMSDELGCVNVTQCDGPNKFKCHSGECISLDKVCDSARDCQDWSDEPIKECKTNECLDNNGGCSHICKDLKIGSECLCPSGFRLVDLHRCEDIDECQEPDTCSQLCVNLEGSYKCECQAGFHMDPHTRVCKAVGSIGYLLFTNRHEVRKMTLDRSEYTSLLPNLKNVVALDTEVTNNRIYWSDLSQKKIYSALMDQAPNLSYDTIISEDLHAPDGLAVDWIHRNIYWTDSVPGSVSVADTKGVKRRTLFQEAGSRPRAIVVDPVHGFMYWTDWGTPAKIKKGGLNGVDIHSLVTENIQWPNGITLDLSSGRLYWVDSKLHSISSIDVNGGNRKTILEDENRLAHPFSLAIYEDKVYWTDVINEAIFSANRLTGSDVNLVAENLLSPEDIVLFHKVTQPRGVNWCETTALLPNGGCQYLCLPAPQIGPHSPKFTCACPDGMLLAKDMRSCLTEVDTVLTTQGTSAVRPVVTASATRPPKHSEDLSAPSTPRQPVDTPGLSTVASVTVSHQVQGDMAGRGNEEQPHGMRFLSIFFPIALVALLVLGAVLLWRNWRLKNINSINFDNPVYQKTTEDELHICRSQDGYTYPSRQMVSLEDDVA

SEQ ID NO: 10929 - DNA, 2580 bp, Artificial Sequence
  derived and/or modified sequence
atgggcccctggggctggaagctgcgctggaccgtggccctgctgctggccgccgccggcaccgccgtgggcgaccgctgcgagcgcaacgagttccagtgccaggacggcaagtgcatcagctacaagtgggtgtgcgacggcagcgccgagtgccaggacggcagcgacgagagccaggagacctgcctgagcgtgacctgcaagagcggcgacttcagctgcggcggccgcgtgaaccgctgcatcccccagttctggcgctgcgacggccaggtggactgcgacaacggcagcgacgagcagggctgcccccccaagacctgcagccaggacgagttccgctgccacgacggcaagtgcatcagccgccagttcgtgtgcgacagcgaccgcgactgcctggacggcagcgacgaggccagctgccccgtgctgacctgcggccccgccagcttccagtgcaacagcagcacctgcatcccccagctgtgggcctgcgacaacgaccccgactgcgaggacggcagcgacgagtggccccagcgctgccgcggcctgtacgtgttccagggcgacagcagcccctgcagcgccttcgagttccactgcctgagcggcgagtgcatccacagcagctggcgctgcgacggcggccccgactgcaaggacaagagcgacgaggagaactgcgccgtggccacctgccgccccgacgagttccagtgcagcgacggcaactgcatccacggcagccgccagtgcgaccgcgagtacgactgcaaggacatgagcgacgaggtgggctgcgtgaacgtgaccctgtgcgagggccccaacaagttcaagtgccacagcggcgagtgcatcaccctggacaaggtgtgcaacatggcccgcgactgccgcgactggagcgacgagcccatcaaggagtgcggcaccaacgagtgcctggacaacaacggcggctgcagccacgtgtgcaacgacctgaagatcggctacgagtgcctgtgccccgacggcttccagctggtggcccagcgccgctgcgaggacatcgacgagtgccaggaccccgacacctgcagccagctgtgcgtgaacctggagggcggctacaagtgccagtgcgaggagggcttccagctggacccccacaccaaggcctgcaaggccgtgggcagcatcgcctacctgttcttcaccaaccgccacgaggtgcgcaagatgaccctggaccgcagcgagtacaccagcctgatccccaacctgcgcaacgtggtggccctggacaccgaggtggccagcaaccgcatctactggagcgacctgagccagcgcatgatctgcagcacccagctggaccgcgcccacggcgtgagcagctacgacaccgtgatcagccgcgacatccaggcccccgacggcctggccgtggactggatccacagcaacatctactggaccgacagcgtgctgggcaccgtgagcgtggccgacaccaagggcgtgaagcgcaagaccctgttccgcgagaacggcagcaagccccgcgccatcgtggtggaccccgtgcacggcttcatgtactggaccgactggggcacccccgccaagatcaagaagggcggcctgaacggcgtggacatctacagcctggtgaccgagaacatccagtggcccaacggcatcaccctggacctgctgagcggccgcctgtactgggtggacagcaagctgcacagcatcagcagcatcgacgtgaacggcggcaaccgcaagaccatcctggaggacgagaagcgcctggcccaccccttcagcctggccgtgttcgaggacaaggtgttctggaccgacatcatcaacgaggccatcttcagcgccaaccgcctgaccggcagcgacgtgaacctgctggccgagaacctgctgagccccgaggacatggtgctgttccacaacctgacccagccccgcggcgtgaactggtgcgagcgcaccaccctgagcaacggcggctgccagtacctgtgcctgcccgccccccagatcaacccccacagccccaagttcacctgcgcctgccccgacggcatgctgctggcccgcgacatgcgcagctgcctgaccgaggccgaggccgccgtggccacccaggagaccagcaccgtgcgcctgaaggtgagcagcaccgccgtgcgcacccagcacaccaccacccgccccgtgcccgacaccagccgcctgcccggcgccacccccggcctgaccaccgtggagatcgtgaccatgagccaccaggccctgggcgacgtggccggccgcggcaacgagaagaagcccagcagcgtgcgcgccctgagcatcgtgctgcccatcgtgctgctggtgttcctgtgcctgggcgtgttcctgctgtggaagaactggcgcctgaagaacatcaacagcatcaacttcgacaaccccgtgtaccagaagaccaccgaggacgaggtgcacatctgccacaaccaggacggctacagctaccccagccgccagatggtgagcctggaggacgacgtggcc

SEQ ID NO: 10930 - DNA, 2580 bp, Artificial Sequence
  derived and/or modified sequence
atgggaccatggggctggaagctgcgatggacggtcgccctgctcctcgctgctgccggaactgcggtgggcgacaggtgcgagagaaacgagtttcaatgccaggatggcaagtgcatatcttacaaatgggtgtgcgacggttctgctgagtgtcaggacggtagtgatgagtctcaggagacatgtctaagcgtcacctgtaagtctggggatttttcgtgtgggggaagggttaatcgatgtattcctcagttctggaggtgcgacggtcaggtggactgtgataacggatctgacgagcaggggtgtcctcctaagacttgcagccaggacgagttccgctgtcacgacgggaagtgcattagcaggcagtttgtgtgtgatagtgatcgtgattgcctggacgggtccgacgaggcgagttgcccggtgttgacatgcggacccgctagttttcagtgtaactcgtctacgtgcataccacagctctgggcatgtgataatgacccagattgcgaagacgggagtgacgaatggcctcaaagatgtcggggattgtatgtttttcaaggggatagctcaccgtgctctgcattcgaatttcattgcctgtcaggcgagtgtatccattcctcctggcgttgtgacggtgggcctgactgcaaggataagtctgacgaggagaattgtgctgttgccacctgccgacccgatgaatttcaatgctctgatggcaattgtatccatggcagcaggcagtgcgatcgggagtacgactgtaaggatatgagtgatgaggtggggtgtgttaatgtgactctttgcgaaggccccaataagttcaagtgtcattccggcgagtgtataactcttgataaagtttgtaacatggctagggattgtcgtgactggtctgacgaaccaatcaaagaatgtggaacgaatgagtgcctggacaacaatggcggctgctctcacgtctgcaacgatctcaaaatcgggtatgagtgtttgtgtccagatggctttcagctggtcgctcagaggcggtgtgaagatatagacgagtgtcaagaccctgatacctgcagtcagctctgtgtgaatctggaggggggttacaagtgtcaatgtgaagagggattccaactggatcctcacaccaaagcctgcaaagccgtgggatcaatagcctacttgttcttcactaaccgtcacgaagtgcgcaagatgaccctcgacaggtcagaatatacatccctgataccgaacctgaggaatgttgtcgccttagataccgaggtcgcatccaatcggatttattggagcgacctgagtcagaggatgatctgcagcacccagcttgatagagcccacggcgtcagctcatatgataccgtgatcagtagagatattcaagccccggatggactcgcagtggattggattcattcaaacatctattggacagactcagtactggggacggtgtccgtcgccgacacaaaaggcgtgaagcggaagacactgttcagggagaacggatctaagccccgcgccatcgttgttgatcctgtacatgggtttatgtactggacggattggggaacgcccgccaagattaagaaaggaggacttaacggggtggatatatattcccttgtaactgagaatatacagtggccgaatggcatcaccctggatctgttgagtggccgactgtactgggttgattccaagctgcactcaatcagtagcatcgacgttaacgggggaaataggaagaccatcttggaagacgaaaagcgactggcccatcccttcagcctcgctgtgtttgaggataaagtgttttggacagacatcatcaacgaagcaattttttcagcaaacaggctcacaggttcagatgttaatctactggccgaaaatctcttgagtcctgaggacatggttcttttccacaatcttacacagccacgtggcgtgaactggtgtgaaaggacaactctgagcaatggtggatgtcagtatctgtgtttaccagccccacagattaatccccactcccctaagtttacttgcgcgtgtcccgacgggatgctccttgcccgcgatatgcgctcctgcctcacggaagcagaagccgcagtggctacccaagagactagcactgtcaggctcaaggtgagttcaacagcggtgcgaacgcaacacacgactaccaggcctgttccggacacatcgcggttgcctggagcaacaccgggtctgactacagtggaaattgtaaccatgtcccaccaggcactaggtgacgtggcaggtaggggcaatgagaaaaaaccctcctctgttcgcgccctatctatcgttttaccaattgtgttactcgtgttcctgtgtctcggagtgtttctgctatggaagaattggagactcaagaacattaatagtattaattttgacaaccccgtttatcagaaaacaacagaggatgaggtgcacatatgccacaatcaggatgggtattcatacccttctcgacagatggtgtccttagaagacgacgtggca

SEQ ID NO: 10931 - DNA, 2580 bp, Artificial Sequence
  derived and/or modified sequence
atgggaccgtggggatggaagctgaggtggactgtggccctgctgctcgcagcagccgggaccgcggtgggcgatcggtgcgaacggaacgaattccagtgtcaagacggaaaatgcatcagctacaagtgggtttgcgatggatcggccgaatgccaggacggatctgatgagtcccaagagacgtgtttgtcggtgacctgcaagagcggggatttctcatgcggaggacgcgtcaataggtgcatcccgcagttttggcggtgtgatggacaggtggattgcgataatgggtcagatgagcagggatgcccgccgaaaacctgctcccaggacgaattcagatgccatgacggtaagtgcatttcgcgccaattcgtctgcgactcggaccgcgactgcctggatggctcagacgaagcctcgtgcccggtgctgacttgcgggcctgcgagcttccaatgtaactccagcacgtgtatcccgcagctgtgggcttgtgacaatgacccagactgcgaggatggatcggacgaatggccgcagcgctgccggggcctttacgtgttccaaggagactctagcccatgctccgcgttcgaattccactgcctgtccggagaatgtatccactcatcttggcggtgcgacggtggaccagattgcaaggacaaatcggacgaggaaaattgcgcggttgccacttgtagaccagatgaatttcaatgctccgacggaaactgcattcatgggagcaggcaatgcgacagggagtacgactgtaaagatatgtcggatgaagtgggctgtgtgaacgtcaccctgtgcgaaggcccgaacaagttcaagtgccactcgggggaatgcatcactctggacaaggtgtgtaacatggcgcgcgactgtcgggattggtcggatgaaccgatcaaggaatgcggtactaacgaatgcctggacaataacggcggatgttcgcacgtgtgtaatgacctgaagatcgggtacgaatgcctgtgcccggacggattccagctggtggcgcagcggcgctgtgaggacatcgatgaatgtcaggacccggacacctgctcgcagctgtgcgtgaatctggagggtggatacaaatgtcagtgcgaggaaggattccaattggatccccatactaaggcctgtaaggccgtggggtctatcgcgtacctctttttcactaatagacatgaagtgcgcaaaatgaccctcgaccgttccgagtatacctcgctcatccctaacctccggaatgtagtggcgctcgacactgaggtggcgtctaaccgaatctattggtccgacctttcccagagaatgatctgttcgacgcaactggacagggcccatggtgtgtcgtcttacgatacggtcatcagccgggacatccaagcgcctgatggattggcagtggattggatccactcgaatatctactggactgattcagtgttgggaaccgtttccgtcgctgacactaaaggcgtgaagagaaagaccctgttccgggagaatggatccaagccacgcgccatcgtcgtggatccggtccatgggttcatgtactggaccgattggggaaccccggccaagatcaaaaagggaggtctgaacggagtggacatctactcgctcgtcaccgagaatattcagtggcctaatgggatcacccttgatctgctctcgggccggctgtactgggtggacagcaagctgcattccatctcgagtatcgatgtgaatggaggcaaccggaaaacgatactggaagatgagaaaagactcgcccacccattctcgctggcggtgttcgaggacaaggtgttttggaccgacatcattaacgaagccattttctccgcaaaccgcctcaccggctccgacgtgaacttgctggcggagaatctgctgtccccggaggatatggtgctgttccacaacctgactcagcctagaggggtgaactggtgcgaacgcaccaccttgtcgaatggcggatgtcaatacctgtgcctcccggccccccaaatcaatcctcattcccctaaattcacgtgcgcgtgcccagatggcatgctgctggcacgcgatatgcgcagctgcctcacggaagcggaggctgctgtggcaactcaagaaacctcaaccgtccggctgaaggtgtctagcacggcagtgcgcactcagcacactactacccgcccggtgccggacacgagccgccttccgggagctaccccgggacttactactgtggaaatcgtgactatgtcgcaccaggcgctgggagacgtggcgggacgcggcaacgagaaaaagccatcctcggtcagagctctctcaatcgtgctgccgatcgtgctgcttgtctttctctgcctcggagtgttcctcctctggaagaattggcgcctgaagaatatcaatagcatcaattttgataatccagtgtaccaaaagactaccgaggacgaagtccatatatgtcacaatcaagacggatactcgtacccgtccagacagatggtgtcactcgaggacgacgtggcc

SEQ ID NO: 10932 - DNA, 2580 bp, Artificial Sequence
  derived and/or modified sequence
atgggcccctggggctggaaactgagatggacagtggctctgctgctcgctgccgctgggacagctgtgggagaccgatgtgaaaggaacgagttccagtgtcaggacggtaaatgcattagctataaatgggtgtgtgacggcagtgcagaatgccaagatggtagtgacgagagccaagaaacatgcctctctgtgacttgtaagagtggcgatttttcttgtggagggcgggttaacaggtgcatcccccaattttggaggtgtgatgggcaggtcgactgcgataatggaagcgacgagcaggggtgcccacccaaaacctgctcacaggatgagttccggtgccatgacggcaagtgcatttcccgacagttcgtctgcgacagtgatagagactgtctagatggtagtgatgaagcctcctgtccggtgctcacctgcgggccagctagttttcagtgcaattctagcacatgcatcccacagctatgggcctgcgataatgatcccgattgcgaagatggctcagatgagtggccacaacgctgcagagggctgtatgtattccagggagatagttctccatgttccgcctttgaattccactgcctgtcgggcgagtgtatacactccagctggcggtgtgatggaggccctgactgtaaggataagtctgatgaggagaactgtgctgtcgctacatgcaggcccgatgaatttcagtgctccgacggcaattgtattcacgggtccaggcaatgtgatcgcgaatatgattgcaaagacatgagcgacgaagttggctgtgtaaacgtgacattgtgtgaggggcccaacaaattcaagtgccatagcggcgaatgcattacactggataaggtgtgcaatatggcgcgcgattgccgggattggagcgacgaacctatcaaggagtgtggcacaaatgagtgcctggacaacaacggtgggtgctcccacgtgtgtaacgacttaaagattggttacgagtgtctttgcccggacggattccagttagtggcacagcgacggtgtgaggacatcgacgagtgccaagaccccgacacctgtagtcagctgtgcgtaaatctggaaggtgggtataaatgccaatgtgaagagggctttcagctcgacccacacaccaaagcttgcaaggccgttgggagtatcgcatatctcttttttacaaatagacatgaagtccggaagatgacccttgaccgttccgagtacaccagtctgattcccaacttgcgcaacgtggttgcactggacaccgaggtggctagcaacagaatttactggtctgaccttagtcaaaggatgatctgctccacgcagctggacagggcacacggtgtgagttcatatgacacagtcatctccagggacatccaggcaccagatggactcgccgtcgattggatccatagcaacatctactggactgacagtgttctggggacggtgtccgttgccgatactaagggggtgaaacggaaaactctatttagagagaatggtagtaagccgagagccatcgtcgttgatccagttcatgggtttatgtattggacagattggggaacacctgcaaaaataaagaaaggggggctgaatggggtggacatatactcactggttaccgagaacatccagtggcctaatggcatcaccctggatctactcagtgggcggctctattgggtggattctaagttgcattctataagctcaattgatgtaaacgggggcaaccgcaaaactattctggaagacgagaagcggttggctcatcctttttccctggcagtcttcgaggataaggttttttggacggatatcatcaacgaagcgattttcagcgccaaccgattgactggatctgacgttaacctgctggcggagaaccttctttcccctgaagacatggtgctgtttcataatcttacacaaccccggggggtgaactggtgcgagcgtaccaccctgtctaacggcggctgtcagtacctgtgcttgcccgctccccagataaacccccactccccgaagttcacatgcgcgtgtcctgacgggatgctgctagcccgagacatgcggagctgcctcacagaagcagaggcagcggttgccactcaagagacatctaccgtgagattgaaggtctccagcacggctgtaagaactcagcataccacgactcggcctgtgcccgacacgtctaggctcccaggggcaaccccaggcctgacaaccgtagaaattgtcactatgtcccatcaggccctgggcgacgtggccgggcgcggaaacgaaaagaagccaagctctgtccgggctttgtctatcgtgctccctatcgtgctgctggtcttcctttgtttgggagtattcttgttgtggaaaaattggcggctcaaaaatatcaactctatcaatttcgacaaccctgtgtaccagaaaacaactgaggatgaggtccacatttgtcacaatcaggacggctattcttaccctagtcgacagatggtttccctggaggatgacgtcgcc

SEQ ID NO: 10933 - DNA, 2580 bp, Artificial Sequence
  derived and/or modified sequence
atgggaccgtggggttggaagctgagatggaccgtggcgctcttgctggccgccgctggaaccgccgtcggggaccgttgtgaacggaatgaattccaatgtcaagatggtaagtgcatctcatacaagtgggtgtgcgatggttcggccgaatgccaagacggcagcgatgagtcccaggagacttgcctgtcagttacctgtaagtcaggcgacttctcgtgtggaggcagggtgaaccgctgcattccacagttctggcggtgtgacggacaagtggattgcgacaatggatcagacgagcaaggatgcccgccaaagacttgcagccaggacgaatttagatgtcacgacggaaagtgcattagccggcaatttgtctgcgattccgacagagattgcttggatggctccgacgaagcctcatgtcccgtgctcacgtgtgggccagctagcttccagtgcaattcctctacctgtatcccacagctctgggcttgtgataacgacccggattgcgaggatggatccgacgagtggccccaacgctgcagggggctttacgtgttccaaggagactcaagcccatgcagcgctttcgagttccattgcctgtcgggagaatgcatccatagctcatggaggtgcgacggagggccggactgcaaggacaaatctgacgaggaaaactgtgctgtcgccacctgcagacccgacgagttccagtgttccgatggcaactgcatccacggctcgcgccaatgtgatagggaatacgattgtaaggacatgagcgatgaggtcggctgtgtgaacgttaccctgtgcgaaggccctaacaagttcaagtgccactcgggagagtgcatcactctcgacaaggtgtgcaatatggctagagattgtagagactggtctgacgagccgatcaaggaatgcggaaccaacgaatgcctcgataacaatggaggttgttctcacgtctgcaatgacctgaaaatcggttacgaatgcctctgcccagacggattccagctcgtggcccaacgccgttgcgaggatatcgacgaatgtcaagaccctgacacttgctcccagctctgcgtgaaccttgaagggggatacaagtgccagtgcgaagaaggcttccagcttgatcctcataccaaggcttgtaaggccgtaggaagcatcgcgtatctgttcttcactaataggcacgaggtgaggaaaatgactttggaccgatccgagtacacctcgctgattccgaatctccgcaacgtggtcgcgctcgatactgaggtcgcgtcgaaccgcatttactggtcggacctgtcccagcgcatgatctgttcgacccagctggaccgggcccatggtgtgtctagctacgacactgtcattagccgcgacatacaggcgccggacggcctggccgtggactggatccattcaaacatctattggacggatagcgtcctgggtacggtgtcggtcgcagacaccaagggcgtgaaacggaaaacgctgttccgcgagaatggatcaaagccaagagccatcgttgtggacccggttcatgggtttatgtactggaccgactggggaaccccagcgaagatcaagaaaggtggactgaatggagtcgacatctactcgctggtcactgaaaacatccagtggcccaatggcatcaccctggatctcctgtccggacggctgtactgggtcgatagcaaactccactcgatctcatccatagacgtcaatggaggtaatagaaaaaccattcttgaggacgaaaagcggttggctcacccttttagtctggccgtgtttgaagataaagtgttttggactgatatcatcaacgaagcgatcttttcggcaaacaggctgactggttcagacgtaaacctcctcgcggagaacctcctgtcgccggaggacatggtgctgttccacaacctgactcagccgaggggagttaattggtgtgagcgcactaccctgtcgaacggagggtgtcagtacctttgcctcccagcaccacaaatcaacccccactcaccaaagttcacgtgcgcgtgtccggacgggatgttgttggcacgggatatgcgctcgtgtctgactgaagcagaagccgctgtggcaacccaagaaacttcgactgtgcgcttgaaggtcagctccacggcagttcgtacccagcacacgaccacccgcccggtccctgatacttcgaggctgccgggagcaaccccgggactgaccactgtggaaatcgtgaccatgagtcatcaggcgctgggcgatgtggcgggccggggaaacgaaaagaagccgtcgtccgtgagggccctgtccatcgtcttgcccatcgtgctgctcgtgtttttgtgtctcggtgtctttcttctgtggaaaaactggcgcctcaaaaacataaactccattaacttcgacaaccctgtgtatcagaaaactacggaggacgaggtgcacatctgccacaaccaagatggctacagctacccgtcccgccagatggtgtccctggaggacgatgtggcc

SEQ ID NO: 10934 - DNA, 2580 bp, Artificial Sequence
  derived and/or modified sequence
atgggaccttgggggtggaaacttcgttggaccgtggccctcctgctcgcggccgccggtaccgccgtcggggatagatgtgaacgcaatgaattccagtgccaggacggtaaatgtatttcgtacaagtgggtctgtgatgggtccgcagaatgtcaggatggttcagacgaaagccaagagacttgcctttcggtcacctgtaaatccggtgatttctcatgtggaggacgtgtgaacagatgcattcctcaattctggcgctgtgatggacaagtggattgtgataacggttccgacgaacaaggttgtcctcctaagacgtgttcgcaggatgagtttaggtgccatgatggaaagtgcatttcgaggcagttcgtgtgtgactcggatagagattgcttggacggatcagatgaggcgtcctgtccagtcctgacttgtggtcccgcatcatttcagtgtaactcctcgacttgtatcccccagctttgggcctgtgacaacgacccagactgcgaagatggttcagatgaatggccacaaaggtgtagaggattgtacgtgttccaaggcgattcctccccgtgctccgcttttgaatttcattgcctttcaggggaatgtattcactcatcatggagatgtgatggagggccggattgtaaggacaagtcagatgaagaaaattgcgctgtcgcgacttgtcgtccagatgaatttcagtgctcggatggaaactgtatacacggatcccgtcaatgtgatagagaatacgattgtaaggatatgtcagatgaagtcggttgtgtcaacgtgaccctttgtgaaggtcctaacaagttcaagtgccacagcggagaatgtattacgctggacaaggtgtgtaacatggcaagagattgtcgcgactggagcgacgaacctattaaggaatgcggtactaatgagtgtcttgacaacaacggaggttgctcgcacgtgtgtaacgatctcaaaatcggttacgaatgtctgtgcccggacggatttcagctcgtggcccaacgccggtgtgaagatattgatgagtgccaggatcctgatacgtgctcccagctttgcgtgaatctggagggcggatacaagtgccaatgtgaggaagggttccaacttgacccccacacgaaggcatgtaaggccgtgggatccatagcatacctgttctttactaatcggcacgaagtgcgtaagatgactttggatcgatcagaatacaccagccttataccaaacctgcgcaacgtggtggcactggacaccgaagttgcctccaaccgtatttactggtccgacctcagccaacgaatgatttgttcaacccaacttgacagggcacatggtgtgtcgtcctatgacacggtgatttcacgcgatattcaggcacccgatgggctcgcagtcgactggatccattcgaatatctattggaccgatagcgtccttgggaccgtgtcggtggctgatactaaaggggtgaagagaaagactctgtttcgagaaaatggatctaagccacgggcaattgtggtcgatccagtgcatgggtttatgtactggaccgactgggggacgccagcgaagatcaaaaaaggcgggctgaacggcgtggatatctactccctggttacggaaaacatccagtggcctaacggtatcaccctggatctgctgagtggacggctttactgggtcgactccaagttgcattcaatttcaagcattgacgtgaacggtgggaatcggaaaaccattcttgaagatgaaaagagacttgcacatccgtttagcttggcagtgtttgaggataaggtgttttggaccgacatcataaacgaagccattttcagtgccaatagattgaccggtagcgacgtcaatctgctggcggaaaatctgctgtccccagaggacatggtgctgtttcataatctcacgcaaccccgaggcgtgaattggtgtgaacgcactacgcttagcaatggaggatgccagtacctgtgtttgcccgctcctcaaatcaaccctcattcgccgaaattcacctgtgcctgtccagacggaatgctccttgccagagatatgcgcagctgcctcaccgaggctgaggctgcagtggcaactcaagaaacttcgaccgttcgactgaaagtttcctccacggctgtgcggactcagcataccactaccaggccagtcccagatacctcaagacttccaggagcaaccccaggactgactactgtggagattgtcacgatgtcacaccaggcacttggtgatgtggctggtagaggcaatgagaagaagccatcttcagtgcgagcactttccattgtcctcccaattgtgttgcttgtttttctttgtctcggagtgtttctgctctggaaaaactggcggctgaagaacatcaatagcataaactttgacaacccagtctaccagaaaactaccgaggatgaggtgcatatttgccacaatcaagatggctattcctacccgtcccgccagatggtcagtctggaagatgacgtcgca

SEQ ID NO: 10935 - DNA, 2580 bp, Artificial Sequence
  derived and/or modified sequence
atgggtccctggggctggaaactgcggtggaccgttgccctgctgctagctgcggcaggtacagcagtgggcgaccggtgcgagcgaaatgagtttcaatgtcaagatgggaagtgcatcagctataagtgggtgtgcgatggctccgccgagtgccaggatggcagtgatgagtcacaagaaacatgcctctccgtgacatgtaagtcgggcgattttagctgtggcggtagagtgaacaggtgcatcccccagttttggaggtgcgatggccaggtcgactgcgacaatggcagcgacgaacagggatgtcccccgaagacatgttcccaagacgagtttcggtgccatgacggaaagtgtatctcccggcagttcgtttgtgactccgaccgagattgcctggacggcagtgatgaagcatcttgtcctgtcctgacttgcggcccagccagctttcaatgcaactcatctacatgtatccctcagctctgggcatgcgataatgatccagattgcgaggatgggtccgacgagtggccgcagcgctgccgggggctttacgtgttccagggcgattccagcccgtgctccgcatttgaattccactgtctgtctggggaatgtatacactcatcctggcgctgtgacggcggccctgattgcaaggataagagtgacgaggaaaactgcgcagttgccacttgccgtcctgatgagtttcagtgttctgatggaaactgtattcacggatctaggcagtgcgacagagaatatgattgcaaggatatgagtgacgaagttggctgcgtcaacgtaacactgtgcgaaggtccgaataaattcaagtgccactcaggggaatgcatcaccctggataaggtctgcaacatggcacgcgactgcagggattggagcgatgagcccatcaaggagtgtggcacaaatgaatgtcttgataataatggtggctgcagccacgtctgtaacgatctgaagatcggttacgagtgtctgtgcccagatgggtttcagctggtcgcacagcgaaggtgtgaggacatagatgagtgtcaggatccggacacctgttctcaactctgcgtaaatctggagggtggatacaagtgccagtgcgaggaaggctttcagttggatccacatactaaggcgtgcaaggccgtcggatcgattgcttacctctttttcactaacaggcatgaggttaggaaaatgacgctcgatcgcagtgaatacactagcctgatcccaaacctgaggaacgtcgtagctttggatactgaggttgctagcaatcggatatattggagcgatctctctcagagaatgatttgctctacccagctggacagggcacacggggtctctagctatgacaccgtcataagcagggacatccaagcacctgacgggctcgcagtcgattggatccactctaatatatactggaccgatagcgtgcttgggactgtgagcgtggctgataccaaaggcgtcaagcggaaaactctcttccgagagaatgggtctaagccaagagctattgttgtggatcctgtccacggcttcatgtattggaccgattgggggacgcctgctaagatcaagaagggcgggttaaatggggtggatatctacagtctggtaaccgagaatatccaatggccaaacggcatcaccctggacctgctgtccggaaggttgtactgggttgattcgaaactgcatagtattagtagtatcgacgtaaatggcggtaatcggaagaccatacttgaggacgagaagaggctggcccaccctttctctttggctgtgttcgaggataaggttttttggaccgatattattaacgaagcaattttttccgcaaatcgtttgacaggatccgatgtgaacctgctggcagagaacctgttaagccccgaagatatggtgctattccacaatctgacgcagcccagaggagtgaactggtgcgaaaggacaaccctctccaacgggggatgtcagtatctgtgtctcccagccccgcaaatcaaccctcactccccaaagtttacatgtgcctgccctgacggaatgctcctcgcacgagacatgcgatcttgtctaacagaggcagaagccgctgtggccacacaagaaacatctacagttcgcctgaaggtgagttcaactgctgtccgaactcagcacaccactacaagacctgttccagacacgtctagactcccaggagctactcccgggctaaccactgtcgaaatcgtgaccatgtcccaccaagccctcggggatgtggccgggcgtggaaacgaaaaaaagccttcctccgtgcgggcgctgtctatagtgctgcccattgtgcttctcgttttcctttgcctaggggtgttcttactgtggaagaactggaggcttaaaaatattaacagcatcaacttcgacaatcccgtgtaccagaagactaccgaggatgaggtgcacatctgtcataatcaggatggttacagctaccctagccggcagatggtgtcactggaggacgacgtggcg

SEQ ID NO: 10936 - DNA, 2580 bp, Artificial Sequence
  derived and/or modified sequence
atgggaccatggggatggaaactgcgatggactgtcgccctcttgctcgccgcggccggaactgctgtcggggaccggtgtgagcggaacgagtttcagtgtcaggacggcaagtgtataagttataaatgggtatgcgatgggtccgcagaatgccaggacggaagcgacgaatctcaagaaacgtgtctgtccgtaacctgcaagtccggtgacttctcatgcggggggcgcgtgaaccgctgtattccccaattctggagatgcgacggccaggtcgactgcgacaacggctcagatgaacagggatgcccgccgaagacttgctcccaggacgagtttcggtgccacgatggtaaatgcataagccgacagtttgtgtgcgactccgacagagactgcctcgacggatcagatgaggcatcttgtcctgtccttacctgcggtcccgcatcttttcagtgcaactcaagtacatgtatcccccaactgtgggcatgcgacaatgatcctgattgcgaggacggctccgatgagtggccacagcgatgcaggggtctgtacgtttttcaaggcgattcctcaccttgtagcgcatttgagtttcactgcttgagtggagagtgcatacacagctcttggaggtgtgatggcggccctgattgtaaggacaaatctgacgaggaaaattgcgctgttgcaacttgcaggccagacgagttccaatgtagcgacgggaactgtatccacggctctaggcagtgtgaccgagaatacgactgcaaggacatgagtgacgaagttggttgcgtgaacgtaacactctgcgagggccctaacaagttcaagtgccactcaggagaatgcatcacactggacaaagtctgcaatatggcacgggattgtcgggactggagcgatgagcctattaaggagtgtggtacaaatgagtgcctggataacaacggcggttgttctcatgtttgcaatgatctgaaaatcggatatgaatgcctgtgcccagacggctttcagctggtcgcacagcgccggtgtgaggacattgacgaatgtcaggatcccgatacatgctctcagttgtgtgttaatttggaaggcggctacaaatgtcagtgcgaggaaggattccagctcgaccctcatacaaaggcatgcaaagctgtcggatccatcgcatatctgtttttcactaataggcatgaggtccggaagatgactttggaccggagtgagtacacttccctgatccccaatcttcggaatgtggtggctttggacacagaagtcgcctccaatcgcatctattggagcgatcttagtcaacgaatgatatgttctacgcagctcgaccgagcccacggcgtgtcttcctatgataccgtaattagcagagacatccaggcgccagatggcctggcagtggactggattcacagcaatatttattggaccgattctgtactgggaacggtgtctgtggctgacactaagggcgtgaagaggaagaccctgtttcgcgagaatggctctaaacctcgcgccatcgtcgtggacccagtgcacggctttatgtattggacagattgggggaccccagcaaagattaagaagggcgggctgaatggagtggacatctacagcttggtcaccgagaacatacagtggcccaatggaataacattggatttgctgtccggaagactctattgggtggattctaagctccatagcatttctagcattgatgtaaatggcggaaatcgaaagaccatactggaagatgaaaaaaggctggcacacccgttttccctggctgtgttcgaggataaagtgttctggacagacattattaacgaggccatcttcagcgctaacagactgactgggtcagacgttaatctgctcgcagagaatttgctgagcccggaagatatggtcctttttcataatttgacgcagcctagaggtgttaattggtgtgaaagaacaaccctcagtaacggaggctgccaatacttgtgtctgcccgccccccagataaatccccactcaccgaagtttacctgcgcctgcccagacggtatgctcctggcacgcgatatgcgatcctgtcttactgaggccgaagcagccgtagctacccaagaaacatccacagttcggttgaaggtgtccagtacggctgtcagaacccagcataccacaacgaggcctgttcctgacacttcccgcctgccaggagctacgcctggtttgactaccgtcgaaattgtgaccatgagtcaccaagcactgggcgatgttgccggaaggggaaatgaaaagaaaccatcctctgttagggccctgagcatagtgctgccgattgtgctcctcgttttcctgtgcctgggtgtgtttcttctctggaaaaactggcgcctgaaaaatatcaactctatcaacttcgacaaccccgtatatcagaagactacagaagacgaggtgcatatctgtcataaccaagacgggtatagttacccatctagacaaatggtgtctctggaagatgacgtagcc

SEQ ID NO: 10937 - DNA, 2580 bp, Artificial Sequence
  derived and/or modified sequence
atgggtccatggggctggaaacttcggtggactgtggccttgctgcttgcagccgcaggaaccgccgtgggagacagatgcgaacgtaatgagtttcagtgccaagatggcaaatgcatctcctataagtgggtgtgtgacggctcggcagagtgtcaggatggcagcgatgagtcacaagaaacgtgtctgtccgtgacctgcaagagcggtgatttttcatgtggaggacgagtcaacagatgtatcccgcaattttggagatgcgatggccaggtagattgtgacaacggctctgatgagcagggttgtccacccaagacctgctcccaggatgagtttagatgtcatgacgggaagtgcatctccaggcaattcgtgtgtgacagcgatcgtgactgcttggacgggtccgacgaggcatcgtgtcctgtgcttacctgtggcccagcttcctttcaatgcaacagcagcacctgcataccgcagctctgggcctgcgataatgatccagattgcgaggacgggtcagatgaatggcctcaacggtgtcgagggctctacgtctttcagggagattcctcgccatgttcggcatttgaatttcattgcctgagcggtgagtgcatacactcgtcatggcgttgcgatggcggaccagattgtaaggataagtcggacgaggaaaactgcgcagtggccacctgccggcccgatgaatttcagtgttcggatggaaactgcatacatggatcgcgccaatgcgatcgtgagtacgactgtaaggacatgtcggacgaggtcggttgtgtgaacgtgaccctttgtgaagggccaaacaagttcaagtgtcactccggagaatgtattactctggataaggtctgcaacatggctagagattgccgcgattggtcagacgaacccattaaagagtgtggcaccaatgagtgcttggacaacaatggcggatgctcccacgtgtgtaatgacctcaagattggctacgagtgcctgtgtccagacggatttcagctcgtggcacagcggagatgtgaggacattgatgaatgtcaagatccagatacttgttctcaattgtgtgtcaatcttgaaggtgggtacaagtgtcaatgtgaagaaggatttcaacttgatcctcacaccaaagcatgcaaggcagtgggttcgatagcctacctgttctttactaacagacacgaggtgcgaaagatgactctggaccgaagcgaatacacctccctcatccctaacctccggaacgtggtcgcgctcgatactgaagtggcatcaaacagaatatactggtctgatcttagccaaaggatgatctgctccacccaactggatcgagctcacggagtgtcatcgtacgatactgtgatttcgcgcgatattcaagcacccgatgggctggcggtggactggatccattcgaatatctactggaccgattccgttctgggaacggtgtcagtggcagacactaagggtgtcaagagaaaaaccctgtttagagagaacggctcgaaacctcgggcaattgtggtggatccagttcatggatttatgtactggactgactggggaactcctgcaaagataaagaagggaggtctgaatggagtggatatctactcactcgtgactgaaaacatccaatggccaaatgggattaccctggatttgctctcaggacgactgtactgggtggactccaagctgcattccatttccagcatcgacgtcaacggaggtaataggaaaaccatactcgaggatgaaaagcggctcgctcatcctttttcgctggctgtctttgaagataaggtgttctggaccgatatcattaatgaagcgatctttagcgccaaccggctgactggatcggacgtgaaccttctggcagaaaacctgctttcgccggaggacatggtgctgttccataatctgacccagccccggggagtgaattggtgcgagcgcactaccctgtcgaatggtggttgtcaatacctgtgcctccctgcacctcaaatcaatccccactcgcctaagtttacctgtgcatgtccagatggaatgctgctggcacgagacatgcgatcgtgtttgacggaagcagaagcagccgtcgcaacgcaggaaaccagcacggtccgactgaaagtctcctctaccgcagtcaggactcaacatactaccactagaccggtgccggacacttcgagacttcccggagcgactcctggtcttaccacggtggaaatcgtgaccatgagccatcaggcactcggagatgttgcaggaaggggtaacgaaaagaagcctagctccgtcagagcgctttcgatcgtgctccctattgtgctgctcgtgttcctttgtcttggggtgtttctgctttggaagaattggcgcctgaaaaacattaacagcataaactttgacaaccctgtgtaccagaaaactactgaggatgaagtccacatatgtcacaatcaggatggttactcctacccttcgcggcagatggtttcactcgaagatgatgtggcg

SEQ ID NO: 10938 - DNA, 2580 bp, Artificial Sequence
  derived and/or modified sequence
atgggaccgtggggatggaagctgagatggaccgtcgccctcctgcttgcagcagctggaactgcggtgggtgacagatgtgaacggaatgaattccagtgccaagatggtaagtgcatttcctacaaatgggtgtgcgatggatcggccgagtgtcaagacggatccgatgaatcgcaggaaacttgtcttagcgtcacctgtaagtccggtgacttttcgtgtgggggtcgcgtgaaccggtgtattccacagttctggcggtgtgatggacaagtcgattgcgataacggttcagatgaacagggatgtcctccaaagacctgttcgcaagacgaattccgatgtcacgacggaaaatgcatttcccgccaattcgtgtgtgacagcgatcgggactgtctggacggaagcgatgaggcttcctgtcctgtgctcacctgtggaccagcttccttccagtgtaactcgtcgacctgtatccctcaactgtgggcctgcgataacgatccagactgtgaggatggtagcgatgaatggccacaaaggtgcagaggattgtacgtgtttcaaggcgattcaagtccatgtagcgcgtttgaattccactgcctgtcgggtgaatgtatccattcatcctggcgttgtgatggaggtccagattgtaaggataaatccgatgaggaaaactgcgcggtcgcaacttgcaggccagacgagtttcagtgctcggatggtaactgtatacatggatcaaggcaatgtgatagggaatacgactgtaaggatatgagcgatgaagtgggttgcgtcaatgtaactctgtgtgaagggccaaacaagtttaagtgccactcaggcgaatgcattactctggataaggtctgcaacatggcaagagactgccgggattggtccgacgaacctataaaggaatgtggaactaacgaatgtctggacaataacggaggatgttcccatgtgtgtaacgatctgaagatcggctacgaatgtttgtgtccagacggattccagcttgtggcacaacgccgctgtgaagatatagatgagtgccaggaccccgatacttgttcccaactgtgcgtgaaccttgaaggaggttacaagtgccaatgtgaagaaggtttccaattggaccctcataccaaagcatgcaaggcagttggatcgatcgcatacctcttctttaccaaccgtcatgaagtcaggaaaatgaccttggatcggtccgagtacacctccctgattccgaacctgagaaacgtcgtggcattggataccgaggtggcctcgaaccgcatatactggtcagacctgtcccaacggatgatttgcagcactcaactggaccgggcgcatggggtttcatcctacgatactgtcatttcaagggatatccaagcccccgatggacttgctgtcgattggattcattcgaacatctactggactgactcggtgcttggaaccgtgtcggtcgcagacaccaagggtgtcaaaagaaagaccctttttagggaaaacggatcaaagccacgtgcaatcgtggtggacccggtccatggttttatgtactggaccgactggggaactcctgcaaagattaagaaggggggcctgaacggtgtcgacatttactcgctggtgaccgaaaacatacagtggcctaatggaattacccttgatttgctgtccggtcgcctgtactgggtggatagcaagctccattcgatatcatccatcgacgttaacggtggaaaccgcaagactattctggaggatgaaaaacggcttgctcatccttttagcctggccgtgtttgaagataaagtcttttggactgatatcatcaacgaagcaatcttttcggccaatagacttacggggtcggacgtcaatcttcttgcagaaaacctgctgagcccggaggatatggtgctgtttcataatctcactcaacctagaggggtcaactggtgcgaacgcaccactcttagtaatggtggatgtcagtacctctgcttgccggcaccacaaatcaacccacattcacctaagttcacttgtgcatgtcctgatgggatgctgctggcacgagatatgcgttcctgtctcactgaggcagaggcagctgtggcaacccaggaaacctcgactgtgagacttaaggtttcatccacggcggttcggacccaacataccactactcggccagtgcccgacacttcgcgcctccccggggcaacccctgggctgaccactgtcgaaattgtgactatgtcccatcaggcacttggtgacgtggccggcaggggaaatgaaaagaaaccttcgagcgtgcgtgccctgtccatcgtgctcccaatagtgcttctcgtgtttctttgtctgggagtctttcttctctggaaaaactggagactcaaaaacatcaattcaattaactttgacaaccctgtgtaccaaaagacgactgaagatgaagtgcacatttgtcataaccaagacggatacagctacccatcacgccagatggtcagccttgaagatgatgtggca

SEQ ID NO: 10939 - DNA, 2580 bp, Artificial Sequence
  derived and/or modified sequence
atgggaccctgggggtggaagctgcgctggacggtcgcacttctgcttgccgcagcaggcaccgcagtcggcgaccggtgtgaacgtaacgaattccaatgtcaagacgggaagtgcatctcatacaagtgggtgtgtgacggctcggcagagtgccaggacggatcagacgagtcccaggagacttgtctgagcgtgacctgcaaatccggagatttttcatgtggagggcgtgtcaaccgttgtattcctcaattttggagatgcgatggacaagtggattgtgacaatggctcagatgagcaggggtgcccacctaagacgtgcagccaggacgaattcagatgccatgacggaaagtgtatctcgaggcaattcgtctgcgactcggacagagattgtttggatggatcggatgaggccagctgccctgtcttgacttgtggtcccgctagcttccaatgtaactcgtcgacttgcatcccgcagctctgggcgtgtgataacgatcccgattgtgaagatgggagcgacgaatggccacaacgctgtcgtggcctgtacgtctttcagggagacagctcgccatgttccgcctttgaattccattgtctttcgggtgagtgtattcatagctcctggcgatgcgacggagggcctgattgcaaagataaaagcgacgaagagaactgcgccgtggcgacctgtcggccagatgagtttcagtgttcggatggtaattgcatccatggatcacgtcaatgtgaccgggaatacgattgcaaggatatgtccgatgaagtgggatgcgtgaatgtgactctgtgtgaaggccctaacaaattcaaatgtcattcaggagagtgtatcaccttggacaaggtgtgtaatatggctagagattgtcgagattggagcgatgagcccatcaaggaatgtgggactaatgagtgcctcgataacaacggcggctgttcccacgtgtgtaacgatctgaagattggatatgaatgtctttgtcctgacggatttcaactggtggcccaaagacgctgtgaagatattgatgaatgccaagatcccgacacttgttcgcagctgtgtgtgaacctcgaaggtggatacaaatgtcagtgtgaggagggattccaactcgaccctcatactaaggcttgtaaggcagtgggttcaatagcgtatctgtttttcaccaaccggcacgaagtgcggaaaatgactttggatcggagcgaatacactagcctcatcccaaacttgaggaacgtcgtggcattggatacggaggtcgcatccaacagaatttactggagcgatctgtcccagcggatgatctgttcgacccaactggatcgggcacatggagtgtcgtcctacgataccgtgattagcagagatatacaggcaccagacggtctggcagtcgactggattcattccaacatttactggaccgattcggttctgggtactgtgtcggtggcggataccaagggggttaaacgcaagaccctttttagagaaaacggtagcaaacctcgcgcaattgtcgtggaccctgtgcatgggttcatgtattggactgattggggcactccggctaagatcaaaaagggcggtcttaatggagtggacatctactccttggtgactgagaatatacagtggcctaacggtataaccctggatcttctctccggtagactgtactgggtcgactccaagctgcactctatctccagcattgatgttaatggtgggaacaggaaaaccattcttgaagatgaaaagagacttgcccatccattttcactcgcagtatttgaagataaagtcttttggaccgacatcattaacgaagctatcttctccgcaaacaggctgaccgggtccgatgtcaaccttcttgcggaaaacctgctgtccccagaagatatggtgcttttccataaccttacgcaaccaagaggcgtgaactggtgcgaacgaaccaccttgtcaaacggtgggtgccaatacctgtgcctgcctgcgccccaaatcaatccccattcgcctaaattcacttgtgcctgtccagatggaatgcttctggcccgcgatatgagatcatgtctcacggaagctgaagcagctgtcgcaactcaagaaacgtcgactgtgaggctgaaggtcagctcgaccgctgtgaggacgcaacataccaccacccgtccagtgccagatacctcccgactgccaggagcaacgccaggcctcactaccgtcgagattgtgaccatgtctcatcaggcattgggcgacgtggccgggcggggaaatgagaaaaagccctcgtcagtgcgcgctctgtccatcgtgctgcccatagtgcttctggtgtttctttgcctgggagtctttctgctgtggaagaactggagacttaagaacattaactctatcaattttgataaccccgtttatcaaaagacgactgaggacgaagtccacatctgtcataaccaagatggttactcctatccatcacggcaaatggtgtccctggaagatgacgtggca

SEQ ID NO: 10940 - DNA, 2580 bp, Artificial Sequence
  derived and/or modified sequence
atgggtccttggggctggaagctgaggtggaccgtggcgctgcttcttgccgctgcaggcaccgcagtgggtgataggtgtgagcggaacgagtttcagtgtcaggatggtaaatgcatttcatacaagtgggtgtgtgacggctcggcagagtgtcaagatggttctgatgaatcgcaggaaacctgtctgtcagtcacctgtaaaagcggagatttttcctgcggaggcagagtcaacagatgtattccgcagttttggcggtgtgacggtcaggtcgattgcgataacggatcggatgagcaaggatgcccacccaaaacgtgtagtcaagatgagttccgttgtcatgatggaaaatgtattagccggcaatttgtctgcgacagtgaccgggattgtctcgatggatccgatgaggcctcgtgccctgtccttacctgcgggccagccagcttccaatgtaactcctcaacttgcattccacaactctgggcttgtgataatgatcccgattgtgaggatggaagtgacgaatggccccaacgctgtagagggctctacgtgttccaaggggatagctccccttgctcggcgtttgaatttcattgtcttagcggagaatgtattcattcgtcctggcgatgtgatgggggtcccgactgtaaggacaaatcggacgaagaaaattgtgcggtggcgacttgtcgcccagatgaattccagtgttcggacggcaactgtatccacggaagccggcagtgtgacagagagtacgactgtaaagatatgtcggacgaagtgggatgcgtcaatgtgaccctttgcgaagggccaaacaaattcaagtgtcattcgggtgaatgtatcactcttgacaaggtgtgtaatatggctcgtgactgcagagactggtccgatgaacctattaaggagtgtggtacgaacgagtgcctcgacaacaatggtggatgctcgcatgtctgtaacgatctcaagataggttacgaatgtctctgtccggacggctttcagttggtcgcacaacgcaggtgtgaggacatcgatgaatgccaagacccagatacctgtagtcagctttgcgtgaatctggaaggtggttacaaatgccagtgcgaggagggatttcaactggacccgcataccaaggcttgtaaggcagtgggatcgattgcatacctgtttttcaccaatcgccatgaagtcaggaaaatgaccctggatcgcagtgaatacacctcccttatccctaacctgcgcaacgtggtggcattggataccgaagtggcaagcaaccgaatctattggtccgacctttcgcaaagaatgatttgctctacccagcttgaccgggcacacggggtgtcaagctacgataccgtgatctcccgtgacatccaggcaccagatggcttggcagtcgactggatacacagcaatatctattggacggattccgtgctcggtaccgtgtcggtggctgatactaagggcgtaaagcgcaagaccctgtttagagaaaacggctccaagcctagagccattgtggtggatcctgtgcacggatttatgtactggaccgattggggtactccggcaaagattaagaaggggggcctgaacggagtggacatttactcccttgtaactgagaacattcagtggcccaatgggataaccctggatctgctgagcggaaggctgtactgggtcgattcgaagctccactcaatttcgagcattgatgtgaacggaggtaataggaaaactatattggaagatgagaagagattggcccatccattttccctggcagtctttgaagataaggttttctggacggacattatcaacgaagcaatcttctcagccaaccggttgactggaagcgatgttaatcttctcgccgaaaaccttttgtcacctgaagatatggtgctgttccataatcttactcaaccaagaggagttaactggtgtgaacgtaccacgttgtccaacggtggctgccaatacctctgccttcctgcgccccagatcaacccacactctccaaagtttacttgcgcttgtcctgatggcatgctgctggccagagatatgcggtcctgtctcactgaagcagaagccgcagtggcaacccaggaaacttctactgttagattgaaggtgtcatcaactgcagtgaggacccagcatactaccacccgccccgtgcctgacacttcacgactgcccggggcgactccaggactgacgaccgtggagatagttaccatgagccaccaagcccttggtgatgtggcaggtagaggaaacgagaagaaaccttcgtcagtacgagcacttagcattgtcctgccaatcgtgcttctcgtgttcctttgcctgggcgtctttctgctctggaagaattggcgtctcaagaacatcaattccattaactttgacaaccctgtctaccaaaaaactactgaggatgaagtgcatatttgccataatcaagatggctactcgtacccttcacgacaaatggttagtcttgaagatgacgtcgca

SEQ ID NO: 10941 - DNA, 2580 bp, Artificial Sequence
  derived and/or modified sequence
atgggaccttggggctggaaacttcggtggactgttgccctgctgctggcagccgccggaactgcggtgggggatcgttgtgaacgaaatgagtttcagtgccaggatggcaaatgtatctcatacaagtgggtctgcgacggaagcgcagaatgccaagacggatcagatgaatcccaggaaacgtgcctgtccgtaacctgcaagagcggggacttctcgtgcggaggacgggtaaatcggtgtatcccgcaattctggcgttgtgatggacaggtcgactgcgataacggctccgacgagcagggatgtccgccaaagacttgctcccaggatgagttcagatgccatgacggaaaatgcatctcacgacaatttgtgtgtgactcagacagagattgcctcgacggttccgatgaagcgagctgcccagtcctcacctgtggaccagcatcttttcaatgcaactcgtccacctgcattccacagctttgggcatgcgataatgacccggattgtgaggacggatcggacgaatggccccaacggtgccggggtctgtacgtctttcagggcgattcatcgccctgctccgcgttcgagttccactgcctgtcgggtgagtgcatccactcatcgtggcgctgcgacggaggtccagattgcaaagataagagcgatgaggaaaattgcgcggtcgctacgtgccgccctgacgaattccaatgttccgatggaaactgcattcacggctcccgccagtgcgacagagagtacgattgcaaggatatgtccgatgaggtgggttgcgtgaacgtgactctgtgtgaaggacccaacaaattcaaatgccattccggggaatgcatcaccctggacaaagtttgcaacatggcacgcgattgtagagactggagtgacgaacccattaaagagtgcggtaccaatgaatgcttggataacaacggaggctgctcgcacgtgtgtaatgacctgaaaataggttacgaatgcttgtgccccgacggcttccaactcgtggcccagagacgctgcgaagatatcgacgagtgccaggatccagacacctgttcccagctctgcgtgaacctggaaggaggatacaagtgtcagtgtgaggagggattccagctggatccacacactaaggcgtgcaaggccgtcgggtccatcgcttacctgttcttcaccaacaggcacgaagtgcggaagatgactctcgaccggtccgagtatacgtcgctgatccccaacttgcggaacgtggtggcattggataccgaagtggcaagcaatcggatctactggtcagacctttcccaacgcatgatctgcagcacccagcttgatagggctcacggagtctcatcatacgatactgtgatctccagagacattcaagcaccggacgggctggccgtggactggattcactctaacatctactggactgatagcgtgctggggacggtgtcagtcgcagacaccaaaggggtgaagagaaaaaccctgttccgcgagaatggaagcaagccgcgggcgatcgtggtcgacccggtgcatggcttcatgtactggaccgactggggaactcccgcgaagatcaagaagggaggactgaatggagtcgacatttactcactcgtgaccgagaatattcagtggccaaacggcattaccctggacctgctgtctggccggctttattgggtggatagtaaacttcatagcatcagctccatcgacgtgaatggaggaaataggaaaaccatccttgaggacgagaaacgcctcgcgcatcccttcagccttgcagtgttcgaggataaggtgttttggactgatatcatcaacgaagcgatcttctcggcaaatagattgaccggttccgatgtcaacttgcttgccgagaacctgctgtccccggaagatatggtgctgttccataacctgacccaaccgcggggagtgaattggtgcgagagaaccactctctcgaatgggggctgccagtacttgtgcctcccggccccgcagatcaacccgcactctccaaagttcacttgcgcatgcccagatgggatgctgctcgccagagacatgaggtcgtgccttactgaagccgaagctgcggtggccacccaggaaaccagcactgtgagactcaaggtgtcctcaactgcagtgcgcacccagcatacgaccactcgcccagtcccggacacttcgcggctcccaggcgctaccccgggccttactaccgtggaaatcgtcaccatgtcgcatcaggcgttgggggacgtggcggggcgggggaacgaaaagaagccgtcatcggtgcgcgccctgtccatcgttctgccaatcgtgctgctcgtgtttctgtgtctgggagtgttcctgctctggaagaattggcggctgaagaacatcaattccatcaatttcgataaccccgtgtaccaaaagaccactgaggatgaggtgcacatttgtcacaaccaggacggctactcgtacccttccagacagatggtgtcgctggaggatgacgtggcc

SEQ ID NO: 10942 - DNA, 2580 bp, Artificial Sequence
  derived and/or modified sequence
atgggaccttggggatggaagctcaggtggactgtggccctgcttctggcagctgcgggtactgccgtgggcgaccggtgtgaacgcaacgagtttcaatgtcaggatggaaagtgcatctcgtacaagtgggtgtgcgatggatccgcggagtgccaggacgggtcggatgaatcgcaagaaacttgcttgtccgtcacttgtaagtcgggagacttctcctgcggagggagggtcaataggtgcatcccacagttctggcggtgtgacggacaggtggactgcgacaacggatcggatgagcagggctgtcctccaaaaacgtgcagccaagatgagttcagatgtcacgatggaaaatgtatctcccgccagttcgtctgcgactccgaccgggactgtctggatggatctgatgaggcatcttgcccagtgctgacttgcggacctgcctcgtttcagtgcaactcctcgacttgcatcccgcaattgtgggcctgcgataatgatccagactgcgaagatgggagcgacgagtggccgcaaagatgccgggggctctatgttttccaaggagactcatccccgtgcagcgccttcgagttccactgcctgtctggcgaatgcatccattcctcctggcggtgcgatggaggcccggactgcaaagataaatcagacgaagaaaactgcgccgtggccacctgcagaccggacgagttccagtgctcggacggcaactgcatccacggctcgcgccagtgtgaccgtgaatacgactgcaaggacatgagcgacgaggtcggatgcgtgaacgtgactctgtgcgaaggtcccaacaagttcaaatgccattcgggtgagtgtattactctggacaaagtgtgcaatatggcacgcgactgccgagactggagcgacgagccgatcaaggaatgcggcactaacgagtgtctggacaacaacggaggctgctcgcatgtgtgtaacgacttgaaaattggctacgaatgcctgtgtccggatggcttccagctggtggcccaaaggcggtgcgaagatatcgatgaatgtcaggatccggacacgtgtagccagctgtgcgtgaatctggaaggcggatacaaatgccagtgcgaagagggattccaactcgacccacataccaaggcatgcaaagcagtcggatcgatcgcttacctcttcttcactaatcgccatgaggttcggaagatgactctggaccgctcggaatacacttccctgatcccgaacctcaggaacgttgtcgcactggacaccgaagtcgcgtccaaccggatttactggtcagatctgtcacaacggatgatctgcagcactcaactggatagagcacacggagtctcctcgtatgataccgttatcagccgagacatccaagcccctgacggactggccgtggactggatccacagcaacatatactggaccgactcggtgctgggaactgtctcagtcgccgacactaagggagtgaaacgcaagaccttgtttcgcgaaaacggaagcaagccacgcgccatcgtggtggaccctgtccatggtttcatgtactggactgattgggggactccggctaaaatcaaaaaggggggactgaacggagttgatatctattccctcgtgactgaaaacatccagtggccaaacggcattaccctcgatttgctcagcggaaggctgtactgggtcgactcgaaacttcactctatttcctccatcgatgtgaacggaggcaatcgaaagacgatcctggaggacgaaaaacgcctggcccacccattttcacttgctgttttcgaagataaggtgttttggaccgatatcattaacgaggcaatcttttccgctaacagactgactgggtccgatgtgaatctgctcgcggagaacctgctgtcgcctgaggacatggtgctgttccacaacctgacccaacctcgcggcgtgaactggtgcgagagaactactctgtccaacgggggttgtcaatacctgtgtttgccagctcctcagatcaacccacactcacctaagttcacttgtgcatgcccggacgggatgctgctcgcgcgcgatatgagaagctgcctcaccgaggccgaggccgcagtggccactcaggagacttcaaccgtccggctgaaggtgtcaagcactgccgtcaggactcagcacactactacgaggcctgtccctgacacttcccgccttccaggtgctactccgggactcaccaccgtggaaatcgtgacgatgtcgcaccaggctctcggagatgtggctggacgcgggaacgagaagaagccctcgtcagtgcgcgccctgagcatcgtcctgccaatcgtgctgctggtgttcctctgcctgggagtctttctgctctggaagaactggcggctcaaaaacatcaatagcatcaatttcgataatccagtgtaccaaaagaccaccgaggatgaggtgcacatttgccacaaccaggatggatactcctacccgtcccggcagatggtatctctcgaggatgatgtggcc

SEQ ID NO: 10943 - DNA, 2580 bp, Artificial Sequence
  derived and/or modified sequence
atggggccgtggggctggaagctgagatggacagttgcccttctgctggccgcagccgggacagcagtcggtgatcgatgtgaacgaaacgagttccagtgtcaagatggtaaatgcatttcctataagtgggtatgcgatggaagtgcggaatgtcaggatgggtctgacgagtcacaggagacctgcctgtcagtaacctgcaagtcaggggactttagttgtggaggaagagtgaaccggtgcatccctcagttttggcgttgtgatggccaggtggattgcgacaacgggtcagacgaacaggggtgcccaccaaagacatgttctcaggatgaattccgttgccacgacggaaaatgtatttcgagacagttcgtttgtgattctgatcgcgattgtttagacggcagtgatgaagcctcatgcccggttcttacttgcgggcctgctagcttccagtgcaacagctcgacatgcatcccccagctctgggcctgtgataatgacccggactgcgaggatggatccgacgaatggccacaaagatgccgtgggctctatgtctttcagggtgattccagcccttgcagtgccttcgagtttcattgtttgtcgggcgagtgcattcacagctcatggcggtgtgacggaggcccagattgtaaggacaaatccgatgaggaaaactgcgctgtcgctacctgcaggcccgacgagtttcaatgctccgatggcaattgcattcatggttcaagacagtgcgacagggaatacgattgtaaggacatgagcgatgaagtgggatgtgttaacgtgaccctgtgtgagggaccaaacaagttcaaatgccattctggagagtgtattacactggataaggtctgtaatatggctagagactgtcgcgactggtctgatgagccaatcaaagagtgtggtacaaatgaatgcctggacaataatggcgggtgcagtcacgtctgcaatgatctcaagattggctatgaatgcctttgtcccgacggatttcaactggtagcacagcgtcggtgtgaagacatcgatgaatgccaggatcctgatacttgtagccagctttgcgtcaaccttgagggaggctataagtgccagtgtgaagaagggttccagttggatccacacaccaaggcatgcaaggcagtggggtcaattgcttacctgttctttactaacaggcatgaagtgcgtaagatgaccctcgatagatctgagtatactagtcttatccctaatttgagaaatgtcgtagccttggacactgaggtcgcgagcaatagaatctattggtccgacttatctcagcggatgatctgctccacacagctggatcgagcccacggcgtgagcagctacgacacagttatcagtcgggacatccaggcccccgatggtttggctgtggactggatccactctaatatctattggacagactccgtactcgggactgtgagtgtggccgacacaaagggagtgaagaggaagaccctgttcagggagaatggctcaaagccaagagccattgtggtggatccagtgcacgggttcatgtactggacagactggggtacgcctgcaaagatcaaaaagggtgggttaaatggggtggatatctactccttagtgacagagaacattcaatggccgaacggcatcactcttgatctcctgagcggccggctctattgggttgattctaagttgcatagtatcagctcgattgatgttaacggtggaaaccggaaaaccatcctggaggacgagaagagactggcgcatccattctccctagcagtattcgaggataaggtgttttggaccgacattataaatgaagctatcttcagtgccaacagactcaccggcagcgatgtgaacctactggcagagaatctcctctctcctgaggacatggtcttatttcataatctcactcagccgagaggcgtgaactggtgcgagaggacaactcttagcaatggcggctgccagtatctatgtttgccagcacctcagattaaccctcattctcctaaattcacgtgcgcttgcccagacggaatgcttctggcccgggatatgcgctcttgtctcacggaggccgaggccgccgtggctacccaggagacgagcactgtaaggctgaaagtgagtagcacggccgttcgaacccagcacacaaccacaagacctgtgcccgataccagccgtttgccgggagcaacacccggactgactaccgtggagatcgtgaccatgagtcaccaggctctgggcgacgtggcaggaaggggaaatgagaagaagccatcttctgtgagagccctctccatagttttacccatcgttctgctggtgtttctgtgtctgggagtgttcttactgtggaagaattggcgacttaaaaatatcaatagcatcaactttgataaccctgtctatcaaaagacgaccgaggacgaggtgcacatctgtcacaatcaggatggatatagctaccctagtagacagatggtgtcactggaggacgacgtcgca

SEQ ID NO: 10944 - DNA, 2580 bp, Artificial Sequence
  derived and/or modified sequence
atgggaccatggggatggaaactgcgatggaccgtggcactcctgctggctgcagctggcaccgctgtaggagatcggtgcgaacgcaacgagttccagtgccaggacggaaaatgcatctcgtacaagtgggtgtgcgatggatcagccgaatgtcaagatggttccgatgaatcccaggaaacctgcctgtccgtcacttgcaagtcgggagacttctcctgcggaggcagagtcaaccgctgcatcccgcagttctggaggtgcgacggacaggtcgattgcgacaacgggtccgacgaacagggctgcccacctaagacgtgcagccaagatgagttcagatgccatgatgggaagtgcatctcgcgccagttcgtgtgcgactcggaccgggactgcctggatggctcagatgaggcctcgtgcccagtcctcacctgtggcccagccagctttcagtgcaactcatcgacttgcatcccgcaactgtgggcctgcgataacgacccagactgcgaagatgggtcggacgaatggccccaacgttgcaggggactttacgttttccagggagactcaagcccatgcagcgcgtttgaattccactgtcttagcggtgaatgcatccactcatcgtggagatgcgacggaggtcctgactgcaaagacaagtccgatgaggaaaactgcgccgtggccacgtgtcgcccggacgaattccagtgctcggacggtaattgcattcacggaagccggcaatgcgatcgcgagtacgactgtaaggacatgtcggacgaagttggatgcgtgaacgtcactctgtgtgagggaccaaacaagtttaagtgtcattccggggaatgcatcactctggataaggtgtgcaacatggcacgcgactgcagggactggtccgacgagccgatcaaggaatgcggtactaatgaatgtctcgataacaatggaggttgcagccatgtgtgtaacgacctgaaaatcgggtatgagtgtctgtgccccgacggcttccaactggtggcacagaggcgctgcgaggacatcgatgaatgccaagacccggacacttgctcccaactgtgtgtcaaccttgaaggagggtacaagtgtcagtgcgaagagggatttcagcttgatccgcacactaaggcctgtaaagctgtgggatcaattgcctacctgttctttaccaaccggcacgaggtccgcaaaatgaccttggatcgctcggaatacacctcactgatccctaatctccggaacgtggtcgccctggacactgaggtggcgtcaaaccgcatctactggtctgatttgtcacagaggatgatttgttccacccaactcgatagagcccacggagtctcctcgtacgataccgtgatcagcagagatattcaggccccagatggattggccgtcgactggattcattcgaatatctactggacggactcggtgctgggcactgtgtcagtggcggacaccaagggggtgaagcgcaaaactctcttccgcgagaatggcagcaagccccgggcaattgtcgtggacccggtgcacggcttcatgtactggaccgactggggaactccggcgaaaatcaaaaaggggggcctcaacggagtggacatctactcacttgtgaccgagaacatccaatggcctaatggaattaccctggatctgctttcggggcgcctttactgggtggattcaaagctgcactccatcagctccatcgatgtgaacggcggaaacagaaagaccatcctggaagatgaaaagcggctggcccacccattttcactggctgtctttgaagataaagttttctggaccgacatcatcaacgaggcgatcttctcggcgaacagactgactgggtccgatgtcaatctccttgcagaaaatctgctgtcaccggaggacatggtgctgttccacaatctcacccagccaaggggggtcaattggtgcgagagaactaccctctcaaacggaggatgccagtatttgtgcctgccagccccacagatcaatcctcactcgcccaagttcacctgcgcctgtccagacggcatgctgctcgcccgcgatatgcgcagctgcctcactgaggctgaagccgcggtggcgacgcaagaaacctcgaccgtccggcttaaggtgagctcgaccgccgtgagaactcagcacaccactacccgcccagtgccggacaccagccgcctgccaggcgcgactccgggattgactaccgtggagatcgtgacgatgagccaccaggccctgggagacgtggctgggcgcggaaacgagaagaagccatcgagcgtcagggcgctgtcgatcgtcctgccgatagttctgctggtgttcctttgccttggagtgttcctgctgtggaagaattggagattgaagaatatcaactcaatcaacttcgataacccggtgtatcagaaaactaccgaggacgaagtgcacatttgccacaatcaagacggatactcatacccgtccagacagatggtgtccttggaagatgacgttgcc

SEQ ID NO: 10945 - DNA, 2580 bp, Artificial Sequence
  derived and/or modified sequence
atgggcccctggggatggaagttacgatggacggtcgctttacttttggcggctgcaggcacagcagttggcgatcgctgtgaacgtaacgagtttcagtgtcaggatggaaagtgtataagttataaatgggtctgcgatggatccgcggagtgccaggatggatcagacgaatcgcaagagacctgcctgtccgtaacatgtaagagcggcgacttcagttgtgggggacgcgtgaatagatgcatccctcaattctggcggtgtgacggccaggtcgattgcgataatggatccgatgaacaaggatgcccacctaagacatgctcgcaggatgagttccggtgccacgacggcaagtgcataagtcggcagtttgtgtgtgatagtgatagagactgtctggacggcagtgacgaggcatcttgtcctgtacttacttgtgggcccgcgagtttccagtgcaatagcagcacttgcataccccagctctgggcttgcgacaacgatcccgactgcgaggacggcagtgatgagtggccgcagcgatgtcgaggtctttacgtgtttcaaggcgatagtagcccctgttctgcattcgaatttcactgtctgtctggggaatgtatccacagttcctggcggtgcgatggaggacctgactgcaaagacaagtctgacgaggagaactgtgcagtggcgacctgtaggcccgatgagtttcagtgtagcgatggcaactgtattcatggtagcaggcaatgcgatcgggagtacgattgtaaggatatgtctgacgaagtaggctgcgtcaatgtcacgctctgcgagggcccgaataagtttaaatgtcactcaggagaatgcatcactctagacaaagtgtgcaatatggccagggattgccgtgactggtccgatgagcccattaaggagtgcggaacgaatgagtgcctcgacaacaatggcggctgttcacacgtctgcaatgatcttaaaatcggttatgaatgtctctgtccagacggctttcagctagtggcccaaaggcgatgcgaggacatcgatgaatgtcaggatccagatacatgctcccagttatgcgtgaatcttgagggcggctacaaatgtcagtgcgaggaaggcttccagttggatccgcacacaaaggcgtgtaaggccgtgggcagtatcgcttatctctttttcacaaacagacacgaggtgagaaaaatgactctcgatcggagcgaatacactagcctgatcccaaacttgcggaatgtggtggccctggacactgaagtcgcttccaacaggatatactggagcgatctttcacagagaatgatctgttcgacacaactggaccgggctcatggcgtgtcatcatacgacaccgtaatttcccgtgacatccaggccccagacggcttggctgtggactggatccattccaatatttactggacagattctgttctgggcaccgtatcagttgccgacaccaagggcgtgaagcgtaagactctctttcgcgagaacggttctaagccgagggcgatagtagtggacccagtacatggatttatgtactggaccgattggggtactcctgcgaagatcaagaagggcgggctcaacggtgtggacatctactcgctagtgaccgagaacatacagtggcctaatggaatcactctggatttacttagcgggagactctactgggtggactccaagctgcactcaatctcgtctatcgacgtcaatggcgggaatcgcaaaactatcctggaagacgagaaaagactcgcacacccctttagtctggcggtattcgaggacaaggtgttctggaccgacatcatcaacgaggctatcttctcagccaatagactgactggttcagatgttaatctgttggccgagaacctgctgagtcccgaagatatggtgctgttccataatcttactcagcccaggggggtgaactggtgcgaacgcacaaccctttcaaacggcggctgccagtatctgtgcctccctgcacctcagatcaatccccactcccccaaatttacctgcgcctgccctgatgggatgctcctggcacgcgacatgcggtcttgcttgacagaggcagaagctgctgtggccacccaagaaaccagtaccgtacggctcaaggtgagctctacagccgtccgaacccagcacacaactacccgacctgtgccagacacgtccagattgcctggggctaccccaggcttaacaacagtggagattgtgacaatgagccatcaagcactgggcgacgtcgcaggacgtggcaacgaaaagaagcctagtagcgtccgcgctctgtctatagtcttgcctattgtgcttttggtgttcctttgtcttggagtgttcttattgtggaagaactggaggctgaagaatataaattctattaacttcgataacccagtctaccagaagactacagaggatgaggtgcacatctgccataaccaagacgggtacagttatcccagccgtcagatggtgtccctagaggacgacgttgct

SEQ ID NO: 10946 - DNA, 2580 bp, Artificial Sequence
  derived and/or modified sequence
atgggaccttggggttggaaactgaggtggactgtggcactgctgctggcagcggctggaacggccgtgggggaccgatgtgagaggaacgaatttcaatgtcaggacggcaaatgcatttcgtacaaatgggtctgtgatggctctgccgagtgtcaagatgggtcagatgagtcgcaggaaacttgtctttcggtcacttgcaagagcggggatttctcatgtggagggcgcgtgaacaggtgtataccacagttctggcgctgtgatggtcaagtggattgtgacaatggttccgatgaacaaggatgccctcctaagacttgcagccaggacgaattccgctgtcatgacggtaagtgtatttcccgacaattcgtgtgcgattccgatcgagactgccttgatggctcagatgaggcctcgtgtcccgtgcttacttgcggacctgcatcatttcagtgcaattcctcaacttgtattccccaactttgggcatgtgataatgaccccgattgtgaggatggatcggacgaatggcctcaacgttgtagaggtttgtacgtgtttcagggagattcatcgccatgctcggcctttgaattccattgtctcagcggagaatgtattcattcttcatggcgatgcgatggggggcctgattgcaaagataagagcgatgaagagaactgtgcagtcgcgacctgtagaccagatgagtttcagtgttccgatggaaattgtatccatgggtcgaggcaatgtgacagagaatacgactgtaaggacatgagcgatgaagtgggttgcgtgaatgtcactctgtgcgaaggtcctaacaagttcaagtgtcattcgggagagtgtattacccttgataaggtctgtaacatggcaagagactgccgagactggtccgatgagcctattaaggaatgcggcacgaatgagtgtcttgataacaatggtggctgttctcacgtctgtaatgacctcaagatcggatacgaatgtctgtgcccagacggatttcagctggtggcacaacgacgctgcgaagatatagatgaatgtcaggatccagatacctgttcgcaactttgcgtgaatcttgaaggaggctacaaatgtcaatgtgaggaaggcttccagctggacccacacactaaggcatgtaaagcagtgggttcaatcgcctacctgttctttaccaaccggcatgaagtgaggaaaatgactcttgacagatctgagtacactagcctgattcctaatctgcgaaacgtggtggcattggataccgaagtggcatcgaatcggatctattggtcggatctcagccaaagaatgatctgtagcacccagcttgacagagcgcatggggtttcgtcgtacgacaccgtcattagccgggacattcaggcacctgatgggctcgcagtggattggatccactccaacatttactggaccgacagcgtcctgggaaccgtctcggtcgccgatactaaaggggtgaagcgtaagactctgtttcgcgagaacggcagcaagccacgcgcaatcgtggtcgacccagtgcatggatttatgtactggactgactggggaacgcctgcaaagattaagaagggcggactcaacggcgtggatatctactccctggtcaccgaaaacatccaatggcctaacggtataactctggaccttctctcaggacggctttactgggtggactccaaactgcattccataagctcaattgatgttaatgggggaaataggaaaaccattctggaggatgaaaaaaggctggcccacccattcagtctcgcagttttcgaagataaggtgttttggactgacataatcaatgaggctatcttttcagctaacaggctgaccgggtctgatgtgaacctgctggcagaaaaccttctgtcaccagaggatatggttctttttcacaacctgactcaaccccgtggcgtcaactggtgtgaaaggactaccctctcaaatggaggttgtcagtacctctgtttgcctgcacctcagattaaccctcatagccctaaattcacctgcgcatgtccagatggaatgctgctcgcgagagatatgagatcatgtctgacggaggccgaggcagccgtcgccacccaggaaacctcaaccgtgcgactgaaagtgtccagcacggccgtgagaacgcagcacactaccactcggcccgtgccagatacctcgagacttcccggcgcaaccccgggtctgaccaccgtggaaatagtcactatgtcgcatcaggctctcggtgacgtcgcgggaagagggaacgaaaagaagccaagctccgtgagagctctttccatcgtgcttcctattgttcttcttgtgtttctgtgtcttggagtgtttttgctttggaagaattggcgcctgaagaacataaacagcattaactttgataatcccgtctaccaaaagaccactgaggacgaggtccacatctgtcacaaccaggatggatacagctatccttcgaggcaaatggtgtcgctggaggacgatgtggca

SEQ ID NO: 10947 - DNA, 2580 bp, Artificial Sequence
  derived and/or modified sequence
atgggaccatgggggtggaagcttcgctggaccgtagctctgctcttggccgccgccggcactgctgtgggggatcggtgtgagcgcaacgaattccagtgccaggatgggaaatgtattagctacaaatgggtatgcgatggttcagctgagtgccaagatggctcagacgagtctcaagaaacatgtctgagcgtgacttgtaagtctggtgattttagttgcggggggcgggtaaacagatgtataccacagttctggcggtgtgatggacaggtggactgcgacaacgggagtgacgagcagggctgtcccccgaaaacatgcagtcaggacgagtttcgctgtcacgacgggaagtgtatctcaagacagttcgtatgtgattctgatcgcgattgccttgatggaagtgatgaggcaagctgtcctgtcctgacgtgcgggcctgcaagtttccagtgcaacagttccacatgtattcctcagctctgggcttgtgacaatgaccctgactgtgaagatgggtcagacgagtggcctcagcggtgtcgcggcctgtatgttttccagggcgattcttcaccatgctcagccttcgaattccactgtctgagtggggaatgcatccatagctcttggcggtgtgacggcggcccagactgcaaggataagagcgatgaggagaattgtgcagtcgccacctgcaggcctgacgaatttcagtgtagtgatgggaattgcatccatgggagccgccaatgtgaccgcgaatatgactgcaaagacatgagtgatgaagtaggttgtgtgaatgtgaccctttgtgaggggccgaacaagttcaagtgccattccggggaatgtattacactcgacaaggtctgtaacatggcccgggattgtagagattggtctgatgaaccaatcaaagagtgcggaaccaacgagtgtctggataataacggagggtgtagtcatgtctgcaacgatcttaaaatcgggtacgagtgcctgtgccctgacggcttccagctcgtcgctcagcggcgctgcgaagacatcgatgagtgccaggatcccgacacatgtagccaactctgcgtcaacctggaaggaggatataagtgccagtgtgaggagggcttccagctcgacccccacactaaggcgtgcaaggcagtgggctctatagcatacctgttcttcaccaaccgccatgaggtgcgcaagatgactctggacaggtctgaatatacatctttgattcctaatttgcgaaatgttgtggcccttgacactgaagttgcttccaatcgaatctattggtccgacctgtctcagcggatgatctgctcaactcagcttgacagagctcatggcgtgagcagctacgacactgtgataagtagggatatccaggctccagatggactggccgttgattggatccactcaaatatttactggaccgatagtgtccttgggaccgtcagtgtcgccgataccaaaggcgtgaaaagaaagacactgtttagggagaacgggagtaagccaagggcgatcgttgtggaccccgtgcacgggttcatgtactggacagattggggcactccagctaagatcaaaaagggagggctgaacggagtggacatctacagtctggtgaccgagaatattcagtggcctaatggcattacactggatttgttgtctggacgcttgtattgggtggattcaaaactgcattccatctctagcattgacgtcaacggtgggaataggaagacgattctggaggatgagaaacggctcgcccatcctttctcattggcagtatttgaggataaagtcttctggacagatatcataaatgaggcaatattctccgctaaccgactgactggctctgatgtgaatttgctggccgaaaatttgctgtcaccggaagacatggtcctgttccacaacttgactcaacctcgcggagtgaactggtgtgaacgcactacactcagtaatggcggttgccagtatctttgtctgcccgctccccaaataaatccacatagcccgaagttcacctgcgcatgcccagatgggatgctgctggcacgcgacatgaggtcctgccttacggaggctgaggcagctgtggcaactcaggaaacttctaccgtccgcctgaaggtgtcctccactgctgtacgcacccaacacacaacaacacgcccggtgccggatactagccgcctgccaggcgccactcctggtctcactaccgtcgaaatcgtgactatgtctcaccaggctcttggggacgtggccgggagaggcaacgaaaaaaagccttcaagcgttcgggccttgtccatagtcttgcctatcgtgctcttggtcttcctttgcctgggggtgttcctgctttggaaaaattggcgcctgaagaacattaacagcatcaattttgacaaccccgtataccagaaaaccaccgaagatgaggtgcacatctgccacaatcaggacggctattcatatccgtcccgacagatggtgagtctcgaggatgatgtggcc

SEQ ID NO: 10948 - DNA, 2580 bp, Artificial Sequence
  derived and/or modified sequence
atgggaccttggggatggaagctgagatggactgtggcgttgctgctggctgcggcgggcaccgccgtcggggaccgctgcgaacggaacgaattccaatgccaggatgggaagtgcatctcatacaagtgggtctgcgacggctcggcggagtgccaggatggttcggatgaaagccaagagacttgcctctcggtcacttgcaaatccggcgatttctcctgtggcggtcgagtgaaccggtgcatcccccagttctggaggtgtgatggccaagtggattgcgataatgggtcagacgaacaagggtgcccaccgaaaacctgttcgcaggacgaattccggtgccatgacggaaagtgcatctcccggcagttcgtgtgcgatagtgaccgcgattgtctcgacggcagcgatgaagcatcgtgccccgtgctcacttgcgggccagccagcttccagtgcaactcctccacctgcataccgcaactctgggcttgtgacaacgacccggactgcgaagatggatccgacgagtggccgcaaagatgtagaggcctgtacgtgttccaaggagattcatccccgtgctcggcattcgagttccactgtctgtccggagagtgcatccacagcagctggcgctgtgatggaggccctgattgtaaggacaagtctgatgaggagaactgtgcggtcgcgacctgtcgcccggatgaatttcagtgctctgacggcaactgcatccatggatcgcgccaatgcgaccgcgagtacgattgcaaagacatgagcgacgaagtcggatgcgtgaacgtcaccctctgcgaaggtcctaacaaattcaagtgccactcgggagagtgcattactcttgacaaagtctgcaacatggcacgcgactgccgcgactggtccgacgaacccatcaaggagtgcggcacgaatgaatgccttgacaacaacggaggctgttcacatgtgtgcaatgatctcaaaatcgggtatgagtgcttgtgcccggatggattccaactcgtggcccaaaggcggtgtgaggacatcgacgaatgccaggatcccgacacctgtagccagctgtgcgtgaatctcgaaggaggctacaaatgccagtgcgaagagggcttccaacttgatccgcatactaaggcctgcaaagccgtgggctcgatagcctacctgttctttaccaatcggcacgaagtgagaaagatgaccctggacagatccgaatacacttcgctgatcccgaacttgagaaatgtggtggccctggataccgaggtggcctcgaacagaatctactggtcggacctctcccagcggatgatctgctccactcaactggatcgcgcccacggagtcagctcctacgacactgtcatctcccgcgacatccaggcgccagacggactcgccgtcgactggatccattcgaacatctactggaccgattcggtgctgggcactgtgtcggtggcagacaccaagggagtgaaaaggaaaacgctgttcagagaaaatggctcgaagcctcgggccatcgtggtggatccggtgcacggcttcatgtactggactgattggggcactccggcaaaaatcaagaagggcggcctgaacggggtcgatatctacagcctcgtgactgaaaacattcagtggccgaatggaattactctcgatctcctgtcggggcgcctttactgggtggactctaaactgcatagcatctcttctatcgacgtgaacggaggaaatcgcaagactatcctggaagatgagaagaggctcgcccacccgtttagcctcgccgtgtttgaggacaaagtcttttggactgacattatcaacgaggctatcttctcggcaaacaggctgactggtagcgacgtgaatttgctggcagagaatttgctctcgccagaagatatggtgctgttccacaatctcacccagcccagaggagtaaactggtgtgagcggactactctgagcaatggtggatgccaatacctctgcctgccggctcctcagattaatccgcacagcccgaagtttacgtgtgcttgcccagatggaatgctcctggctagagacatgcgctcctgcctcacggaggcagaggccgccgtggcgacccaggaaacctccaccgtgcggctgaaagtgtcctcgaccgcggtgcgcacccagcacactactactcgcccagtgccggatacctcccggctccccggagcgacgccgggcttgaccaccgtcgagattgtgaccatgtcgcaccaagccctcggcgacgtcgcgggtcgcggaaatgaaaagaagccttcatcggtccgggccttgtcaatcgtcctgcctatcgtgcttctcgtgttcttgtgccttggcgtgttcctgctgtggaagaattggcgcctcaaaaacatcaactccatcaacttcgacaacccggtgtaccaaaaaaccactgaggacgaagtccacatctgccataaccaggatggatactcataccccagccgtcaaatggtgtccctggaggacgacgtggca

SEQ ID NO: 10949 - DNA, 2580 bp, Artificial Sequence
  derived and/or modified sequence
atgggtccatgggggtggaagctcaggtggacggttgcacttcttctcgcggccgcaggtaccgccgtgggggatagatgtgagcgcaacgaattccagtgccaagacggtaagtgtatctcatacaaatgggtgtgcgacgggagcgcagaatgccaggatggttccgatgaatcccaagaaacttgcctttcggtgacctgcaagagcggagatttttcatgcggaggcagggtgaaccgatgtatcccacaattctggagatgcgatggacaggtggattgtgataacggaagcgacgagcagggttgcccgcccaagacctgctctcaggacgagtttagatgtcatgacggaaagtgcatctcccgacaatttgtgtgcgattcggatagagactgcttggacggctcggatgaagcgtcatgcccagtgctcacctgtggccctgcatccttccagtgtaatagctccacctgcatccctcagctttgggcatgtgacaatgaccccgactgtgaagatggatcggacgaatggccacagagatgtaggggtctttacgtgtttcagggcgatagctccccgtgcagcgccttcgaattccattgcctgtcaggggaatgcatccactcctcctggaggtgtgatggggggcctgattgcaaagacaagtcagatgaggagaactgtgcagtggcaacttgtcggcctgatgagttccagtgcagcgatggcaactgtatccatggctcgagacagtgtgatcgcgaatacgactgcaaagacatgtccgatgaagtgggatgcgtgaatgtgaccctgtgtgaaggaccaaacaagttcaaatgccacagcggtgagtgcataactctggacaaggtctgtaacatggcacgagattgtcgcgattggtcggacgagcccattaaagaatgtggcactaacgagtgtctcgataacaatggaggatgctctcacgtctgtaacgatctgaaaattgggtacgaatgcctctgccccgatggctttcaacttgtggcacagcgccgctgtgaagatatcgatgaatgtcaagatcctgatacctgctcgcaactgtgtgtgaatcttgaagggggttacaagtgtcagtgtgaagagggtttccaacttgatccccatactaaggcctgcaaagcagtgggttccattgcgtatctctttttcactaatcgacatgaagtgcgaaagatgaccttggacagatcagaatacacttccctcatccctaatctgcgtaatgtggtggcactcgatactgaagttgcttcgaacaggatatactggtcggatcttagccaacgaatgatctgctccacccagctcgatcgtgcacacggagtgtcatcctacgacactgtcatttcgagagacattcaggctcccgatggtttggcagtagattggatccatagcaacatttactggactgacagcgtccttggtactgtgtctgttgcagataccaagggagtgaagcggaaaactctgtttagagaaaacggatcaaaacctcgagcaattgtggtggacccagtgcacgggtttatgtactggaccgactggggaactccggccaagattaagaaaggaggcctgaacggcgtcgacatttactcgctcgttacggagaacatccaatggcctaatggaattaccctggatttgttgtcgggacggctgtactgggtggatagtaagctgcactcgatttcgtcaattgatgttaatggcggcaatcgcaagaccattctggaagatgagaagagactggcccatcctttttcactggcagtttttgaggacaaggtcttttggactgatatcataaatgaggcaattttcagcgcaaatcgccttaccggctccgatgttaaccttcttgcagaaaaccttctgtcccctgaggatatggtgctttttcataacttgacccaacctcgcggcgtgaactggtgtgagcgcaccactctgtccaatggcggctgccaatacctttgtctgcccgcgccccagattaaccctcactctcctaagtttacttgcgcatgcccagatgggatgctgcttgcacgcgatatgcgtagctgtcttacggaagctgaggcagctgtggctacgcaagaaacgagcactgtgaggctcaaggtgtcgtcgacggcggtccgcactcagcatactacgacgcgacctgtgcccgacaccagccggcttccgggggcaactccagggctcaccactgtggaaatagtgactatgtcccaccaagccctgggggatgtggcagggcgcggaaacgagaagaagccttcgtcagtgagggcgcttagcatagtgctccccatagtcctgctggtctttctttgtctcggagtctttctcctgtggaaaaactggaggcttaagaatatcaactccataaactttgataatccagtctatcaaaagactaccgaagatgaggtgcatatatgtcataaccaggatggctactcttacccatcccgtcagatggtgtcgctggaggacgacgtggcc

SEQ ID NO: 10950 - DNA, 2580 bp, Artificial Sequence
  derived and/or modified sequence
atgggtccgtgggggtggaagctcaggtggaccgttgcattgctgctcgctgcagcagggactgcagtgggagatcgatgtgagcggaacgaattccagtgtcaagatgggaagtgcatatcctacaagtgggtctgcgatggttccgcagaatgtcaagatggttctgacgaaagccaggagacttgtctttctgtgacgtgtaaatctggtgatttctcttgcggtggtagggtcaataggtgtatcccccaattttggaggtgtgacggtcaggttgattgcgataacggcagtgatgagcaaggctgccctcctaaaacatgctcacaagatgaattcaggtgtcacgatggtaaatgtatttctagacagtttgtatgcgattcagaccgtgattgcttggatggcagtgatgaggcgtcatgcccagtgctcacatgtggtcctgcctcttttcagtgtaattcatcaacttgcatccctcaactctgggcatgtgataacgatccagattgcgaagatgggtctgatgagtggcctcagagatgtcgcggcctctacgtgttccagggtgattcctccccctgttccgcttttgaattccattgcctgtctggcgaatgtatccacagcagttggcggtgcgatgggggacccgattgtaaggataagtccgacgaggaaaactgcgcagtggctacctgtagacctgatgagttccaatgctcagatggtaactgtattcacggatcacgccagtgcgatcgagagtacgattgcaaggacatgtccgatgaagtcggttgtgtgaatgtcacactatgtgaaggtcccaacaaatttaagtgtcactcaggtgaatgtatcacattggataaggtctgtaatatggcacgggattgccgtgattggagcgacgagcccatcaaggaatgcggaacgaatgaatgcctcgataataatggtggatgttctcacgtttgtaacgacttgaagatagggtacgaatgtttatgtcccgatggtttccagctggttgctcaaagacgatgtgaagatattgatgagtgtcaagatccagacacttgttctcaattatgtgtcaacctcgagggagggtataaatgtcaatgtgaagagggctttcagctcgatccgcatactaaggcttgtaaggccgtggggagcattgcttatcttttctttaccaaccgtcacgaggttaggaagatgactcttgataggtctgagtatacatcgttaattcctaatcttcgtaatgtcgtggctttggataccgaggtggctagcaatagaatctattggtcagatctctctcagagaatgatttgttccacccaattggatagagcccatggcgtatctagctacgacacagtcatttcaagagatattcaagctccagatggcttagccgtagattggatacattcgaatatttattggactgattcagtactggggactgttagtgtggctgacacaaagggggtaaagcgtaagacattgttccgagagaatggttcaaagccacgcgccatagttgttgaccccgtgcacggttttatgtattggactgactggggtacccctgctaagataaaaaaaggtggtctgaacggagtagatatatactccttggtgactgaaaacatacagtggcctaatggaattactcttgatcttctaagtgggcgtctttattgggtggattcaaagctgcactcgatttcatctatcgatgtgaacggaggaaacaggaagaccattctggaagatgaaaaacggctggcacatcctttttctctggccgtctttgaggataaggtcttttggaccgatataatcaacgaagctatcttttcggcaaatcgacttacaggttcagacgtcaatcttctagctgaaaacctcttgagcccagaggatatggttttgtttcataacctaactcaacctcgcggagtcaattggtgtgagagaacaactctcagcaacgggggttgccaatatctttgtctgccagcacctcaaattaatccacattcaccaaagtttacctgtgcgtgcccggatgggatgcttctggcccgcgatatgaggtcttgtctgaccgaggctgaagcagctgttgctacgcaggagacatcaactgtgcgtctcaaagtgagttcaacagcggttaggactcagcatactacaaccagacccgttcctgatacaagccgactgcctggtgccactccgggactcacaacagtcgaaatagttaccatgagccatcaggccttgggtgatgttgctggtcgtggaaatgaaaaaaagccatcatccgttagagctctgtctatagttttgccgatagtgctccttgtttttttatgtcttggggtgttcctgctgtggaagaactggcgattgaagaacatcaactctataaactttgataaccctgtttatcaaaaaactactgaggatgaggtacatatttgccacaatcaggacggttactcgtatccgtcaaggcaaatggtgagcttggaagacgatgtggcc

SEQ ID NO: 10951 - DNA, 2580 bp, Artificial Sequence
  derived and/or modified sequence
atgggtccgtgggggtggaaattgcgttggaccgtcgcgttgctgctggcagcggccggaacggccgtgggagatcgctgcgaacggaacgaattccagtgtcaagacggaaagtgcatcagctacaaatgggtctgcgacgggtcagcagagtgccaggacggaagcgatgagtcccaggaaacctgcctgtcagtgacttgtaagtccggcgatttctcctgcggaggacgcgtgaatagatgcatccctcagttctggagatgcgacggtcaggttgactgcgataacggatccgacgagcagggatgcccccctaagacttgctcacaagatgagttcagatgtcatgatgggaagtgtatctcgcgccaattcgtgtgcgactccgaccgagattgtctggatggatcggacgaggccagctgccccgtgctcacttgtggcccggccagcttccagtgtaattcgagtacctgtatcccgcagctgtgggcatgtgataacgacccggattgtgaagatggaagcgacgaatggcctcaaagatgcagaggactgtacgtgttccagggcgattcctccccttgttcggctttcgagttccactgcctttcgggcgaatgtatccactcctcctggcgctgtgatggggggccggattgcaaagataagtcagacgaggagaactgtgctgtggctacttgccggccagatgaatttcagtgcagcgacggcaattgcatccacggaagccgccaatgcgatagagaatacgactgtaaggacatgagcgacgaggtcggttgcgtgaatgtgactctttgcgaaggaccgaataagtttaagtgtcattcgggtgaatgcattaccctggacaaagtgtgcaatatggctagggattgccgcgactggtccgatgagccgattaaggaatgcggaactaacgaatgcctggataacaacggaggatgctcgcacgtgtgcaacgacctgaagatcggatacgaatgtctgtgcccggatggattccagctcgtggcccagcgccgctgcgaggacatcgacgaatgccaagaccccgatacgtgttcacaactctgcgttaatctggaaggtggatacaagtgccagtgcgaagaaggtttccaactggatcctcacaccaaggcctgtaaagcagtgggatccatcgcctacttgttcttcacgaatcggcacgaagtcaggaagatgaccctggatcgcagcgagtacacttcgctgatccctaacctgcgtaacgtggtggccctcgacactgaggtggcatcgaaccgcatctactggtccgatctgtcacagcggatgatctgtagcactcagctcgaccgcgctcacggggtgtcgagctatgacactgtgatctcgcgcgacatccaggctcctgacggtctggctgtggattggatccattccaacatctactggacggattccgtgctgggcaccgtctccgtcgcagacaccaagggtgtgaaacggaaaaccttgttcagggagaatggatcaaagccgcgcgcgatcgtggttgacccagtgcatgggtttatgtactggactgattggggaactccagccaagatcaagaagggagggctgaacggagtggacatctactcgctggtgacggaaaacatccagtggccgaatgggatcactctcgacctgctgtctggccgattgtactgggtcgactccaagctgcattcgatcagcagcattgatgtaaacggcggaaatcgcaagaccatcctcgaggacgaaaagcgcctggcccatccattctctctcgcagtctttgaagataaagtattctggactgatatcattaacgaggcgatcttttcagctaaccgcctgaccggaagcgatgttaatctgctggcggaaaacctgctgtcgccggaggacatggtgctctttcataacctgactcagccacggggcgtgaattggtgcgaaagaactacgctgagcaacggagggtgccagtacctgtgcttgcccgctccccaaatcaacccacactcaccaaagttcacttgcgcctgcccggacggaatgttgctggcgcgcgatatgaggtcgtgcctgaccgaagcggaggcagccgtggcgacgcaggaaacctccactgtcagactcaaagtctcctcgactgcggtgagaactcagcacaccaccacccgcccagtgccggacacttccaggttgccgggcgccactccaggcttgaccaccgttgagatcgtgaccatgtcccatcaagccttgggagatgttgcgggcaggggaaatgaaaagaagccgtcgtcggtaagagccctctccatcgtgctgccaatcgtgctcctggtgttcctctgcctgggggtgttcctcctgtggaaaaactggcgcctgaagaacatcaacagtatcaacttcgacaacccagtctaccaaaagaccaccgaggacgaggtgcacatttgccacaaccaagacggttactcgtacccgagccggcaaatggtgtcattggaggatgatgtggcg

SEQ ID NO: 10952 - DNA, 2580 bp, Artificial Sequence
  derived and/or modified sequence
atgggtccgtggggctggaaattgcggtggacggtcgcattgctccttgctgccgccggaactgccgtgggagataggtgtgagcgcaacgagttccagtgccaggatggaaagtgcatctcgtacaagtgggtctgcgacggttccgcggagtgccaggacgggtcggacgagtctcaggaaacgtgcctctcagtgacgtgcaaatcgggggacttctcgtgcgggggtcgcgtgaaccggtgcatcccgcaattctggcgctgtgatggtcaggtcgactgcgacaatggttccgatgaacaaggctgcccgcctaagacctgctcgcaagatgagttccggtgtcacgatgggaagtgcatcagcagacagttcgtctgcgacagcgacagagactgcctcgacggtagcgatgaagccagctgtcctgtgctgacctgtggaccggcctccttccagtgcaactcgtccacctgtatccctcagctgtgggcgtgcgataatgaccctgattgcgaggacggctccgatgagtggccgcagcggtgccgcgggctgtacgtgttccaaggcgactcgtcgccatgttccgcctttgaattccattgcctgtctggcgaatgcattcatagcagctggcgctgcgacggcggaccggattgcaaggataaatccgacgaagaaaactgcgcggtggccacttgccggccggatgagtttcagtgttcggacggcaactgcatccacggatcgaggcagtgcgacagagaatacgactgcaaggatatgtcagacgaagtgggatgcgtgaacgtgactctctgtgaggggccgaataagtttaagtgccactcgggagaatgtatcaccctggataaagtgtgtaacatggctcgggactgcagagattggtccgacgagccgatcaaggagtgtgggaccaacgagtgcttggacaacaacggagggtgtagccacgtctgcaacgacctgaagattgggtacgagtgtctgtgtccggacggtttccagctggtggcacagcggcggtgcgaagatatagacgaatgtcaggacccggacacgtgctcccaactgtgtgtgaatctggagggaggatacaagtgtcagtgtgaggaaggattccagctggatccccataccaaggcctgtaaggcggtgggatccattgcgtacctgttcttcactaaccgtcatgaggtgcggaagatgaccctcgaccggtcggaatatacctccttgattccgaacttgcggaacgtggtcgccctggatactgaggtcgcctccaaccgcatctattggtcggatctctcacaaagaatgatctgttcgacccagctcgatagagcacacggagtatcgtcttacgacactgtgatcagccgcgacattcaggccccggatggactcgccgtggactggattcatagcaacatctactggaccgactccgtccttggaactgtgtccgtcgccgatactaaaggtgtgaaaagaaagacgttgttccgcgagaatgggagcaagccgcgggctattgtcgtggaccctgtgcacggattcatgtactggactgactggggcaccccagcgaagatcaagaagggaggactgaacggggtggacatatactctctggtgaccgaaaacatccagtggccgaatggaatcactctggacctgctttcgggccggctgtattgggtggatagcaaactgcactctatcagcagcatcgacgtgaacggcggaaacagaaaaacgatccttgaggacgaaaagcggctcgctcaccctttctcgctcgctgtgttcgaggacaaggtgttttggactgacattatcaatgaggcgatctttagcgcgaatcgcctgaccggttccgacgtgaatctgctcgctgaaaatctcctgtccccggaggacatggtgctgtttcataatctcacccaaccccggggagtgaactggtgtgaacgcacgactctctccaacggtggttgccagtacctgtgtctgcctgctcctcagatcaacccgcactcccctaaattcacttgtgcgtgcccagacggaatgctgctcgcgcgggacatgcgctcatgtctcactgaagcagaggcggcggttgcaactcaagaaacctcgactgtgagacttaaggtgtccagcactgcggtgagaacccaacatacgaccactcgaccagtgcctgatacctcccgcctgcccggcgcaaccccaggcctgacgactgtggaaatcgtgactatgtcgcaccaggcgctgggggatgtggcaggccgggggaacgagaagaaaccatcttcggtgcgcgcactgtcaatcgtcctcccaatcgtgcttctggtgttcctgtgcttgggagtgtttctgctgtggaagaattggaggctcaagaatatcaacagtattaacttcgacaacccagtctaccaaaaaaccactgaggacgaagtgcacatctgccacaaccaagacggatactcatacccatcccgccaaatggtttcccttgaagatgacgtggca

SEQ ID NO: 10953 - DNA, 2580 bp, Artificial Sequence
  derived and/or modified sequence
atgggaccctggggatggaagttaaggtggaccgtggctcttcttctggcagccgcaggcaccgccgtgggagatcgctgtgagcgtaacgagttccagtgtcaggacggtaaatgcatctcatacaagtgggtttgtgatgggtctgctgagtgtcaggacggatctgatgaatcccaggagacgtgtttaagcgtcacctgcaagtcaggagacttttcttgcggaggtagagtcaatcgctgcatccctcaattttggcgctgcgatggacaggtcgactgtgataacggtagcgacgagcaaggctgtcccccaaagacctgttcccaggacgaattcagatgtcatgacggtaaatgtatatcccgccagttcgtgtgcgatagcgaccgggattgcctggatggcagtgacgaggcctcttgtcctgtactgacatgcggaccagcctcctttcaatgcaactcgagcacttgtatcccacaattgtgggcttgtgacaatgatccggactgtgaagatggcagcgacgaatggccacagagatgcaggggactctacgtcttccagggtgactctagcccctgcagcgcttttgagtttcactgcttatccggcgaatgcatccactctagctggagatgcgacggcggtcccgattgcaaggacaaaagcgatgaggagaactgcgctgtcgcgacctgcaggcctgatgagtttcagtgctctgatgggaattgcattcacgggagcagacagtgcgacagagagtacgactgcaaagacatgtctgatgaagtgggatgcgtcaacgtgacattgtgtgagggaccaaataagttcaaatgccacagtggagagtgcataacacttgataaggtctgcaacatggccagagattgtagggactggtcagatgaaccaattaaagaatgcggcacaaacgagtgcttagataataacggcggatgctcccatgtgtgtaacgacctaaaaattggctacgagtgcctgtgtccggatggtttccagctggtggcgcagcgcagatgcgaagatatcgatgaatgtcaagatccagacacctgctcacagctgtgcgtgaacctggagggaggctataagtgccagtgcgaagaaggcttccaacttgatccacataccaaagcctgcaaagctgttggctcaatagcctacttattttttacaaacaggcatgaggttaggaagatgacgttagacaggagcgagtacacatctctgattccaaacctccggaacgtggtcgccttggacaccgaggtggcctcaaaccgaatctattggagcgatctctcacaacgaatgatttgtagtacccagctggatcgcgcccacggcgtgtcaagctatgatactgtgatcagtcgcgatattcaagcccctgatggtctggcggttgattggatccactctaatatatactggactgatagtgtattgggaaccgtaagcgtggcagacaccaaaggggtgaagaggaaaaccctgtttagggagaatggcagcaaaccgagggctattgtagtggatcccgtccacggcttcatgtactggacagactggggtacacctgccaagatcaaaaagggaggattgaatggggtcgatatctattccctggtcaccgagaacattcaatggcctaacggtatcacactggacctgctgtccggccgactttattgggtggactctaaacttcattccatcagttcgattgatgtgaacgggggcaacagaaaaaccattctggaagacgagaaacgactggcacaccctttttctctggccgtgtttgaagacaaagtgttctggacagatatcatcaatgaagcaattttttccgcaaacagactgacaggctccgacgtcaatctgctcgccgagaacctactcagcccagaagacatggtcctgtttcacaacctgacccagcctaggggggttaactggtgcgagcgcacgaccctctcaaacggaggctgccaatacctgtgccttcccgcaccccaaataaaccctcacagccctaaatttacctgcgcctgcccagatggcatgttgctggcgagggatatgcggtcatgcctgacagaagcagaagctgcagtggcaacacaagagacctccacggtccgcttaaaagtgagctccacggctgtccggacacagcacacaactacaaggcctgtccccgatacctcccgattgcccggagcaaccccaggactgaccacagtggaaatcgtgacaatgagtcaccaggccttgggagatgtcgcgggcagaggcaacgaaaagaaaccaagtagcgtgcgcgctctctcaattgtgctgcctatagtgctccttgtgtttctttgcctcggagtgtttctgctgtggaaaaattggaggttaaagaacattaatagtatcaattttgacaatccagtataccaaaagacgaccgaagacgaagtgcacatctgtcacaatcaagacgggtattcttacccttctaggcaaatggtcagcctggaggatgacgtggca

SEQ ID NO: 10954 - DNA, 2580 bp, Artificial Sequence
  derived and/or modified sequence
atgggcccttggggttggaagctccgatggactgttgccttgcttctggctgccgcgggtaccgccgtgggcgatcggtgcgaacgaaacgagttccagtgtcaggacggcaagtgtattagttataagtgggtttgcgatggctctgcagaatgtcaggatggttcggatgagtcgcaggagacttgcctgtccgttacctgcaaaagtggggacttcagttgtggcgggagggtcaatcgctgcattccccaattctggaggtgtgatggtcaggttgactgtgataacggaagcgatgagcagggatgcccaccgaagacctgttctcaagatgagtttcgttgtcacgatggaaagtgcatctcacgacagttcgtttgcgattcggatcgtgattgcttggacgggagcgatgaagcctcgtgccccgtactgacgtgcgggccagcttcttttcagtgcaactcctcaacatgtataccgcagttgtgggcctgcgacaacgatccagattgcgaagatggcagtgatgagtggccccagagatgtcgaggcctatacgttttccaaggtgactcaagtccgtgctctgctttcgagttccactgcttgtccggggagtgcattcatagctcgtggcgatgtgacggtggtccggactgtaaagacaagtccgatgaggagaattgcgctgttgccacatgtcgtcctgacgagttccaatgcagtgatgggaactgcatacatggttctcgacagtgtgatcgagaatatgattgcaaggatatgtccgacgaagttggctgtgtcaatgtcacgttgtgtgaaggtccgaacaagtttaagtgccactcgggcgagtgtataaccctggacaaagtctgcaacatggcccgtgactgtcgtgattggagtgacgagccaattaaggaatgcggaacaaatgagtgtctcgacaacaacggtggctgcagtcatgtgtgcaatgatcttaagataggatatgaatgcctatgcccagatggatttcagctggttgcgcagagaagatgtgaagacatagatgaatgccaagacccggatacgtgtagccagttgtgtgtgaaccttgaggggggctataagtgtcagtgtgaggagggattccagctcgatccccatacgaaggcctgcaaggcggttggatcgatagcctaccttttcttcaccaaccgccacgaggtgcgcaaaatgactttggataggtctgaatatactagcctcattccaaacttgcgcaacgtcgtagccctggacaccgaggtcgcctcgaatcggatctactggtctgacttgtcccagagaatgatctgcagcacgcagctagatcgggcccacggtgtctcgagttatgataccgtgatctcgcgcgacatacaggcacccgatggattggccgtcgattggatccactccaatatctactggacggattcggtgctgggtaccgtgagtgtggccgacaccaagggcgtgaagcggaagacactattccgagaaaatgggtccaagccacgcgccatcgtggttgaccctgttcacggttttatgtattggacggactggggtacgcctgccaaaattaaaaaaggagggttgaacggtgtggacatctattctctcgttacggagaatattcagtggccaaatggaataacactggacctcctgagtggtcgcctttactgggttgatagcaagctgcatagcataagcagtatcgatgtcaacggaggcaataggaaaactattctggaggatgaaaagcgcttggcgcatcctttctccctagcggtgtttgaagataaggttttttggactgacattatcaacgaagccattttttccgctaaccggctaactggctctgatgtaaacttgcttgcggagaacctcctgtcgcccgaagatatggttttgttccacaacctcacgcaacctaggggagtcaattggtgtgaacgaaccactctgtccaatgggggttgtcagtatctctgcctgccggctccgcagatcaacccacacagtcctaaatttacttgcgcctgtccagacggcatgctcctggcaagggatatgaggtcatgtctaaccgaagcggaagcggccgtcgctacccaggagacatcgacagtccggctaaaggtttctagcacagccgtgagaacccaacacactaccactcggccagtccctgacacttccaggctccccggtgctacccccggcctgaccactgttgagattgtcaccatgagccaccaagccctcggtgatgtggccggccgcggaaatgaaaagaagcctagctctgtccgcgcgcttagtatagtcttgcctattgtcttgttggtcttcctctgccttggcgtatttctgctttggaagaactggagactaaaaaacataaattcaattaactttgataatccagtctatcaaaaaacaactgaggacgaggtccatatctgtcacaatcaagacggctactcctacccttctcggcagatggtttcgttagaggatgacgtggct

SEQ ID NO: 10955 - DNA, 2580 bp, Artificial Sequence
  derived and/or modified sequence
atgggtccgtggggttggaaattacgatggacggtagcgctattactagcggcggcgggtacggcggtaggtgatcgatgtgaacgaaatgaatttcaatgtcaagatggtaaatgtatatcgtataaatgggtatgtgatggttcggcggaatgtcaagatggttcggatgaatcgcaagaaacgtgtttatcggtaacgtgtaaatcgggtgatttttcgtgtggtggtcgtgttaatcgttgtataccgcaattttggcgttgtgatggtcaagtagattgtgataatggttcggatgaacaaggttgtccgccgaaaacgtgttcgcaagatgaatttcgatgtcatgatggtaaatgtatatcgcgtcaatttgtatgtgattcggatcgtgattgtttagatggttcggatgaagcgtcgtgtccggtactaacgtgtggtccggcgtcgtttcaatgtaattcgtcgacgtgtataccgcaactatgggcgtgtgataatgatccggattgtgaagatggttcggatgaatggccgcaacgatgtcgtggtttatatgtttttcaaggtgattcgtcgccgtgttcggcgtttgaatttcattgtctatcgggtgaatgtatacattcgtcgtggcgatgtgatggtggtccggattgtaaagataaatcggatgaagaaaattgtgcggttgcgacgtgtcgaccggatgaatttcaatgttcggatggtaattgtatacatggttcgcgacaatgtgatcgtgaatatgattgtaaagatatgtcggatgaagttggttgtgttaatgtaacgttatgtgaaggtccgaataaatttaaatgtcattcgggtgaatgtataacgttagataaagtatgtaatatggcgcgagattgtcgtgattggtcggatgaaccgataaaagaatgtggtacgaatgaatgtctagataataatggtggttgttcgcatgtatgtaatgatctaaaaataggttatgaatgtttatgtccggatggttttcaattagttgcgcaacgtcgatgtgaagatatagatgaatgtcaagatccggatacgtgttcgcaactatgtgtaaatttagaaggtggttataaatgtcaatgtgaagaaggttttcaactagatccgcatacgaaagcgtgtaaagcggttggttcgatagcgtatttattttttacgaatcgacatgaagttcgtaaaatgacgttagatcgttcggaatatacgtcgctaataccgaatttacgaaatgttgtagcgttagatacggaagtagcgtcgaatcgtatatattggtcggatctatcgcaacgaatgatatgttcgacgcaattagatcgtgcgcatggtgtatcgtcgtatgatacggttatatcgcgtgatatacaagcgccggatggtttagcggtagattggatacattcgaatatatattggacggattcggtattaggtacggtatcggttgcggatacgaaaggtgtaaaacgtaaaacgttatttcgagaaaatggttcgaaaccgcgtgcgatagtagtagatccggttcatggttttatgtattggacggattggggtacgccggcgaaaataaaaaaaggtggtctaaatggtgttgatatatattcgttagtaacggaaaatatacaatggccgaatggtataacgttagatttactatcgggtcgtctatattgggttgattcgaaactacattcgatatcgtcgatagatgttaatggtggtaatcgtaaaacgatactagaagatgaaaaacgactagcgcatccgttttcgctagcggtatttgaagataaagtattttggacggatataataaatgaagcgatattttcggcgaatcgtttaacgggttcggatgttaatttattagcggaaaatttattatcgccggaagatatggtattatttcataatctaacgcaaccgcgaggtgtaaattggtgtgaacgtacgacgttatcgaatggtggttgtcaatatctatgtttaccggcgccgcaaataaatccgcattcgccgaaatttacgtgtgcgtgtccggatggtatgttactagcgcgtgatatgcgttcgtgtttaacggaagcggaagcggcggtagcgacgcaagaaacgtcgacggtacgtttaaaagtatcgtcgacggcggttcgtacgcaacatacgacgacgcgaccggtaccggatacgtcgcgattaccgggtgcgacgccgggtttaacgacggtagaaatagtaacgatgtcgcatcaagcgctaggtgatgtagcgggtcgtggtaatgaaaaaaaaccgtcgtcggtacgtgcgttatcgatagttttaccgatagtattattagtatttttatgtttaggtgtttttttactatggaaaaattggcgtctaaaaaatataaattcgataaattttgataatccggtatatcaaaaaacgacggaagatgaagtacatatatgtcataatcaagatggttattcgtatccgtcgcgtcaaatggtatcgttagaagatgatgttgcg

SEQ ID NO: 10956 - DNA, 2580 bp, Artificial Sequence
  derived and/or modified sequence
atgggcccatgggggtggaaactgagatggactgtggccctgctgctcgcagctgctgggaccgccgtgggcgacagatgcgaaaggaacgagttccagtgccaagatggaaaatgtataagctataaatgggtgtgtgatggctctgcagagtgccaggacggctctgacgagagccaggagacctgtctatctgttacctgcaaaagtggcgacttctcttgtggaggccgggtgaatcggtgtatcccacagttctggaggtgtgatggacaagttgactgtgataacggatctgatgagcaagggtgcccacctaaaacctgttctcaggacgagtttagatgccacgacgggaagtgtatatcacggcagtttgtatgcgacagcgacagagactgcctggatgggagtgatgaagccagctgccctgttctaacctgtggcccagcatctttccaatgcaattcctcaacttgcatacctcagttgtgggcttgtgacaacgacccagattgcgaagacggctccgacgaatggccacagcggtgtcgcgggctgtatgttttccagggcgacagttccccttgtagcgctttcgagttccactgtctgtccggggaatgtatccacagttcctggcgatgcgatggggggccagattgtaaggataaaagcgatgaagagaattgtgcagtcgcaacatgccgccctgacgagtttcagtgtagcgacgggaactgcattcatggatctcgacagtgcgatcgtgaatacgattgcaaggacatgagcgatgaggttggatgcgtgaacgtcactctgtgtgaaggtccaaataagttcaagtgccattctggcgaatgtatcaccctggataaggtgtgtaacatggccagagattgccgtgattggtccgacgagccgataaaggagtgtgggaccaacgaatgtttggataacaatggaggctgttctcatgtgtgcaacgatctgaagatagggtacgagtgtctgtgtccagatgggttccagttagttgcacagaggcgctgtgaagatatagatgagtgccaggaccctgacacatgttcacagctatgcgtgaatctcgaggggggatataagtgtcagtgtgaggagggcttccagctggacccacataccaaggcctgtaaagctgtgggcagcatcgcatacctattttttaccaaccggcacgaggttcgtaaaatgacactggaccgatctgagtatacttcactcattccaaatcttaggaatgtcgtggctctggacaccgaggtggcttcaaatcgcatctactggtccgacttgtcacagcgcatgatatgcagcacacagctcgacagagctcatggggtttcctcttacgataccgtgatcagccgggatatacaggccccagatgggctagctgtggattggatccattccaacatttactggaccgacagcgtgctgggcaccgtgagtgtggccgacacaaaaggcgtgaagaggaaaactctcttcagggaaaacgggtccaagcctagagcaattgtggtggatccagtccacggattcatgtattggactgattggggtactcctgctaaaattaagaagggtggactaaacggggtggacatatattccctagttacagagaacatacagtggccaaatggcataaccctggatctgcttagcgggagactgtattgggttgatagtaaactccattccatctctagtatagatgtaaacggcgggaataggaagactatcctagaggacgagaagaggctggcacatccattctcactggcagtctttgaggataaggtcttctggactgatataatcaacgaggctatctttagtgcaaacagactaaccggcagtgatgttaacctgctcgccgaaaacctgctctcccctgaagacatggtcctattccacaacttaacccagccccgcggggtgaactggtgtgaacggacaacactcagtaacgggggctgccagtatctgtgtctcccggccccacaaattaaccctcactctcctaagttcacctgcgcatgtccagatgggatgctcctggctagggatatgcgtagctgcctgacagaggccgaagctgcagtcgccacccaggaaacctccacagtgcggctcaaagtgagtagtacagccgtgagaacacaacacactaccactcggcctgtcccagacacctcccggcttcccggcgccaccccagggctgacaacagttgagatagtgacaatgagtcaccaggcccttggagacgttgccggacgaggcaacgagaagaagcctagcagtgtccgagcactcagtatagtcctgccaatcgttctgctggtgttcctatgtctaggcgtcttcctgctatggaagaattggcgcctgaaaaatattaacagcataaattttgacaaccctgtttatcagaagactacagaagatgaagttcatatctgccacaatcaggacggctatagctacccaagtagacagatggtgtcactagaggacgacgtcgcc

SEQ ID NO: 10957 - DNA, 2580 bp, Artificial Sequence
  derived and/or modified sequence
atgggtccgtgggggtggaagctgcgctggaccgtggccctgctgctggcggccgctggaactgctgtgggtgaccggtgcgaacgcaatgaattccaatgccaggacggaaaatgcatctcatacaagtgggtctgcgatgggtcagcggaatgccaagatggatcggacgaatcccaggagacgtgcctctctgtcacgtgcaagtcaggcgacttctcgtgtggcggacgggtcaatagatgcattccgcagttctggcgctgcgacggacaggtggattgcgacaacggttccgatgaacagggatgcccacctaagacgtgctcccaagatgaattcagatgtcacgatggaaaatgcattagccggcagttcgtgtgcgacagcgatagagattgcttggatggctccgacgaagcctcctgtcctgtgctgacctgtggccctgcctccttccagtgcaacagctctacttgcatcccacagctttgggcctgcgacaacgacccggattgcgaggacgggtcggacgagtggccgcaaaggtgccgggggctttacgtttttcaaggtgattcctcgccttgctcagcctttgagttccattgcttgtcaggagagtgcattcactcctcctggaggtgtgacggagggccggactgcaaagataagtcagacgaagaaaattgcgcagtcgcgacctgcagacctgatgaattccagtgctcagacggcaattgcatccacggatcgcggcaatgcgacagagagtacgactgcaaggacatgagcgacgaagtcggctgcgtgaacgtgaccctgtgtgaaggaccgaacaagttcaagtgccacagtggtgaatgtatcactctggacaaagtctgtaacatggcacgcgactgccgcgattggtcggatgagccaatcaaagagtgcggaaccaacgaatgcctggacaacaacggaggctgctcccacgtgtgcaacgacctgaagatcggttacgaatgcttgtgccccgatggattccaactcgtggcacagcgcagatgcgaggacatcgatgaatgccaagaccccgacacctgctcgcagctgtgcgtgaacctcgaaggggggtacaagtgccagtgtgaagaaggctttcagctggaccctcacactaaagcatgcaaagccgtgggatcaatcgcctacctcttcttcaccaatcgccatgaggtgcggaaaatgactctggaccggagcgaatacacctcactcattccgaatctcagaaatgtggtggccttggacaccgaggttgcctcaaacaggatctactggtctgacctgtctcaacggatgatctgctcgactcagttggaccgcgcgcacggtgtctcaagctacgacactgtcatcagtcgggacatccaggcgccggacggactggcggtcgactggatccattccaacatctattggactgactctgttctcggcactgtctccgtggctgacactaaaggagtgaaacggaaaaccctgttcagagagaacggctcgaagcccagagccattgtcgtggatccggtgcatggattcatgtactggaccgattggggcactcctgcgaagatcaagaagggaggactgaacggggtggatatctacagcctggtcaccgaaaacatccaatggccgaatgggattaccctggacctgctgtcagggagactgtactgggtggattcgaaacttcattccatcagctctatcgacgtgaacggcggcaaccgcaagacgatcttggaagatgaaaagcgcctggcccacccgttctccctcgccgtgttcgaggacaaggttttctggacggacatcattaatgaagcaatcttctcggctaacagactcaccgggagcgatgtgaacctcctcgcggagaacctcctgtctccggaagatatggtgctcttccacaacctgactcagccgcgcggagtgaactggtgtgagcgcactaccctttcgaacgggggctgccagtatctttgtctcccagccccccaaatcaatcctcacagcccgaagttcacttgcgcctgtcccgacggaatgctgcttgctagagatatgcgaagctgcctgactgaagcagaagccgcagtggccactcaggagactagcactgtgcgcctgaaggtgtcgtccactgccgtgcgcacccagcacacgactactcggccggtgccggatacgtcgagattgcctggcgccaccccgggtctgactactgtcgagatcgtgaccatgagccatcaggcgctgggagacgtcgctggtcgcggtaatgagaaaaagccaagctcggtgcgggctctgtcgatagttctcccaattgtgcttctggttttcctctgcctcggagtgttcttgctctggaagaactggaggctcaagaatatcaattccataaacttcgacaatcctgtttaccagaaaaccactgaagatgaggtccacatctgccataatcaggacggctattcgtacccgtcaagacaaatggtgtctctggaggatgatgtcgcc

SEQ ID NO: 10958 - DNA, 2580 bp, Artificial Sequence
  derived and/or modified sequence
atgggaccctggggctggaagctcagatggaccgtggccctgctcctggcagcggccgggaccgcagtgggtgatcgctgtgagagaaatgaatttcaatgccaggacggaaagtgtatctcgtacaaatgggtgtgtgacggaagcgctgagtgtcaggatggctcagacgaaagccaagaaacctgtctcagcgtcacctgtaagtcgggtgatttttcctgtggcgggcgcgtgaaccgatgcatacctcaattttggagatgtgatggacaggtggactgtgacaatggatcggatgagcaaggatgccctccaaagacttgttcccaagacgagttccgctgtcatgatggaaagtgtatttcccgacagtttgtctgcgactcagatcgggattgcctcgatggatcagacgaagcatcatgccctgtgcttacttgtggtcctgcatccttccaatgtaactcttccacgtgcattcctcagttgtgggcctgtgacaatgaccctgactgtgaggacggctcagacgagtggccacaacgctgtagagggctttacgtgtttcaaggtgactcgtccccctgctcagcctttgaatttcactgtcttagcggggaatgtatccattcatcctggcggtgcgacggaggtcctgactgtaaggataagtccgacgaggaaaactgcgcagtggccacctgcagaccggacgaatttcagtgttcagacggaaattgtattcacggttccaggcaatgtgatagggaatatgattgtaaggatatgtccgatgaagtcggctgtgtcaatgtcaccctttgtgaaggtccaaacaagttcaaatgtcattccggcgaatgtatcacccttgataaagtctgcaatatggcacgagactgtagagattggtcggacgaacccattaaagagtgtggaactaacgaatgcctcgacaataacggcggatgttcccacgtgtgcaacgacctgaagattggctatgagtgtctgtgtccggatggttttcaactcgtcgcgcagcgcagatgtgaggatatcgacgaatgtcaagatccggatacttgcagccaactgtgtgtcaacctggagggaggatacaagtgtcagtgcgaggaaggtttccaactggatccacacactaaggcttgtaaggcagtcggatcaattgcgtaccttttcttcaccaatcgccatgaagtgaggaagatgactttggaccgatcggaatacacctccctcatccctaatctgcggaatgtggtggcacttgatactgaagtggcgagtaacaggatatactggtccgacctctcgcagcggatgatatgcagcacccaactcgaccgggcacatggtgtgtcgtcgtacgatactgtgatatccagagacatccaagcgccggacggactcgccgtcgattggatccatagcaatatctactggaccgattctgtgctgggaacggtgtccgtggcagacacgaagggcgtgaagcgcaaaactcttttccgagagaatggcagcaagcctcgggcaatcgtggtcgaccctgtgcatggattcatgtactggactgactggggcactccagcaaagatcaaaaagggtggtcttaatggggtggatatctacagcctcgtgactgaaaacattcagtggcctaatggtataaccctcgacctcctttccggccgactgtactgggtcgactcgaagctgcacagcatctcctcaatcgatgtgaatggaggtaaccgtaagaccattcttgaggatgagaagcgactggcacacccttttagcctcgcagtattcgaagataaggtcttttggaccgacattatcaatgaagcaatcttttccgccaacaggctgaccggatcagacgtcaaccttcttgccgaaaacctcctgtccccagaggatatggtgctttttcataaccttactcaaccgcggggtgtgaattggtgtgagagaacgactttgtcaaacggcggttgccagtacctctgtctgccggcccctcagattaacccgcactcgccgaagtttacctgtgcatgtcctgatggcatgctcctcgcacgggatatgcgctcctgcctgaccgaagctgaagctgctgtggccacccaagagactagcactgtgaggcttaaggtttcgagcacggccgtccgcactcaacacactactactagaccggtgcctgatacgtcgcggcttccaggggcaacccccggtctgactactgtcgagattgtgactatgtcacatcaagcactgggcgatgtggcaggtcgtggcaacgaaaagaagccaagctcggtccgggcactctccatagtgctgccaattgtcctgcttgtgttcctttgccttggggtctttctgctgtggaaaaactggagattgaaaaacattaactctattaactttgataaccccgtttatcaaaagaccaccgaggatgaggtccacatttgtcacaaccaggatggttactcatacccctcacggcaaatggtgtcattggaggacgatgtggcc

SEQ ID NO: 10959 - DNA, 2580 bp, Artificial Sequence
  derived and/or modified sequence
atgggtccttgggggtggaagctgcgctggactgtcgccttgttgctcgccgcggcgggcactgccgtgggtgaccggtgtgagaggaacgagtttcagtgtcaagatggaaagtgcattagctacaaatgggtgtgcgatggatcagccgaatgtcaagacggatccgacgaatctcaggaaacttgtctctccgtcacgtgtaagtcgggagacttttcatgcggaggcagagtgaatcgatgtatacctcaattttggcgctgcgatggtcaggtggactgcgataatgggtccgatgaacaaggatgtccgcctaagacttgctcgcaagatgagttccggtgtcatgatggcaaatgtatttcaaggcaatttgtctgtgattcggacagggattgtctcgatgggtcggatgaagcaagctgtcccgtgttgacctgtggtcctgcatcgtttcagtgtaattcgtcaacgtgcattcctcaactgtgggcatgcgataatgatcctgactgtgaggatggatccgatgaatggccacagaggtgccgtggactgtatgtgttccaaggagattcctcaccttgctccgcattcgagtttcactgtctctcgggcgagtgtatccattcctcctggcgttgtgatggtggcccagactgcaaagataagtcagacgaagagaattgtgcagtggcaacttgtcgtcccgacgaatttcagtgtagcgacggtaactgtattcacggaagcagacagtgcgatcgcgagtacgattgcaaagacatgagcgatgaagtgggctgtgtgaacgtgactttgtgtgagggccctaacaagtttaagtgccattccggagaatgtattactcttgacaaggtctgtaatatggcgagagattgtcgcgactggtcggatgagcctattaaggaatgtggtaccaacgaatgtttggataacaacggtggttgttcgcatgtgtgcaacgacttgaaaattggatatgaatgcctttgtccggatgggtttcaactcgtggcccaaaggaggtgtgaagatattgatgagtgtcaggatcccgacacttgcagccagctttgcgtgaaccttgaaggggggtacaagtgccagtgtgaggaaggatttcaacttgacccacataccaaggcatgtaaagcagtgggttcaatagcttacttgttcttcaccaatcggcatgaagtgcggaagatgacgctggatcggtcagaatacacttcgctgattccaaatttgaggaatgtggtggcgcttgacactgaggtggcatctaatcggatctactggtccgacctgtcccagcggatgatctgctccactcagctggatagagcacatggtgtctcctcgtacgatactgttatctcacgggatattcaagcacctgatggacttgccgtggattggatacatagcaacatctattggaccgactcggtgctgggcacggtttcagtggcagacactaaaggggtgaagcggaaaactctgttccgtgaaaacggaagcaagcccagggcaatagtcgtcgatccggtgcacgggtttatgtactggaccgattgggggactccagcaaagattaagaaaggaggactcaatggcgtggacatctactccctggtgaccgaaaacatacaatggccaaacggaatcactcttgatctgcttagcggccgactgtactgggtcgattccaagctccacagcatttcttcgatcgacgtcaacggaggtaaccgcaaaaccatccttgaggacgaaaagagacttgcgcatcctttctcccttgcagtgtttgaagataaggtgttttggactgatatcattaacgaggctatcttttcagctaaccgcctgactggatcagatgtcaatctgctcgcggagaatttgctttcaccagaagatatggtcctgtttcacaaccttacccagcctagaggcgtgaactggtgcgagcgcactactctgagcaacggggggtgccaatacctgtgtttgcccgcacctcagatcaatccccacagcccgaaattcacttgcgcatgccctgatggaatgcttttggccagagatatgagaagctgtctgacggaagccgaggccgcagtcgcaactcaagaaactagcaccgttcgactgaaggtttcttccactgcagtgagaacccagcataccaccacccgaccggtgccagacacttcccgactgccgggtgccactccggggctcaccactgtggaaatcgtgaccatgtcgcaccaagcgctgggagacgtcgctggtagggggaacgaaaagaagccgtcgtcggtcagagcactgtcgattgtccttccaatagtgcttcttgtgttcctctgtctgggagtgttcttgctctggaagaactggagactgaagaacattaactcaattaactttgacaatcccgtgtaccagaaaaccaccgaagatgaagttcatatttgtcataaccaggatggatactcatacccatcccgccaaatggtgtcccttgaagatgacgtcgca

SEQ ID NO: 10960 - DNA, 2580 bp, Artificial Sequence
  derived and/or modified sequence
atgggaccttggggttggaaattgcgctggacagtggcgcttctgctggctgctgccggaacagcagttggagatcgatgtgaacgcaacgagtttcagtgtcaggatggcaagtgcatcagctataaatgggtgtgtgacgggtctgcagagtgtcaggacggctcagatgaatcacaggagacttgcctgtccgtgacatgtaaaagtggagacttctcatgtgggggtagagtcaatcggtgtatcccccagttttggagatgtgatgggcaggtcgattgcgataatgggtcagatgaacaaggctgcccccccaaaacctgttctcaggacgagtttcgatgtcatgacgggaaatgtatttcaagacagtttgtgtgtgactctgaccgagactgtttggacggatccgacgaggccagctgtccagtattaacctgcggccccgcttcatttcagtgcaactcaagtacgtgcatcccccaactatgggcctgtgacaatgacccagattgtgaagatggcagtgacgaatggccacagcggtgccgaggcctgtatgtcttccaaggcgatagttccccttgctcggcctttgagtttcactgtctatccggagaatgtatccactccagttggagatgtgatggaggccccgattgtaaagataagagtgacgaagagaactgtgcggtcgcaacatgccggccagacgagttccagtgctccgacgggaattgcatacacggatcacggcaatgcgacagagaatatgactgcaaggacatgagtgatgaggtaggctgcgtaaacgttaccctgtgtgaaggacccaataaattcaagtgtcatagcggggaatgcattacgctggacaaagtttgtaacatggcccgcgactgtcgtgattggtccgacgagcctataaaagaatgcggtaccaacgagtgcctcgacaataatggagggtgtagccatgtctgcaatgatctaaagattgggtacgagtgcctgtgtccagatggattccaactggtcgcccaacggaggtgcgaggatattgatgagtgtcaggacccagatacctgctcacagctctgtgttaatttggaaggtggctataaatgtcagtgcgaagaggggttccagttggatccccatacaaaggcctgcaaagcagtcggatccattgcctatctgtttttcactaatagacatgaggttcggaaaatgactctcgaccgtagcgaatacacctctctcatcccaaatctccgaaatgttgtagccctggacaccgaggtggcaagtaatcgtatctactggtccgatctgagccagcgaatgatctgcagcacccagcttgacagggcacatggcgtgtcctcatacgacactgtgattagccgagatatacaggcacctgatggtcttgcggtagactggatccattccaacatatattggacggactccgttttgggcacagtatccgtggccgatacaaagggagtaaaacgtaagacactctttcgggaaaacggatcaaaaccccgagcgatcgtggtggaccccgtgcacggatttatgtattggacggactggggcacccctgctaagattaagaagggcgggctgaatggggttgatatctattctctggtaacggagaatatccagtggccaaacggaataaccttggacttgcttagtggacgcctttactgggtggattctaaattgcactccatctcatcaatcgacgtgaatggaggcaatcggaagactattttggaggatgagaagcggctggcccatccgttttctttggctgtgttcgaggacaaggtgttttggacagacattattaacgaggccatttttagcgccaatcgcctaacgggtagtgacgtaaacctgctggcagagaatctgttatccccagaggatatggtcctgtttcataatttgacacaaccaagaggcgtgaactggtgcgaacggaccacactaagcaacggggggtgccaatacctgtgcctccctgcccctcagattaatcctcactctccaaagttcacctgtgcctgcccagacggaatgttgctggctcgagatatgaggtcttgtctaactgaggccgaagccgctgttgcgactcaggaaaccagtactgtccgcctgaaagtgagtagtactgcggtgcgtacacagcatacaacaacacgcccggttcccgatacctccagactgcccggggccacccctggcttgactactgttgaaatcgtcaccatgtcacatcaggccctcggtgacgtggctggccgcgggaatgaaaaaaagcctagttctgtgagagctttgagcattgtccttcctattgtgctgctggtttttctttgtttaggtgtgttcctgctgtggaagaattggcggcttaagaacataaatagcataaacttcgataaccccgtctaccagaagaccacagaagacgaagtacatatttgccacaaccaagacggatattcatacccttccaggcaaatggtctccctggaagacgacgtggcc

SEQ ID NO: 10961 - DNA, 2580 bp, Artificial Sequence
  derived and/or modified sequence
atggggccttggggatggaaacttaggtggactgtcgcgctgttgctcgctgcagctggaacagcggtgggagacagatgcgaaagaaatgaattccagtgccaggatgggaagtgcatcagttacaaatgggtgtgcgatggatcggccgagtgccaagatgggtctgatgaaagtcaggagacatgtctgtccgtgacttgtaaaagtggagattttagttgcggggggcgggtaaataggtgcatcccacagttctggaggtgtgacgggcaggtcgattgcgataatggaagtgatgagcaggggtgcccgcccaaaacttgttcccaggatgaatttcgatgtcatgatggaaaatgtatatctagacagtttgtgtgcgattccgaccgggattgcctggatggatcagacgaagcgtcctgtcccgtcttgacttgtgggcccgcgtcgtttcagtgtaactctagtacatgtatcccccagctctgggcatgtgataacgatccagactgcgaagacggatccgatgaatggccacagaggtgtaggggactctatgtgtttcagggggatagttctccttgctcagccttcgaattccattgcttatcaggagaatgtatacactcttcgtggaggtgtgacggagggccagattgtaaagataaatccgacgaagagaactgcgccgtagctacttgccgccccgatgaattccaatgctccgacgggaattgcatacacgggtctcgacagtgcgatcgggaatatgattgcaaggatatgtccgatgaggtcggatgtgtgaatgttactctgtgcgaagggcccaataaatttaaatgtcactccggggaatgtattacactcgataaggtctgcaacatggctcgcgattgtagggattggagtgatgaacccatcaaggaatgtgggactaacgaatgtctagataacaatggggggtgttcacacgtttgcaatgatcttaaaatcggatatgaatgtttatgtcccgatggattccagctcgtcgctcagcgacgctgcgaagacatagatgagtgtcaggatcctgatacttgctctcagctttgcgtaaatctcgaaggggggtataaatgtcagtgcgaagaggggttccagctggatccccatacaaaagcgtgcaaagcagtggggtcgatcgcctacctgttctttactaaccggcatgaagtcagaaagatgactctggatagatctgaatacacttctcttatccctaatctgagaaacgtcgtggctcttgatactgaagttgccagtaatcgaatctactggtccgatctttcccagaggatgatatgcagtactcagctggacagggcccatggggtatcttcttacgatacagtgattagtcgagatatccaggcacccgatgggctagcggttgattggattcactctaatatttattggactgattctgtcctgggaacagtttctgtggccgacacaaaaggggtgaaacgaaaaactctatttagggaaaatggatcgaagccacgggctatcgtggtcgaccccgtgcacgggtttatgtattggacagattggggaacacccgccaaaataaagaaaggagggctgaacggggttgatatatattccctcgtgactgaaaacatccagtggcctaacggaataactctggatctgttaagtggaagactctactgggttgactccaaactgcactccatatccagtatcgatgtcaatggagggaatagaaaaactattttagaagatgagaaaagactagcacatcccttctccctagccgtgtttgaagacaaagtcttctggactgacatcatcaacgaagctatcttttctgcaaaccgactcactgggagtgatgtaaacctcctagccgagaacttgctatccccagaagacatggttttattccataacctaactcagccaagaggggtaaattggtgcgaacgcacaactctctctaatggagggtgtcagtacctttgcttacccgctccacagatcaacccccattctcctaaattcacatgtgcctgtcctgatgggatgctgctcgcgcgcgatatgaggtcttgtcttactgaagcagaagctgcggtagctactcaggaaacatcgactgttagactcaaggtctcctccacggccgtccggacacagcacactacaacacggccagtacccgatacttccagacttcccggggccacaccagggctgactactgttgaaatagttacgatgtcccatcaggcccttggggatgtcgctggaagggggaacgaaaagaaaccctcaagtgtcagggcgctatctatcgtactacctatagtgctgttagtctttttatgtctgggggtgtttctgctgtggaaaaattggcggctaaaaaatataaattccattaattttgataaccctgtgtaccagaaaacaacagaagatgaagtccatatctgtcataatcaggatgggtattcatatccctcacgccagatggtgtctctggaggatgacgtggcc

SEQ ID NO: 10962 - DNA, 2580 bp, Artificial Sequence
  derived and/or modified sequence
atgggaccatggggctggaagctcagatggaccgtcgccttactgctggccgcagccggcacagcagtgggcgaccgctgcgagaggaatgaatttcagtgtcaggacggaaagtgtatctcgtacaaatgggtatgcgacgggtctgcagagtgccaggatggttcagatgagtcccaggaaacatgtttatccgtcacatgcaaatccggagacttctcatgtggcggccgtgtgaatcgctgcatacctcagttttggcgctgcgatggccaagtggactgtgacaatgggtctgatgagcaagggtgccctccgaagacgtgctctcaagatgagttcaggtgtcacgatggcaagtgcatctccaggcagttcgtgtgcgattccgaccgggattgtctggacggatccgacgaggcgtcttgcccagtgctaacctgtgggcccgcgtcattccagtgcaactcttccacctgcatccctcagctctgggcttgtgacaacgaccccgactgcgaggacgggagcgacgagtggcctcaacggtgcagaggattgtatgttttccagggggattcatccccttgctcagcttttgaattccattgcctctccggcgagtgcatccacagctcatggcgttgtgacgggggtcccgattgcaaagataaatcagacgaggagaattgtgccgtggctacctgcagacctgatgagttccagtgtagtgatggaaactgtattcacggaagcagacaatgtgatcgtgaatatgattgcaaggacatgagcgacgaggtaggatgtgtgaacgtgacgctctgcgaggggccaaataagttcaagtgccattccggagaatgtatcacactggacaaagtctgtaacatggcccgggactgtcgggactggagcgacgagcctattaaggagtgcggcaccaatgaatgtctggacaacaacggaggatgttcccacgtgtgtaatgaccttaagatcggatatgaatgcctgtgtccggacggtttccagttggtggctcagcgcaggtgtgaggacatagatgaatgtcaggatcccgatacttgcagccagttgtgtgtgaatctcgagggcgggtataaatgccaatgcgaagaagggttccagttagacccgcacacaaaagcttgtaaggccgtgggctctattgcatacctcttttttaccaacagacacgaggtaaggaagatgactctggacagaagtgaatacacctctctgatccccaacttgagaaacgtagtggccttggatacagaagttgcctcaaatcggatctactggagtgatctaagccagcggatgatctgctcgacgcagctagatagagcccatggcgtatccagctatgatactgtcatcagtcgagacatccaggccccagacgggctagccgtcgattggatccattccaatatctattggaccgatagcgtgttgggaacagttagcgttgccgacacaaaaggggtgaagaggaagaccctctttcgcgaaaatggttccaagccccgtgctatcgtcgtcgacccagtgcacggcttcatgtactggactgattgggggactccagccaagataaaaaaagggggcctgaatggagtggacatttacagcctcgttactgaaaacatccagtggccaaacgggattacactggatcttctgtcaggaaggctttattgggttgactcaaagctgcactctatcagttcaatcgatgtgaacggaggaaaccgaaagacaatcttagaagatgagaagaggctggcgcacccgttttccctggccgtgttcgaggacaaggtcttctggacagacatcatcaatgaagctattttctccgctaaccgcctgaccggatccgacgtcaatttgctggctgagaacctgttgtctccagaggacatggtactgtttcataatctaacccaacctcggggcgtcaattggtgcgaaaggactaccctaagtaacggaggctgtcagtatctgtgcctacccgctcctcagattaaccctcattctccgaaattcacctgcgcctgccctgatgggatgctgctcgcacgcgacatgcggagttgtctcacagaggccgaagccgcggtagctacccaagaaacatcaacagtgaggctgaaggtgtcttccaccgccgtgcgaacccaacatactacgactcgacccgttcccgacacatcccggctcccgggagcaaccccgggactgacaacagtggaaatcgtcactatgagtcaccaggcactgggcgacgtggctggacgcggcaatgagaagaaaccctcttccgtgagagccctgtccatagttttacctatcgtgctgttagttttcctctgccttggtgtgtttctcctgtggaagaactggcgcctaaaaaacatcaattccataaactttgataatcccgtgtaccagaaaactactgaggatgaagtgcacatctgccacaaccaggacgggtacagctacccgagccgccagatggtcagcctagaggacgacgtagca

SEQ ID NO: 10963 - DNA, 2580 bp, Artificial Sequence
  derived and/or modified sequence
atgggcccttgggggtggaagttgagatggacagtggcactcctcttggctgctgccggcacggccgtcggcgaccgctgtgaaaggaacgagttccaatgtcaagatgggaaatgcatctcatacaaatgggtgtgcgatggatctgcggagtgtcaagatggctccgatgagagccaggagacttgcctgagtgttacatgcaagtctggcgacttcagctgcggcggtagggtgaataggtgcatcccacaattctggaggtgtgatggccaggtcgactgcgataatggtagtgatgagcaggggtgtccacccaagacctgttcccaagacgagtttaggtgccacgacggcaaatgtatctctcgacagtttgtgtgcgactccgatcgggactgtctcgacgggtctgatgaggcctcttgccctgtgctgacctgtgggccagcttcttttcagtgtaactcgtccacctgcattccgcagctgtgggcatgcgataatgaccctgactgtgaggacggctctgatgagtggccccagcggtgtcggggactatacgtcttccagggtgattcttcaccttgtagcgccttcgagttccactgtctgtccggagaatgcattcactcctcctggaggtgtgacggaggccccgattgcaaggacaagtcagatgaggagaactgtgctgtggccacttgccgccctgatgaatttcagtgctctgatggtaattgtattcatgggtccaggcagtgcgatagggagtacgactgtaaagacatgagcgacgaagtcggctgcgtgaacgtgacactgtgcgaaggaccgaataagttcaagtgccactcaggcgagtgcattacattagataaggtttgtaatatggcccgcgattgccgcgactggtccgatgagccgatcaaagagtgcgggactaatgagtgcttggacaacaatggtggctgtagccacgtatgcaatgatcttaaaattggatatgaatgtttgtgtccagatgggttccaactggtcgcgcagaggagatgcgaggatatcgatgagtgtcaggatcccgacacctgtagtcagttatgcgttaacctggaaggtggctataagtgtcagtgtgaggagggctttcagttagatccgcacacgaaagcctgcaaagccgtcggaagcattgcctatctctttttcacaaatagacacgaagtgagaaagatgacgctagacaggtctgagtacacctcattgattcccaacctacgcaatgttgtggccctggataccgaagttgcctccaatcggatttactggagtgacttgtcacaacgaatgatatgttccacccagctcgacagagcgcacggcgtgagttcttatgacacggttatctcaagagacatccaggctcccgatgggctggctgtcgactggatccattcgaacatttactggaccgattcagtactggggactgtaagtgtggctgatacaaaaggagttaaacgcaaaaccttgtttcgggagaacggctcaaagcctcgcgctatagtggtggatcctgtgcacggattcatgtattggactgactgggggactcccgctaagattaaaaagggaggactgaatggagttgacatatatagtctggtcaccgaaaatattcaatggccaaatggaattactctggacctcctgtccggtcggttgtactgggtcgactccaagctacattccatctcatccatcgacgtgaatggaggcaatcgtaaaacaattttggaagacgagaaacggttggcacatcctttctcgctcgcggtttttgaggacaaagtgttctggacagacatcatcaacgaggcaatctttagcgccaatagacttaccggcagcgacgttaatcttttggccgagaatctactgtctccagaggatatggtgctatttcataatcttacccagccacgcggggtcaattggtgtgaaaggacaaccctgtccaatgggggatgtcagtacttgtgcctgccagcacctcaaatcaatcctcacagtcccaaattcacttgtgcttgtccagacgggatgctcctcgcaagggacatgcgcagctgcctgacagaagcagaagccgcagtcgccacccaggagacctccactgtgagacttaaagtaagtagcaccgccgtgcgcacccagcatacgaccacgcggcccgtccccgacaccagtaggctccccggcgctacgcctggactgaccaccgttgagatagtgaccatgtctcatcaggccttgggggacgttgccggaaggggtaatgagaagaagccttcatcagtccgcgccctgagcattgtgttaccaattgttctgctggtcttcttatgtctcggagtgttcctcctgtggaagaactggcggctgaaaaacataaattccattaacttcgataacccggtctaccagaagacaactgaggatgaggtgcatatctgccacaaccaagacggctacagttaccccagccgccagatggtgtctttggaagacgacgttgct

SEQ ID NO: 10964 - DNA, 2580 bp, Artificial Sequence
  derived and/or modified sequence
atgggcccctggggatggaagctgcggtggaccgtcgcgttactgcttgctgcagccgggactgcagtgggcgaccgatgtgaaagaaatgagttccagtgtcaggatggaaaatgcatcagctataagtgggtctgtgatggatccgctgaatgccaggacgggtccgatgagtcccaagaaacttgcctctcagtcacctgcaagagtggtgacttttcatgtgggggcagggtcaacagatgtatcccacagttctggaggtgcgacggccaggtggactgcgataatggcagtgacgagcagggatgcccccccaaaacttgctctcaagacgaatttaggtgccacgacgggaaatgcataagccggcagttcgtgtgtgatagcgaccgagactgtcttgacggatccgacgaggcatcttgccccgtcttgacatgtggacccgcctctttccagtgtaactcctccacatgtataccccaactgtgggcctgtgacaatgacccagattgcgaagacggttctgatgaatggccgcagcggtgcaggggactatacgtctttcagggagacagctctccatgcagcgcttttgaattccactgccttagtggcgagtgcattcattccagttggcgatgtgatgggggccctgattgcaaagacaaatcagacgaggagaactgcgccgtagcaacatgcaggcccgatgaattccagtgctccgatgggaactgcattcatggaagccgacagtgtgatcgtgaatacgattgtaaggatatgtctgacgaggtgggttgcgtgaacgtgactctatgcgagggccctaataagtttaagtgccattccggagaatgtattactttagacaaggtttgtaatatggcgcgcgattgcagggactggtcggacgagccaatcaaagaatgtggcactaatgaatgcctcgataataatgggggatgctcccatgtgtgtaacgacctgaaaatcggatatgaatgtctgtgccccgatggattccagctggtcgcccaaaggagatgcgaggacattgacgaatgtcaagaccctgacacctgttcccagctctgtgtcaatcttgagggcggctacaagtgccagtgcgaggaaggcttccagcttgaccctcatacaaaagcatgcaaagctgttggaagtatagcatacctgttttttacaaatcgacacgaggtaaggaagatgaccctcgaccgatccgagtatacctctctgattccaaacctgaggaacgtcgtagccttggataccgaagttgcgagtaataggatctattggagcgacctctcacagaggatgatttgctcaactcagcttgacagggctcacggcgtcagcagttatgacacagtgataagcagggatatccaggcaccggacggtttggccgtggactggattcatagcaatatttattggacagactctgtgctgggaacagtttctgtggccgatacaaagggcgtgaagcgcaaaacccttttccgagagaacggctcaaagccaagagccattgtggtggaccctgttcacgggtttatgtactggacggactgggggacccccgctaagattaagaagggaggcctcaacggggtggatatctattctctggtgacagaaaacatacagtggcccaacggaatcaccctggacttgctcagtgggaggctgtattgggttgattccaaactccatagcattagttctatcgacgtcaacggagggaatcgaaaaacaatcttggaagacgaaaagagactagctcatcccttttccctggccgtcttcgaggataaggtgttctggactgacattatcaatgaggccatattttccgcgaatcgattgaccggtagtgatgtcaacctcctcgccgaaaacctcctatctccagaagacatggttctatttcataatttgacgcagccccggggggttaattggtgcgagcggactaccctgtccaacggtggatgtcagtatctgtgcttacccgctccccagatcaatccacacagcccaaagttcacctgcgcgtgtccagatggtatgctactggccagggacatgagatcttgccttactgaggccgaagctgcggtggctacgcaggaaacatccaccgtgaggctgaaggtctcgtcaacagccgtgcgaacacaacataccacgaccaggcctgtgcccgacacatcaagactgccaggtgcaacccccggactgacaaccgtggaaattgtaaccatgagtcatcaggccctcggcgacgtggccggacgaggaaacgaaaagaagccctcctctgttcgggccctttctatagtgctgcccattgtcctgctggtgtttctctgcttaggagtatttctcctctggaagaattggagacttaaaaatataaactcaatcaatttcgataaccccgtttatcagaagacgaccgaagatgaggtgcatatttgccacaatcaggacggctattcgtacccctcaaggcagatggtctccctggaggacgatgtcgcc

SEQ ID NO: 10965 - DNA, 2580 bp, Artificial Sequence
  derived and/or modified sequence
atggggccttggggttggaagctgcggtggacagttgcactgctgctggccgctgctggaacggctgtgggagacagatgtgagcgtaatgagttccagtgccaggatggaaagtgcatcagctacaagtgggtgtgcgacggctctgcagaatgccaagatggaagcgatgagtcacaggaaacttgcctctccgtaacatgcaagtcaggtgatttttcctgtggcggccgagtcaatcggtgtatcccccagttctggcgatgcgacggccaagtggattgtgacaatggctctgatgagcaaggctgccccccaaaaacctgcagtcaggatgagtttcgatgccatgacgggaagtgcattagtagacagttcgtgtgcgactccgatcgggattgtcttgatggcagcgatgaagcctcctgcccggtcttaacctgtggccctgcctcattccagtgtaactccagcacgtgcattccccagctgtgggcatgtgataacgacccagattgcgaagacggatctgatgagtggccccagcggtgtcgggggctctacgtgtttcaaggggattcatcaccatgcagcgccttcgagttccattgcctgagtggtgaatgtatccactcctcgtggcgctgtgatggtggtcctgattgtaaggacaagagcgatgaggaaaactgcgccgtggctacctgtaggcccgatgagttccagtgcagtgatggcaattgcatccacggcagcagacagtgcgaccgggagtatgactgcaaagatatgtctgatgaggtgggatgtgttaacgtcaccctctgcgagggtcccaacaaattcaaatgtcacagtggcgagtgcatcaccctggataaggtgtgcaacatggcccgtgactgccgcgattggagcgacgagccaattaaggaatgtggaacaaatgagtgtctggacaataacgggggatgctctcacgtgtgcaacgacttgaagattggttatgaatgtttgtgtccggatgggttccaacttgtagcccaaagaaggtgtgaagacatcgatgaatgccaagatccggatacgtgttcccagctgtgtgttaatcttgagggaggttataagtgccagtgcgaggaagggttccagctcgacccacacaccaaagcatgcaaagccgtcggcagtatcgcatacctgtttttcactaaccgccacgaggtgcggaaaatgacccttgacaggagcgagtacacctccctgattccaaacctcagaaatgtagtcgctctggacactgaggtcgcatccaatcgcatctactggtcagacctcagccagagaatgatatgtagcactcagctggaccgagcacacggagtctcctcttacgacaccgtgatcagtagagatattcaggcacctgacggtctggccgtggattggatccattcaaatatttactggaccgactccgtgctcggtacagtgtcggtcgcggacaccaagggagttaagcgtaaaacgctttttcgggagaacgggtccaaaccccgcgcaattgtcgtggacccggttcacggattcatgtattggaccgattggggcactcctgcaaaaattaaaaaagggggtctgaacggagtcgacatatattcacttgtgaccgagaacattcaatggccaaatggtattactctcgatctgcttagcggccgcctctattgggtggactcaaagctgcattctatcagtagcatcgatgttaatggcggaaatcgcaagacaatactggaggatgagaaaaggctggcacatccattttctctcgctgtttttgaggacaaagtgttctggaccgatatcatcaatgaggccatcttctccgccaaccgcttaaccgggtccgacgtaaacttgctggcggaaaatctgctgtcaccagaagacatggtacttttccacaatctgacgcagccccgcggtgttaattggtgtgagcgtaccaccctgagtaatggaggctgccagtatctatgcctcccagcgccccagattaatccacactctccaaaattcacatgtgcttgtcccgacgggatgctcctggccagagacatgcggagctgtctcaccgaggcagaagccgccgtcgctactcaggaaacgagcacagttaggcttaaggtctcctccacagccgtgaggacccagcacacgacaactcgccctgtgcccgatacatcgcgcttacctggcgcaacccccggcctcaccacggtggaaatcgtcacaatgagccaccaggcactgggtgacgtagcaggtcgaggaaacgagaagaagcctagcagcgtgagggcactgtcgattgtcctccctattgtcctgctcgtcttcttgtgtctgggagttttcctgctctggaagaactggaggctgaagaacattaatagtataaacttcgacaaccctgtttatcagaagaccacagaggatgaggtgcacatctgccacaaccaagacgggtattcttacccgtcacgccaaatggtctcactcgaagatgatgttgct

SEQ ID NO: 10966 - DNA, 2580 bp, Artificial Sequence
  derived and/or modified sequence
atgggtccctggggttggaagttgcggtggactgtcgcactgctcctcgccgcggcagggaccgccgtgggagatagatgtgagagaaacgaatttcagtgtcaagatgggaagtgtatctcatacaaatgggtctgcgatggatcggcagagtgccaggatggttcagatgaatcccaagaaacctgtctgagcgtcacttgtaagtcgggagacttttcgtgtgggggaagggtgaataggtgcattccccaattctggcgttgtgatgggcaggtcgactgcgacaacgggtcggatgaacaaggttgcccacctaagacgtgttcgcaagatgagttcagatgccacgacggaaaatgtattagccgtcagtttgtttgtgattcggacagagactgtctggatggatctgacgaggcctcctgtcctgtgcttacttgtggacctgctagcttccaatgtaatagcagcacttgtattccgcagctttgggcatgcgacaacgaccctgactgtgaggatggttccgacgagtggccacagcggtgtagaggactctatgtgtttcaaggcgactcgtcgccttgctcggcatttgagtttcactgtttgtccggggaatgtatccactcctcgtggagatgcgatggaggtccggattgtaaggataagagcgatgaggaaaactgtgctgtcgcaacttgtcgacctgatgagtttcaatgttccgatggaaactgtatacacggctcaagacagtgcgaccgagaatatgattgtaaggacatgtcagacgaagtcggatgcgtcaacgtgaccctttgcgaaggaccaaacaaattcaaatgccattcaggagaatgtatcaccctggacaaggtctgtaacatggcgcgggattgtagagactggtcagatgagcccattaaggagtgtggcacgaacgaatgtttggacaataatggtgggtgcagccatgtgtgtaatgatctgaaaattgggtacgaatgcctttgtccagatggattccaactggtggcgcaaagacgttgtgaagatatcgacgaatgccaagatccggacacttgttcacagctgtgtgtgaatttggaaggcggctacaagtgtcagtgcgaggagggatttcaacttgatccccatacgaaggcatgcaaggcagtgggttccatagcatacctgttctttacgaacaggcatgaagttaggaagatgaccctggacaggtcagagtacacctctctcatcccaaaccttcgaaatgtggtggcacttgacaccgaagtggcctcgaatcgaatttactggtcggacctttcgcaaagaatgatctgtagcactcagctcgatagagcacacggagtctcgtcgtacgatactgttatctcgcgtgatattcaagcaccagatggtctggcagtggactggatacatagcaacatttactggaccgattcggtgctgggaaccgtctcagtggccgatactaagggtgtcaagagaaagaccctgttccgggaaaatggttcgaaaccgcgcgcaattgtggtggatcccgtgcatggctttatgtactggactgactggggtactccagccaagatcaaaaagggtggtctgaatggcgtggacatatactccctggtgacggagaatatacaatggcctaacgggatcaccttggacttgctttcgggtcggttgtactgggtggattctaagttgcactccatttcatctatcgatgttaacggaggaaaccggaaaacgattcttgaagatgaaaagcgactcgcgcatcctttttccctcgcggtgtttgaagataaggtgttttggaccgacattatcaacgaagctatcttttcggcgaacaggcttaccggctcagacgtgaaccttctggccgagaatcttctctcccccgaggacatggtcctgtttcacaacctgacccagccgcggggagtcaattggtgtgaaaggaccaccctttccaacggtggttgccaatacctttgcctgcctgcacctcagattaacccccatagccccaagttcacgtgcgcctgccctgacggaatgctcttggcaagagacatgcggtcctgtctcactgaagcagaggctgcagttgcgactcaggaaacctcaaccgtgagactgaaagtgagctccactgccgtccggacccaacataccaccacgcgcccagtgcctgatacctctcgcctgcctggtgccactcctggccttactacggtcgaaattgttactatgtcccatcaggccctcggggatgtggcaggtcgtggcaacgaaaagaagccatcctccgtgcgagcattgtccatagtgctgcctattgtgctgcttgtttttctctgccttggagtgttcctcttgtggaaaaactggcggctgaaaaacattaactctatcaacttcgataatcccgtgtaccaaaagaccactgaagatgaagtccatatatgccataatcaagatgggtactcgtacccaagcagacaaatggtgagccttgaggatgacgtcgca

SEQ ID NO: 10967 - DNA, 2580 bp, Artificial Sequence
  derived and/or modified sequence
atgggcccctgggggtggaagctccgatggaccgtggccctactgctggcggccgcaggaacggcagtgggtgatcggtgtgagcggaacgaattccagtgtcaggacggcaaatgcatctcgtataaatgggtttgcgacggcagtgcagaatgccaggacggctcagacgagtctcaggagacctgtctttcagtgacttgcaaaagcggggactttagttgcggcggacgtgtcaacaggtgcattccacagttttggcgctgcgatggtcaggttgactgcgacaacgggtctgacgaacaggggtgcccccctaagacgtgttcgcaggacgagttccggtgtcacgacggaaagtgtatctcccggcagtttgtgtgtgactctgatcgggactgtctagacgggtccgacgaagcatcctgtccagtgcttacttgcggtccagcctcatttcaatgcaactcctctacctgtataccccagttatgggcttgcgacaacgatcctgactgcgaggacggctccgacgagtggccacagcgctgcagggggctttacgtattccagggagattcaagtccatgttccgcgttcgaatttcattgtcttagcggggaatgcattcactcctcatggagatgtgacggcggccccgattgcaaggataagtctgacgaagagaattgcgccgtggcaacatgcaggcctgatgaattccagtgctccgatggaaattgcatacatggcagccggcagtgtgatcgggagtatgactgcaaagacatgtctgacgaagttggatgcgtgaatgtgacgctatgtgagggcccgaacaagttcaaatgtcacagcggagagtgtataaccctcgacaaagtttgtaatatggccagggactgccgtgattggtctgatgagccaatcaaggagtgtgggacgaacgagtgcctggacaataacggtggttgttcacacgtgtgtaacgatctcaaaatcggttacgagtgtctgtgtccagacggcttccagctagtggctcagcggcgttgcgaagacatcgacgaatgtcaagatccggacacgtgttctcaactatgtgtgaatctcgagggagggtataagtgtcagtgcgaagagggttttcagcttgacccgcatacaaaggcctgcaaagctgtaggatctatagcttaccttttcttcactaatcgccatgaggtgcgcaaaatgacccttgacaggagtgagtacacatccctcattcccaacctgagaaacgttgtggcactggacacagaggtggcaagcaacagaatatactggtctgacctctctcagcgcatgatctgcagcacgcaacttgatagagctcacggagtgtcatcttatgacacagtgataagccgggacatccaggccccagacgggttagccgtggattggatccactctaatatctactggacggactctgttcttggcacagtcagcgtcgctgatactaaaggtgttaagagaaaaaccttgtttcgggaaaacgggtcgaaacctcgcgccatcgtggtcgatccagtgcacggttttatgtactggactgattggggaaccccagccaaaattaaaaaagggggcctcaatggggtcgacatctacagtttggtcaccgagaacatccagtggcctaacggtattacgcttgacctccttagcggcagattgtactgggtagattccaagttacatagcatcagcagtatcgacgtaaatggtggaaatcgtaaaacgattctggaggacgaaaaaagactggctcatcccttttctctagctgtctttgaggacaaggttttctggaccgatatcattaacgaggccatcttttcagccaacagactcacgggttccgacgtcaacttactagcagagaacctgttgagcccagaggacatggtgctgtttcacaatcttacacagcctagaggggttaattggtgcgagaggaccaccctgtccaatgggggctgtcagtatctctgcctgccagccccccagatcaacccccactcccctaagttcacatgcgcatgtcctgatggtatgctgctggcccgtgatatgcgctcgtgcctgacagaggccgaagctgccgttgccacgcaggagacatctaccgttaggctcaaggtctctagcaccgccgtgcgaacccagcatactactacacgacctgtgccagatacatcacgacttcctggggcgacccctggcctgaccacggtcgagattgtcaccatgagtcaccaagccctgggagatgtagctgggcgcggtaacgaaaagaagccttccagtgttcgcgccttgtcaatcgtgttgcctatagtcctcctcgttttcctgtgcttgggcgttttcctgctgtggaaaaattggcgactcaaaaatattaactctatcaatttcgacaaccctgtgtaccagaaaacaactgaagatgaagtgcacatctgccacaatcaggacgggtacagctaccctagccgacaaatggtaagcttggaggacgacgtggct

SEQ ID NO: 10968 - DNA, 2580 bp, Artificial Sequence
  derived and/or modified sequence
atgggaccgtggggatggaagctcagatggaccgtcgcgctgctccttgccgcagcgggaaccgccgtgggcgaccggtgcgagcgtaatgagttccagtgtcaagacggtaagtgtatcagttacaaatgggtgtgcgacgggtcggctgagtgccaggatgggtcagacgagtcccaggagacgtgcctgtccgtgacctgcaaaagcggagatttttcgtgcggtgggagagtgaacaggtgcataccgcaattctggcggtgcgacggacaagttgattgcgacaacggctcagatgaacagggatgtccgcctaagacgtgctcacaagacgagttccggtgtcatgacggaaagtgcatctcgaggcaattcgtgtgtgactcagatagggactgcctcgacggctcggatgaagcgtcgtgcccagtgctgacttgtggcccggcctcgtttcagtgcaactcgtctacttgcataccccagctttgggcatgcgacaacgacccggattgcgaggatggatcggatgagtggcctcagagatgccggggactttacgtgttccagggcgactcatccccatgctcggccttcgagttccattgtctgtctggagaatgcatccactcttcgtggcgatgcgatgggggaccggattgtaaggacaaaagcgacgaggagaattgcgcggtcgcgacttgccggccggacgagttccaatgctcggacggaaattgcatccatggctcccgccagtgtgaccgcgagtacgattgcaaggacatgagcgatgaagtgggatgcgtgaacgtcaccctgtgcgaaggcccgaacaaattcaaatgccactccggagaatgtatcaccctggataaagtgtgcaacatggcgcgcgactgcagagattggtctgatgaaccaatcaaggaatgcggcaccaatgagtgcctggataataacggtggatgctcccatgtgtgtaatgacctgaagatcgggtatgaatgtctctgtcctgatggctttcaactggtggcccaacggaggtgtgaagatatcgacgaatgccaggacccagatacttgcagccagttgtgtgtcaatctggaaggaggatacaagtgccagtgcgaagaaggattccaactggacccacacacgaaggcatgtaaggccgtcgggtcgatcgcctacctgttttttaccaaccgacatgaagtgcggaagatgacccttgaccggagcgaatacacctcgctgatccccaatcttcggaatgtggtggccttggatacggaagttgcctcaaaccggatctactggtcagacctctcacagcggatgatctgcagcacccagctcgaccgcgcgcacggcgtctccagctacgatactgtgatctcgcgcgacatacaggctccggacggactggccgtcgattggattcattcgaatatctactggactgactcagtgctgggaacggtttccgtggccgatacgaagggtgtcaagagaaaaaccctctttcgggagaatggctcgaaaccgcgggccattgtcgtggatccggtgcatggtttcatgtactggacggactggggcacccctgcaaagatcaaaaaaggcggactcaatggagtggatatctactcgttggtgacggaaaacatccagtggccgaacggaatcaccctggacctgctttccgggaggctgtactgggtcgatagcaaactgcattcaatctcatcgattgacgtgaacggagggaaccggaagactatcctcgaagatgaaaagcgcctggcccacccgttctcgctcgccgtgtttgaggacaaagtgttctggaccgacatcattaacgaggcaatcttctcagctaatcggctgactggatcggacgtgaatctcttggcagagaacctgttgtccccagaggacatggtgctgttccacaatctcacgcaaccgcgcggcgtgaactggtgcgaacggaccactctgtcaaatggaggctgtcaatatctttgcctgcctgccccgcagattaacccacattccccgaagttcacttgcgcatgtccggacggtatgctcctggcccgggacatgaggtcctgcctgacggaggctgaggccgccgtcgcgacccaagaaacctcaaccgtgcgcctgaaggtgagcagcaccgcggtccgcactcagcacacgactaccagacccgttcctgatacttcccgcctcccaggagctactccgggcctcaccaccgtcgaaatcgtcaccatgtcccaccaggctctgggagacgtcgcaggacgaggaaatgaaaagaagccatcgtccgtgagggcacttagcatcgtcctgcccatcgtcctgctggtgtttctgtgcctcggagtgtttctgctctggaagaactggcgcctgaagaacatcaatagtataaactttgacaacccggtctaccagaagaccactgaagacgaagtgcacatctgccacaatcaggacggatacagctacccatcgcggcagatggtgtccctcgaggacgacgtggcc

SEQ ID NO: 10969 - DNA, 2580 bp, Artificial Sequence
  derived and/or modified sequence
atgggaccttggggatggaagctgcgctggactgtggccctcctgcttgcagcggccggcaccgccgtaggggatagatgcgagcgcaacgaattccagtgtcaggacggcaagtgtatttcgtacaagtgggtgtgcgatggaagtgccgaatgtcaggatggatccgacgaatcacaagaaacttgtctgagcgtgacttgtaagagcggcgacttctcgtgtggcggacgagtgaaccgatgcatccctcaattttggagatgtgacggccaagtggactgcgataacggaagcgacgagcaaggttgtccgcctaaaacctgtagtcaagatgagtttcgttgccatgacggcaagtgcattagcaggcaatttgtgtgtgactcggatcgagactgtctcgatggttcggatgaggctagctgcccagtgcttacctgcggaccggccagctttcagtgtaactcctccacttgtattccccaactttgggcatgtgataacgatcccgattgcgaggacgggtcggacgagtggccacagcgatgcagaggactttacgtctttcagggagactcatcgccctgtagcgcatttgaatttcattgtttgagcggtgaatgtatccactcctcctggcgctgcgacggcggtccggactgtaaagataagtcggatgaagagaactgtgccgtcgcaacttgtcgccccgacgaattccaatgctccgacggtaattgtattcatggctcgcgacaatgcgatcgggagtatgattgtaaggatatgtccgacgaagttggatgtgtgaacgtgactctgtgcgagggacctaataagtttaagtgtcactcaggagaatgtataaccttggataaggtttgtaacatggcacgtgactgcagagattggtcggacgaacccataaaggaatgtgggactaacgaatgcctggacaacaacggaggctgctcccatgtgtgtaatgacctgaagatagggtacgagtgcttgtgtccggatggttttcagcttgtggcacagcgccgttgtgaagatattgatgaatgtcaagatccagacacttgttcgcaactctgtgttaaccttgaaggtggctacaagtgccagtgcgaagaaggcttccagctggatcctcataccaaggcgtgcaaggctgtgggcagcattgcatatctgttctttactaatcggcatgaagtccgcaaaatgactctggatcgatcggaatacacctccctgatacctaacttgcgcaatgtcgtggccctggataccgaggtggcgtcgaaccgcatttactggtcggacctgtcccaacgcatgatctgctcgacccagttggaccgagcgcatggtgtctcctcatacgacacggtcatctcgcgtgacatccaagcccccgatgggctcgcagtggattggattcacagcaacatatactggaccgattcagtccttggaaccgtgtccgtggccgacactaagggggtgaagcgtaaaaccttgtttagggagaacggttcgaaacccagagcaatagtcgttgacccagtccacggttttatgtactggaccgactggggtactccagcgaagatcaaaaagggaggactgaacggagtggacatttactcacttgtgaccgaaaacatccaatggccaaacggaattaccctggacctccttagcggacgtctctactgggtggattccaagctgcatagcatttcaagcatcgatgtgaacggcggtaaccgcaagactattctggaagatgaaaagcgtttggcacacccgttttcccttgccgtgtttgaagataaagtgttttggaccgatatcattaacgaagcaatcttttccgccaaccgactgactggaagcgacgtgaacctcctggcggaaaacctcctgtctccagaagatatggtcctttttcataacttgacgcaacctagaggtgtgaactggtgtgaaaggaccaccctgtctaacggtggatgtcagtacctgtgtctccccgcaccacagattaatccacattcccctaagtttacctgcgcatgtcctgatggaatgctgcttgctcgcgatatgaggagctgtcttaccgaggctgaggcagcagtggcgactcaggaaacctcaaccgtgcgactcaaggtcagcagcactgcagtccggactcaacataccaccacgcggccagtgccagacacttcgagacttccgggagcaactccaggacttaccactgtggagatcgtgaccatgtcacaccaggcactcggtgatgtggcaggacgcggaaatgagaagaagcccagctcagttagggcactttcaatcgtgctgcctattgtgctcctcgtgttcctttgtcttggagtgttccttctctggaagaattggagactcaagaacattaactccatcaactttgataaccccgtctaccaaaagaccaccgaagatgaagtgcacatctgtcataaccaagatggctactcctaccctagcagacagatggtgagcctcgaagatgacgtggcc

SEQ ID NO: 10970 - DNA, 2580 bp, Artificial Sequence
  derived and/or modified sequence
atgggaccatgggggtggaagctgaggtggaccgtggctctgctgcttgccgctgccggaacagctgtgggagatagatgcgagagaaatgagtttcagtgccaggacgggaagtgtatttcgtacaaatgggtgtgcgatggcagtgccgagtgtcaggatggttccgatgagagccaggagacctgcctttcggttacctgtaaatctggtgatttcagctgcggaggcagggtaaatcgctgcatcccccagttttggcggtgcgacggtcaggttgattgcgacaacgggagtgacgagcaggggtgtccccccaaaacttgctcgcaggacgaatttagatgccacgacggaaagtgcattagtaggcagttcgtgtgtgatagcgatagagactgtctggatggaagcgacgaggcttcatgtcccgtcctgacatgcggccccgcatctttccagtgcaatagtagcacttgtatccctcagctgtgggcctgtgacaatgacccagattgcgaggacggctctgatgagtggccacaacggtgtcgaggattgtatgttttccagggcgattccagcccctgcagtgccttcgaatttcattgtctgtccggggagtgcatccattcttcatggagatgtgacgggggtcctgactgcaaggacaaatctgatgaggaaaattgcgcagttgcaacctgccgtcctgacgaattccagtgcagtgatggtaactgcatacacggctcgcgccagtgcgatagagaatacgattgcaaggacatgtctgatgaggttggatgtgtgaacgttaccctgtgtgagggccccaacaagtttaaatgccatagtggcgaatgcatcaccctggacaaggtctgtaatatggcccgtgactgccgggactggagcgacgaacctattaaagagtgtgggactaacgaatgtcttgataataacgggggatgctcacatgtgtgcaatgatctgaagattggctatgagtgtctttgtcccgatggctttcagctagtcgcacagaggcgatgtgaggacatcgatgaatgtcaggaccccgacacgtgttcacagctgtgcgtcaatctggagggcgggtataaatgccagtgtgaggaaggatttcagctggatccccacacaaaagcatgtaaagcagtgggcagcatagcctacctgttttttacaaatagacacgaggtccggaagatgactctggataggtctgaatataccagtctaattccaaatctcagaaacgtcgtcgccttggacacggaagtggcatccaacaggatatattggagcgacttatcacagagaatgatctgctctactcagctcgatcgggcccacggagtctccagttacgacacggtcatctccagagacattcaagccccagatggccttgctgtcgactggatacactcgaacatttactggaccgactctgtgttagggaccgtcagcgtcgctgacacgaagggggtaaagcgaaagactctgttccgcgagaatggaagcaagccccgggctatcgtggtggaccctgtccatgggtttatgtattggacagattggggaaccccagctaagataaaaaagggagggctgaatggcgttgatatttatagcctggtcactgagaacatccagtggcctaacggaatcacccttgacctgctgagcggaaggctgtattgggttgacagcaagcttcactctatcagcagcattgacgtgaacggcggtaatcgaaaaacaatcctggaggacgagaagcggctggcccaccccttcagtctggcagtgttcgaggataaggtgttctggacagacatcatcaacgaagcaatattcagcgctaatcggttgaccgggagcgacgtgaatctgctggccgagaatctactgagtcccgaggatatggtgctgttccataacctcacccagcctcgaggagtaaactggtgcgaaagaacgacgttgagtaatggcggatgccagtacctttgcctccccgccccacagattaatccccacagtccaaagtttacgtgtgcttgcccagacggcatgctcctcgctcgggatatgaggagctgtctcacggaggccgaagcagctgtggccacacaagagacctccacagtgcgcctgaaggtgtcctccactgcggtcaggacacagcacactactacccgcccagtgccagatacttcgcgacttcccggtgctaccccgggactgactaccgttgaaatcgttaccatgagtcaccaggcacttggagatgtagccggccgcggaaacgagaagaagcccagtagtgtccgagctttatccattgttcttccaattgtgttactcgtatttctgtgtctgggcgtattcctgctgtggaagaactggcgcctgaaaaatattaatagcatcaattttgataatcccgtgtaccagaaaactacagaggacgaggtacacatctgccacaatcaagacggatactcctatccatctaggcaaatggtgagtcttgaggatgatgtggcc

SEQ ID NO: 10971 - DNA, 2580 bp, Artificial Sequence
  derived and/or modified sequence
atggggccttgggggtggaagttgcgttggactgtggccctactcctggcggccgcaggcactgctgtgggggataggtgcgagcgcaacgaatttcagtgccaggatggaaaatgtatttcttacaagtgggtctgtgacgggagtgccgaatgtcaggatggctccgacgagtcccaagagacgtgtctaagcgtgacctgcaagagcggcgattttagctgtgggggaagagtaaatcgctgcataccacaattctggagatgcgatggccaggtggactgtgacaacggcagcgatgaacaagggtgcccccccaagacatgcagccaggacgagttccgatgtcacgacgggaagtgcatttcccgacaattcgtatgcgatagtgaccgggactgcctggatggaagtgacgaggcttcatgccctgtccttacctgcggacctgctagcttccagtgcaatagtagtacctgcatcccacagctgtgggcgtgcgacaacgaccctgactgtgaggacggctccgacgaatggccacagcggtgtcgaggcctgtacgtctttcagggggatagttctccctgttctgcgtttgaatttcattgcctaagcggagagtgtatacacagttcttggcgctgcgatggcggccctgactgtaaggacaaaagcgacgaggagaactgtgccgtggctacctgtcgccccgatgaatttcagtgttctgatgggaactgtatccatggcagtcgccaatgtgatcgagagtatgactgtaaggacatgagcgacgaagtcgggtgcgtgaatgtgactctctgcgagggccctaataagttcaagtgccactctggcgaatgtataacactagataaggtttgtaacatggccagagactgtagagattggtcagatgagcctatcaaagagtgcggcacaaatgagtgtctggacaataatggaggttgtagtcatgtatgtaacgacttgaagatcgggtatgaatgcctgtgccctgatggcttccagctggtcgctcaaaggcggtgtgaagacattgatgagtgtcaggacccggacacttgtagtcagctctgcgtaaaccttgagggtggctacaaatgccagtgtgaggaggggttccagttagacccacacacaaaagcttgtaaggccgttggcagcatcgcttatttgtttttcacaaatcgacacgaagtccgaaagatgactcttgaccggagtgaatatacttcacttatcccgaatctcaggaacgtagtggcactggatactgaggtggccagcaatcgtatctactggagtgatctctcccaacgtatgatttgttccactcagctagatcgcgctcatggcgtgtcttcatatgacactgtgatttcaagggacatccaggctccagatggcctggcagttgattggatccactctaatatatattggacagattcagtactgggcacagtgtcagttgccgacacaaagggggtgaagcgcaagactctgtttcgtgagaatggatctaagcctagggctattgttgttgacccagttcacggcttcatgtactggaccgactggggcacacctgccaaaattaagaagggcggtttaaatggagtggacatctatagcctggtcacggagaacattcagtggcccaacggaataaccctcgatctgctgtctggacgactttattgggtggacagcaaactgcacagcatctcatccatcgatgtgaacggaggaaacaggaaaactattcttgaggatgagaaacgtctggcacacccattctcactggctgtgtttgaggataaggtgttctggactgacataataaatgaagctatattttccgcaaatagactaaccggctctgacgtcaatctactggcggaaaatctgttgagtcccgaggatatggttctgttccacaatctgacgcagccgaggggggtaaattggtgtgaacgcacaactctctccaatggaggatgtcagtacctctgtctgcccgcccctcagatcaatccccatagccctaagtttacatgcgcatgtcccgatgggatgttgctggcccgggatatgagaagctgcctgactgaggctgaggccgccgtcgccactcaggagacctccaccgtgaggctaaaagtcagtagcacggccgtgaggacacagcacaccacaacacgccctgttcctgatacctctcgcttacctggagcgacaccaggcctgactaccgtagagattgtgacgatgtctcaccaggccctaggtgacgtggcgggcagaggtaacgaaaagaagccctcctccgtcagagccctatccattgtattgcctatcgtcctgttagtgtttctgtgcctcggagtgttcctgctgtggaaaaattggagactgaagaacatcaatagcattaatttcgataatcctgtttatcagaaaaccacggaggatgaggtgcacatttgtcacaaccaggacggttattcatatccatcccggcaaatggtcagtttggaggatgacgtcgcc

SEQ ID NO: 10972 - DNA, 2580 bp, Artificial Sequence
  derived and/or modified sequence
atgggtccctggggctggaagctgcgatggaccgtagcactgttgttagccgccgctggcactgctgtcggtgaccgctgtgagagaaatgagttccaatgtcaggacggcaagtgtatctcctacaaatgggtgtgcgacgggagcgcggaatgccaggacggctccgatgagtcccaggagacctgtctttcagtcacctgcaagtccggcgacttttcatgtggtggccgggtgaaccgatgtatccctcagttctggcgatgcgacggccaggtggattgcgataatggctccgatgaacagggctgtcccccaaagacgtgctcgcaggacgaatttcgatgtcatgacggcaagtgcatcagccgccagtttgtgtgcgactccgatagagattgtctcgacggatctgacgaggcatcttgccccgttctgacctgcggtcccgcctcatttcagtgtaatagctcgacttgtattccccagctttgggcctgtgataatgacccggactgtgaagatgggagcgacgaatggccgcaacggtgccgcggcttgtatgtctttcagggcgatagctccccctgcagcgctttcgagtttcattgtctgagcggagagtgcatccattctagttggaggtgtgatgggggacctgattgcaaggataagtccgacgaagagaactgtgccgtggccacatgtagaccagacgaatttcagtgttctgacggaaattgtatacacggatcccggcaatgtgatcgcgagtatgattgcaaggatatgtcagatgaagttggatgcgtgaacgttaccctttgcgaaggaccaaacaagttcaagtgtcattctggcgagtgtattacactggataaggtatgtaacatggctagagactgtcgtgactggtccgacgagccaataaaagaatgtgggacaaatgaatgtctcgataataacggcggctgctcccacgtgtgtaacgaccttaagataggctacgagtgcctgtgccctgatggcttccagctggtcgcacagagacgctgcgaggatatagacgagtgtcaggacccagacacatgttcccaactgtgtgtgaacctggaaggaggatacaagtgccagtgcgaggaaggatttcaactggatccgcacaccaaagcctgtaaggccgttggaagcatcgcatatctgttttttactaatcggcacgaggtaagaaaaatgaccctggataggtcagaatacacgtcattgatacctaatctgaggaatgtggttgcactcgataccgaagtggcttctaaccgcatctactggagcgacctctctcagcgaatgatttgttccacccagttggatagagcccacggggtgagcagttacgataccgtgatcagtcgggacatacaagcccctgatggcctagcagtcgattggatacattccaatatatattggacagatagcgtgcttggcactgtgtctgttgctgatacaaagggcgtgaagcggaagacactattcagagagaacgggtctaaaccaagagctattgtggtggaccctgttcacggattcatgtattggaccgactggggaaccccagccaagatcaaaaaaggagggcttaatggagtagacatttatagccttgtgactgaaaacattcagtggccaaatgggatcactttagacttactctccggtcgcctgtattgggtggactctaaactacatagcatcagctcaatcgatgtgaatggcggaaacagaaagaccatcctggaagacgaaaagaggctggcacatcctttcagcctggccgtttttgaggataaagttttttggaccgacattatcaacgaagcaatctttagtgccaatcggctcactggctctgacgtaaacctcttggctgagaacctcctctcgccagaagatatggtccttttccataatctgactcagccaagaggggtgaactggtgtgaacgcactactttgtcgaacgggggctgtcagtatctgtgtttgccagctccacagattaatcctcattccccgaaatttacctgcgcatgcccggacggcatgttactggcccgagatatgaggtcatgtcttaccgaggctgaggccgccgtggctacacaggaaacctcaacagttcgactgaaagtgtccagtaccgccgtaaggacacaacacactacaacgcggccggtgccggatacctcaagactgcccggcgccacccctggcctcaccacagtcgagattgtgactatgtcccaccaagccttgggcgacgtcgcaggacgcgggaacgagaaaaagcctagctcggttagggccctcagcatcgtgcttccaatagtcttgcttgtgttcttgtgtctgggtgttttcctgctgtggaaaaattggaggcttaagaatatcaactccatcaattttgataaccccgtctaccaaaagactaccgaagatgaagtgcacatctgccacaaccaagatggctactcttatccatcgcgccagatggtgtcacttgaggatgacgttgct

SEQ ID NO: 10973 - DNA, 2580 bp, Artificial Sequence
  derived and/or modified sequence
atgggaccatggggatggaaattaagatggacagtagcattattattagctgctgcaggaactgcagtgggagacagatgtgaacgtaatgaatttcaatgtcaagatggtaaatgtattagttataaatgggtttgtgatggaagtgcagaatgtcaagatggaagtgatgaatcccaagagacttgtttatctgttacttgcaaaagtggtgattttagttgtggaggaagagttaatagatgtattccacaattctggcgttgtgatggacaagttgactgtgataatgggagcgatgaacagggatgtccaccaaagacttgttcacaagacgaattcagatgtcatgatggaaaatgtattagtagacaatttgtttgtgattcagatagagattgtcttgatggttctgatgaagcatcttgtccagtattaacctgtggaccagcctcattccaatgtaattcaagtacttgtattccacaactttgggcatgtgataatgatccagattgtgaagatggaagtgatgaatggccacaacgttgtagaggactttatgtatttcaaggtgactcttcaccatgttctgctttcgaatttcattgtttatctggagaatgtattcattctagttggagatgtgatggtggtccagattgtaaggataaaagtgatgaagaaaattgtgctgttgctacatgtagaccagatgagtttcaatgttcagatggaaattgtattcatggatcacgacaatgcgatagagaatatgattgtaaagacatgtcagatgaagttggatgtgttaatgttacattgtgtgaagggccaaataaatttaagtgtcattctggagaatgtattactttagacaaagtatgtaatatggctagagattgtagagattggtcagatgaacctataaaagaatgtggaacaaatgaatgtttagataataacggtggttgttcacatgtttgtaatgatttaaagattggatatgaatgtctttgtccagatggttttcaacttgtagctcaaagaaggtgtgaagatattgatgaatgtcaagatccagatacatgtagtcaactttgtgttaatttagaaggaggttataaatgtcaatgtgaagaaggttttcaacttgatccacatacaaaagcatgtaaggcagtaggttccattgcatatttgttctttactaatagacatgaagttagaaaaatgaccttggatagaagtgaatatacaagtcttatcccaaatttacgaaatgtggttgcattagatacagaagtagccagtaatagaatttattggtctgatttaagtcaaagaatgatatgttctactcaacttgatagagcacatggagtttcttcatatgatactgttatttctcgtgatatacaagctccagacggacttgcagttgactggattcattcaaacatttactggacagattcagttttaggaacagtttctgttgcagacactaaaggagtgaaaagaaaaactttattcagagaaaatggttctaaaccaagggcaattgttgttgatcctgttcatggattcatgtattggactgactggggaacacctgcaaaaattaaaaagggtggacttaatggtgttgatatctattcattagttacagagaatattcaatggcctaatggaattactttagatcttctttctggaagattatattgggttgattcaaaacttcattctattagttcaattgatgttaatggtggtaatagaaagacaatattagaagatgaaaaaaggcttgcacatccattttcacttgctgtgtttgaagataaagttttttggacagatattataaatgaagcaatatttagtgctaatagattaactggaagtgatgttaatttacttgccgaaaatcttttgtcaccagaagacatggtattgtttcataatttaactcaaccaagaggagtaaattggtgtgaacgtacaactctcagtaatggaggatgtcaatatctttgtcttccagcaccacaaattaatccacattctccaaagtttacttgtgcttgtccagatggaatgcttttagccagagatatgagaagttgtttaactgaagctgaagcagcagttgctacgcaagaaactagtactgttagattgaaagtaagttcaactgcagttcgaacacaacatacaactacaagaccagttccagatactagtagacttccaggtgctactccaggtcttacaacagttgaaattgtcactatgagtcatcaagcattaggagatgtagctggaagaggaaatgaaaaaaaaccatcatccgttagagctctttctattgttctcccaatagttttacttgtttttctttgtcttggagtttttttattatggaaaaattggcgtcttaagaatattaattcaattaattttgataatccagtttatcaaaagacaactgaagatgaggttcatatttgtcataatcaagatggatattcttatccaagtagacaaatggtatcacttgaagatgatgttgct

SEQ ID NO: 10974 - DNA, 2580 bp, Artificial Sequence
  derived and/or modified sequence
atggggccatggggctggaagctgcgatggactgtggctctactgttagctgctgcaggcactgctgtcggggatcggtgcgagcgcaacgagttccagtgtcaggatggcaagtgcatcagctataagtgggtgtgcgatgggagcgcggaatgtcaagacggaagtgatgaatcacaagaaacatgcctctccgtgacttgtaagtcaggtgacttctcctgtgggggaagggtcaacagatgtatccctcagttctggaggtgtgacggccaggtggactgtgacaacggaagcgacgaacagggctgcccgcctaaaacttgtagccaagatgagtttcgctgtcacgacggcaaatgcatttccagacagtttgtctgcgattcagatcgagattgtctggacggctctgacgaggcatcctgtcctgttctcacctgtggccctgcctcgttccagtgtaactcttctacctgtatccctcagctctgggcttgtgacaacgatcccgattgtgaggatggatcagacgaatggcctcaacgttgtcggggcctctacgtttttcagggggactcatcaccgtgcagtgcttttgagtttcactgcctgtccggagagtgcatccactcatcctggcggtgcgatggaggtcctgattgcaaggacaaaagcgacgaggagaattgtgccgtagcaacctgccgcccggacgagttccagtgcagtgacggaaactgcatacatggatcaaggcagtgcgatcgtgaatacgattgtaaagacatgagcgacgaggtcggatgcgtcaacgtcaccctttgtgaagggcccaacaagttcaaatgccactccggggagtgcattactcttgacaaggtctgcaacatggccagggactgtcgtgactggtcagacgaacctataaaggagtgtgggaccaacgagtgcctggataacaacggcggctgctcccacgtgtgcaacgacctaaagattggctacgagtgcctatgccccgacgggttccagttggttgctcagcggcgatgtgaagacattgatgagtgccaagacccggacacttgtagtcaactgtgtgtgaatcttgagggaggttacaagtgccaatgtgaagaggggtttcaactggatccacacacaaaggcttgcaaagccgtaggcagtatcgcctatttattttttactaaccggcatgaagtgcgcaaaatgactcttgaccgcagcgagtatactagccttatccctaatcttcgtaacgttgtcgcactggacacggaagtggcctcaaaccgaatctattggtccgacttgtctcaacggatgatttgtagtacacagctggacagagcacacggcgtgagcagttacgatactgttatttctcgcgacatacaagctcctgacggtctggccgtcgactggattcactccaatatctactggactgacagtgtactcggtaccgtgtccgtagcagacactaagggagtgaagcgtaagacactctttagggaaaatgggtcaaagccacgggccatcgttgtggatcctgtccatgggtttatgtattggaccgattggggaactcctgccaaaatcaagaaggggggcctgaacggggtggacatttattcgttggttactgagaatattcagtggcctaacgggattacccttgacctgctgagtggacggctttactgggtggactccaagctgcactctatttcatctattgacgtgaacggcgggaatcggaagaccatcctggaagacgaaaagagacttgcacaccccttctccctggcagtgttcgaggacaaggtgttctggaccgatattatcaacgaagcaattttttcagcaaacagactgacagggtctgatgtgaatctgctggccgaaaatctgctgtcaccggaggatatggtcctgttccacaatcttacacagccacggggcgtgaactggtgcgaacgcacgacattgtccaacggcgggtgtcagtatctttgtctacctgctccacagattaacccccactcgccaaaatttacttgcgcatgccctgacgggatgcttctcgcaagggatatgcggtcttgcttgactgaggcggaagcagccgtcgccacccaggagactagtactgttaggcttaaggtcagcagcactgccgtgagaactcagcacacaaccaccagaccagtccccgacacctcaagactccccggagccaccccaggactaactaccgtggagatcgtgaccatgagccaccaagcgctaggggatgtggccggtcgcgggaacgaaaagaagccttccagcgtgcgagcgctcagtattgtgttaccgattgtcttgctggtgttcctatgtcttggggtgttcctcctgtggaaaaattggagattgaagaacataaatagtattaacttcgataatcctgtgtaccaaaagaccaccgaagatgaggtccacatttgtcataatcaagatggctacagctatccttcacgccagatggtgagtctggaggatgacgtagct

SEQ ID NO: 10975 - DNA, 2580 bp, Artificial Sequence
  derived and/or modified sequence
atggggccctggggctggaagctcagatggaccgtagccctacttttagctgctgcaggcacagcagtgggtgaccgctgcgagcggaatgaattccagtgtcaagatggtaagtgcatctcttataaatgggtgtgtgatgggtctgcagagtgtcaggacggcagcgatgagtcacaggagacatgcctcagtgtgacatgcaagagcggggatttcagttgtggcggtagagttaacagatgtattccccaattttggcgctgtgacggccaggtggactgcgacaacgggtctgacgagcagggttgtccacccaagacgtgctcgcaggatgaatttcggtgccacgacggcaaatgtatttcaaggcagtttgtgtgcgatagtgaccgagattgcctcgacggcagtgacgaggcctcctgcccagttctgacatgtggccccgccagtttccagtgcaactcgtctacatgcatccctcagttatgggcctgcgataatgacccagactgcgaagatggatccgatgagtggccccagcggtgtcggggtctctatgtcttccagggcgatagcagcccttgtagcgctttcgagttccactgtctgtctggagagtgtatacactcctcctggagatgcgatggcggccccgactgtaaagacaagtcagatgaggagaactgtgcggtggccacctgcaggccagatgagttccaatgcagcgatggcaattgcatccacggaagtcgccagtgcgaccgggagtacgattgcaaggacatgtccgacgaagttgggtgcgtcaacgttacactgtgtgagggacccaacaaatttaagtgtcattctggtgagtgcatcacactggataaagtctgtaacatggcgagagactgcagggattggagtgatgagcctattaaagagtgtggaacgaatgagtgcctggacaataatgggggctgttctcacgtgtgcaacgatctcaagatagggtatgagtgcctctgtccagatgggttccaactggtcgcccagcgccgatgtgaggatatcgacgaatgtcaggatccagacacctgttcacagctatgcgttaacctggagggtggatacaagtgccagtgcgaagaaggttttcagctggatcctcataccaaagcgtgtaaggcagttggcagtattgcctatctgttcttcaccaatcggcatgaggtcaggaagatgactcttgaccgcagcgagtacacttccctgattccaaatttgagaaatgtggtagcactcgacacagaggtagcatctaacaggatctactggagcgacttatcccaacggatgatctgcagcacccagctggatcgggctcacggcgtttcatcttacgatactgtgataagccgggatattcaagccccagacggactggccgtggactggattcacagtaacatttactggacagactcggtactggggactgtctccgtggcggataccaagggtgtcaagcgaaagactctgtttcgtgaaaatggatcgaaaccacgcgccatcgtggtggacccagtgcacggattcatgtattggacagactggggcaccccagccaagataaagaaaggtggacttaatggcgtggatatttactctctggttactgagaacatccagtggcccaacgggataaccctggaccttttatccggtcggttatactgggtggacagtaagctccacagcatctcttccattgacgttaatggagggaatagaaagacaatcctggaagacgagaagaggctcgcacaccccttttctctcgcagtgttcgaggataaggtcttctggacagacattataaacgaggcgattttctcagcgaaccggctcactggctcagacgtcaacctcctggccgaaaacttgctatctcctgaggacatggtgctgtttcacaatttgacccagccacggggtgtgaactggtgcgagcgcaccacccttagcaacggggggtgccagtatctttgccttcctgcacctcagatcaatcctcactccccaaagtttacgtgtgcctgccccgatggcatgctgctggccagagatatgcgttcatgcctgacagaagcagaggccgccgtcgccacacaggagacgtcgaccgtcaggttaaaagtctccagcacagcagttaggacacagcataccactacccgacccgtgcctgacacttcccggcttccgggggctactccggggcttactaccgtggaaatcgtgacaatgtcacatcaggcgctcggcgacgttgccgggagagggaacgagaagaaacccagtagtgttcgagctctgtcgatcgtgctaccgatcgtccttctcgtcttcctctgtctgggcgttttccttctgtggaagaactggcgactgaagaatattaacagtattaacttcgataatccggtttatcagaagacaacagaggatgaggtgcatatttgtcacaatcaggacggatatagctacccttctcgccaaatggtgtctttggaagatgatgtggcg

SEQ ID NO: 10976 - DNA, 2580 bp, Artificial Sequence
  derived and/or modified sequence
atgggtccatggggctggaaacttagatggaccgtcgccctgttattggctgcagccgggacagcggtgggtgacaggtgcgagagaaatgaatttcaatgtcaggatggtaaatgtatctcttacaagtgggtttgcgatggaagcgctgagtgtcaagacggtagcgacgaatcacaagaaacatgtttgtctgtaacctgcaagtcgggcgatttctcctgtgggggtagggtaaaccgatgcattcctcagttctggcggtgcgatggccaggtggattgcgacaacgggagtgatgagcagggatgtccccctaagacctgctcacaagatgagtttcggtgccacgacgggaaatgcatctcccggcagttcgtgtgcgactcggatcgggactgcctggatggcagcgatgaagccagttgccctgtactgacttgtgggccggcctcattccagtgtaatagttccacctgcatcccccagttgtgggcgtgcgacaacgacccagactgtgaagatggctccgatgaatggcctcagcggtgtcgcgggctctacgtcttccagggagatagctcaccttgctccgcattcgaatttcactgcctttccggcgaatgcattcatagttcttggaggtgcgatggaggcccagattgcaaggataagtccgatgaagagaactgcgctgtggccacatgtaggccggacgagttccagtgtagtgacggtaactgcattcacggctcccgtcagtgtgaccgagagtatgactgcaaggatatgagcgacgaagtgggctgcgtgaacgttactttatgtgagggacccaataaattcaaatgccattctggggaatgtataaccctggacaaggtttgtaacatggctcgagactgcagagattggtcagacgaacccatcaaggagtgcgggactaatgagtgcttagataataacggaggctgcagccacgtctgcaatgacctgaaaattgggtatgaatgtttatgccccgatggattccagttggtcgcacagcgtagatgtgaagatattgatgaatgtcaggatccagatacatgtagccaactgtgtgtgaacttggaaggtggatacaagtgccagtgcgaggagggattccagttagacccccacaccaaggcctgtaaagccgtaggcagcattgcctatctgttcttcaccaaccgccacgaagtgagaaagatgaccttggatcggagcgaatacacctctctgattccaaatttgcgtaacgtggtagctctcgacactgaagtcgcctcaaataggatttactggtctgatctgtctcagaggatgatttgtagtacgcagttggaccgtgcccacggagtcagtagctacgacaccgtgatctcgcgagatatccaggctccagatgggttggcagttgactggatccattccaacatttactggaccgacagtgtgttggggaccgtttcagtggctgataccaagggggtgaagcggaagacactttttagggagaatggatccaagccccgcgctattgttgtggaccccgttcacggctttatgtattggactgattggggcaccccagccaaaatcaagaaaggaggcctgaacggcgtggacatttactccctcgtcaccgaaaatatccagtggcccaatgggatcaccctggatctgctgtctggtcggctgtactgggtcgattccaaactgcattctatatcctcaatcgatgtgaatggaggtaacaggaagacgatcctggaagacgagaaacgcttggctcaccccttcagcctggccgtttttgaagacaaggtgttctggactgacataatcaacgaagcgattttcagcgctaataggctaactggatccgatgttaacctgttagcagaaaacttgctctcccccgaagatatggttctgttccacaatctcacacagcccagaggcgtgaattggtgcgaacgtacgacgctgtccaatggggggtgccagtatttgtgcctgcctgccccacagatcaacccccattcgccaaagttcacctgtgcctgtccagacggtatgctcctggcccgggacatgcgctcctgccttaccgaggccgaggcggccgttgcaacacaggaaacatccacagtgaggcttaaggtttcttcaaccgcagtaaggacccaacacacaacaactaggccagtccctgatacaagtcgcctgccgggcgctactcccggtctgaccacggtcgaaattgtgaccatgtcacatcaggcccttggcgacgtcgctggtcgcgggaatgagaagaagccgagctcagtacgcgctttgtcaatcgtcctccctatcgtgctgctcgttttcctgtgcctaggtgtgtttctcctctggaagaattggcgactcaagaacataaacagtataaacttcgataatccagtatatcagaaaacgacggaggatgaagtgcatatctgccacaatcaagatggatactcttatcccagcagacagatggtgagtctggaggacgatgttgct

SEQ ID NO: 10977 - DNA, 2580 bp, Artificial Sequence
  derived and/or modified sequence
atgggcccttggggatggaaactcagatggaccgtggccctcttgctcgctgcagcagggaccgctgtcggagaccgatgcgagcggaacgaatttcaatgccaggatggcaaatgtatttcatacaagtgggtgtgcgacggtagcgccgagtgccaggatgggagtgatgagagccaggagacatgcctgtcagtcacctgtaagagtggcgacttttcctgcggcgggagggtgaaccgctgtattccgcagttttggcggtgtgatggacaagtggattgcgacaacggctcagacgaacagggatgtcctccaaagacatgctctcaggatgagtttcgatgtcacgacggaaaatgcatttccaggcagtttgtgtgtgactctgacagggactgcctggacgggagcgatgaggcttcctgtcccgtgctcacctgcgggccagcatctttccagtgcaacagtagcacttgtatccctcagctttgggcctgtgataatgacccagactgcgaggacggctctgacgagtggccccagagatgcaggggattgtacgtcttccagggcgacagcagcccttgcagcgcatttgaattccactgtctcagcggcgaatgtatacacagctcctggaggtgcgatgggggacctgactgtaaggacaagtccgacgaagagaattgcgcagtagccacatgtcgccctgacgagttccagtgctccgacggaaactgtatccacgggtcccggcagtgtgatagagagtatgattgcaaagatatgtctgacgaggtaggatgtgttaacgtcaccctctgcgaggggccgaataagttcaagtgccacagtggtgagtgtatcactttggataaggtctgtaacatggcccgggattgcagggactggtcagatgaacctattaaggaatgcggtactaatgagtgtctggacaataatggcggttgttctcacgtgtgtaatgacttgaagatcgggtacgaatgcctctgcccagacgggttccagctcgtcgcccagaggcgatgtgaggacattgacgaatgccaagatccagacacgtgttctcagctttgcgtaaacttggagggtgggtacaagtgtcagtgcgaagaagggtttcaactcgatccacacaccaaggcatgtaaggccgtggggtccattgcgtacctgtttttcaccaataggcatgaagtgcggaaaatgactctggaccgctctgaatacacctctttgatccccaacctcaggaacgtggtcgccctggatacagaggtagctagtaatcgcatttactggtcagatctgtctcagcgcatgatctgctctacccaactggacagggcacatggagtcagttcttatgacacggtgatctctagagatatacaggccccagacgggttggccgttgactggattcattccaatatctactggacagatagcgtgctgggtacagtttctgtggccgatacaaagggcgtcaagagaaaaaccctctttagagaaaacggcagcaagccacgggcgatagtggtcgatcccgtccacggctttatgtactggacagattgggggacccccgccaagattaagaagggggggttgaatggagtcgacatatacagcctggtcaccgaaaacattcaatggcctaacgggatcacactcgacctgctgagcgggcgcttgtattgggtggattctaagcttcacagcatctcttcaatagacgtcaacggcggtaaccgcaagaccatactggaagatgaaaaacgactggcgcatccgttctcacttgcagtgttcgaagacaaggtgttctggacagacatcattaacgaggcgattttttcagccaacagattgaccggttccgacgtgaacctgctggcagaaaatctgctcagccctgaagatatggtgcttttccacaatctcacacagcccaggggagtgaattggtgtgaacgcaccactctttctaatggtggttgtcagtatctgtgtcttccagcacctcagatcaatcctcatagccctaagtttacgtgtgcatgtccggatggcatgttgctcgcgcgagatatgcgatcctgtctgaccgaagccgaggctgctgtggctactcaggagacgtccaccgtcagactcaaggtgtcttccaccgctgtgcgcactcaacacactaccactcggcctgtacccgatacgagccgcttgcccggggctactcccggacttaccactgtggagatagtgacgatgagccaccaagctctgggcgacgtggctggcagaggtaacgagaagaaaccgtcctcagtccgggccctctccatcgtgctgcctatcgtgctgcttgtgtttctttgcctcggagtgtttctcctttggaaaaactggaggctgaaaaacattaactccatcaacttcgacaatccagtgtaccagaaaaccaccgaagatgaagttcacatctgtcacaatcaggacgggtattcataccccagccgccaaatggtttcccttgaagacgatgtggca

SEQ ID NO: 10978 - DNA, 2580 bp, Artificial Sequence
  derived and/or modified sequence
atggggccatggggatggaagctgcgctggaccgtggcgctgctcctggctgccgcaggaaccgccgtgggagacagatgcgaaagaaacgagttccaatgccaggatggtaaatgtatctcgtacaagtgggtttgcgatgggtcagccgagtgtcaggacggatcggatgagtcgcaggaaacctgcctgtcagtgacgtgtaagtccggagacttctcctgtggaggaagagtcaatagatgcatcccacagttttggcggtgcgatggtcaggtagattgcgacaatggaagcgacgagcagggatgcccgcccaagacctgtagccaggacgaattcagatgtcacgacggtaagtgtatttcccgacagtttgtctgtgattccgaccgcgactgtcttgatggatcagatgaagcgtcgtgccccgttctgacttgtggacctgcctcgttccagtgcaatagctcaacctgcatccctcaactctgggcatgcgacaatgatcctgattgcgaagatggatcagacgagtggcctcagcgctgccggggactctacgtgttccagggagattcgtcaccctgctcagctttcgagtttcactgcctgtcgggagaatgtatccatagctcttggcggtgtgacggcgggcctgattgtaaggacaagtcggacgaagaaaattgcgccgtggcgacttgcaggccggatgaattccaatgtagcgatggcaactgcattcacggatcccgccaatgcgaccgcgagtacgactgcaaagacatgtccgacgaagtcggatgcgtcaacgttactctgtgcgaagggccaaataagtttaagtgtcactctggagaatgcatcaccctggataaagtgtgcaacatggcgcgcgactgtcgcgactggtcggacgagccgatcaaggagtgcggaactaacgagtgtctggataacaatggaggttgcagccacgtgtgcaacgatttgaagatcggctatgaatgcctgtgcccggacggcttccagctcgtggcacagcgacggtgcgaggacatcgacgagtgccaggaccctgacacttgttcccagctgtgcgtgaatctcgaaggagggtacaagtgccagtgcgaggaaggattccagctggatcctcataccaaggcgtgcaaggccgtcggatcaatcgcgtacctgtttttcactaacagacacgaagtgcgcaaaatgaccctggaccgttcggagtacacctccctgatcccaaacctgagaaacgtggtggcactcgacaccgaagtcgcctcgaacaggatttactggtcggacttgagccaacgcatgatctgttcgactcagctggatcgcgcgcatggagtgagctcctacgataccgtgatctcccgcgacatccaggcgcccgacggactggcggtcgactggatccatagcaacatttactggactgattctgtgttgggtactgtgagcgttgccgatactaagggagtgaagcgcaagaccttgttccgggaaaacggatcaaagcccagggcaatcgtggtcgaccctgtgcatggattcatgtattggaccgactggggcaccccagcgaaaatcaaaaaaggagggttgaatggagtggatatctatagcctggtgactgaaaacatccaatggcccaacggaattacccttgacttgctctcaggcaggctctactgggtggattccaagctgcactcaatctcgagcatcgacgtgaacggcgggaacaggaaaacgattctggaagatgagaagagactggcccacccattctcgctggccgttttcgaggacaaggtgttctggaccgacatcatcaatgaagcaatcttctccgcaaacaggctgaccggatcagatgtgaacctcctggcagagaacctcctttcaccggaagatatggtgctcttccataacctgactcaaccgagaggagtcaattggtgcgaaagaactacgctgagcaacggcgggtgccagtacttgtgtctcccggcacctcagattaatccgcatagccctaaattcacttgcgcctgcccagatgggatgctgctggcacgggacatgcgctcctgcctgactgaggccgaagccgccgttgccacccaggaaacgagcacggtgaggcttaaggtgtcaagcactgcagtcagaacccaacacaccactactagaccagtgccggatacctcgagactgccgggcgctacccccggactcactaccgtggaaattgtgacgatgtcccaccaagccctgggggacgtggcgggaagaggcaacgagaaaaagccatcctcggtgcgggctcttagcattgttctgccgatcgtcctcctggtgtttctgtgcctgggcgtgtttctgctttggaagaactggaggctcaaaaacatcaattcgatcaatttcgataatcccgtgtatcagaaaactacggaggacgaggtgcacatctgtcacaaccaagatggatactcatacccttcccgccagatggtgtcgctggaggacgatgttgcg

SEQ ID NO: 10979 - DNA, 2580 bp, Artificial Sequence
  derived and/or modified sequence
atgggtccctggggatggaagctaagatggaccgtagcgttgctgctggctgcagcagggactgctgtgggcgatcggtgtgagcgcaatgagttccagtgccaggatggcaagtgcatttcgtataaatgggtttgtgatggttcagcagaatgtcaggacggatccgacgagtctcaagaaacttgtctgagcgtgacatgtaagagtggtgacttctcatgcggaggccgggtgaacaggtgcataccccagttttggaggtgcgacggccaagttgactgcgacaacggaagtgacgaacaggggtgtccacccaagacatgctcacaggatgagttccgatgtcacgatggcaagtgtatttcccgacagttcgtgtgcgacagtgatagggactgcctggacgggtctgatgaagccagctgtcctgtgctgacttgtgggccagcttcctttcagtgtaactcaagcacttgtatcccccaattatgggcctgcgataacgatcctgattgtgaggatggaagcgatgagtggcctcagagatgtcggggcctctacgtcttccaaggagattccagtccatgtagcgcatttgagtttcactgcttgtctggcgaatgcatccacagctcatggcggtgtgacggaggacccgattgcaaggacaaatcggatgaagagaactgcgcagtggccacttgtagacctgatgagtttcagtgtagcgacggcaattgtatacacggaagtagacagtgtgatcgggagtacgactgcaaggacatgtcagatgaagtaggatgtgtcaacgtgacactctgcgagggtcccaataaatttaagtgccattccggagagtgtattacactggacaaggtttgtaacatggcacgagattgtcgggactggtccgatgaacctatcaaggaatgcggtaccaatgaatgcctggataataacggtggctgtagccatgtgtgcaacgacctaaaaattggctacgagtgcctctgcccagacggattccagcttgttgcacagcgtcggtgtgaagacatcgacgaatgtcaggatcccgacacatgctcgcaactgtgcgtgaacctcgagggaggatataagtgccagtgtgaagagggcttccaactggatccacacaccaaggcctgcaaagctgtggggtctattgcctacctgtttttcaccaatcgccacgaagtacggaaaatgacgcttgaccgatctgagtacacctccctaattcctaacctccggaacgtggtggcgctcgataccgaggttgcttctaataggatctattggtccgacctttcacaaaggatgatctgctctacacaattggatagggcccacggcgtatcttcctatgatacagtgattagccgtgacattcaggcccctgacggcctcgccgtagattggattcattccaacatatactggaccgactctgtcctaggcaccgtgagcgtggcagacaccaagggagtgaaaagaaaaaccctgtttagggaaaatggcagcaagccaagggctatagttgtggaccctgttcacggtttcatgtactggacagattgggggacacctgcaaagatcaagaaaggtggtctgaatggggtggacatttatagcttggtaactgagaatatccagtggcctaatgggataactttagatctgctgtccggtagattgtattgggtggacagtaaattgcattctatttccagcatcgacgttaatggcggaaaccggaagaccattttagaggacgagaaacgcctcgcacatcccttcagtctggccgtattcgaggataaggtcttttggaccgacattattaatgaagccatcttctcagctaacagactgactgggagcgacgtcaatctgctagctgagaatctgctcagtccagaagatatggtgctctttcataaccttacacagcctagaggtgtgaattggtgcgagcgaacaaccctctctaatggagggtgccagtacctatgcctgccagccccccagattaatcctcactctcctaagtttacttgtgcttgtccggatggaatgttgctcgcacgtgatatgcgctcttgtctgactgaggcggaggcggctgtcgccacacaggaaacctcaaccgttcgccttaaggtgtcaagtactgctgtaagaacccagcacacaaccactaggccagtgcctgacaccagcagattgcccggggccactcccgggttgacaacagttgagatcgtaacgatgagccaccaggccctcggggatgtcgcggggaggggcaatgagaagaagccatcctcagttagggctctcagcatcgttctgcctatagtcctattggtgtttttgtgcttaggggttttcctcctgtggaaaaactggaggttgaaaaatatcaacagtataaatttcgacaatcctgtgtatcagaagactacagaagacgaagtgcatatttgccacaaccaggacgggtattcctatccatcccgccagatggtgagcctcgaggacgatgtggct

SEQ ID NO: 10980 - DNA, 2580 bp, Artificial Sequence
  derived and/or modified sequence
atgggaccatggggttggaaactaagatggacagtcgccttactgctcgcggccgcgggcaccgcggttggtgacaggtgtgaaaggaatgagtttcagtgccaggacggaaagtgcatcagctacaaatgggtctgcgatgggagtgctgagtgccaggatggcagtgacgaatctcaggagacatgcctgtctgtgacctgtaaatccggtgatttctcctgcggcggcagagtgaatcgatgtatacctcaattctggagatgcgatggtcaggttgactgcgataacggtagcgacgagcaggggtgtcctccgaagacttgttcccaggatgaattcagatgtcatgatggcaaatgtatttcacgacaattcgtgtgtgattccgatagagattgcctggacggatctgacgaggcttcttgtcccgtgttgacttgcgggcctgcaagttttcagtgtaattcttcgacttgcatccctcagctatgggcctgtgataacgatcctgactgcgaggacggtagcgatgaatggccccagcgatgccgaggcttatacgtctttcagggggattcaagcccctgttcagcattcgagtttcattgtctgagtggagagtgtatccattcgtcttggaggtgcgacggaggccccgactgtaaggacaagagcgacgaggaaaactgcgcagtcgccacttgtcgccctgatgaattccagtgctctgacggcaactgtatccatggtagcagacaatgcgaccgcgagtacgattgtaaggacatgagcgatgaggttgggtgtgtgaatgtaactctttgtgagggtccaaataaatttaagtgtcattcaggcgaatgcattacactggacaaagtgtgtaatatggcgagggattgtcgtgattggtccgatgagccgatcaaggagtgtggaacaaacgagtgcctggataataacggggggtgttcacatgtgtgtaatgatctgaaaattggatacgaatgcctctgccccgacggatttcagctcgtggcccaaagaaggtgcgaggatatcgatgagtgtcaggacccagatacgtgttctcagttatgcgtgaatctggagggcggttataaatgccagtgcgaggagggtttccagctggatccccacacaaaggcttgtaaggccgtgggcagcatagcctatctcttctttacaaatcgacatgaggtgcgaaagatgacgcttgataggtcagagtatacttcactgattcccaatctccggaacgtggttgccttagacacagaggtggcaagtaaccgtatttactggagtgatctcagccagcggatgatttgttcaacccagctcgatcgcgcccacggtgttagttcttacgacacagtgatctctcgggatatccaggcccctgatggattggccgttgactggattcactccaacatctattggaccgacagtgtactgggcacagtgtccgttgcagatactaagggagtgaaaagaaaaaccctatttagagagaacggaagtaagccccgagccattgtcgttgatccggtgcacggctttatgtattggacagactggggaacccccgcaaagatcaagaagggcggcctcaatggtgtggacatctattccctagtgactgagaatattcagtggcccaatgggatcacactggacctactgagcggccggctgtactgggtggacagtaaactccattcaatctcctcaatagatgtgaatggtggtaacaggaaaactatattagaggacgaaaagcggttggcccaccccttctccctggctgtatttgaggataaggtattctggactgacattatcaacgaagcaattttcagtgccaaccgcctcacggggagcgatgttaacctcctagctgaaaatctccttagcccagaagatatggtgcttttccacaacctcacccagccccgaggtgtaaactggtgtgagcgcaccacactgagcaatggtggctgccaatatctctgcctgcctgcaccccaaattaacccgcattctcctaagttcacctgcgcgtgtccggacggcatgctgctggcaagggacatgaggagctgtctgacggaggcggaagcagcagtggctactcaagagacaagcaccgttcgattaaaagtgtccagcacagcagtcagaactcagcatactacaacccggccagttcccgacacaagcagactgccaggcgccacaccagggctaactactgtagagattgtgacaatgagtcaccaggctctcggcgacgtcgctggcagaggtaacgaaaagaaaccatccagtgtgcgggcactgtctatcgtgctgcctattgtgctgctcgtgttcctgtgtctcggagtttttctgctatggaagaactggaggctgaaaaacatcaactccataaactttgacaatccagtgtaccaaaagaccactgaagacgaagtgcatatctgtcacaatcaagatggctatagctacccaagccggcagatggtgtccctggaagatgacgtcgcg

SEQ ID NO: 10981 - DNA, 2580 bp, Artificial Sequence
  derived and/or modified sequence
atgggtccatggggctggaagctgcggtggaccgtcgccttgctgctggccgcagccgggactgccgtgggggatcggtgtgagcgcaacgaattccaatgtcaggatggcaagtgtatttcttacaaatgggtgtgcgacgggtccgccgagtgccaagacggttccgacgagtcccaggagacctgtttaagtgtgacctgcaaatctggcgacttttcctgtgggggtcgagtaaacagatgtatccctcagttctggaggtgtgacgggcaggtcgattgtgacaacggatctgacgagcagggatgtccccccaagacctgtagtcaggacgagtttaggtgtcatgatggtaaatgcatctcaagacagtttgtttgcgacagtgacagggactgtcttgacggttcagacgaagccagttgtcccgtgttgacgtgcggtcctgccagcttccagtgcaatagcagcacctgtatccctcagctgtgggcctgtgataacgacccggactgtgaggatggctctgatgaatggccgcaacgatgccgaggactgtacgtgtttcaaggcgattctagtccctgcagtgcattcgaattccattgcctgagcggggaatgcatacattcctcttggcgttgcgacggtgggccagactgcaaagacaagagtgatgaggagaattgtgccgtggcaacctgtagacccgatgaatttcagtgctccgacggaaattgtatccacggaagccgacagtgtgatcgagagtacgactgcaaggacatgtcagacgaagtagggtgtgtaaacgtgaccctctgtgaagggcctaataagttcaaatgccacagcggtgagtgtatcacgctggataaggtgtgtaacatggcgagagactgtagggactggtcagatgagccaattaaggaatgtggtacaaatgaatgtctggacaataacgggggttgttcccacgtctgcaacgacctcaagattggttatgagtgcctgtgtcctgacggctttcaactggtggcccagcggcgatgtgaagatatagatgaatgtcaggaccctgacacatgtagccagctgtgtgttaatcttgaaggcggctataagtgtcagtgcgaagaagggtttcagcttgatcctcatacaaaggcttgtaaggccgtcggaagtatcgcctacctgttttttactaacaggcatgaagtcaggaaaatgacactcgatcgttcagagtacactagtctgatccccaatcttagaaatgtagttgccttagacactgaagtggccagtaacagaatctactggagcgatttaagccagcgtatgatttgcagtacccagttagacagggcccatggagtgagtagctatgatacagtgatatctagggacattcaggcccctgatggactggccgtggactggatccattcaaacatctactggacagactcagtcttgggtaccgtctcggtggccgatactaaaggggtgaaaaggaagacactgttccgggagaacggttctaagccacgtgccatcgtggtcgatccagtacacgggttcatgtattggacagattggggtacaccagctaaaatcaagaagggtggcttgaatggtgtggatatctacagcctggtgacagaaaatattcagtggcctaacggaattactcttgacctgttatctggtaggctttactgggtggactccaaactccattctatttcgagcatcgatgtgaacggcggcaatcgcaaaactattctggaggacgagaagcgactcgcccatccttttagtctggccgtgtttgaggataaggtgttctggactgatatcattaatgaggctatcttcagcgccaatcgtctgaccgggtcagacgtaaacctcctcgcagagaacctgttgtctcctgaggacatggtgctgttccataacctgacacagccccgaggcgttaattggtgtgagcgaacaactctgtctaatggaggctgccagtatctttgccttcctgccccgcaaatcaacccccatagccccaagtttacatgcgcttgtcctgatggcatgctgctggctagggatatgcgaagctgcttgacagaggctgaggccgcagtggctacacaggaaaccagtacagtgcgattgaaggtttcctctactgccgtacgcactcagcacaccaccacacgacccgtcccagacacatctcgacttccaggagccactccggggcttaccaccgttgagatagtgaccatgagtcatcaagccttaggagatgtagctggcagagggaacgaaaagaaacccagcagtgtacgagccctgtccatcgttctcccaattgtactacttgtgttcctttgcctgggcgtgtttcttctttggaaaaactggagactgaaaaatatcaactccattaatttcgacaaccccgtgtatcaaaagacaaccgaggatgaggtgcacatctgccacaaccaagatggctactcctatccatccagacagatggtgtctctagaagacgacgtagct

SEQ ID NO: 10982 - DNA, 2580 bp, Artificial Sequence
  derived and/or modified sequence
atgggaccgtggggatggaagctccgctggaccgtggctctgctcctcgcagcggccggaacggctgtcggagacaggtgcgagcgcaatgaattccaatgtcaggatggaaaatgcatatcctacaaatgggtgtgtgacggttctgcggaatgccaagacggatccgacgagtcccaagaaacttgcttgagcgtgacctgcaaatcaggtgatttctcgtgcgggggacgcgtcaacagatgcatccctcagttctggcgctgcgatggacaagtcgattgtgacaacggttcagacgaacaaggatgccctcctaagacgtgctcccaggacgaattccgctgccacgatggtaagtgcataagcaggcaattcgtgtgcgatagcgacagggattgcttggatggatccgatgaagcgtcctgcccggtcctgacttgcggcccggccagctttcagtgcaactcgtcgacctgtatcccacaactgtgggcctgcgacaatgaccccgactgcgaggatggctcggacgagtggcctcagagatgccggggcctgtacgtgttccaaggcgatagctcaccgtgttctgccttcgagttccactgcttgtcgggagagtgcatccactcctcgtggcgctgcgacggcggaccggattgcaaggacaagagcgacgaagaaaactgcgccgtcgcgacgtgccgtccggacgagttccagtgctcagacggcaattgcatccatgggtcccgtcagtgcgatcgggaatacgactgcaaagatatgagcgacgaggtcggatgcgtgaacgtgactctgtgtgaaggaccgaacaagttcaagtgccattctggagaatgcattaccctggataaagtgtgcaacatggcacgcgattgccgggactggtccgatgagcctatcaaagaatgcggaactaacgagtgtctggataacaacgggggatgttcacatgtgtgtaatgatctgaaaatcggatacgagtgcctctgcccggatggtttccagcttgtggctcagcgcaggtgcgaagatatcgatgaatgccaggatccggacacgtgttctcagctctgcgtgaatctggaaggcggctacaagtgccaatgcgaagagggattccagctggacccgcatactaaggcctgcaaggccgtgggttcgatcgcctacctgttcttcaccaaccggcatgaagtccggaagatgacgctggatcgaagcgaatacacctcgcttattccgaatctgagaaatgtcgtggccttggatactgaggtcgcctcaaaccggatctactggtcggacctcagccagcgcatgatctgttccactcaattggaccgggcccacggcgtcagcagctacgacactgtcatttccagggatatccaagccccggacggactcgccgtcgattggatccattcgaatatctactggacggactcagtgctgggcactgtgtccgtcgcagacaccaagggtgtgaaacgcaagaccctgttccgggaaaacgggtcaaagccgcgcgcgatcgtcgtggacccggtccatggattcatgtactggactgattggggcacccccgcaaagatcaaaaagggaggactgaacggggtggatatctattcactggtgaccgaaaacatccagtggcccaatggtatcacgctggatctgctgtcagggaggctgtactgggtggactcgaagctccactccatctcgtcgattgatgtgaatggcgggaaccgcaaaactattctcgaagatgagaagcgcctggcgcatccattctcgctggccgtgtttgaggacaaggtgttctggaccgacattatcaacgaagccattttctcggcaaaccggctgactggatccgatgttaacctcttggccgaaaatctgctgtcacccgaggacatggtcctctttcacaatttgacccaaccacggggagtcaattggtgcgaaaggaccacgctgtccaacggcgggtgccaatacctctgcctgccagcgcctcagatcaaccctcacagcccgaagtttacttgcgcctgtccagacgggatgctgctggcacgggatatgagatcgtgcctgaccgaggccgaggcggccgtggcaacccaagaaactagcaccgtgaggttgaaggtgtcatctaccgcggtgcggacgcagcacaccactactagaccggtgccagatacctccaggctccctggtgcaaccccaggactgactaccgtggaaattgttaccatgtcccaccaggcactgggcgacgtagctggaagaggaaacgaaaagaagccgtcatcggtgagggctctcagtatcgtcctgcccatagtgttgctggtgtttctgtgcttgggtgtgttcctgctttggaagaattggcgcctcaagaacatcaattcaatcaatttcgataacccagtctaccaaaagacgaccgaggacgaggtgcacatctgtcataatcaagacgggtactcatatccatcgagacagatggtgtccctggaggacgacgtggcc

SEQ ID NO: 10983 - DNA, 2580 bp, Artificial Sequence
  derived and/or modified sequence
atgggaccctgggggtggaaactgagatggacggtggcgcttctcctagctgcggctgggacagcagtcggagatcggtgtgagcgaaacgagtttcagtgtcaggatgggaaatgcattagttataaatgggtatgcgatgggtctgcagaatgccaggacgggtcagatgagtctcaggagacttgtctttcagtcacttgtaagtctggggacttttcatgcggaggaagagtcaaccgatgtataccacagttctggagatgtgatggacaagtggactgtgataacggatctgatgaacaagggtgtccacctaaaacatgcagtcaggatgaatttcggtgtcacgatgggaagtgtataagtagacagttcgtctgtgattcagatagagactgtcttgatggatcagatgaagcttcttgccccgtactcacatgcgggccagcctcctttcagtgtaattcctctacatgtattcctcagctctgggcatgcgataacgacccagattgcgaagatggatctgatgagtggcctcaacgctgccggggactctacgtatttcagggggattcaagtccttgttccgcctttgaatttcactgtctttctggagaatgcatccacagtagttggaggtgtgatggggggcccgattgtaaggataaatccgacgaagaaaattgcgctgtagctacttgtcgcccagacgaattccagtgttctgacggaaattgcatccatggaagtcggcaatgtgatagagaatacgattgcaaagacatgtccgatgaagttgggtgcgtaaatgttacactttgtgaagggcctaataaatttaagtgtcactctggggagtgtattacacttgataaagtatgcaatatggctcgggactgcagagattggtctgatgagccaattaaagaatgtgggactaacgagtgcctggataacaatggaggatgttctcatgtgtgcaatgatctgaaaattggatatgaatgcctttgtcccgacgggtttcagctcgtggcccagaggcgctgtgaggacatcgatgagtgtcaagatcccgacacatgttcacagctctgcgtcaatttagaaggggggtacaaatgccagtgtgaagaagggttccagcttgatccacatactaaagcctgtaaagctgtagggtctatagcctatcttttctttacaaacaggcatgaagttagaaaaatgactctggatagaagtgaatatacttctctaattcccaatcttaggaatgtcgtagcactagatactgaagtggcctctaacagaatctattggtctgacctaagtcaaagaatgatctgctccactcagttagaccgggcacatggggtgtcctcttatgatacagtcatctctcgggatatccaggcgccagatgggcttgccgtcgactggattcacagtaacatttattggacagattcagtactgggaactgtatctgttgcagatacaaaaggggtcaagagaaaaacactgttcagggagaatggatctaagcctcgggcaatagtggtcgatcccgtacatggatttatgtattggacagattggggaactcctgcgaaaattaaaaaaggaggattaaacggagtcgatatatattcactagtgactgaaaacatccagtggcccaatgggattacacttgatctcctttctggacggctgtattgggtagatagtaaattacattctatctcatcaatcgacgtcaatggggggaaccggaagactatactagaagatgaaaaacgcctcgcacaccccttttcattagcggtttttgaagataaagtcttttggacagatattataaacgaagctatattctccgccaatcggctcacaggaagtgacgtcaatctcctcgccgagaatcttctgtccccagaagatatggtgctattccataatttaacacagcctaggggagtgaactggtgcgaaaggactactctttcaaatggagggtgtcagtatttatgccttccagcccctcagattaatcctcactctcctaagttcacatgtgcttgccccgatggaatgctgctggcccgggatatgagatcttgcctcacagaagctgaagctgccgttgccacacaggagactagtactgtaaggctgaaagtgtcctctactgcagtgagaactcagcatacgactactcgccccgtccctgatacttctaggctgcccggagcaacacccggactcacaacagtggaaatcgtgacaatgagtcatcaggcattgggagatgtagcgggaaggggaaatgaaaagaaaccttcaagtgtgagagcgctgtccatcgtgcttcctatcgtgctgttagtatttctatgtttaggagtttttttactttggaagaactggcggctcaagaacataaattctattaactttgataacccagtgtaccagaaaacaacggaagatgaagttcatatctgccataatcaggatggatattcctacccatctagacagatggtatccctggaagatgatgtggct

SEQ ID NO: 10984 - DNA, 2580 bp, Artificial Sequence
  derived and/or modified sequence
atgggcccgtggggctggaagcttcgctggaccgtcgctctccttcttgccgcggcaggcacagctgttggtgaccgttgcgagagaaatgaattccagtgccaagatggaaagtgcatcagttataaatgggtatgcgacggcagtgccgaatgccaagatggatcagatgaatcgcaagagacgtgcctgtcagtgacatgcaagagcggggacttctcttgcggtggacgcgttaaccggtgtataccgcaattttggcgttgcgatgggcaggtcgattgtgataacgggagcgatgaacaagggtgcccaccgaaaacgtgtagtcaagacgaattccgctgccacgatggaaaatgcattagccggcaatttgtctgcgattcggatagagactgcttggatggctcagacgaggccagttgccctgtgctgacatgtggaccggcgtcttttcagtgcaattcctcaacatgcatcccccaactgtgggcgtgcgacaatgacccagactgcgaagatggctccgacgagtggccgcaacgttgtcgtggcctctacgtattccaaggcgacagctcgccgtgttctgcctttgaatttcattgcctgtcgggtgaatgtattcactccagctggagatgtgatggaggcccggattgcaaggataaatcagacgaagagaattgtgcggtcgctacgtgtcggcctgacgaatttcaatgttcagacggcaactgcatccatggaagccgacagtgcgatagggagtacgattgcaaggatatgtccgacgaagtggggtgtgtgaacgtcacactgtgcgaggggcctaataaattcaagtgccattcgggcgaatgcataacgttagataaggtgtgtaatatggccagagattgccgcgattggtctgacgagccgattaaagaatgtggaacaaatgagtgccttgacaacaacggaggttgttcacatgtctgcaatgacttgaagattggttacgaatgtttatgtcctgacggatttcaattagttgctcaaagaagatgtgaggatatcgacgaatgtcaggatcctgatacgtgcagccagttgtgtgttaatcttgaaggtggatataaatgccagtgcgaggaaggctttcagctcgaccctcacacgaaagcgtgcaaagccgttgggtcaattgcctaccttttttttacaaatcgtcatgaagttaggaaaatgaccttggatagaagcgaatatacaagcctgatcccaaacctgcggaatgttgtcgcactggacacggaagtggcctcgaatcgtatctactggtcagacctgtcacagaggatgatttgcagtacacagttggatcgcgctcatggcgtcagctcatatgatacggtgattagtcgagatatacaagcgcctgacggattagcggtcgattggattcatagcaatatttactggactgattccgtactgggaacggtgagtgtggcggatacaaagggagtgaaacgcaaaacattatttcgcgaaaatggttcaaaaccgagggcaatcgtagtcgatccggttcatggttttatgtattggacagattgggggacgccggccaagattaaaaaaggcggattaaatggtgttgatatttactccttggttacggaaaatatacaatggccgaatggtataacgttggatttgctatcaggtcggttatattgggtggattctaaactgcactctataagttcaattgatgtgaacggcggaaaccgcaaaacaattttggaagacgaaaaacgcttagcgcatccattctcactggccgtgtttgaagataaagtcttttggacggacattattaatgaagcgattttctcagcgaataggcttacaggctctgatgtaaatttgttagcggaaaatctgctgtcaccggaagatatggtcttgttccataaccttactcagccgcggggcgttaattggtgcgagcggaccacattatcaaatggcggatgtcaatatctatgcttacctgcgccgcaaattaatccgcattcaccgaaattcacgtgcgcttgcccggatggtatgttgcttgcgcgagatatgcgcagttgcctgacagaagcagaggccgcggtagcgacccaggaaacatcgacggtccgtctcaaagtcagctcgacggccgtcagaacacaacatacaacaacgagaccagtaccggatacaagcagattaccgggagctactccgggattgacgacagtggagatcgtaacaatgtcccaccaggcactgggagacgtggctgggcgcggaaatgaaaagaaacctagcagtgtgcgcgcgttaagcatcgtcttaccaattgttctgttagtattcttatgcttgggcgtctttcttctgtggaaaaattggagattgaaaaacattaatagcatcaacttcgataacccggtttaccagaaaacaactgaggacgaagttcatatatgtcataaccaggacggatattcttatccaagtagacaaatggtctctttagaggatgatgtggcg

SEQ ID NO: 10985 - DNA, 2580 bp, Artificial Sequence
  derived and/or modified sequence
atgggaccgtggggttggaagctgagatggaccgtggccttgttgctggctgcagcgggaactgccgtgggtgacagatgcgaacggaatgaatttcaatgccaagacggaaagtgcatttcctacaagtgggtttgtgacggttctgccgaatgtcaagacggatcggatgagtcccaggagacttgcttgtcggtcacttgtaaatccggcgatttctcctgtggagggagagtgaatagatgtatcccacagttctggcggtgcgacggacaggtggattgcgacaacgggtcggacgaacagggatgcccgccaaagacttgctctcaggacgaattccggtgccacgatggcaagtgtatcagccgccagtttgtttgcgactcagatcgggactgtctcgatgggtcggacgaggcttcatgcccggtgctgacctgcggacctgcgagcttccaatgcaactcctccacgtgcatcccgcagctttgggcgtgcgacaatgatccggattgtgaagatggatccgacgaatggcctcaaagatgccggggactctacgtgtttcagggggactcctctccttgctccgcctttgaattccactgcctctcaggtgaatgtatccattcttcatggagatgcgacggtgggccggactgcaaggacaaatcggacgaagaaaattgtgccgtcgcgacgtgccgccccgacgagttccaatgctctgacggcaactgcatccacggatcgaggcagtgtgatagagaatacgattgcaaagatatgagcgacgaagtgggctgcgtgaacgtgactctctgtgagggccctaacaagttcaagtgtcacagcggagagtgcatcacgctcgacaaggtgtgtaatatggcgcgggattgccgggattggtcagacgagcctatcaaggaatgcggtaccaatgaatgtcttgacaacaacggaggatgcagccatgtgtgcaacgacctgaagatcggatacgaatgtctttgcccggacggctttcagctggtggctcagcggcgctgcgaggatattgatgaatgccaggaccccgatacgtgctcgcagctgtgcgtgaaccttgaaggcggatacaaatgtcagtgcgaggaaggattccagcttgatccgcacaccaaggcttgcaaggccgtaggatccatcgcttacctcttcttcaccaatcggcacgaggtcagaaagatgaccctggatcgctccgagtacacctctcttattccgaacctgaggaatgtggtggcgctggatactgaagtggctagcaataggatctactggtcggacctctcccagaggatgatctgcagtacccagctggaccgcgcgcatggtgtgagctcctacgacaccgtgatctcgcgcgacatacaagccccagacggtctggccgtggattggatccattcgaatatctactggaccgactccgtgcttggtactgtgtctgtggcagatactaagggagtcaagagaaagactttgttccgcgaaaacggctcaaaaccgcgcgctattgtcgtggatccggtgcatggtttcatgtattggacggattggggcactccggcgaagatcaagaagggaggtctgaacggagtggacatctactccctggtgaccgaaaacatccagtggcccaacgggatcactctcgacctcctgtcaggacgcctctactgggtcgactccaaattgcatagcatctcgtccatcgatgtgaacggaggaaaccgcaaaactattctcgaggacgagaagcggttggcgcaccctttcagcctcgccgtctttgaggataaggtgttctggaccgacatcattaacgaggctatcttctcagctaatcgccttacgggatccgacgtcaacctgctcgcggaaaacctcctttccccagaggacatggtcttgttccataatctgacccaaccgcgcggggtgaactggtgtgaacgcaccactctgtctaacggagggtgccaatacctgtgcctgcccgcaccccaaatcaatcctcactcgccgaagtttacctgcgcctgtccagacggaatgcttctggcgcgcgacatgcggtcctgcctcactgaggcggaggccgctgtggcaactcaggaaacctcaactgtgcgactgaaagtgtcctccaccgcggtgcgtacccaacataccaccacccgtcctgtcccagatacttcgcggctgcctggggctactccaggtctgactactgtggaaatcgtcaccatgtcccatcaagcattgggcgatgtggcaggtcgcggaaatgaaaagaaaccctcaagcgtgagggctctgtcgatcgtcctgccaatcgtgctgctggtgtttttgtgtttgggagtgttcctgctgtggaagaattggcgcctcaagaatatcaactcaattaacttcgacaaccctgtctatcagaaaaccactgaggacgaggtgcacatctgccacaaccaggatggctactcctacccgtcaagacagatggtcagcctggaagatgacgttgcc

SEQ ID NO: 10986 - DNA, 2580 bp, Artificial Sequence
  derived and/or modified sequence
atgggcccctggggatggaagttacgctggactgttgcactgcttcttgcggccgctggaactgccgtaggggaccggtgcgaacgaaatgaattccagtgtcaggacggcaaatgcatttcttacaagtgggtgtgtgacggttccgcagaatgccaggatggctccgatgagtcacaggaaacctgcctatcggttacctgcaaaagcggggatttctcgtgcggagggcgagtgaatcggtgcattccgcagttctggagatgtgatgggcaggtcgattgtgacaatgggagtgatgagcagggctgccctcccaagacttgttcacaggacgaattcaggtgccacgacggtaaatgtatttcccgacagttcgtctgcgactcagatcgagattgtcttgatggaagcgatgaagcttcgtgccctgtcctcacttgtggtcccgcttcctttcagtgtaactcatctacctgcatcccgcagctgtgggcttgcgataatgatccggactgtgaggacggatccgacgaatggcctcaacgctgccggggcctatatgtttttcaaggggactccagtccctgctctgctttcgagttccattgtctctctggggagtgcatccactccagctggcgatgcgacggaggacccgactgtaaggataaaagcgatgaagagaactgtgccgtcgccacttgtcggcctgatgagtttcagtgttctgatggaaattgtatacatgggtctaggcagtgcgaccgcgagtatgactgcaaggacatgtcagatgaggttgggtgcgtgaacgtgactctgtgcgagggtccgaataaattcaagtgccatagtggggagtgcattactctggacaaggtctgtaacatggctagagattgtagagattggtctgatgagcccattaaagagtgcggaacgaacgaatgcctggataacaacggtgggtgcagccacgtgtgcaatgacttgaaaatcgggtatgagtgcctatgtccagacgggtttcaactggtggcccaacgtcgctgcgaggacattgacgagtgtcaggacccagacacctgcagtcagctttgtgtgaatctcgagggagggtataagtgtcaatgcgaggagggattccagcttgacccacatactaaggcctgtaaagcagtgggttcgatcgcttacttgttcttcacaaataggcacgaggtcagaaagatgacactagatcgtagcgagtacacgtccctgattcctaatctgaggaatgttgtcgccctcgataccgaggtggcctctaatagaatctattggagtgacctgagccagaggatgatttgctcaacacagctggaccgggctcacggggtgagcagctatgacaccgtcatttctcgggatattcaggcaccagacggcctcgcggtggactggatacattccaacatctattggacagacagcgtgcttggcacagtgtccgtggccgacaccaaaggcgtgaagcgaaaaaccctgttccgcgaaaacggctccaaaccccgagctatagtggtggatcccgtacatggcttcatgtactggacagactggggtacaccagctaagatcaaaaagggcggactgaacggggtggatatttactctttggtgacagaaaacattcagtggcccaacgggatcactctcgatctcctcagtggaaggctgtactgggtcgattctaaactccactccatctcatccatagatgttaacggcggcaatagaaagactatcttggaagatgagaagcggcttgcacatcctttcagcctcgccgtgtttgaggacaaggtcttctggaccgacattatcaatgaggcgatattttccgcaaatcgcttgaccgggtctgacgtgaacctactcgcggagaacctccttagccctgaggacatggtcctgttccataaccttactcagcctcgcggcgtcaattggtgtgagcgaactactctgtcgaacggaggatgccaatatctgtgtctgccagcaccacagatcaaccctcattcaccgaaatttacctgtgcatgcccagacggcatgctcctcgcgagagacatgcgatcttgccttacagaagccgaagctgcagtcgccactcaggaaactagcacggttagactgaaggtgagtagcaccgcggtaagaacgcaacacactacaaccagacccgttcccgatactagccggctgcctggggcaacaccaggattgaccaccgtcgaaatcgtgaccatgtcccatcaggccctcggcgacgtcgctggaagagggaatgaaaaaaagccctcaagtgtacgggctttaagcatagtacttcctattgtcctgttggtgtttctgtgcttaggagtgtttctcctctggaaaaactggcgtctgaagaatataaattctattaattttgacaatcctgtctaccaaaaaactacagaagacgaagtgcatatctgtcataatcaagacgggtacagctatccatctcgccaaatggtctcgttggaagacgatgtcgct

SEQ ID NO: 10987 - DNA, 2580 bp, Artificial Sequence
  derived and/or modified sequence
atgggcccatggggctggaagctccggtggactgttgctcttcttctcgcggccgctgggactgcagtcggcgataggtgtgaacgaaatgagtttcagtgccaggacggaaaatgcatcagctacaagtgggtttgcgacggctcggcagaatgtcaggatggttcggacgaatcgcaggagacttgtttgagcgtgacctgtaagtcaggagatttttcctgcggcggtcgcgtcaacaggtgcatcccgcagttctggagatgtgacggacaagtggattgcgacaatggatctgacgagcaggggtgcccgccgaaaacttgctcgcaggatgaatttcgctgccacgatggaaagtgtatttcacgccagtttgtgtgtgacagcgatcgcgactgcctggatgggagcgacgaagcctcgtgtccggtcctcacttgcggccctgcctcgttccaatgcaactcgagcacgtgcatcccccaactgtgggcatgtgacaacgaccctgattgcgaggacggttcagacgaatggccgcaaagatgccggggattgtacgtattccagggtgactcctccccttgctcagcgttcgagttccattgcctgtcaggagaatgcatccattcaagctggcggtgcgatggcggcccggactgtaaagataagtcggacgaggagaactgcgcagtggccacgtgccgccctgacgaatttcaatgttcggacggcaactgcatccacggctcaaggcaatgcgaccgggagtatgattgcaaagacatgtcggacgaggtcggatgcgtgaacgtaaccctgtgcgaagggcccaataagttcaagtgtcattccggagaatgtatcactctcgataaagtgtgtaatatggcgagagactgccgggactggtcggacgagcctatcaaagagtgcggaaccaacgaatgcctggacaacaatggagggtgctcacacgtttgtaatgacctcaagattggatacgagtgcctgtgcccagacggattccagctggtcgcgcagagacggtgcgaggacatcgatgagtgccaagacccggacacttgctcccagctgtgcgtcaatctggaaggcggctacaagtgccagtgcgaagaaggattccagctcgatccacataccaaggcatgcaaagccgtgggatcaatcgcctacctgtttttcaccaatagacacgaagtgaggaaaatgaccctggaccgcagcgaatatacctcgctgatcccgaatctccggaacgtggtcgccctcgacaccgaagtggcgtcaaataggatctactggtcggatttgtcgcagagaatgatttgctcaacccagctggaccgcgcccatggcgtgtcaagctacgatactgtgatcagcagggacatccaagcgccagacgggctcgcggtggactggattcacagtaacatatactggactgactcggtcttgggtaccgtgagcgtggccgacaccaagggtgtgaagagaaagactctgttcagggaaaacggatcaaaaccgcgggctatcgtggtggacccagtccacggattcatgtactggactgattggggcaccccggccaagatcaaaaagggcggactgaatggggttgacatttacagtcttgtgacggaaaacatccaatggccgaacggcatcaccctggacctcctgagcggacgcttgtactgggtcgactcgaagctgcattcgatcagctcgatcgatgtcaacggcggaaaccgcaagaccatcctggaggatgagaagagactcgcccacccgttctcgctcgccgtgttcgaagataaagtgttctggaccgacatcatcaatgaggcgatcttttccgcgaaccgtctcactggcagtgacgtgaacctgctggcggagaatctgctgtcgcccgaggatatggtgctgttccacaacttgacccaaccgcgcggtgtgaactggtgtgaacggactacgctgtcaaacggaggctgccagtacctgtgtctgccagcccctcaaatcaacccacattcgccaaaattcacttgtgcttgtcctgacggaatgctgctggcgcgcgacatgcggtcgtgtttgaccgaagcggaggctgccgtggctactcaagagacttccactgtgcggctgaaggtgtcctccaccgccgttcgtacgcagcacactactaccaggccggtcccagatacttctcgcctgccgggggccacccccggacttactacggtcgagatcgtgactatgtcgcaccaagcgctcggagacgttgctggcagagggaatgagaagaagccgagctcagtgagagcactgtcaatcgttctgcccatcgtgctgctcgtgttcctctgcctgggagtgttcctgctgtggaagaactggaggctcaagaacatcaacagcatcaattttgataatccagtgtaccaaaaaactactgaggatgaggtgcacatctgccataatcaggatggatactcgtacccatcacgccagatggtgagcctggaagatgatgtggcg

SEQ ID NO: 10988 - DNA, 2580 bp, Artificial Sequence
  derived and/or modified sequence
atgggaccatggggatggaagcttaggtggaccgtcgctctcctgcttgccgccgcaggaactgccgtgggcgacagatgcgagcgtaatgagtttcaatgtcaggacggaaagtgcatcagttacaagtgggtatgtgacggatccgccgagtgccaagatggttccgacgaaagtcaggagacctgcctcagcgtaacatgtaagagcggagacttcagttgcggcggaagggtcaatcgttgcatccctcagttttggcgctgcgatggacaggtcgactgtgacaacggttcagacgagcagggctgcccccccaaaacatgttcccaagacgaatttagatgccacgacggaaaatgtatctcaaggcagttcgtctgcgacagcgatagagactgtctggatggtagtgacgaagctagctgccctgtactgacctgtggccctgccagcttccagtgtaactcctccacatgcataccccagctgtgggcctgcgacaacgatcccgactgcgaggacggtagtgacgaatggccacagcgctgtaggggtctttacgttttccagggagactcctctccatgttctgctttcgagttccattgcttgtccggagaatgcatccatagctcttggaggtgcgatggaggtccagactgcaaggacaagagcgatgaagagaactgtgccgtggctacatgcaggcccgacgagttccaatgtagcgatggaaactgcatccacggttctaggcagtgcgacagagaatacgactgtaaggacatgagcgatgaagtgggttgtgtcaatgtgaccttgtgtgagggacccaacaagttcaagtgccactctggagagtgcatcacattggacaaagtatgcaatatggctcgtgattgcagggactggtctgacgagcccataaaagaatgtggtacaaacgaatgcctggataacaatggaggatgtagtcacgtctgcaacgatctcaagattggctacgagtgtctctgccccgacggattccaactggttgcacagaggaggtgcgaggacatagacgagtgccaagatcctgacacttgctcccagttgtgtgtcaacctcgagggaggctacaagtgccaatgtgaggagggtttccagttggatccacacactaaggcctgcaaggctgttggatccatcgcctatctgttctttacaaacagacacgaagtgcgcaaaatgaccctcgatcgttctgagtacacctctctcatccctaacttgaggaacgtggtggctttggacactgaggtggctagtaatagaatttactggagtgacctgagccaacgtatgatttgcagtacacagctggatcgcgcccacggagtgagcagctacgacaccgtcatcagtcgtgatatacaggcacctgacggacttgcagttgattggatccactccaacatctattggactgactcagtgcttggcactgtgtctgtggctgatacaaagggagtgaagcgcaagacattgttcagggagaatggttctaaacctcgcgctatcgttgtggaccccgtacatggcttcatgtactggactgattggggcacacccgccaagataaagaagggcggactcaacggcgtggacatctactccctggtgacagagaacatccagtggcccaacggcatcacattggatcttctctccggcagactttattgggtggactctaagctccattccatatcaagcatcgatgtcaatggtggtaatcgtaagaccatcctggaggatgagaagcgtctcgcacacccattctcactggctgtatttgaggataaggtgttctggactgacatcattaacgaagcaattttttctgccaaccgcctgaccggctctgacgttaacctgttggccgaaaatcttctcagcccagaggacatggtgcttttccataacctcacccaaccccgtggtgtaaactggtgcgaacgtactacactgtctaatggaggttgccagtacctgtgcctgcccgctcctcagatcaaccctcactcacctaagtttacctgcgcctgccccgatggaatgctgctggccagggacatgcgtagctgtcttaccgaagccgaggctgcagtggccactcaggagactagcaccgtgcgtcttaaggtctccagtacagctgtaaggacccagcacactacaacccgtcctgtaccagacacttcacgtttgccaggcgctacacctggcctcaccaccgtagaaattgtaaccatgtcacaccaagctctgggagacgtggctggaagaggtaatgagaaaaagccttccagcgtgcgcgccttgtctatcgtcttgccaatagtcctgctggtatttctctgtctgggtgttttcctgctgtggaaaaattggcgtctcaaaaacatcaactcaattaacttcgataaccctgtgtaccagaaaactactgaggacgaggtgcatatctgccacaatcaggatggctactcttacccctcacgccaaatggtgtccttggaggatgatgtagct

SEQ ID NO: 10989 - DNA, 2580 bp, Artificial Sequence
  derived and/or modified sequence
atgggcccttggggatggaagctccggtggaccgtggccctgctcctcgcggccgccggaaccgccgtcggcgataggtgcgaacggaatgagttccagtgccaggatggaaagtgtatttcatacaagtgggtctgtgacgggtccgccgaatgccaggacggatcagacgaaagccaggagacgtgcttgagcgtgacttgcaaatcgggagatttctcgtgcggaggccgcgtgaacaggtgtatcccacagttttggcgctgcgatggccaagtggattgcgacaacggttccgatgaacaaggatgtccccctaagacttgctctcaagatgagttcagatgtcacgatggtaaatgtatcagccggcagttcgtgtgcgactccgacagggactgcttggacggatctgatgaggcttcttgcccggtcctgacttgcggccccgcctcctttcaatgcaatagcagcacctgcatccctcagctgtgggcctgcgacaatgacccggattgcgaagatggcagcgatgaatggccgcaacgatgccgcgggctttacgtgttccaaggagactcgtcaccatgttccgcgttcgaattccactgcttgagcggagaatgcattcactctagctggaggtgcgacggaggacccgactgcaaagataaatccgatgaagaaaattgcgccgtggctacttgtcgcccagacgaattccagtgttccgatggaaactgtattcatggatcaagacagtgtgatcgggagtacgactgcaaggacatgtccgatgaggtgggatgtgttaacgttaccctgtgcgagggcccgaacaagtttaagtgtcactccggggagtgcatcacgctcgataaagtctgtaatatggccagagactgccgcgattggtcggacgagccgatcaaggaatgcggaaccaacgaatgcttggacaataacggaggatgctcacatgtgtgcaacgatctgaagatcgggtacgaatgtttgtgtcccgatggattccagctcgtcgcccaaagaagatgcgaggacatcgacgagtgccaggatccggacacctgctcacaactctgcgtgaacctcgaaggaggatataagtgtcaatgtgaggaaggatttcaactcgacccgcatactaaagcgtgcaaagctgtcggatcgatcgcttacctgttcttcacgaatcggcacgaagtgagaaagatgactttggaccgctcagaatacacttcactcatccccaacctgcgcaacgtcgtggcgctggatactgaagtggccagcaaccggatctattggtcggatctctcccagcggatgatctgctccacccagctggaccgcgcccacggggtttctagctacgacactgtcatctccagagacatccaggccccggacggtctggctgtggactggatacattcaaacatctactggactgactcggtcttgggcaccgtctcggtggcagacaccaagggggtgaaacggaaaactctgtttcgcgaaaacggatcgaagccgcgcgcgatcgttgtggacccagtgcatgggtttatgtactggaccgattggggaacgcccgctaagatcaagaaaggagggctcaacggagtcgacatttactcattggtgaccgagaatatccagtggccgaacggtatcactctggaccttctgtccggtcggctgtactgggtcgattccaagctgcactcaatctccagcatcgacgtgaacggcggaaaccgtaagacgattctggaggacgagaagcggctggcacaccctttcagcctcgcggtgttcgaggacaaggtgttctggactgacattatcaacgaagctatcttcagcgccaatcgcctgactggcagcgacgtgaacctgctcgcagaaaacttgctgagcccggaagatatggtgttgtttcacaacctgactcagcccaggggagtgaattggtgtgaacgcactaccctgtcgaacggaggctgccagtacctgtgcctgccggcaccgcagattaacccgcatagcccgaagttcacctgcgcatgtccagatggcatgcttctcgcccgggatatgcggtcctgtctcactgaagctgaagcggccgtggcgactcaggaaacctctactgtgcgactgaaggtgtcctccaccgctgtccgcacccagcataccacgactcggcctgtgccagacaccagccggctgcccggcgcgactcctggattgaccacggtggaaattgtgaccatgtcacaccaggcgctgggagatgtcgcaggcagaggtaacgaaaagaagccatcaagcgtgcgcgccctgagcatcgtgctgccgattgtgctgctggtgttcctttgtctgggagttttccttctgtggaaaaactggcgcttgaagaacatcaattcgatcaatttcgacaatccagtgtaccaaaaaactactgaggacgaagtgcacatctgccataaccaggatggatactcctacccatcacgccaaatggtttcgctcgaggacgatgtggca

SEQ ID NO: 10990 - DNA, 2580 bp, Artificial Sequence
  derived and/or modified sequence
atgggcccttggggctggaagctgaggtggacagttgctctattgttggctgccgctggaaccgctgtcggcgacagatgcgagagaaacgaattccaatgtcaggacgggaaatgcataagctacaaatgggtctgcgacggctcggcggagtgccaagacggctcggacgaaagccaagaaacatgtctgtccgtgacctgcaagtcgggcgactttagttgcggaggaagagtgaacaggtgtattcctcaattctggaggtgcgatggacaggtggactgtgacaacggtagtgatgagcaaggttgccctccaaaaacctgtagccaagatgagttccggtgccacgacggaaagtgcatctcacgccagtttgtgtgcgatagcgatcgagattgcctggacgggtcagatgaggcatcatgtccagtgctgacttgtggccccgcttcatttcagtgcaattctagcacttgcataccccagctctgggcatgcgataacgatcccgattgcgaggatggctctgacgagtggcctcagagatgtaggggattatatgtgtttcagggcgacagctctccctgcagtgcctttgagttccattgcctcagcggggaatgtatccattcaagctggcggtgcgatggaggccctgactgcaaggacaagtctgacgaagaaaactgcgccgttgccacctgtagacccgacgaattccaatgcagcgatgggaattgtatccacggctccaggcagtgcgaccgagagtatgactgcaaggatatgtctgatgaagtcggatgtgtgaacgtaaccttgtgcgagggaccgaacaaattcaaatgccattctggagagtgcatcacactggataaagtgtgcaacatggctcgcgactgtcgggactggagcgatgaacccattaaagaatgcggaactaacgaatgcctggacaataacggcggctgctcccatgtgtgcaacgatttgaagatcggttacgagtgcctgtgccctgacggcttccagctggtggcccagcggaggtgcgaagacatcgatgagtgccaggaccctgatacttgttcccagctctgcgtgaatctggagggcggctacaaatgccagtgtgaggaaggctttcaactggacccacatactaaagcttgtaaggctgttggatctattgcctatcttttctttaccaacaggcacgaggtcaggaagatgaccttggacagaagcgaatacacgagtctgatccctaaccttcgaaatgtggtggcactggataccgaagttgcttcaaatagaatttactggagcgatcttagccagcgcatgatctgttcaacccagctagacagggcacacggcgtgagctcatacgatacagttatcagcagggatatccaggcgcctgacgggcttgctgttgactggatccacagcaacatctattggaccgattctgtgctgggaacagttagcgttgcagataccaaaggagtgaagaggaaaactctctttcgcgagaacggttctaagccccgcgcaatcgttgtggacccagttcacggctttatgtattggactgactggggcacaccggcaaaaatcaagaaagggggcctcaacggagtcgatatctactctctggtcaccgaaaacatccagtggcctaacgggataaccctcgaccttctgagcgggagactttactgggtggacagtaaactccattcgatatctagtattgatgtaaatggtggcaacagaaagactattcttgaagacgagaaacgcctggcccaccccttctcactggcggttttcgaggacaaggtgttctggactgacattatcaacgaggcaatcttcagcgctaaccgattgacaggcagcgacgtcaacctcttggccgaaaatctgctatctccagaggatatggtgctcttccataacctgacacagccgcgtggagtcaactggtgcgaaaggaccaccttgagcaatggcggctgccaatatctgtgcctccctgctccccaaatcaatcctcatagtcctaaattcacctgtgcatgccccgacggcatgctgctcgcccgggatatgaggtcttgtctcaccgaggctgaggccgcagttgcaacccaggaaacttcaacagtgaggttaaaagtgtcatccaccgccgtgcgcacccagcacactaccacccggcccgttcctgacacaagcaggctgcccggagccaccccagggcttactactgtcgagatcgtgaccatgtcccaccaagcactgggagacgtggccggcagaggaaatgaaaagaagcctagcagcgtgagagccttgtctattgttctgcctatcgtgctgcttgtctttttgtgtcttggggttttcctcttatggaaaaattggcgcctgaaaaatatcaacagtataaacttcgataaccccgtttaccagaagacaactgaggacgaagtccacatttgccacaatcaggacggatattcatacccatcacgccaaatggtgtcacttgaggatgatgtcgct

SEQ ID NO: 10991 - DNA, 2580 bp, Artificial Sequence
  derived and/or modified sequence
atgggcccttggggttggaagctgcggtggacggtggctctcttgctagcggccgctggaacagctgtcggagacaggtgtgagagaaacgaattccagtgtcaggatggaaaatgtatatcatacaagtgggtgtgcgacggaagcgccgaatgccaggatggatcggacgagtcccaggagacatgcctgtctgtcacctgtaaaagtggtgatttctcatgtggcggacgggtgaacaggtgcattccccaattctggcgctgtgatgggcaggtggattgtgataacggctccgacgagcagggttgtcccccaaagacttgtagccaggatgagtttagatgtcacgatggaaaatgtatttcacggcaattcgtctgcgattctgacagagattgtcttgacggctctgatgaggcgagttgtccagtgctgacatgtggcccagcgtcgttccaatgtaattctagtacgtgcattcctcagctctgggcttgcgataatgatcccgactgcgaagacgggtcggacgagtggccacagaggtgcagaggcctttacgtcttccagggggactcctccccatgttctgccttcgaatttcattgtctttcaggtgaatgcatccattcatcttggaggtgcgacggaggcccggattgtaaggataagagcgacgaggaaaactgcgcagttgcaacctgccggcctgacgaatttcaatgcagcgatggaaactgcatacacggttccaggcaatgtgaccgagagtatgattgtaaagatatgagcgatgaagtcggctgcgtgaatgtgacactgtgtgaaggccctaataagttcaagtgccactccggcgagtgtattacacttgacaaggtgtgtaacatggcccgcgactgccgggactggtcagacgagcccattaaagagtgcggcaccaatgaatgtctcgataataacgggggctgttctcatgtgtgcaacgatctgaaaatcggttacgaatgcttgtgcccagatgggtttcagctcgtggctcaaagacgatgcgaagacattgatgagtgccaggatcccgatacctgttctcagttgtgcgtgaaccttgaaggcggctacaaatgccagtgcgaagagggcttccagctggacccccacaccaaggcttgtaaagccgtgggttccattgcataccttttctttacaaacaggcatgaggtgaggaagatgactttagatcgttcagagtacacctctctcatacctaacctcaggaacgtggtcgctctcgacacggaggtcgcaagtaacagaatctactggtccgacctttcccagcggatgatctgcagtacccagctagatagagcacatggggtgtctagctacgacaccgtgatttcgcgggacattcaagccccagacgggttggcggtggattggattcactcaaacatctattggactgattcagtgctcggcacagtatctgtggccgatactaagggggttaagagaaaaacccttttcagggagaacggcagtaaaccccgggcaatagtagtggacccagtgcatgggtttatgtactggacggattgggggactcccgccaagattaaaaaggggggtcttaacggtgtcgacatatattcgttagttacagagaacattcagtggccaaacggtatcaccctagacctgttaagtggcagactgtattgggtagacagcaagctccactccatctcgtccatcgacgtgaatggcgggaaccggaaaaccatcctggaggacgagaagcgactggcccaccccttctcacttgcagtgtttgaggacaaagtgttttggacagacattatcaacgaggctatattctcggctaatcgcttgactgggagcgatgtcaatcttctcgccgagaacctcctgtctccggaggacatggtgctgttccataatcttacccagcctcgcggcgttaattggtgcgaacgaactacattgtccaatgggggttgccagtatctatgtctgccagctccccaaattaatccacactccccaaaatttacctgcgcctgtcctgatggcatgctgcttgcaagggacatgagaagctgcttaacagaagccgaggctgcagtggccacacaggaaacctctactgtgcgattaaaagtgagcagcacagccgtgagaacccagcatacaaccacccgcccagtgcctgatacttcacggctgccaggcgccacaccaggactgacgactgtagaaatcgtgacaatgagccaccaggccctcggggacgttgcagggagaggtaacgagaaaaagccaagctcagtgagggcattaagtattgttttgcccatcgttctgctggtatttctgtgtctgggagtattcctcctgtggaagaactggcgcctgaagaatatcaattctatcaactttgacaaccccgtgtaccagaaaaccacagaagatgaggtgcatatttgccataaccaagacggttactcgtatccaagtaggcagatggttagcctggaagacgatgttgca

SEQ ID NO: 10992 - DNA, 2580 bp, Artificial Sequence
  derived and/or modified sequence
atgggaccgtgggggtggaagcttcgctggactgtcgctttgttattagctgcagcgggaactgccgtcggcgacagatgcgaaagaaatgaatttcaatgccaggatggcaaatgtatttcttataaatgggtctgtgatggaagcgccgaatgtcaagacggaagcgatgagtctcaagaaacgtgtttgtcagttacgtgtaaatcgggggatttcagttgcggtggtcgagttaatagatgcatcccacaattctggcgatgtgatggtcaagttgattgcgataacggaagcgatgagcaaggatgtccgccaaaaacgtgttcgcaagatgagttcagatgtcatgatggaaagtgcatttcccgacaattcgtgtgcgattcagatagagattgcttggatggttcggatgaagcatcttgccctgtgctgacttgtggacccgcaagttttcaatgcaattcttccacctgcattccacaactctgggcttgcgataatgatccagactgtgaagatgggtccgatgaatggccacaacggtgtcggggattgtatgttttccagggagatagcagtccctgtagtgcctttgagtttcattgtttgagcggagagtgtattcattcatcttggcgctgtgatggaggacctgattgtaaggataagtcagatgaagagaattgtgcagtggctacttgtcgcccagatgagtttcaatgctcggatggaaattgtattcacggttcccgtcaatgcgatcgggagtatgattgcaaagacatgtccgacgaggttggttgtgttaatgtaactttgtgtgaaggaccaaataagtttaaatgccactctggcgaatgcattacgcttgataaagtatgtaacatggcacgcgattgtcgagattggtccgatgaaccgattaaggagtgtggaacgaatgagtgcctagacaacaatggaggatgttcgcacgtgtgcaatgatctgaagattggttacgaatgcctgtgtccggatggattccagctggttgctcaaagacgctgtgaagatattgatgaatgtcaagatccagatacctgttcacagttgtgtgtaaatcttgaaggcggttacaagtgccagtgcgaagaagggtttcaactggacccacatactaaggcgtgtaaggcagtagggagtattgcatacttgtttttcaccaacagacacgaggtacgaaagatgactttggatagatctgaatatacttctctcatccccaatctaaggaacgtagttgcacttgacacggaggttgcgtctaaccggatctactggagcgatctttctcaacgtatgatttgttcaacccaattggatagagctcatggagtatcatcttacgacactgtcatttcccgagacattcaggccccagatggccttgccgtagattggattcactccaacatttactggacagatagcgtattaggaaccgtatcggttgcggatactaagggagtgaaaaggaaaactctttttcgagaaaacggatctaaaccacgagctattgttgtggatccagtacacgggtttatgtattggacagattggggaactcctgcgaaaattaaaaaaggcggactgaacggagtagacatctattctcttgttactgaaaatatccaatggccaaatggtataacgctcgatcttctttcgggacgactgtactgggtcgactctaagttgcattcaatttcgtcgatcgacgtaaatggaggaaatagaaaaactattctagaagacgaaaaacggctcgctcaccctttttcacttgcggtatttgaggataaagttttctggacagatataatcaacgaggctatcttcagcgctaatagacttacaggaagtgacgtaaatctgttggccgaaaacttgctgtctcccgaagatatggtactcttccacaatctcacacaaccacgaggagtcaattggtgtgaacggactacgctttcgaacggaggttgtcagtacctttgcctgccagctccccagatcaatccacattcacctaaatttacttgcgcgtgcccagatggtatgcttcttgctagagatatgcgttcatgtcttacagaagctgaagcagctgttgctacgcaagaaactagtacagttcgtttaaaagtgagttctaccgcggtgcgaactcagcacactaccacgcgaccggtcccagacacatccagactgccgggagctacgccaggactaaccacagttgaaattgtcaccatgtcacaccaagcactgggtgacgtggccggacgtggaaatgaaaagaagccaagttctgtgcgagctctgtctattgttctccccatagtacttctagttttcctttgtctcggcgtctttctgctgtggaaaaattggcgattgaaaaatatcaatagtattaattttgacaacccggtataccaaaagaccactgaagacgaggtccacatttgccataatcaggatggatacagttatccatccagacaaatggtctctcttgaagacgatgtggcc

SEQ ID NO: 10993 - DNA, 2580 bp, Artificial Sequence
  derived and/or modified sequence
atgggcccttggggctggaaacttcgctggacggttgcgctgctgttggccgctgccggtacggcagtgggggatcgttgcgagcgtaatgagttccagtgtcaagacggaaagtgcatatcgtataagtgggtatgcgacggatcggctgaatgtcaggatggttcggacgaatcacaggagacatgcctgagcgttacctgcaagtctggtgatttcagttgtggcggacgtgtgaatcgttgcattccccagttttggcgatgcgacggccaggtggactgtgataacggatcagatgaacaaggttgcccacccaagacctgctcccaggacgagttcagatgtcacgatggcaagtgcatttccaggcagttcgtgtgcgactcggaccgggattgcctggacggctcagatgaggcttcctgcccagtgctgacctgcggaccggctagcttccagtgcaacagttcgacatgcattcctcagctgtgggcctgcgacaatgatccagactgcgaggatggatctgacgagtggccgcagagatgccgtggtttgtatgtctttcagggtgacagttccccgtgttctgcctttgagtttcattgcttgtcgggcgaatgcatccatagtagttggagatgcgatggtggccctgattgcaaggataagagcgacgaggagaattgtgccgtagctacttgccgtccagatgagttccagtgcagcgacggaaactgcatccacggatcccgacaatgcgaccgcgagtatgactgcaaagatatgtccgatgaggtgggatgcgtgaacgtgaccctttgtgaaggaccgaataagttcaagtgccattcgggcgagtgcataactctggataaagtgtgtaatatggccagggactgtagagattggagcgatgaacccatcaaggagtgcggaaccaatgagtgcctggacaacaacggtggatgctcgcatgtgtgtaatgacctgaagatcggttacgaatgcctgtgccctgatggcttccagttggtcgctcagaggcgctgcgaggacatcgacgaatgccaagatccggacacctgtagccagctgtgcgtcaatctagaaggcggctacaaatgccagtgcgaggagggattccaattggaccctcatacgaaagcctgtaaagctgtgggcagcatcgcctacctatttttcaccaatcgacacgaggtgcgcaagatgaccctggataggagtgagtacaccagtctgattccaaatctgcgaaatgtagtggccctcgacacagaggtcgccagtaaccgcatctactggtcggatctctcccagcgcatgatttgctccactcagttagatcgagcccacggcgtgtcgagctacgatactgttatcagccgtgacattcaagccccggacggcttggccgttgactggattcattccaatatctattggaccgattccgtactgggtaccgtctcggttgccgatacaaagggcgttaaacgcaagacgctcttccgggagaatggtagcaagcccagggcgatcgtcgtggatccagtccatggttttatgtactggactgattggggcacacccgccaagattaaaaagggcggacttaatggcgttgacatctattcgttggtgacggagaatattcagtggcccaacggcataactctggacctgttgtccggccgtctctattgggtggatagtaagctccattccatctcctccattgatgtgaatggcggcaacagaaagacaatcctagaggacgagaagcggctagcgcatcccttcagcctggccgtgttcgaggataaggttttctggacggatatcataaatgaggctatcttttccgccaatcggcttacgggctcggatgtcaacctcctggcggagaatctgctgtcccccgaagacatggttctgtttcacaatctgacccaaccgcgcggagtcaactggtgtgagcgaacaacccttagtaatggcggctgccaatacctgtgtcttccggccccccagattaacccacactcgccaaagttcacgtgcgcatgccccgatggaatgctgcttgctagagacatgcggagctgtctaacggaggccgaggcggcggtggccactcaagagacatcgacggttcgactgaaggtatcctccacggctgtgcgtacccaacacacgactacacgcccggtccctgacacatcgcgactgcccggtgccacaccgggccttaccacagttgaaatcgtgacgatgtcccatcaggcactcggagacgtcgccggtcgtggaaacgagaagaagccgagctcggtgcgcgcccttagtatcgtgctcccgattgtcctcctcgtgttcctgtgtctgggcgtgttcctactttggaagaattggcgactgaagaacatcaacagcattaatttcgacaatccagtttatcagaagaccaccgaggacgaagttcacatctgccataatcaggacggctactcctaccccagccggcaaatggtgagcctggaggatgacgtcgcg

SEQ ID NO: 10994 - DNA, 2580 bp, Artificial Sequence
  derived and/or modified sequence
atgggaccctggggatggaagctccggtggactgtggcacttctgcttgccgcagcgggaactgcagtgggcgatcggtgtgaacgcaacgaatttcagtgtcaggatggaaagtgcatctcctacaaatgggtctgtgatggaagcgcagaatgtcaagatggatcagatgagtcgcaggaaacctgtctgtcggtcacttgtaagtctggcgacttctcctgcggtggacgtgtcaatcgctgcatcccacaattttggagatgtgatggccaagtggattgtgataatgggtcggacgagcagggatgcccgccaaagacctgtagccaggacgaatttagatgtcatgatgggaaatgtatatcgcgccaatttgtgtgtgactccgatcgagactgcctggatggctcggatgaagcctcgtgcccagttcttacctgcggtcctgcatcatttcaatgtaactcgagcacctgtatacctcaactttgggcatgtgataatgaccccgactgtgaagatgggagcgatgagtggccccaaagatgccgcggactctacgtgttccaaggagactcatccccttgttcagcgtttgaatttcattgtctttcaggtgaatgtattcattccagctggaggtgtgatggaggacccgattgcaaggataagtcggatgaagaaaactgcgcggtagcaacctgcagaccagatgaatttcagtgctccgacggaaattgcatacacggatcgagacaatgtgatagagaatacgattgtaaggatatgtccgacgaggtcggttgtgtgaacgtgactttgtgtgagggacctaacaagtttaagtgccactcaggggagtgtatcactctggataaagtttgtaacatggccagagattgtagagattggtcggatgagcctatcaaggaatgtgggactaacgaatgtctggataacaacggcggttgctctcacgtgtgcaacgatcttaagattggctacgaatgtctttgccctgatggattccaactcgtggcacaacgtcgctgtgaggatattgatgaatgtcaggatcccgacacctgcagtcagctgtgtgtcaacttggaaggcggctacaagtgtcaatgtgaagaaggattccaattggatcctcacactaaagcatgtaaggcagtgggttcgattgcgtacctcttcttcactaatcgccatgaggtgaggaagatgactctcgacaggtccgagtacaccagcctcatccctaacctgcggaatgtggtggcgctcgatacggaggtcgcgtccaaccgcatctactggagcgatctgagccagcgcatgatttgttctacccaattggatcgcgcacatggcgtgtcctcgtacgatactgttatttcgcgggatatccaggcacctgatggtcttgctgtggactggattcacagcaatatctactggactgacagcgtcttgggcaccgtgtcagtggcggataccaagggtgtcaagagaaagaccctgtttcgagagaacggttccaaacctcgtgcaatcgtcgtggacccagtgcacggctttatgtattggactgattggggaactcccgcaaagatcaaaaagggcgggctgaatggtgtggatatctatagcttggtgaccgagaatattcaatggccaaacggtatcactctcgacctgcttagcggacggctttactgggtggattcgaaactgcactccatttcgtccatcgacgtcaacggaggcaatcggaaaaccatcctggaagatgaaaagcgactggcacatccattctctctggcagtgtttgaagataaggtcttttggactgacataatcaatgaagcgatcttcagcgccaaccgcctcactggttccgatgtcaacttgctggcagaaaatctgctgtcccctgaggacatggttctgtttcataacttgacccaacctagaggtgtcaactggtgcgagcgtacgaccctgtcaaatggcgggtgccaatatctttgtctgccagcgcctcagatcaaccctcattcaccaaagtttacctgtgcctgtcctgacggtatgcttttggctcgcgacatgagatcatgcctgacggaagcagaggcagccgtggcaacgcaagaaacctcaactgtgagactgaaagtgtcatcgactgccgtgcggacccaacatactaccacgcgacctgtgcccgatacttcaaggcttcctggtgcaaccccaggtcttaccaccgtggaaatagtgaccatgtcgcatcaagcacttggagatgttgcaggacgaggaaatgagaagaagccttcttcggtgcgcgcactgtcgatagtgcttcctatcgtcctgcttgtgtttctctgcctcggtgtctttctgctgtggaagaactggagactcaagaacattaactccatcaacttcgacaaccctgtctaccaaaagaccactgaagatgaagtccatatttgccataaccaggatggttacagctaccccagccggcagatggtgtccctcgaagatgatgtggca

SEQ ID NO: 10995 - DNA, 2580 bp, Artificial Sequence
  derived and/or modified sequence
atgggcccttgggggtggaaacttcgatggaccgtggccctgttgttagccgcagccggaactgccgtgggagacaggtgcgagcgaaacgagttccaatgtcaggacgggaagtgtatcagctacaagtgggtgtgtgatggtagtgcagaatgtcaggacggatcagacgagtcccaggagacctgcctgtcggttacgtgcaaaagtggggacttttcctgcgggggtcgggtaaaccggtgtataccacagttctggaggtgtgacggccaggtcgattgcgacaatggttctgacgagcaagggtgtccacccaaaacttgtagtcaggatgagttcagatgtcacgacggaaaatgcatctcccgtcaatttgtgtgtgattccgatcgagattgtctggacggcagcgatgaggccagctgtcctgttctgacctgcgggcccgccagcttccagtgtaacagtagcacttgtatcccccagctgtgggcatgtgataatgatcctgactgtgaggacggatctgacgagtggcctcagagatgccgaggtctctatgtatttcaaggcgattcctcaccatgttccgcctttgaatttcattgtttgtctggtgagtgtattcacagctcatggcgatgcgacggcgggcccgattgtaaggataagagcgatgaggagaactgtgctgtcgctacttgtcgacccgacgaattccagtgctccgatggcaactgcatccacggaagccggcagtgcgaccgcgagtacgattgtaaggacatgtcagatgaggtcgggtgcgtaaatgtgacactgtgtgagggcccaaacaaatttaagtgccactcgggagagtgtattacactggataaggtttgtaatatggcacgggactgtcgtgattggtcagatgagcctataaaggagtgcggcaccaacgaatgtttggataacaatgggggctgcagtcacgtgtgcaatgacctgaaaataggctatgaatgcctttgtccggatggattccagctggtggcccagaggagatgtgaagacatagatgagtgccaggatccggacacttgctcacagctgtgcgtaaacctggagggcggctacaaatgtcagtgcgaggaaggattccagctagaccctcataccaaagcttgcaaggctgtcggatccatcgcttatttgttcttcacaaaccgtcatgaggtgcgaaagatgacgttggaccgctcagagtatacctcccttatccctaacttacggaacgtggtggcgcttgacacagaggtggcctccaacagaatttactggtctgatctgagtcagcgaatgatttgttctacccagcttgaccgagcacatggggtcagctcctatgataccgtgatctcgagagatatacaggctccagacgggctagctgtggattggatccacagcaacatctactggaccgacagtgtcctgggaaccgtatctgtggccgatacaaagggcgtcaagcggaaaacactgtttagggagaacgggtctaaacctagggctatcgtggtcgatccagttcacggattcatgtattggaccgactggggaacccccgctaaaattaagaagggggggctgaatggggtcgacatctatagcttggtcacagagaatatccaatggcccaacggcatcaccctcgacctactctccggaagactgtactgggtggacagtaaactgcattccatttctagcatcgatgttaatggaggtaaccggaagacaatcctggaagacgaaaagagacttgctcatccgttttctctggctgtattcgaggataaagtgttttggacagatatcattaatgaagcgattttcagtgctaatagattaacaggcagcgacgtcaaccttctagctgaaaatctcctctcaccagaggacatggtgctatttcacaacctcacacagcccagaggagtgaattggtgcgaacgaactaccctgagtaacggaggctgtcagtacctgtgcctgccagcgccacagattaatccgcactcccctaagttcacatgcgcttgtccagatggcatgctgcttgcccgggatatgaggtcttgcctaacagaagctgaggcggctgtggccacccaggagacgagtacggtaagactaaaagtcagctcaacggccgtgagaactcaacataccacaacccgccccgtgcccgacacatccagactcccgggcgccacccccgggttaaccacagttgaaatcgtgactatgtcccatcaggccctcggagacgtggccggcagaggcaacgagaagaagcccagttctgtaagggctctatctatcgtcttaccaatcgttcttctcgtgtttctgtgccttggcgtcttcctgctgtggaagaattggcgcctaaaaaacatcaatagtatcaattttgacaaccctgtttaccaaaagaccaccgaagacgaagtgcatatttgccacaaccaggatggctattcctatccgagtcggcagatggttagcctggaggatgatgtagca

SEQ ID NO: 10996 - DNA, 2580 bp, Artificial Sequence
  derived and/or modified sequence
atgggaccatggggttggaaacttcgttggacggtggcacttcttcttgcagcagcaggaaccgctgtcggcgatcgctgcgaacgaaatgaatttcagtgccaagatgggaagtgcatctcctacaagtgggtgtgtgatggttccgcagaatgtcaagatggaagcgatgaaagccaagaaacctgcctttcggtgacctgcaaaagtggggatttcagctgtggcggaagagtgaatagatgtatcccccagttttggcggtgtgatggtcaagtggattgtgataacggatctgacgagcaaggttgtcctcccaagacttgctcacaggatgagttccggtgtcacgacggtaagtgtatctcacggcagttcgtctgcgattccgatagagactgccttgatggatcagatgaagcctcgtgtccagtgcttacttgtggaccagcatcctttcagtgcaactcatcgacctgcatcccccagttgtgggcatgcgataatgatcccgactgtgaagatggatccgatgaatggccacaaagatgccgcggactttacgtgtttcaaggagacagctcgccatgttcagcgtttgaatttcactgtcttagcggggagtgtattcattcctcgtggaggtgtgacggtggacctgattgtaaagacaagtccgacgaggagaactgcgcggtggccacctgccgtcctgatgagtttcagtgctcggatgggaactgtattcatggatcgagacaatgcgacagagaatacgattgtaaggacatgtcagacgaagttggttgtgtgaacgtgaccctctgtgaaggtcctaacaaattcaagtgtcatagcggtgaatgtataacccttgataaggtctgtaacatggcaagagattgtcgagactggtcagatgagcctatcaaagaatgtggaactaatgaatgtctggacaacaatggcggatgcagccacgtgtgtaacgatctgaaaattggatacgagtgtctttgtcctgacggattccaattggtcgcgcaacggcgctgcgaggacatcgatgagtgtcaggacccagacacctgctcacagttgtgcgtcaatcttgagggaggttacaagtgtcaatgtgaggagggattccagcttgacccgcatactaaggcatgcaaggcggtgggttctatagcatacttgttctttactaaccggcacgaagtgcgcaagatgacccttgaccgcagcgagtacacctccctcattccaaaccttagaaacgtggtggcacttgacactgaggtggcctcgaatcgcatttactggtcggacctgtcgcaacgtatgatctgttcgacccagctggatagagcacatggagtgagctcgtacgatactgtgatttcccgggatattcaagcaccagatggacttgccgtggactggattcattccaatatctactggacggattcggtccttggtactgtgtccgtggcggacacgaagggcgtgaagcgaaagaccctgttccgcgaaaatggttccaaaccacgcgcaattgtggtggatcctgtgcacgggtttatgtactggactgactggggtacccctgcaaaaatcaaaaagggaggactgaatggtgtggacatatactccctcgtcactgagaatatccaatggccaaacggcattactctggatcttctgtcggggcggctttattgggtggacagcaaactgcactctatctcatcaattgacgtcaacggcggaaaccgcaagaccattcttgaggacgagaagcgtcttgcccatcccttttcactggccgtctttgaggataaggtgttctggaccgacatcatcaacgaagcaatcttttcggcgaatcggctgaccggttccgatgtgaatctcctggcagaaaacctgctttccccagaagatatggtcctgtttcataatctgactcagccgaggggtgtcaattggtgtgagcgcacgaccctgtccaacggtggctgtcaatacctttgcttgccagcacctcagatcaaccctcacagccctaaattcacctgtgcctgtcctgatggtatgcttttggctagagatatgcgatcctgcctgaccgaggcagaagcagcggtggcaacgcaggagacttcgaccgtgaggctgaaagtgtcctcgaccgcagtgagaacccaacatacgactaccaggccagtgcctgacacttcacggctgccaggggcaacccctgggttgactacggtggagattgtgactatgagccatcaagccctgggggatgtggcaggccggggtaacgaaaagaagccatcgtccgtgcgcgcccttagcattgttctgcctatcgtcttgttggtctttctttgcctgggtgtgtttctgctgtggaaaaactggaggctgaagaatatcaactcgattaactttgacaatcctgtgtaccagaaaaccactgaagatgaagtccatatttgtcacaaccaagacggatactcctacccatcgaggcagatggtgtccctggaggacgatgtggca

SEQ ID NO: 10997 - DNA, 2580 bp, Artificial Sequence
  derived and/or modified sequence
atggggccctggggttggaaacttcgttggaccgtcgcacttctgcttgcagccgcaggaaccgcggtcggtgacagatgtgaaaggaatgagtttcaatgtcaagacggaaagtgtatttcatacaagtgggtgtgtgatggtagcgcagaatgtcaggatgggtcagacgagtcgcaggaaacgtgtctgagcgtgacgtgtaaatccggtgatttttcgtgtggaggccgtgtgaaccggtgtattccacaattttggaggtgcgatggtcaggtggattgtgataacggatccgatgagcaaggttgtcctccgaaaacgtgctcccaagacgaattccgttgtcacgacggtaagtgcattagccgccaatttgtgtgtgattcggatcgtgattgtcttgatggtagcgacgaggcaagctgccctgtccttacttgtggtcctgcctcctttcaatgcaactcttcgacctgcatccctcagctttgggcatgcgacaatgatccagattgcgaggatggttccgacgagtggcctcaacgctgtagagggctttacgtgtttcaaggagacagctcgccttgtagcgcgtttgagtttcactgcctttccggcgaatgcattcactcatcctggagatgtgatggcggaccggattgtaaggataaaagcgatgaagagaattgtgctgttgctacttgtcggccggacgaatttcaatgtagcgatggtaattgtattcatggatctcgccagtgcgatagggaatacgactgtaaggacatgagcgacgaggtgggttgtgtgaatgtcaccctctgtgagggacctaacaagttcaaatgtcattcgggagagtgcattactctcgataaagtctgtaatatggcaagagactgtcgcgactggagcgatgagcccatcaaggagtgtgggactaatgagtgtcttgataacaatggcgggtgctcccacgtgtgtaacgatctgaagataggctacgagtgtctttgcccggacggatttcagcttgtggcccaaagacggtgtgaggacattgatgagtgccaggatccagatacctgctctcagctttgtgtgaacctcgagggcgggtacaaatgccaatgcgaggaaggttttcaattggatccacacactaaggcatgtaaggccgtcggtagcatagcttacttgttctttacgaacagacacgaggtccgtaagatgacccttgatagaagcgaatacacctccctgattcctaatctgcgtaatgtggtcgctctggacactgaagtggcgtcgaataggatttactggtccgatctctcgcagcgcatgatctgttcaacccagttggatcgagctcatggggtcagctcgtacgatactgtcatttcaagagatatacaggcacctgatggactcgcagtggattggattcattcaaacatctactggactgatagcgtcttgggtactgtgtccgtggcagataccaagggagtgaagagaaagaccctttttagagaaaacggttccaagccacgagcaattgtggtcgaccccgtccatgggtttatgtactggaccgattggggtaccccggccaagattaagaagggcggactcaatggagtggatatctactccctggtgactgaaaacattcagtggcccaatggtattacccttgacctgctgtcaggcagactctactgggtggacagcaaactgcattcaatatcgtcaatcgacgtgaacggcggaaatcggaaaaccatactggaagatgaaaaaaggcttgcgcacccattttcgcttgcggtgtttgaagataaagtgttttggactgacattatcaatgaggcaatcttttcagcgaacaggctcaccggatcggatgtcaatctgctcgcagagaatctcctctcgccggaagatatggtgcttttccataacctgacccaacccagaggggttaactggtgtgaaaggaccactctgtcaaacggcggatgtcaatacctttgcctgcctgcgccacagataaacccccactcgccaaagtttacctgtgcctgtcctgatgggatgctgctggcgcgggatatgcgatcgtgcctgactgaagcggaggcagcagtggcaactcaggaaacctcaaccgtgagactgaaagtctcctccactgcagttcgcacccagcataccaccacccgccccgtcccagataccagtagactgccaggagcaactcctggtcttactaccgtcgagatagtcaccatgtcacatcaagcactgggagatgtggcaggcagagggaacgaaaagaagccttcgtccgtgcgagcactctcgattgtgctgcctattgtgttgcttgttttcctttgccttggtgtctttcttctttggaagaactggaggttgaagaacataaacagcattaacttcgacaacccagtctaccagaaaacgacggaagatgaggtccatatctgccataaccaggatggttactcgtacccatcgcgccagatggtgtcgctggaagatgatgtcgcg

SEQ ID NO: 10998 - DNA, 2580 bp, Artificial Sequence
  derived and/or modified sequence
atgggcccttggggttggaaactccggtggactgtggctttgttgctggcggcggccgggaccgccgtgggagacaggtgcgaacgcaacgagttccagtgtcaagatggaaaatgcatctcatacaagtgggtgtgcgacggatcggctgaatgtcaggacggctcggatgaatcccaagaaacttgcctgtcggtcacgtgcaagtcaggtgacttctcctgtggcggaagggtaaaccgctgtatcccccagttctggcgctgcgatggccaggtggattgtgataacggatcggacgagcaaggatgcccgccgaaaacctgttcacaagacgaattccggtgtcacgacggaaagtgcattagtcggcagttcgtgtgcgactcggatcgcgactgtctggatggatccgatgaagcatcgtgcccggtgctcacttgcgggccggcgtcctttcaatgcaactcatctacctgcatccctcagttgtgggcctgcgacaatgacccagactgcgaggatggctccgacgagtggccccagcggtgccgcggcctgtacgtattccagggagatagctcaccatgctcagcctttgaattccactgtctgagcggtgagtgcatccacagcagctggcggtgcgacggtggaccagactgcaaggacaagtcggacgaggaaaactgcgccgtggcgacctgccgcccggatgaatttcagtgctcggacggaaactgcatacatggatcgcgccaatgcgacagggaatacgattgcaaagacatgagcgacgaagtggggtgcgtgaatgtcactctgtgcgagggcccaaataaattcaagtgtcatagcggcgaatgtatcactcttgacaaggtctgtaatatggcccgcgactgccgagactggtctgatgaaccaatcaaagaatgcggaactaatgaatgccttgacaacaatggaggctgttcccacgtgtgcaacgatctgaagatcggatacgaatgcctgtgcccggacgggttccaactcgtggcacagagaaggtgcgaagatattgacgagtgtcaggaccccgacacctgctcacaactttgcgtgaacctcgaaggaggatacaagtgccagtgtgaggaggggtttcaacttgacccacacaccaaggcctgtaaggcggtgggaagcatcgcatacctgttcttcaccaaccggcacgaggtgcggaaaatgaccctggatcgctcggaatatacctcgctgatcccgaacctgagaaacgtcgtcgccctggacaccgaagtcgcttcgaacaggatctactggtccgatctgtcgcagcggatgatctgttcaacccagctcgaccgcgcgcatggtgtgtcgtcctacgatacggtcatctcgagagacatccaagctccggatggcctcgctgtggactggattcacagcaacatctactggaccgacagcgtcctgggaaccgtcagcgttgcagacaccaagggcgtgaaacgtaagaccctcttcagagaaaatggctccaagcctcgggccatcgtggtggacccggtccacggattcatgtactggactgactgggggacccctgccaagatcaagaaaggaggactgaacggggtggacatctacagcctggtgactgagaacattcagtggcctaatggcatcacgctggatctgctgagtgggcgcctgtactgggtggactcgaagctgcactcaatttccagcatcgacgtgaacggtggcaatagaaagactatcctggaggatgaaaagagactggcgcacccgttctcgctcgccgtctttgaggataaagtgttttggactgatatcatcaatgaagcaatcttctcagctaaccgcctgactggaagcgatgtgaatctcctcgcagaaaacctgctgtccccggaggacatggtgctcttccataatctgactcagccaagaggcgtgaactggtgcgagcgaactacgctttcgaacggcggatgccagtacctttgcctcccggcacctcaaattaatccgcattccccaaagttcacttgcgcgtgcccggatggtatgctcttggccagggatatgcggtcgtgtttgacggaagcagaggccgccgtcgccacccaggagacttcaactgtccggctgaaagtgtcctcaaccgcagttcgcacccaacataccacgacccgccccgtgcctgacacctcccgcctcccaggagcgactcccggactcaccactgtcgaaatcgttactatgagccatcaggccctgggagatgttgcggggagaggaaacgagaagaagccatcaagcgtgcgggccttgtccattgtcttgccgatcgtcctgctggtgttcctttgcctgggtgtgttcctgctctggaagaattggagactcaagaacatcaactccatcaactttgacaatcctgtgtaccaaaagaccactgaggatgaagtccatatctgccacaaccaggatggatattcttacccgtcccggcagatggtgtccctcgaggatgacgtggct

SEQ ID NO: 10999 - DNA, 2580 bp, Artificial Sequence
  derived and/or modified sequence
atgggaccctggggctggaagttgagatggacagtggccctcctgctcgcagccgcgggcacagccgtgggcgacaggtgcgagagaaacgagttccagtgccaggacggtaagtgcatctcttataagtgggtctgcgatggtagcgccgagtgccaggacggttctgacgaaagtcaggaaacatgcctgagcgtcacatgcaagagcggtgacttttcctgcggaggtagagtgaataggtgcatcccccaattctggcgctgcgacggacaggtggactgtgacaacggtagcgatgagcagggttgccccccaaaaacgtgctctcaagacgagttccgctgtcatgacggtaagtgcatctctaggcaatttgtttgtgacagtgacagggactgtctggatggaagcgacgaagcttcatgtcctgtactgacgtgcggtcctgcctctttccagtgtaactcctcaacctgtatcccacagctgtgggcgtgtgataacgatccagattgcgaggacggatccgacgagtggccacaaaggtgtcgcggactgtatgtttttcagggagacagttccccctgttccgctttcgaattccactgcctgtctggtgagtgcattcattcttcttggcgctgtgacggaggtccagattgcaaggataagtcagacgaagagaactgtgcggttgcgacatgcagacctgacgagttccaatgtagcgatggaaactgcattcatggtagcagacagtgcgaccgcgagtacgattgcaaggacatgtccgacgaagtaggctgtgttaacgtgactctttgtgagggacctaataaattcaaatgccacagcggagagtgcattaccttggataaggtgtgcaatatggctagagactgccgcgattggtcagatgaacccatcaaggagtgcggcactaacgagtgcctggataataacggtggctgttcccatgtgtgcaacgaccttaagattggatatgagtgtctgtgccccgatggttttcagttggtcgctcagaggaggtgtgaagatatcgatgaatgtcaagatccagatacatgttcacaactttgcgttaacctggaaggaggttataagtgccaatgcgaggagggttttcagcttgatccccacacgaaggcctgcaaggccgtgggctccatagcgtacttgttctttacgaaccgccatgaggtgcgcaagatgactttggatcgcagtgagtacacaagcctgattcccaacttgagaaacgttgtcgccttggacacagaggttgcctcaaatcgcatctattggtctgacctgtctcagaggatgatctgctcaacccaactcgaccgcgcacacggcgtgagctcctacgatactgtgatttcaagggatatccaggcccctgacggcttggctgtagactggatccacagcaatatttattggactgattcagtgctgggcaccgtgagcgtcgccgacacgaaaggtgtgaagcgcaaaacactgtttagagaaaatggctcaaagccccgcgctatcgtcgtggaccctgtacatggttttatgtattggaccgattggggcacacctgccaaaatcaaaaagggcggactgaacggcgtggatatttactccctggtgacagagaacatccagtggcctaacggtattacattggacctgcttagtggccgcctctactgggtcgattcaaagctgcacagtatctcctccattgacgtaaacggtggcaatagaaagacgatcttggaggatgagaagaggcttgcacaccccttctcactggctgttttcgaggacaaagtcttttggaccgacattattaatgaggcaattttcagcgccaatagacttaccggtagcgacgtgaatttgctggccgagaacttgcttagccccgaggacatggttttgttccataacctcacacagcccaggggtgtaaactggtgtgagagaactaccctgagcaacggcggttgccagtacctttgccttcctgcgccacaaattaatccgcattccccaaagtttacctgcgcctgccccgacggtatgttgctcgccagagacatgcgctcatgcctcactgaagcagaggctgccgttgccacacaggaaacctctactgtaagattgaaggtctctagcactgctgtcaggacccagcacacgactacccgccctgtgcctgatacctccaggctgcctggcgccaccccaggcctgacgaccgtggaaatcgtgactatgagccatcaggccttgggcgatgttgccggtcgcggtaatgagaaaaaaccatcctccgtgcgcgccctgagcatcgtgctgcccattgtgctcttggtcttcctgtgtctcggagtgttcctgctctggaagaactggcgccttaaaaatatcaacagcattaacttcgataacccagtctaccagaaaactacagaggacgaggtgcacatctgccacaatcaggacggctactcttacccttcccgccagatggtaagtctggaagacgacgtcgct

SEQ ID NO: 11000 - DNA, 2580 bp, Artificial Sequence
  derived and/or modified sequence
atggggccgtgggggtggaaattacggtggactgtggcacttttgctcgctgctgccggcacagcagtgggcgacagatgtgagcgcaatgagtttcaatgtcaggatgggaaatgtatcagttataagtgggtctgtgatggaagtgcggaatgccaggacgggagcgacgaatcacaggaaacgtgtctgagtgtgacatgcaagtcaggtgacttcagctgtggcggaagagtgaatagatgcattcctcagttctggcgatgtgatggccaggtggattgcgacaatggatctgatgagcagggctgtccgcctaagacctgtagccaggatgagttccggtgccacgatggcaaatgtatctcacgacagtttgtttgcgactccgatagagactgcctggatggcagtgacgaagctagttgccctgtgctcacttgcggaccggccagtttccagtgcaactcctcaacatgcataccgcaactttgggcttgcgataacgatcccgattgtgaggatgggtcagatgaatggccacagcgatgccggggactctacgtatttcagggagactcatcgccctgttccgccttcgagttccattgcttgtcaggggagtgcattcattccagttggcgctgcgacggaggacccgactgcaaggacaaaagtgacgaagagaattgtgcggtggctacttgccgccctgacgaattccagtgttctgacggcaactgtatccacgggtctaggcaatgcgacagggaatatgattgtaaagacatgtctgacgaagtgggctgcgttaatgtcactctgtgtgagggacccaacaagtttaagtgccacagtggggagtgtatcacattagacaaagtatgcaacatggcccgagattgcagagattggagcgacgaacctataaaggagtgtggaacgaatgaatgcctggacaataacggcggctgcagtcacgtgtgcaacgatctcaagatcggttatgagtgtctgtgtccagatggatttcagcttgtagcacagcgtcgatgtgaagatatcgatgagtgccaggatcctgacacatgttcccaactgtgcgtgaatcttgaaggagggtacaagtgccagtgcgaagaaggctttcagttggatccccacactaaggcctgcaaggccgtgggctccatagcgtacctgtttttcacaaatcgccacgaggtgagaaagatgaccctcgacagatcagagtacactagcctaatccccaacttgaggaatgtggtggctctggacactgaagtggcctccaaccgcatttattggagtgatttatctcagcggatgatttgtagcactcagctggatcgagcacacggtgtgtcaagctatgatactgttattagcagggacattcaggcgcctgacggtctggcagtggattggatacattctaacatttactggaccgactccgttctagggactgtctccgttgcagataccaaaggtgtcaagcggaagaccctgttcagagagaatggctcgaaacctcgcgccattgtcgtcgatcccgtacacggcttcatgtattggactgattgggggactccagctaaaataaagaaaggtggactgaatggggtggacatctactctttggtaactgaaaacatacagtggcccaacgggataactctggacctgctgtcgggacggctgtattgggtcgatagtaaactccactctatcagctccatcgatgtgaatgggggtaatagaaagaccatcctggaggatgaaaagcgcttggctcacccgttttccttagcggtgttcgaagacaaggttttttggacagatattatcaatgaagccatattctctgctaataggttgaccggttccgacgtcaatttactggctgagaatctgctgagtccggaggacatggtgctgtttcacaaccttacccagcctcggggggtgaactggtgcgagaggaccacactctcaaacggtgggtgccagtacctttgcctccccgctccccagatcaacccccattcccctaagtttacctgcgcctgtcctgatggaatgctactggcccgggacatgaggagttgccttaccgaggccgaggcggccgtcgccacccaagagactagcaccgtccgtctgaaggtaagttccactgccgtgagaacccagcacactacaaccagacccgtgccagatacaagtcggctgcctggagctacgccaggactgacaaccgttgaaatcgttactatgagccaccaggccctgggggatgtagccgggagaggcaatgagaagaaaccttcttctgttagggctttgagcattgtactgcctatcgtgcttctcgtctttctgtgcctcggggtctttcttctgtggaaaaattggcgattgaaaaatatcaattccattaatttcgacaatccggtgtaccagaagaccactgaggacgaagtgcacatttgtcacaatcaagatggctactcctacccatcccgccagatggtgtctttggaggacgacgttgca

SEQ ID NO: 11001 - DNA, 2580 bp, Artificial Sequence
  derived and/or modified sequence
atgggcccttgggggtggaagctccgttggaccgtcgcattgttgctggcagccgcaggcactgcagtcggagacagatgtgagcggaacgagtttcagtgtcaagacggtaagtgcatttcatacaagtgggtgtgtgacggatcggctgaatgccaagacggaagcgatgaatcacaggaaacctgtctctcggtgacctgcaagtcgggcgactttagctgcggcgggcgagtgaatagatgtatcccacagttctggaggtgtgacggacaggttgactgtgataatggaagcgatgagcagggttgtcctcctaaaacctgttcacaggatgaattcaggtgtcatgatggcaaatgcatctcccgccaattcgtgtgtgactcggatcgcgattgcctcgatggatcagatgaagcatcatgtcctgtgcttacttgcggacctgcgtcgtttcagtgtaactcaagcacttgtatcccacaactttgggcctgtgacaatgaccccgattgcgaagatggcagcgatgaatggccccagaggtgtaggggtttgtacgtgtttcagggagattcttccccatgttcagcctttgaattccattgcctgtccggcgaatgtatacatagttcctggcggtgtgatggtggacctgactgtaaggataagtcggatgaggaaaactgtgcagtggccacttgtcgaccagatgaatttcagtgttcagatggtaactgtatccatgggtcgcgccaatgcgatcgcgagtacgattgtaaagatatgtccgatgaagttgggtgcgtgaacgtaaccctctgtgagggacctaataagtttaagtgtcatagcggcgagtgcattaccttggataaagtgtgtaacatggcaagagactgtcgtgattggtcggacgaacccattaaggaatgcggaaccaacgagtgtctggataacaacggaggatgcagccatgtgtgcaatgacctgaagatcggctacgagtgcctgtgtcctgatgggttccaactggtcgcgcaacgcagatgcgaggacatagacgagtgtcaagaccctgacacttgttcacagttgtgtgtgaacctcgaaggaggatataagtgccagtgcgaggaagggtttcaacttgatccgcatactaaagcgtgtaaggcagtgggatcaattgcatacctgttctttaccaatcgtcacgaagtgcgaaaaatgacgctcgatcggtccgaatacactagcctgattccgaacctgagaaatgtcgtcgcactcgatactgaggtcgcatcgaaccggatttactggtcggatctgtcacaaaggatgatctgttcgactcaacttgaccgagcacacggtgtctcttcgtacgacaccgtcatttcccgtgatattcaagcacctgatgggctcgcggtggattggattcatagtaacatatactggactgatagcgtccttggcactgtgagcgtggcagataccaaaggcgtgaagcggaaaactctgttccgcgaaaatggatcgaagcctcgagccatcgtcgtcgaccccgtgcatgggtttatgtactggaccgactggggaaccccagccaagattaagaaaggtggtcttaacggcgtcgacatctactctctcgtgactgagaatattcaatggccaaatggtattacgcttgatctgctgtccggacgcctctactgggtggattccaagctgcattccatttcatcaatcgacgtgaacggggggaatcgaaagaccatcctggaggacgaaaagcgactggcgcaccctttttcgctcgcagtattcgaagataaggtgttctggacggacattatcaacgaggcaatcttttcggccaatcgactcaccggaagcgatgtcaatctgctcgctgaaaaccttctttcgcctgaagatatggtgctgtttcacaacctcacgcagcctagaggagtgaactggtgcgaaagaaccaccctctccaacggcggttgtcagtatctgtgtctgcccgccccccagattaatccacacagccctaagtttacctgtgcctgtcctgatggaatgctccttgcgagagatatgagatcctgtctgaccgaagcggaagcagccgtggcaacgcaagagacgtcgactgtgaggctgaaggtgtcgagcaccgcagtccgtacccagcacactaccacccgccctgtcccagacacctcgcgcctccctggtgctacccccgggcttaccactgtcgaaatagttactatgtcccatcaggctcttggggacgtggcaggacggggaaatgagaaaaaaccttcgtccgtgagagccctttcgattgtgctgcctattgtgttgctggtctttctgtgtctcggtgtctttctgctgtggaagaattggagactgaagaatatcaactccatcaacttcgacaaccccgtgtaccagaaaaccactgaggacgaggtgcatatttgtcataaccaagatggatactcatacccgtcgcggcaaatggtatcgcttgaagatgatgtggca

SEQ ID NO: 11002 - DNA, 2580 bp, Artificial Sequence
  derived and/or modified sequence
atgggcccctggggttggaagctgcgctggaccgtggcgttgcttctcgcggcggccggaaccgctgtgggcgaccgctgcgaaagaaacgaatttcagtgccaggatgggaagtgcatcagctacaaatgggtgtgcgacggaagcgcagagtgccaggacggttctgatgagtctcaggaaacttgcctcagtgtgacatgcaagtcaggcgacttctcctgcggcgggcgggtcaatcggtgtattccccagttttggaggtgtgacgggcaggtggactgtgataacgggtccgatgagcagggatgcccccctaagacctgtagtcaagatgagttccgttgccacgatgggaaatgcataagcagacaattcgtctgtgatagtgacagggattgtctggatggaagcgatgaggcttcctgtccggtcctgacgtgtggccctgccagcttccagtgcaatagttcaacttgtataccgcagctttgggcgtgcgataatgatcccgactgtgaggacggctctgacgaatggcctcaaaggtgcagaggcttgtatgtgttccagggtgattcaagcccctgctcagcgtttgaattccactgtctctctggtgaatgcatccatagctcatggcgctgcgacggaggacctgattgtaaagataagtccgacgaagagaactgcgctgtggccacctgtaggcctgatgaatttcaatgttccgacgggaactgtatccacgggtcccggcagtgcgatcgagagtacgactgcaaggacatgagcgatgaggtggggtgtgttaatgtgacactatgcgaaggtcctaacaagttcaaatgccactcgggggaatgtatcacactagacaaagtgtgcaatatggcccgagattgcagagattggtccgatgagccgataaaggagtgcgggacaaatgagtgtctggacaataacggaggctgttcccacgtgtgtaacgacctgaaaataggctatgagtgcctatgtccagacggatttcagttggttgcgcaacggcgatgtgaagacatagatgaatgccaagatcccgatacctgctcccagctgtgtgtgaatctggaaggcgggtataaatgtcagtgcgaggagggctttcagctggatcctcacacaaaagcctgcaaggcagtcggctctatcgcttatttgttctttactaatcggcatgaagtgaggaaaatgaccttggatcgttctgagtacacatcactgatccccaatttacggaatgtggtcgccctagataccgaggtcgcgagtaacagaatctactggtccgatctaagccaaagaatgatctgtagcacacaattggaccgagcccacggtgttagttcgtacgacacggtgatctcaagagatattcaggcgccggacgggctggccgtggactggatacattccaacatatattggaccgactccgtcctggggactgtctctgtggcagacacaaagggggtgaagaggaagacactctttcgcgaaaacgggtcaaagccacgggctatcgtggtggatcctgtgcatgggttcatgtactggacagattgggggacacccgccaagatcaagaagggcggcctgaatggtgtggatatttactctttggtgaccgaaaatattcagtggcccaacgggattacactggacctgttgagcggtcgcctctattgggtggattcgaaattgcactccatctccagcatagatgtcaatggcgggaaccggaaaactattttggaggacgaaaagcggctagcccaccccttttctctggccgtctttgaggacaaagtcttctggacggacatcatcaatgaggccatctttagcgccaataggcttaccggcagcgatgtcaatctgcttgccgagaatcttctgtcccccgaggacatggtgttattccacaacctaacccagccaagaggggtgaactggtgtgagcggaccacgctgagcaatggtggttgccaatacctgtgcctgcctgcaccacaaatcaacccacacagtcccaagttcacctgcgcttgtccggacggcatgctgttggcaagagacatgcggtcttgtctgacagaggccgaggccgccgtggccacccaggagacaagtacggttcggctgaaggtgtcctcaacagctgtgcgcacgcagcatacgaccacgagacccgtgccagatacgtcccgcctgcctggtgccacccccggcctcaccaccgtggaaatcgtcactatgagccatcaagctctcggcgatgtcgccggaagggggaatgagaagaaaccttcatctgtccgggccctctcaatcgtcctgcctatcgtgctgctcgtcttcctgtgtctcggagtgtttctcctctggaagaattggcggctgaagaacatcaatagcatcaacttcgataatccagtctaccagaaaacgacagaagatgaggtacacatctgtcataatcaggacggatattcatacccctcacgacagatggtgtctttagaagatgacgtggca

SEQ ID NO: 11003 - DNA, 2580 bp, Artificial Sequence
  derived and/or modified sequence
atgggtccttgggggtggaaactgaggtggactgtcgcactgcttctggcagccgcaggcactgcagtgggggacagatgtgaaagaaacgagtttcaatgtcaagatggaaagtgtatctcgtacaagtgggtgtgtgatggatcagctgagtgccaagacggttcggacgaatcgcaggaaacttgcctctccgtgacctgtaagtcaggcgatttttcgtgtggtggtcgtgtgaatcgctgcattcctcaattttggcggtgtgacggacaagtggattgtgataatggatcggatgagcagggatgtccacctaaaacttgctcgcaagacgaatttagatgtcacgacggtaagtgcattagcagacaatttgtgtgtgactcggatagggattgcctcgatggtagcgacgaagcaagctgccctgtgctcacctgcggccctgcctcatttcagtgtaactcctccacttgtataccacaactctgggcctgcgataacgatccagactgtgaggatggatcagatgaatggccacaaaggtgccgcggcttgtacgtgtttcaaggtgattcgtcaccctgttcagcatttgaatttcattgtctgtccggagaatgtattcatagcagctggcggtgcgatggaggaccggactgcaaggataagagcgacgaagagaactgtgcagtggcaacttgcaggccggacgaatttcaatgtagcgatggcaattgtatacatggttcgagacaatgtgatcgtgaatacgattgcaaggacatgagcgatgaagtgggatgtgtgaatgtgaccctttgtgaaggtcctaataagtttaagtgccattctggagagtgcattacgcttgataaggtttgtaacatggcccgggattgcagagactggagcgacgaacctattaaggaatgcggcaccaatgaatgcctcgacaataatggaggctgttcgcacgtgtgtaacgatctgaagattggttacgagtgtctttgtccggatggatttcagcttgtcgcacaacgcaggtgtgaagatatcgacgaatgtcaagacccagacacctgctcgcagctctgtgttaacctcgaaggtggctataagtgtcaatgtgaagaaggttttcagctggatcctcatactaaagcctgcaaggcagtggggtcgattgcttacctgtttttcactaatcggcatgaggtgcgcaagatgaccttggacagatcagaatacacttccctcattccaaaccttaggaatgtcgtcgccttggacacggaggtggcctccaaccggatttactggtccgatctctcgcagagaatgatctgctccacccaacttgatcgcgcccacggagtcagctcgtacgataccgtcatttcccgtgatatccaggcaccagacggtctggccgtcgattggattcactccaacatctactggaccgattcggtgctgggaactgtttccgtcgcggacactaagggtgtgaaaagaaagaccctttttcgggaaaatgggtccaagccccgcgcgattgtggtcgatccggtgcacggttttatgtactggactgattggggcacccctgcaaagattaagaaaggcgggctcaacggagtcgacatttactcgcttgtgaccgaaaacatacaatggcctaatggcattactcttgatctgctgtctggcagactttactgggtggactcaaaacttcactccattagcagcattgatgtcaatggaggaaaccgcaagactatcctggaggatgaaaagcgccttgcacatccattctcacttgcagtgttcgaagataaagtgttttggaccgacataatcaatgaagcgatattcagcgccaacaggctgaccggctcagatgttaatctgcttgcagaaaacctgcttagccctgaggatatggtgctctttcataaccttactcaacctcgaggtgtgaattggtgtgagagaaccactctttccaacggaggctgtcagtacctctgcttgcccgcaccacagattaacccgcatagccccaaattcacctgtgcgtgtcctgacggtatgcttctggcccgcgacatgcgctcctgcctcactgaagccgaagcagcagtggctacccaagaaaccagcaccgtgaggctgaaggtgtcgtcgactgcagtccgtacccaacacacgaccacgcgacctgtgccagataccagccgtttgcctggggcaacgccggggttgaccaccgtggagatagtgactatgtcccatcaggccctcggagatgtcgcaggaagaggaaacgagaaaaaaccttcaagcgtgagggccctctcaatagtgctgcctattgtgctgctggtgttcttgtgtcttggggtattcctgctttggaagaattggcggctcaagaacatcaactccataaactttgataatcctgtgtaccaaaagaccactgaagatgaggtccacatttgtcataaccaggatggctactcgtacccttccagacaaatggtgtcgctcgaagatgatgtggcg

SEQ ID NO: 11004 - DNA, 2580 bp, Artificial Sequence
  derived and/or modified sequence
atgggcccatggggatggaaattgagatggaccgtggctctgttgctggccgcggcgggaaccgccgtgggagacaggtgcgaacggaacgaattccagtgccaggatggaaaatgtatttcgtacaaatgggtctgtgacggctcggccgaatgtcaagacggctctgacgagagccaagagacttgcctgagcgttacctgtaagagcggagacttcagctgcggcggacgggtaaatcggtgcatcccgcagttctggcgatgcgacggccaggtcgattgtgataacggatcagatgaacaagggtgtccgcccaagacttgctcgcaggatgagttcaggtgccatgacggaaagtgcatttcgcgccagttcgtctgtgactccgaccgggactgtctcgatgggtccgacgaggcgtcatgccccgtcctgacttgtgggcccgcctccttccagtgcaacagctcaacctgcatcccccagctgtgggcctgtgacaacgatccggactgcgaggacgggagcgacgaatggcctcaacggtgccgcggactttacgtgttccaaggggatagcagtccatgctcggcgttcgagtttcactgcctgtctggtgaatgtatccactcgagctggcgctgcgatggaggaccggattgtaaggacaagtccgatgaagagaattgcgccgtcgctacctgtcgccccgacgaatttcagtgctccgacggaaactgtatccatggatcgcgtcagtgcgatcgggaatacgattgcaaggacatgagtgacgaggtgggatgtgtgaatgtgactctttgcgaaggcccaaacaagtttaagtgccactccggagaatgcatcaccctggataaggtctgcaatatggcgagagactgcagagactggtcggatgaacccatcaaggagtgcggaaccaacgagtgcctcgataacaatggcggatgttcccatgtgtgcaacgacctcaagattgggtacgagtgtttgtgccctgacggtttccagctcgtcgcacagagacggtgcgaggatatcgatgaatgccaagatcctgacacttgttcccaactctgcgtcaatctcgagggtggctacaaatgccaatgtgaagagggattccaactggaccctcatacgaaagcctgcaaggctgtgggaagcatcgcgtacctgttcttcacgaaccgccacgaagtgagaaaaatgaccctggaccggtccgaatacactagtctcatccccaatctgaggaacgtggtcgcgctcgacaccgaagtggcgtccaacaggatctactggtccgatttgagccagcggatgatctgctccacgcagctggacagggcgcacggcgtctcttcttacgacaccgtgatttcgagagacattcaggcccccgatggtcttgcggtggattggatccactcgaatatctactggactgactcggtgctcggtactgtgtcggtggcggatactaaaggagtgaagcgcaagactctttttagagagaatgggtccaaaccaagggccatcgtggtggatccggtccacggcttcatgtattggaccgattggggtaccccggccaagataaagaaggggggactgaacggtgtggacatttactccctggttaccgagaatatacagtggcccaacggaatcactcttgacctcctgtccggacgcctgtactgggtcgattcaaagctgcactccatctcgtccatcgatgtgaatggagggaaccgcaaaacgattttggaggacgaaaagcgcctggcccatcctttcagcctcgcggtgttcgaggacaaagtgttttggaccgacatcatcaacgaggccatcttctccgccaaccgccttactggttcggatgtcaatctcttggccgaaaacctgctctcacctgaagatatggtgttgttccacaacctgacccagcccaggggcgtcaattggtgcgaacgcaccactttgtctaatggagggtgccaatacctgtgcctcccggcaccgcagattaatccgcattctccaaagttcacctgcgcctgcccggatggtatgctgctggcccgggatatgagatcctgcctgaccgaggccgaggccgcagtggccacccaggagacgtcaaccgtgcggctcaaagtgtcgtcgaccgccgtccggactcaacatactacgaccagacctgtgcctgacaccagccgactgccgggcgctacgccaggactgactaccgtcgagatcgtgactatgtcgcaccaggcactgggcgacgtggccggccggggaaacgagaagaagccgtcctcggtgagagctctgtcaatcgtgctgcccatcgtgctcctcgtgtttctgtgcctgggcgtgttccttctctggaagaattggagactgaagaacatcaattcaatcaacttcgataacccagtctaccagaaaactactgaagatgaagtgcatatttgccacaaccaggacggctattcttacccgagcagacagatggtttccctggaagatgacgtcgcc

SEQ ID NO: 11005 - DNA, 2580 bp, Artificial Sequence
  derived and/or modified sequence
atgggcccttgggggtggaagctgagatggaccgtggccctgcttctagctgcagccggcacggcagtgggggatagatgcgagcggaacgaattccaatgtcaagatggaaaatgcatttcatacaagtgggtgtgtgatggaagcgcagagtgccaagacggctctgatgagtcccaggagacctgtctgtccgtgacctgcaaaagtggagacttctcatgcggtgggagggtgaatcgttgcattcctcagttttggcgctgtgacggccaggttgactgcgataatggctccgatgaacaagggtgccccccaaaaacctgcagccaggacgagttcagatgccacgacgggaagtgcatctcaagacaatttgtgtgcgactcagatagggattgtctggacgggagcgacgaggccagttgtccagtactgacatgtggtcccgcctcgttccaatgcaattcaagcacatgtattccgcagctttgggcctgtgataatgaccccgattgcgaagacggttctgacgaatggccacagcgttgccggggcctttacgtctttcagggcgactcctctccctgctcggcatttgagtttcattgcctatcaggtgaatgtattcattcctcatggagatgcgatggtgggcctgattgtaaagataaaagcgatgaggaaaactgtgcggtggcaacctgccgaccggacgagttccagtgtagcgatgggaattgcatacacggctccagacagtgtgaccgcgagtacgattgtaaggatatgagtgatgaagttgggtgcgtgaatgtgacactgtgcgaggggccaaataagtttaaatgtcattccggcgaatgtattacgctggataaagtttgtaatatggcccgggactgtcgggactggtcagatgagccgatcaaggaatgtggtactaacgagtgcctagacaataacgggggctgctcccacgtgtgtaacgacctgaagatcggctatgagtgcctatgtcccgatggctttcagttagtggcccagcgccggtgtgaagatattgatgagtgtcaggatcccgacacctgttcccaattatgtgttaaccttgagggaggatacaaatgccagtgtgaggaaggctttcagctcgatccccacacaaaggcatgtaaggcagtggggagtattgcatacttgtttttcaccaacagacatgaagtgcggaagatgaccctggatcgcagtgagtacacctctttaatccctaatctcagaaatgtagtggccctcgacactgaggtagccagtaaccgaatctattggagtgatctgagtcagaggatgatttgctccactcagttggatcgggcgcatggcgtctcgtcttacgacaccgtcatctctagagatatccaggcccccgacgggctggcagtggactggattcactcaaatatctactggaccgactctgtgctgggcacggtttcagttgccgacaccaagggtgtgaaaaggaaaaccctcttccgagaaaacggaagcaagccacgcgcaatcgtggttgatccggtacacgggttcatgtactggaccgattgggggactcccgcaaagattaagaagggtggtcttaacggagtagatatctattcactggtgaccgagaacatccagtggcccaatggcatcaccctggatctgctgtcaggtcgcctctactgggtggacagcaagctccattctatctcttccattgacgtcaacggcggcaatagaaagaccattttggaagacgagaaacgcctggcacaccccttctctctggcagtgttcgaagataaagtgttctggacagatatcattaatgaggccatcttctcggccaatcgcctaacagggagcgacgtgaatttgctggctgagaacttgttatctccggaagatatggtcctgttccataacttgacacagccacgtggggtaaactggtgcgagaggacaacactttccaatggtgggtgccagtacctgtgcctacccgccccacagatcaatccacattcccccaagtttacatgtgcctgcccagatggaatgctgttggcccgggatatgcgttcttgtctcacagaagcagaggcagctgtggcaacccaggagacgagcaccgtgcgcctcaaggtgagctccactgcggtacggacacagcacaccacaactagacccgtgccagacacttctcgccttccgggcgcaacccctggcctaactaccgtggaaattgtgaccatgtctcaccaggctctgggggatgttgctggccgcggcaacgagaaaaaaccatctagtgtacgggccttgtccatagtgttaccaattgtactgctggtctttctctgcctgggggtgttcttattgtggaaaaattggaggttaaagaacattaactctattaattttgacaatcctgtatatcagaagacgacagaggacgaagtgcacatctgccataatcaggacggttatagctatccgtcacgccagatggtgtctttggaagatgacgtggca

SEQ ID NO: 11006 - DNA, 2580 bp, Artificial Sequence
  derived and/or modified sequence
atgggaccgtggggttggaagctccggtggacggtggctctgctgctcgcggcagctgggaccgccgtgggcgaccgctgtgaacggaatgaatttcaatgccaggacggcaagtgtatctcgtacaaatgggtctgcgacggatcggcggaatgtcaagacggctctgacgaatcgcaagagacttgtctcagcgtgacttgtaagtcaggcgacttctcctgcggaggacgggtgaaccgctgcatcccgcagttttggagatgcgacggacaggtggattgtgataatggcagcgacgaacaggggtgcccgcctaagacttgctcgcaagacgagttccgctgccacgacggtaagtgtatctccagacagttcgtgtgtgatagcgatagggattgcctggatggaagcgacgaagccagctgtccagtcctgacctgcggaccggccagcttccagtgcaactcaagcacctgcatacctcagctctgggcgtgcgataacgacccagattgtgaggacggatcggacgaatggccacagaggtgccgaggactgtacgtgttccagggagactcgtctccgtgttcggcatttgagtttcattgcctgagcggggagtgcatccactcatcgtggcggtgcgacggaggaccagattgcaaagacaagtcggatgaagagaactgtgcggttgcgacttgccgccctgatgagttccaatgctcggacggtaattgcatccatggttcgaggcaatgcgaccgagaatacgattgtaaggacatgtcagacgaggtgggatgcgtgaacgtcactctgtgtgagggacctaacaaattcaagtgccattcgggcgaatgtatcaccctcgataaggtgtgcaatatggccagggattgtcgagattggagcgacgagccaatcaaagagtgcgggactaatgaatgcctggacaacaacggaggctgctcccacgtgtgcaacgatttgaagatcggatacgagtgcctctgccccgacgggttccagcttgtggcacagcgccggtgcgaagatattgatgaatgtcaggacccagatacttgctcccaactttgcgtgaatctggagggcggttacaaatgtcaatgcgaggaaggattccagctggatccgcacaccaaagcatgcaaagccgtggggagcatcgcttacttgttcttcactaatagacatgaggtgcggaagatgactttggaccgcagcgaatacactagcctcatcccaaacttgagaaacgtggtggcgcttgacactgaggtcgcgagcaatagaatctactggtcagacctttcccagcggatgatttgctcgactcagctggatagagcacacggagtgtcgtcgtacgacaccgttatctccagggacatccaggcaccggatgggctggcagtggactggatccactccaacatctactggactgattcggttctcgggaccgtgtccgtggccgacaccaagggggtcaagcgcaagaccctcttccgggaaaacggatctaagccgagagcgatcgtggtggaccctgttcatggtttcatgtactggactgactggggcaccccagccaaaatcaaaaagggaggacttaatggagttgatatctactcgctcgtgaccgagaatattcagtggcccaatggaatcacgctggatctgctgagcggccgtctgtactgggtggactcaaagctccattcaatctcgtcgattgatgtgaatggcggaaatcgcaagactattctcgaggatgaaaagcggctggcgcacccattttccctggccgtgttcgaggacaaggtgttctggactgacatcatcaacgaagcgatcttttccgccaaccggcttacggggtccgatgtgaacctccttgccgaaaatctcctgtccccggaagatatggtcctgtttcacaacctgactcaacctcgcggcgtgaattggtgcgaacgcaccactttgtctaatggcgggtgccagtacctgtgtctgccggccccacagatcaacccccattccccgaaattcacttgcgcgtgccctgatggtatgctgctcgctcgtgatatgcgatcctgcctgaccgaagccgaggcagcagtggccacccaagagactagcaccgtcaggcttaaggtgagctcaactgccgtacgcacgcaacacacgactaccagacctgtgccggacacttcccggctcccaggtgcaacccctggcctgaccaccgtggaaatcgtgactatgtcccaccaagccctcggagacgtcgccgggcgaggaaacgaaaagaagccatcctcagttcgggcattgtcaatcgtgctgccgatcgtgctgttggtgttcctgtgtctcggtgtttttctgttgtggaagaactggcgacttaagaatatcaactcaatcaacttcgacaatccagtgtatcagaaaaccaccgaagatgaggtacacatttgtcacaaccaggacgggtactcatatccctcgcggcaaatggtgtctttggaagatgatgtggcg

SEQ ID NO: 11007 - DNA, 2580 bp, Artificial Sequence
  derived and/or modified sequence
atgggcccttgggggtggaagctgaggtggaccgttgcactgctactggcggctgcgggaacagccgtgggagatcgctgtgaacgtaacgagttccagtgccaggatggtaagtgcataagttacaagtgggtgtgtgatgggagcgccgagtgccaagacggatccgacgagagccaggagacttgcctttcagtaacttgcaaatctggcgactttagctgcgggggccgggtaaacagatgtataccgcaattctggcgatgtgacggccaggtcgattgtgataacggatccgatgaacaaggttgtcccccgaagacctgctctcaggacgagttcagatgccacgatggaaaatgcattagcaggcaatttgtatgcgattcggaccgcgactgtctagatggcagtgacgaggctagctgtcctgtcctgacctgcggaccggcatctttccaatgtaacagttcaacatgcataccccagctttgggcctgtgataacgaccctgactgcgaggatggctctgatgagtggccccagagatgccgaggcctgtatgtttttcagggggatagtagcccttgcagtgccttcgagttccattgcctgtccggagaatgtatccatagttcttggaggtgcgacggcggacccgattgtaaagataaatccgatgaggagaactgtgccgttgccacctgccggcctgacgaattccagtgtagtgacgggaattgtatccacggttctcgacaatgcgatagggaatacgattgcaaggacatgagcgatgaggtgggctgtgtgaatgtcaccctgtgcgaggggcctaacaagttcaaatgccactcaggcgagtgtatcaccctggataaggtctgtaacatggctcgcgattgtcgcgactggtcagatgaaccgatcaaggagtgcggcaccaatgagtgtcttgacaataacggagggtgtagtcatgtctgcaatgatttgaaaatcggttatgagtgcctctgtccagatggcttccaacttgttgcccagcgtcgctgcgaggatatcgacgagtgccaagaccccgacacttgctctcagctgtgcgtgaacctggaaggcggctacaaatgccagtgtgaagaagggtttcaacttgaccctcatacaaaagcttgtaaagctgtggggagcatcgcctacttattttttactaacagacacgaggtccggaaaatgactctcgatcgaagtgagtacaccagcctaatacccaaccttaggaacgtggtggcacttgatactgaagtggcaagcaataggatttactggagcgacttgtctcagcgcatgatatgctcgacccagttagaccgggcacacggcgtgtctagttatgacacagtgatctctcgggacatacaggcgcccgacgggctggccgtggattggattcacagtaatatatattggactgacagcgtgttaggcactgtctcagtggcagatacaaaaggcgtgaagaggaagacattattcagagaaaacgggtcaaagccgcgcgcgatcgtggtggacccagtgcacggttttatgtattggactgattggggcactcctgctaaaattaagaaagggggactgaatggggtagacatatatagcctggtgaccgaaaacatccagtggcccaacggcataaccttggatctgctgagcggcagactatattgggtggactcaaagctgcactccatctcgagtattgatgtgaacggcgggaatcgcaaaaccattctggaagacgagaaacgcttggctcatccgtttagcctcgcagtgttcgaggacaaagtcttttggaccgatatcatcaatgaggcgattttcagcgccaaccgtctgactggcagcgatgtcaacctactggcagagaacctactttccccagaggacatggtgttattccacaatctaactcagccacgaggcgtgaactggtgtgaacggaccacactgtcaaatgggggctgtcagtacttgtgccttccggcaccacagatcaatccccacagccctaaattcacatgcgcatgtccagacgggatgctcctagcacgagacatgcgatcatgcctcactgaagccgaagcagccgtagccacacaggaaaccagcaccgtgaggctgaaggtgagcagtaccgccgtgagaactcagcacaccaccactcggcctgtgccagacacctcaagactcccaggcgccacacctgggctgactaccgtggaaattgtcaccatgtctcaccaggccctcggtgatgtggctggccggggaaatgagaaaaagcccagttcagttcgggcactgagtattgtattgcctatcgtcctgttggtcttcctgtgcctgggagtgttcttgctgtggaagaactggcgactcaaaaatatcaatagcattaatttcgataatcccgtgtaccagaaaactactgaggatgaggtgcacatttgtcataaccaggacggctacagctacccttctcgtcagatggtgagcctggaggacgatgtagca

SEQ ID NO: 11008 - DNA, 2580 bp, Artificial Sequence
  derived and/or modified sequence
atgggcccttgggggtggaaactgaggtggaccgtcgcgttgctgctcgctgcagccggcacagccgtgggcgaccgatgcgagcggaatgagttccagtgtcaggacggcaagtgcatttcttacaaatgggtgtgtgacggctcagctgagtgtcaagatggttccgacgagtcccaggagacctgcttaagcgtgacttgcaaaagcggggacttctcttgcggcggacgtgtgaatcgctgcattcctcagttttggcgttgcgacggccaggtggattgcgacaacggcagcgatgagcaagggtgcccacccaaaacctgtagtcaagatgagttcaggtgccatgacggcaagtgcatttcccgtcaattcgtatgcgacagcgacagggattgcttggatggctctgacgaagcgagttgtccagtcctcacttgcggcccagcgtcattccagtgcaatagcagcacctgcattccacagctgtgggcatgtgacaatgatcctgattgcgaggacggatctgatgaatggcctcagcgatgtaggggcctctacgtgttccaaggcgactcttcaccttgtagcgcttttgagtttcattgtctcagcggagagtgtatccatagttcttggcgctgtgatgggggccctgactgcaaggacaagtctgacgaggaaaattgcgctgtagctacttgccggccagacgagtttcagtgctcagatgggaactgcatccatggatcccgccagtgtgaccgagagtatgactgtaaagacatgtctgatgaggttgggtgcgtaaacgtcacactctgtgaaggccccaataagtttaagtgccatagcggagaatgcataaccctggataaagtgtgtaacatggcgcgggactgtagggactggtctgacgagccaattaaagaatgcggcaccaacgagtgcctagacaataatgggggatgctctcatgtttgcaacgacctgaagatcggttacgagtgcctgtgcccagacggtttccagctggtggcccagcgccgatgtgaggacatcgacgaatgtcaagatccggacacctgctcccagctgtgcgtgaacctcgaaggcggctacaagtgtcagtgcgaggagggctttcaactcgatccccacactaaagcctgcaaggcagtcgggtctatcgcgtatctattttttaccaataggcacgaggtgcgaaagatgacattagataggagcgagtacacaagcctgattcctaatctgcgaaacgtagtggccctggatactgaagtcgctagtaaccggatatattggagcgatctgagccagagaatgatttgttcaacacagttagatagggcccatggcgtgtcgtcttacgatacagtaatctcacgagatattcaagcgcctgacgggttggccgtcgactggattcattcaaatatttactggactgattccgtgcttggcactgtgtcagttgctgataccaaaggcgttaagcgtaagacactctttagagagaatggaagcaaacccagagccatagtggtagatcccgtccacggtttcatgtattggaccgactggggaacccctgcgaagattaagaaggggggcctgaacggagttgatatatactccttggtcacagaaaatatacagtggcctaatggtattacgcttgaccttttgagcggccggctgtattgggtggattctaagctgcacagcatttcaagcattgacgtaaacgggggcaaccgcaaaacaatcctagaagacgagaaacgcctggcccaccctttctccctcgctgtgtttgaggacaaggtcttctggacagatatcatcaatgaagctatcttcagcgctaatcggctgaccgggtctgatgtaaacctactggcagagaacctcctatccccggaggacatggttctgttccacaaccttacccaacctagaggggtcaactggtgcgaaagaacgactctttcaaacggagggtgtcagtatctgtgccttcccgccccccagattaacccgcacagccctaagtttacatgcgcttgccctgatggaatgttgcttgccagggatatgcggagctgcctcactgaggccgaagcagctgtggctacacaggagacgtccactgtgcgcctgaaggtttcgagtactgctgtgcggacccagcacacaactacaagacctgtgccggacaccagtaggctgcccggggctacccccgggctcactacagtcgagattgtgactatgtcccaccaggcccttggtgacgtcgcaggaagagggaatgagaagaagccaagtagcgtgcgcgccctcagcatagttcttcccattgtgctgcttgtatttctgtgcctaggcgtgttcctactatggaagaactggcgcctgaagaacataaatagcatcaactttgataatcctgtgtaccagaagaccaccgaggacgaggtccatatttgtcataatcaggatggttacagctacccaagccgccaaatggtcagcctggaggatgacgtggct

SEQ ID NO: 11009 - DNA, 2580 bp, Artificial Sequence
  derived and/or modified sequence
atggggccgtggggttggaagctgcgctggaccgtcgccctgcttctggccgccgctggaaccgccgtcggcgaccggtgcgagcggaacgaatttcaatgccaggatggaaaatgcatctcgtacaagtgggtctgcgacggatccgcggaatgtcaagatggatcagatgaatcacaggaaacctgcctctccgtcacttgcaaatcaggggacttttcatgcggcggacgcgttaaccggtgtatcccacaattctggagatgcgatggacaggtggattgtgataacggctcggacgagcaaggatgcccaccaaagacctgcagccaagacgaattccgttgtcatgacggaaagtgcatctcgcgccagttcgtgtgcgattccgacagagactgcctcgacggatcggacgaagcctcctgcccggtcctgacttgcggtccagctagctttcaatgtaattcgagcacgtgtattcctcagctctgggcgtgcgataatgacccggattgcgaggacggctcagacgagtggcctcagcgttgtaggggcctgtacgtctttcaaggcgactcatcgccgtgctccgcgttcgaattccactgcctttcgggggaatgcatccactcgtcttggagatgtgacggaggccctgactgtaaggacaagtcggatgaggagaactgcgcggtggccacctgtcgcccggacgagttccaatgttcagatggcaactgcattcatggctctcggcagtgcgacagagagtacgattgtaaagacatgtcagacgaagtgggatgcgtgaacgtgactctctgcgagggccctaacaaattcaagtgccactcaggagaatgcatcacgctggacaaagtctgtaatatggcacgcgactgccgggactggtccgacgaaccgatcaaagaatgtggaaccaacgagtgtttggacaataacggcgggtgctcacatgtgtgcaatgatctgaaaatcggatacgagtgcttgtgcccggacggattccagctcgtcgcgcagcgcagatgcgaggacattgacgaatgccaagaccctgatacctgctcccagctctgcgtgaatctggaaggaggctacaagtgccagtgcgaagaaggatttcagctggatcctcacaccaaggcatgcaaggccgtcggttcgatcgcttacctgtttttcaccaatcgccacgaggtgcggaagatgaccctcgaccggtcggaatacacgagcctgatcccaaaccttagaaatgtcgtcgccctcgacaccgaagtcgcatccaaccggatctattggtcagatctgtcgcagcgcatgatctgctcgactcagctggatcgagcacacggagtctcctcgtacgacactgtgatatcacgggacatccaggccccagacggactcgccgtggactggatccacagcaatatctactggactgattcagtcctcgggaccgtgtcggtggcagacacgaaaggggtgaagaggaaaaccctcttcagagaaaacggttccaagccgcgagctatcgtcgtggacccggtgcacggttttatgtactggactgactggggcacgcctgctaaaatcaaaaagggaggactgaacggcgtggacatctactcgctggtgaccgaaaacattcagtggccgaacggtatcaccctggacctgctttcgggacggctgtactgggtggactccaagctgcactcgatcagctccatcgatgtgaacggcggaaaccgaaagaccatcttggaggacgagaagcggctcgctcacccgttctctcttgccgtctttgaggacaaggtgttctggaccgatatcatcaatgaggcgatattcagcgccaacagactgactggatctgatgtgaacctgcttgcagagaacctcctttccccagaagatatggtgctgtttcacaatcttactcagccacggggtgtgaattggtgcgagcgcaccaccctgtccaacggaggatgccaatacttgtgtctcccggcgccacagatcaatccgcactcgcccaagttcacctgcgcttgccctgatggaatgctgctggcacgggatatgcgatcctgtctgactgaggctgaagctgccgtggcaactcaagaaacctcgactgtcaggttgaaggtttcgagcactgcggtgcgcacgcagcatactactaccagacccgtcccggacacgtcgcgcctccccggagccaccccgggactgactaccgtggagattgtgactatgtcccatcaggcgcttggcgatgtcgccggaagaggaaacgagaagaagccatcaagcgtgcgagccctcagcatcgtcctcccaatcgtgctgctcgttttcctgtgtctgggtgtgtttctcttgtggaaaaactggagactgaagaacatcaactccatcaactttgacaacccggtgtatcagaaaaccaccgaggacgaagtgcacatttgccacaatcaagacggatactcgtacccctctaggcagatggtgagccttgaagatgacgtggcc

SEQ ID NO: 11010 - DNA, 2580 bp, Artificial Sequence
  derived and/or modified sequence
atgggtccatggggatggaaacttcgttggactgtcgccctgctgctggcagcagcaggaaccgcagtgggggacaggtgcgagcggaatgagttccagtgtcaagacggtaaatgcatctcgtacaagtgggtctgcgacggttcagccgaatgccaggatggatccgacgagtcacaggaaacgtgtctgtccgtgacttgtaaatcaggcgatttttcatgcggtggtcgggtgaacagatgtattccacagttctggcgatgtgatggacaggtcgactgtgacaacggatccgatgaacagggttgtccaccaaaaacctgcagccaagacgaattccgctgtcacgatggaaagtgcatctccagacaatttgtgtgtgattcggatagagactgccttgatggaagcgatgaagcatcctgtccagtgcttacgtgtggtccggcgtccttccaatgtaacagctcaacgtgtatcccgcagctttgggcgtgcgataatgaccccgattgtgaggatggatcagatgaatggcctcagagatgtaggggcctctatgtgtttcagggagattcgtccccttgctcagcttttgaatttcattgtctttctggtgaatgtatacatagctcctggcggtgtgacggtggacctgactgcaaggacaagtccgatgaggaaaactgcgcagtggccacctgtcgacctgatgaatttcaatgtagcgatgggaattgtattcatgggagccgccaatgcgatcgagaatacgattgtaaggatatgagcgatgaagtgggatgtgtcaacgtgactctttgtgagggacccaacaagttcaaatgtcactccggggaatgtatcactcttgataaagtttgcaatatggcaagagactgtcgggattggtcagatgaacctatcaaggaatgcggcaccaacgagtgtctggataacaacggcggatgttcacacgtctgcaatgatcttaagattggctacgagtgtctgtgtcctgatggatttcagctggtcgcgcagcggcgatgcgaggatatcgatgaatgtcaagatccggacacctgttcccagctctgcgtgaacctggaaggaggctataagtgccaatgtgaggaaggttttcagctggatccgcatactaaggcctgtaaggcagtgggaagcattgcatacctgttctttactaatcgtcatgaagtgcgcaagatgacccttgatcggtcagaatacacgagcctgattccgaacctgagaaatgtcgtggcgttggatactgaagttgcgtcaaaccgaatctactggtctgacctgtcgcaaagaatgatttgtagcacccagcttgatagagcgcatggggtttcttcttacgataccgtgatttcccgtgacattcaagcacctgatggtttggccgtcgactggattcactctaacatatactggacggattcggtcctgggtaccgtgtcggtcgcagacaccaagggggtcaaacgtaagactctgtttagagaaaacgggtccaagcctcgtgcaattgtcgtggatcctgtccatggttttatgtactggactgattgggggaccccagcaaagatcaaaaaaggaggccttaacggtgtcgatatctactcccttgtgactgagaacattcaatggccaaacggaattaccctcgatctgctttcaggacgactttactgggtcgactcaaaactccatagcatttcgagcatagatgtcaacggtgggaatcgcaagacgatcttggaggacgagaagcggcttgcacatccttttagcctggctgtgtttgaggataaagtgttttggacggacataatcaatgaggccattttctccgccaaccggcttactgggtctgatgtgaatcttttggcagagaatcttctttccccagaagatatggtgctgtttcacaatctgactcaaccccggggtgtgaactggtgtgagcgcactactctttccaacggtggctgtcaatacctttgccttcctgcaccacagattaatccacacagccctaagttcacctgtgcctgcccagatggaatgctgctggccagagacatgagaagctgtcttaccgaggcagaagcagcagtggcgactcaagaaaccagcactgtccgtctgaaggttagttcgacggcagtgcggactcagcataccactacccggcccgtgcctgatacttcgcgactgccgggcgccaccccaggacttacgaccgtggaaatcgtgaccatgtctcaccaggccctgggggacgtggcaggaaggggtaatgagaagaagccttcttcggtgagagccttgtccatagtcctgccaattgtgcttctggtgttcctctgtttgggagttttccttctgtggaagaattggaggctgaagaacatcaactccatcaattttgacaacccagtctaccaaaagaccactgaggacgaggttcatatttgtcacaaccaggacggatattcgtacccatcgagacagatggtgtcgctggaggacgatgtcgcc

SEQ ID NO: 11011 - DNA, 2580 bp, Artificial Sequence
  derived and/or modified sequence
atgggaccctggggttggaaacttaggtggaccgtggccttgctgttagcggccgcaggtactgctgtgggcgaccggtgcgagcgaaacgagttccaatgtcaggatgggaaatgtattagttataaatgggtctgtgacgggagcgccgaatgccaggacgggagtgacgaatcacaagagacctgtcttagtgtgacctgtaagagcggcgattttagttgcggaggtagagtcaacaggtgcattcctcagttctggaggtgcgatggccaggtagattgcgacaacggctctgatgagcagggctgccccccaaagacttgttcccaagacgagttcaggtgccacgacggcaagtgcatctctcggcagtttgtgtgcgattccgatcgcgactgtctcgacggttctgacgaagcctcgtgtccggtcctaacttgtggtccggcgtcttttcaatgcaactctagtacttgcatccctcagctgtgggcttgcgacaatgaccccgactgtgaagacggttcagatgagtggcctcagagatgccgaggcctttatgtgttccagggtgattcatctccatgctcagcctttgagttccattgtctgtcgggggagtgcattcattcaagctggcggtgcgatggaggccccgactgcaaagataagagcgacgaggagaactgcgccgtcgccacctgcagacccgatgaatttcagtgctctgacggcaactgcatccacggtagccggcaatgtgaccgcgaatacgactgtaaagacatgtcggatgaagtgggatgcgtaaatgtaaccctctgtgaaggtccaaacaaattcaagtgccactccggagaatgcattacgctcgataaggtttgtaatatggcacgagactgtcgggattggtctgacgaaccaataaaggaatgcggcactaatgagtgtttggacaataatggagggtgcagtcatgtgtgcaatgacctgaaaataggatatgaatgtttatgcccggatgggtttcagttggtcgcacagcgcagatgcgaagacattgatgaatgccaggacccagacacatgtagccagctctgtgtaaatctggaagggggttacaaatgccaatgcgaagagggcttccagctggaccctcacacaaaagcgtgcaaagcggtgggttccatcgcctacttgttctttactaatcggcacgaggtgcgcaagatgaccctggaccgcagcgagtacacatcgctcattccaaatcttaggaacgtggtcgcccttgacacagaggtggcctccaacaggatatactggtccgacttgagccagcgcatgatctgttccacacaactggaccgcgctcatggcgtctcgagctacgacacagttatcagcagggacattcaggctccggatggtctcgccgtagattggatacacagtaacatatactggacagactccgtgttgggaacggtatctgtggcagacacaaagggggttaagaggaaaacgctctttcgtgagaatggatcaaagccgcgcgctatagtagtggacccggtgcacggattcatgtattggactgactggggcacacccgcgaagatcaaaaaggggggactgaacggggtcgatatctactccctcgttaccgagaacatccagtggcctaacggcattactttagacttgctgtctggtcgcctgtactgggtcgacagtaagttacatagtataagcagtattgatgtgaacggcgggaacaggaagaccatcctcgaggatgaaaagcggctggcccatcccttcagccttgccgtcttcgaggacaaggtcttctggaccgatatcataaacgaggccatcttctccgcaaacagattgacggggtctgacgtgaaccttctcgctgaaaatctcctgtcacccgaagatatggttctctttcacaacttgacccagccacggggggtaaactggtgtgagaggacaactttgagcaatggtgggtgccagtatctctgtctcccagctccccaaatcaatccccacagccccaagttcacctgcgcatgcccggacggcatgctcttggccagggacatgcgaagctgtcttaccgaggctgaagccgccgtcgccacccaggagacctcaactgtcaggcttaaagtttcttccacggcggtgcggacccaacacaccaccacgaggcccgtgccagacacttcgcgccttccgggagccacaccagggctgacgactgtcgagattgtcacaatgtctcaccaggccctcggtgacgtggccgggagaggtaacgagaaaaaaccaagctcagtgagagccctgtccattgttttgccaatcgttctgcttgttttcctgtgtcttggtgtcttcctgctgtggaagaattggcgtcttaagaacatcaattccatcaacttcgataacccagtgtatcagaagactacagaagatgaagtccatatttgtcataatcaggatggctacagttatccaagtagacagatggtaagcctcgaagatgacgtagcc

SEQ ID NO: 11012 - DNA, 2580 bp, Artificial Sequence
  derived and/or modified sequence
atgggtccctgggggtggaaactgcgttggaccgtggctctattgctcgcagctgctggtacggccgttggcgaccgctgcgagcgcaacgagttccagtgtcaagatgggaagtgcatctcatacaagtgggtctgtgacggtagtgcagagtgtcaagatggctcggacgagtcccaggaaacatgcctctctgtcacttgtaagagtggtgatttttcctgtggcggtcgcgtgaaccgctgtatccctcagttctggcgttgcgacggccaagtcgattgcgacaacggcagcgacgagcagggttgcccccccaagacttgttcacaggatgagttcaggtgtcacgatgggaagtgtatatcccgccagttcgtgtgtgattccgatcgcgattgtctcgacggtagcgatgaggcctcctgtccggttctcacctgcggacctgcgtcctttcagtgtaactcctccacctgcattccacagctttgggcctgcgacaatgacccggattgcgaggacgggtcggatgaatggccccagcggtgccgtggtctctacgtgttccagggcgactccagcccatgttccgcgttcgagttccactgtctctcgggtgagtgtatccattcctcatggagatgtgacggtggtcctgattgcaaggataagtccgatgaagagaactgtgcggtggctacctgtcggcccgatgaattccaatgtagcgacggcaactgcattcacggttcaaggcagtgcgaccgtgagtacgactgcaaggacatgtccgatgaggtcgggtgcgttaatgtcaccctctgtgagggacccaacaagttcaagtgccattcaggagagtgcattaccctcgataaggtctgtaatatggctcgcgattgtcgtgactggagcgacgaacccatcaaggagtgcggtactaatgaatgcctggataacaacggcggatgctcgcacgtctgcaacgacttgaaaatcggttatgagtgtttgtgtcccgacggctttcaactggttgcccagcggcgctgcgaggacattgacgaatgtcaggaccccgatacctgctcccagttgtgtgtcaacctcgagggcggttacaaatgtcaatgcgaggagggcttccaacttgaccctcacactaaggcttgcaaggcagtgggttctatcgcttaccttttcttcaccaaccgtcacgaggtccggaagatgacccttgacaggtccgagtacaccagcctgatccctaacttgcgcaatgtcgtcgctctcgacaccgaggttgccagcaaccgcatttactggagcgatctcagtcagcgcatgatctgctccactcaactcgacagagcccacggcgtgtcttcctatgacaccgtcatcagcagggatatccaggcccctgatggtctcgctgtggactggatccattcgaacatatactggaccgactcagtcctgggaaccgtatccgttgctgacactaagggcgtcaagcgtaagacgcttttccgcgagaacgggtcaaagccccgggctatcgtcgtggacccagttcacggctttatgtactggacggactggggtaccccagctaagattaagaagggcggcctgaacggtgtcgacatctacagtctagtcaccgaaaacatccagtggcccaacggcattaccctcgaccttctttcgggaaggctgtattgggtcgactctaagttgcactctatatccagcatcgatgttaatggtggcaatagaaagaccatcctcgaggacgagaagcgtctcgcccaccccttcagtctcgctgtgttcgaggacaaggtgttttggacggacatcatcaacgaggctattttcagcgctaatcgtctcacgggtagcgatgtgaacctgttggccgagaaccttctaagccccgaggacatggtactcttccataatctcacacagcctagaggcgtcaactggtgcgagcgcaccacactcagcaacgggggctgtcaatacttgtgtcttcctgcaccccagattaatccacattcacctaagttcacatgtgcgtgccccgatggtatgctgctggcacgggatatgaggtcttgtctgaccgaagccgaggcggcggtggccacccaggagacttctaccgttcgcctgaaggttagcagtaccgctgtccgcactcagcatacgacgactcggccagtccctgatacctcgcggctgcctggcgctaccccgggtctcaccactgtggaaatcgtgactatgtcccaccaggcactcggagatgtcgctggccggggcaacgagaagaagcccagctccgtgcgggcactgtccattgtactccccatcgtcctccttgtcttcttgtgcctcggcgtttttctgctgtggaagaactggcgtctcaagaatatcaattctatcaacttcgataacccggtctaccaaaagacgaccgaggatgaggttcatatctgccataaccaagatggatactcctacccatcccgccagatggtctccctcgaggacgacgtggct

SEQ ID NO: 11013 - DNA, 2580 bp, Artificial Sequence
  derived and/or modified sequence
atgggcccctggggttggaagctgaggtggactgtggccttgctgctcgcagctgctggcacagcagtgggggacagatgcgaacgaaatgagttccaatgccaggacggcaagtgcatctcctataagtgggtgtgtgatggttcggctgaatgccaggacggttctgatgaaagtcaagaaacctgtctgtcagtgacctgtaaatctggcgacttctcttgtggaggtagggtgaatcgttgtattccgcagttctggagatgtgatggccaggtggactgcgataatgggtcagacgaacagggctgtcctcctaagacatgcagccaggatgagtttagatgtcacgacgggaagtgtataagtcgccaattcgtgtgcgactctgaccgagactgccttgatgggtccgatgaagcgagctgccctgtgctgacttgcgggcccgccagcttccaatgtaattcatccacttgcataccccagctttgggcctgcgataacgaccctgattgcgaagacggatcagacgaatggccccaacgttgtcgcggcctgtacgttttccagggcgattcatcgccctgcagcgcgttcgaatttcattgtctttccggtgaatgtatccacagcagctggcggtgcgacggaggaccagattgcaaggataagtccgatgaagaaaactgtgcggtggctacctgcaggcccgacgaatttcaatgttccgatgggaattgcatccacggttcacggcagtgcgaccgagaatatgattgcaaggatatgagtgacgaagtcggctgcgtgaacgtgaccctttgtgaaggaccaaacaaatttaaatgccactcaggtgagtgcataactcttgacaaggtgtgtaacatggcccgggactgccgagactggtctgatgagcccatcaaggaatgcggaacgaatgaatgtctggacaataacgggggctgttcgcacgtgtgtaatgacctgaagattggatatgaatgcctgtgtcccgatggattccagctggtagcccagaggaggtgtgaagacatcgatgaatgccaggaccctgacacttgcagtcagctgtgtgtcaacctcgagggcgggtacaagtgtcagtgtgaggagggatttcagttagatccccataccaaggcttgcaaggctgttggatccatagcatatctcttcttcactaaccggcacgaggtgcgaaagatgaccttagaccggtcagaatatacaagtctgatacccaatctgcggaatgtagtcgctcttgacaccgaggtggcatccaaccggatttactggagcgatctatctcaacgcatgatttgttccacacagctcgatagggcgcatggggtcagttcatacgacacggtgatctcgcgcgatatccaggcgccagatggcctggccgttgattggatccacagtaacatttactggactgacagtgtgctgggcacagtttccgttgccgacaccaagggggtcaaaaggaagaccctgttccgagagaatggaagcaagccccgcgccatcgtggtggatcctgtccacggattcatgtactggaccgattggggaacgcccgctaagataaaaaaggggggcttgaacggcgtggacatatattcactagtaactgaaaatatccagtggcccaacgggatcacactggatttattgagcggtaggctgtactgggtggactccaagctgcactcgatttctagtatagacgtaaatggaggaaatagaaagacgatcctggaagacgaaaagagactggcccatccttttagtctggctgtgtttgaggataaagtcttctggaccgacatcatcaatgaggccattttctctgcgaaccggctcacggggagtgatgttaacttactggctgagaatctgttatcaccagaagatatggttctattccacaacctgacacagcccaggggcgttaattggtgcgagcgaaccacactgtctaatggaggttgtcagtacttgtgcctgcccgccccgcagattaacccccacagccccaagttcacctgtgcctgtccggatggcatgctgctcgctcgcgacatgcggtcctgcctgacagaggccgaggcagccgtggctacccaagaaacttccactgtgcgactaaaggtgtcctctaccgccgtgcgcacccagcataccaccacacggcctgtccctgacaccagccgactcccgggggctacccccgggttaacaaccgtggagatcgtgacaatgtcccatcaggcattgggcgatgtggctggtcgcggcaatgagaaaaaaccaagctccgtgagagcgctgtcaatcgtgctacccatcgtcctcctggtttttctctgcctgggcgtttttctattgtggaaaaactggcgcttaaagaacatcaacagcattaacttcgataatcctgtctaccagaagactactgaggatgaggtgcatatctgccataaccaggatggctacagctacccttcacgacagatggtgtcattggaggatgacgttgca

SEQ ID NO: 11014 - DNA, 2580 bp, Artificial Sequence
  derived and/or modified sequence
atgggcccatggggatggaagctcagatggaccgtcgcgctgctgctggccgcagcgggcactgcggttggtgaccgatgcgaaagaaatgaattccagtgccaggatggcaaatgtatctcttataagtgggtgtgtgacgggagcgccgaatgtcaggatgggagcgacgagtcccaagagacgtgtctctccgttacctgcaagtccggagattttagctgtggtggcagggtcaatcggtgcataccccagttttggagatgcgatggccaagtagattgcgacaatggtagtgatgagcagggatgtccccctaagacatgctcccaagatgagttcaggtgtcacgatggcaaatgcatttcacggcagtttgtgtgtgactctgatcgcgattgcttagacgggtctgatgaagcatcttgccctgtcttaacatgcgggccggcctctttccagtgtaattcaagcacttgcatcccacaactatgggcttgtgacaatgatcccgattgtgaagacggatctgacgagtggccacaacggtgcagggggctctatgtgttccagggcgacagcagtccctgcagcgcgttcgagtttcactgcctgtcaggtgagtgtatacacagttcctggaggtgcgacggagggccagactgcaaagacaaatccgatgaagagaactgcgctgtggcaacatgcagaccagacgaattccaatgcagcgatggcaactgcatccatgggtcaaggcaatgtgacagagaatatgactgtaaggacatgtcagacgaggtcgggtgtgtgaacgtgaccctgtgcgaggggccgaacaagtttaagtgtcactctggcgaatgtatcacgcttgacaaggtgtgcaacatggctagggattgtcgggactggagcgacgagcccattaaggagtgtgggaccaatgagtgcctggacaataatggcggatgtagccacgtctgtaatgatctgaaaatcggctatgaatgcctctgccccgatggattccagctggtggcccaacgacgttgtgaagatatcgacgaatgccaggatcccgacacctgctcccagctgtgcgttaacctagaggggggatacaagtgccagtgcgaggagggattccaattggatcctcataccaaagcttgtaaggccgtagggtctattgcctatctattctttacaaaccggcacgaagtacgtaagatgactctcgaccgcagcgagtacacaagcctgataccaaatctccggaatgtggtggccttagacaccgaagttgcatctaatcggatctactggagcgatctgtcacagagaatgatttgctccacccaactagatcgggcacatggtgtttcctcgtatgacacagtgatctctagagatattcaggccccggacggcctagcggttgactggattcactcgaatatttactggacagactctgtcctggggacggtttccgtggccgacactaaaggcgtgaaacggaaaacactgttccgcgagaatggctccaaaccaagagctatcgtggtcgatcccgttcacgggtttatgtattggaccgactggggcacccctgctaagatcaagaagggcggccttaatggcgtggacatatatagccttgttaccgaaaacatccaatggccaaacggcatcaccttagacctcctgtccgggcggctctactgggtcgattccaagctccattccatctcctctattgatgtcaacggcggcaatcggaagaccatcctggaagacgaaaaaaggttggcgcatcctttttccttagcggttttcgaagataaagtcttttggacagatataattaacgaagctatcttttctgccaacaggctcactgggtcagatgtgaatttactggcagaaaatctactgtctccagaggacatggtgcttttccacaacctgactcagcctcgaggcgtgaattggtgcgagcgcaccactttgtccaatggcggttgccagtacctgtgccttcctgcccctcagataaatcctcactcccccaaatttacatgtgcctgtccagacggaatgctccttgctagagacatgcgatcctgcttaacagaggccgaagccgcagtggcaacacaagaaacatccacagtccgcttgaaagtgagctctactgctgtgcgcacccagcacacaaccactaggccagtccccgacacctctcgtcttcctggtgccacacccggtctcacaacagtggaaatagtgacaatgagtcaccaggctctgggagatgttgcagggcggggaaatgagaagaaacctagtagcgttcgggctctgtcaatagtactgcctattgtgctcctggtcttcctatgcctgggggtttttctgctgtggaagaattggcgcctgaagaacatcaattccatcaactttgacaacccggtgtatcagaaaaccactgaggatgaagtgcacatatgtcacaaccaggatggttacagttacccatctagacaaatggtctctctcgaggatgacgttgcc

SEQ ID NO: 11015 - DNA, 2580 bp, Artificial Sequence
  derived and/or modified sequence
atgggtccttggggttggaaactgaggtggactgttgcactgcttctggccgcggctggtactgctgtgggagacagatgcgagcgcaatgagtttcaatgtcaggacggtaaatgtatcagctacaaatgggtttgcgacggctctgccgaatgccaggacggcagcgacgagtcccaggagacgtgcttgagcgttacctgtaaatcaggcgacttcagctgcgggggtcgcgtgaaccggtgtattccccaattttggcgctgtgatggtcaggttgactgcgataatggtagtgatgagcagggttgtcctcccaagacttgctcccaggacgagtttcgctgccacgatggtaaatgcattagcaggcaattcgtttgtgattccgatagagactgcctggatggttccgacgaagcaagctgtcctgtgttaacgtgcggtccggccagctttcaatgtaatagctctacgtgcatccctcagctgtgggcgtgcgataacgaccctgactgcgaggacggtagtgatgaatggcctcagcgatgtcgaggcctgtatgtatttcagggtgacagcagcccatgcagcgccttcgaattccactgcctgtctggagaatgcattcatagctcatggcgctgtgacggtggccctgactgcaaggataaaagcgatgaggaaaattgcgcggtggccacgtgtcgcccagatgagttccagtgttctgatggtaactgcattcatggttcaagacaatgtgacagggagtatgattgcaaggatatgagcgacgaggttggctgtgtgaacgttaccctgtgcgagggaccgaataaattcaagtgccacagcggcgaatgtatcacgcttgataaagtgtgtaacatggctagggattgccgcgactggtctgacgaaccaattaaagagtgcggaaccaatgaatgtctggataacaacggcggatgcagccacgtgtgcaacgacctgaaaataggttacgagtgtctgtgccctgacggattccaattggtagcgcaacgacggtgtgaagatattgacgagtgccaggatcctgatacctgttctcaattatgcgtcaatcttgaaggcggctataagtgccaatgcgaagagggatttcagcttgatccacacacgaaggcctgtaaggcggtggggagcatcgcctatttgttctttacgaaccgccatgaggtgcgtaaaatgactctggacaggtcggagtatacgagcctgatccctaatctgcggaacgtggtcgcgctggacaccgaagttgcgtcaaacagaatctattggagcgacctgagccagcgtatgatttgctctacccagctcgaccgggcgcacggagtctctagctatgatacagtaattagccgcgacatccaagccccggacggactcgcagtggactggatccactcaaatatatactggaccgatagcgtccttggcacggttagcgtagcagataccaagggtgttaagcgcaaaaccctatttagagagaacggaagcaaacctcgtgctatcgtcgtggatcctgtgcatggctttatgtactggaccgactggggcacccctgcaaaaatcaagaaggggggccttaatggagtggacatctatagccttgtgaccgaaaacatccagtggccgaacggtatcacccttgacctgctgtccggccgtctgtattgggttgattctaagctgcactctattagctccattgatgtgaatggaggtaatcgcaagaccattctggaggatgaaaagcgtttggcgcaccctttcagcttggcagtgttcgaggacaaagtattctggactgacattatcaatgaagccattttcagcgctaatcgccttacaggttccgatgtgaacctcctggcagaaaacctgcttagccctgaggatatggtgctgttccacaatctcacccagccacgcggtgttaattggtgtgagcggacgaccctgtctaatggcggttgtcagtatttgtgcctgcctgccccacagattaacccacatagcccaaagttcacgtgtgcctgtccggacggcatgctgcttgctcgcgacatgcgctcctgcctgactgaggcagaagccgcagttgccacccaagagaccagcaccgtgcgcctgaaggtttcgtcaacggcggttcgcactcagcacaccactaccaggccagttccggacacgagcagattgcccggtgcgacacctggtctgactaccgtcgagatcgtgaccatgagccatcaggcgctgggtgatgttgcgggtagaggtaacgagaagaagcctagcagcgtgcgcgccctgtctatcgtcctgccgatcgtacttctggtgttcctgtgcctgggagtatttctgctgtggaagaattggcggctgaaaaatatcaactctataaacttcgataacccagtttatcagaagaccactgaggatgaggtgcatatctgccataatcaggacggttactcctaccctagcaggcaaatggtgtctttggaggatgacgtcgcg

SEQ ID NO: 11016 - DNA, 2580 bp, Artificial Sequence
  derived and/or modified sequence
atgggcccttggggatggaaactgaggtggacagtagcgctcctgctggctgcagctggcactgctgtgggcgacagatgtgaaagaaacgagttccagtgtcaagacggcaagtgcatcagttacaagtgggtatgcgacggctctgctgaatgccaggacggttccgacgaatctcaagagacttgtctgtccgtgacttgtaaaagcggagacttttcttgcggaggccgcgtgaacaggtgcatcccccagttttggcgctgtgatggacaggtcgactgtgataacggttccgacgagcagggttgtccccccaagacgtgcagccaggatgagttccgctgtcacgacggcaaatgcatctccaggcagtttgtttgcgacagtgatcgcgactgccttgatggatctgatgaggccagttgtccggtgctgacctgtggacccgcctctttccagtgtaatagttctacctgtatcccacaactctgggcgtgtgacaatgatcccgattgcgaggatggctccgacgaatggcctcaaaggtgcaggggactgtatgtgtttcaaggcgactcttcaccctgtagcgctttcgagtttcactgtttgagcggtgaatgcattcacagtagctggagatgcgatggcggccccgattgcaaggacaagtctgacgaagaaaattgtgctgtggctacctgcaggcccgacgaattccagtgtagtgacggtaactgtattcacggtagcaggcaatgcgatagggagtacgattgtaaggatatgagcgacgaggtcggatgtgttaacgtcactctctgcgagggccccaacaagttcaaatgtcacagcggtgaatgtataaccttggataaagtgtgcaacatggcccgcgactgtagagattggtccgacgaaccaatcaaagagtgcggaacaaacgaatgcctcgataataatggcggttgttctcacgtctgtaatgaacttaagatcggctacgaatgcctttgcccagatggtttccagctcgtcgctcaaagaaggtgcgaggatatcgacgagtgtcaggacccagacacatgcagccagctgtgcgtgaacctggaaggcggttacaagtgtcagtgtgaggagggattccagctggaccctcatacaaaggcttgtaaggccgtcggatccatcgcgtacctgttcttcacaaataggcacgaagtacgcaaaatgacgttggataggtctgagtatacctcactgattcctaacctgagaaacgtggtcgccttggataccgaggtagcttcaaaccgcatctactggtctgatctttcccagcgcatgatctgttccacgcagctggatagggctcatggtgttagttcatacgatacagtcatctctagagacatccaggcccccgacggccttgctgtggactggatacacagcaacatttactggacggacagcgtcctcggtacggtgtccgtggcagacaccaagggcgtgaaaagaaagacactcttcagagagaatggtagcaaaccaagggcgatcgttgtggatccggtacacggcttcatgtattggacagactggggtacacccgccaagatcaagaaaggtggattgaacggcgtggacatctactctctcgttacagagaacatccaatggccgaacggaatcacactcgacctgctttccggcaggctgtactgggtggatagcaagctgcattccatatcttccatcgatgtgaatggcggcaaccgcaagaccatcctcgaagacgagaagaggctggcccatcccttcagcctcgctgtgttcgaagacaaggtgttctggactgacatcatcaacgaggcaatctttagtgcaaacagactgactggctctgacgttaacttgcttgctgagaaccttctgagcccggaggacatggtgctctttcataatctgactcaaccgagaggagtgaattggtgcgagcgcactacgttgtccaatggaggctgtcagtatctttgcctccccgctccccagatcaacccacattccccaaagtttacttgcgcctgtcccgacggcatgctgctcgcaagagacatgaggtcttgccttaccgaggccgaagcagctgtggctacacaggagacttcaaccgtaaggcttaaggtcagcagtacggctgtgagaacgcagcatacaactaccaggccggtgcccgatacctcaagactgccaggcgccacaccaggactcacgaccgtggagattgttaccatgtcacaccaggccttgggagacgtagcaggcaggggcaacgagaagaagccctcatccgtaagggccctgtctatcgttctgcccatcgtgctgctggtgttcctctgtttgggcgtgttccttctttggaagaattggagactcaagaacatcaatagcatcaacttcgataaccctgtgtaccaaaagacaaccgaagacgaggtgcacatctgtcacaaccaggacggttacagttacccttctagacaaatggtctccctcgaggatgatgtcgca

SEQ ID NO: 11017 - DNA, 2580 bp, Artificial Sequence
  derived and/or modified sequence
atgggaccatggggttggaaactcagatggacagtagcattgttgctggcggcggcaggcactgcagtaggagacagatgcgaacggaacgaattccaatgccaagacggaaaatgcatttcgtacaaatgggtctgcgacggatctgcagaatgccaagatggaagtgatgaatcacaggaaacttgcctgtccgtaacctgtaaatccggagatttttcatgcggaggaagagttaatcgatgtattccacagttctggagatgtgatggtcaagtcgattgtgataatggtagtgacgaacaaggatgccctccaaaaacatgttctcaggacgaattcaggtgtcacgacggaaaatgtatttctagacagttcgtatgcgacagtgaccgagattgcttggatggatcagacgaagcttcatgcccagtgttgacatgtggtcctgcatcttttcaatgcaattcgtcaacatgcattccccaactatgggcctgcgataatgatccagactgtgaagacggtagtgatgaatggccacagcgatgtaggggactatatgtgtttcagggtgattcttcgccgtgttcagcttttgagtttcattgcctatccggggaatgcatacattcttcgtggcgatgtgacggcggaccagattgtaaggacaaatctgacgaagaaaactgcgcagtggcaacgtgcagaccggatgaatttcaatgctcagatggaaactgcattcatggaagccgacaatgcgatcgagaatatgactgtaaagatatgagtgacgaggtgggttgcgtgaatgttacgctctgtgaaggaccaaataaattcaaatgtcattctggagagtgcattactttggataaggtctgcaacatggcacgcgattgtcgggactggagcgatgagccgattaaggaatgtggtactaacgaatgtctcgacaacaacgggggatgttcgcatgtttgcaatgaattgaaaataggatacgagtgtttatgtccagatggctttcagctcgttgcacaacgtcgttgcgaagacatcgatgagtgccaagatccagatacctgttctcagctttgtgtaaacctggaaggtggctacaagtgtcaatgtgaagagggttttcaattagatccacacaccaaagcctgcaaagccgttggatctatcgcttatttgtttttcacaaatcgtcatgaggtccgtaaaatgactcttgatcgctctgaatatacctcactcataccaaatttaagaaatgtcgttgctttagacacagaggttgcgtctaaccggatttactggtccgatttatcacaaaggatgatctgttctacgcagttagaccgagcacatggagtttcctcatacgataccgttatttctagagacatccaagctcctgatggtctcgccgtcgattggatccattctaacatatattggacggattcagttctaggaaccgtttcagtcgccgatacaaagggggtgaaacgcaagacactttttcgtgaaaatgggagtaagccacgggccattgtagtggatccagttcatggattcatgtattggaccgactggggaaccccggctaaaattaagaaaggcggactcaatggagtcgacatctattcgttggtaacggaaaatattcagtggccaaacgggattactctggacttgttgagcggacgactgtattgggtagattcaaagttgcactctatcagtagcatcgacgtgaatggaggaaatagaaaaacgatactcgaggatgagaaaagacttgcccacccattttcactagcagtttttgaagacaaggtgttctggactgacatcataaacgaagcaattttctcagcaaatcgccttaccggatcagatgttaatctactcgctgaaaatcttctctcgccagaggatatggttcttttccataatttaacccaaccacgaggagtaaattggtgcgaacgaactacattatcaaatggaggatgtcaatatctttgcctcccagcacctcagatcaatccacactctccaaaatttacatgtgcctgcccagatggtatgttattggcgcgtgatatgcgttcgtgccttacagaagcagaagctgcggtggcaacccaggaaacgtctacagttcgactcaaagtctcttcaactgccgtcagaacccaacacacgactacaagaccggtaccggatacatctcgtcttccgggggcaaccccaggactaacaacggttgagattgtcacgatgagtcatcaagcattgggagacgttgcagggcgtgggaacgaaaaaaagcctagctcagtccgagccttatccattgttttgccaatagttcttctagtctttctttgtttgggagtttttctgctttggaaaaattggagacttaaaaatatcaactcgatcaacttcgataatccagtttaccagaaaaccacagaggatgaagtgcacatttgccataatcaggacggatactcctatccgtctagacagatggtttcgttagaggatgacgttgcc

SEQ ID NO: 11018 - DNA, 2580 bp, Artificial Sequence
  derived and/or modified sequence
atgggcccgtggggctggaaattaagatggaccgtagccctgttactggccgccgctggaacagctgtgggtgataggtgtgaacgaaacgaattccagtgccaggatggaaaatgtattagctacaagtgggtgtgtgatggctctgcagaatgccaggacggttcggacgagagccaggaaacatgcctttctgtgacatgcaaaagtggcgacttcagctgcggcgggcgagtcaaccgttgtatcccacagttctggcggtgtgatggtcaagtggattgcgacaatgggtccgatgagcagggttgccccccgaagacgtgtagtcaggacgagttccgctgtcacgacggcaagtgtatttcccgccagttcgtgtgcgattcggacagggactgtctagacgggagtgacgaggcctcttgccccgtgttaacttgtgggcccgcatctttccagtgcaattctagcacctgcattccacagctatgggcgtgcgataatgacccagactgtgaggatggaagtgacgagtggccgcagcgatgccgtggcctctacgtgttccaaggagatagttccccctgctcagcctttgaattccattgcttatcaggcgaatgcatccattcaagctggagatgcgacggaggaccggattgtaaggataagagcgacgaagaaaactgtgcagtggccacgtgcaggcccgacgagtttcagtgcagcgatggtaactgtatacatgggtcaagacagtgcgatcgcgaatacgattgtaaagatatgtccgacgaggttggctgtgtaaacgtgaccctctgtgaaggacccaacaagttcaagtgccactctggcgagtgcattacactggacaaagtgtgcaacatggctcgggactgtcgtgattggagcgacgagcccattaaagagtgtggcactaatgaatgtctagataataatggaggttgttcacacgtatgtaatgaactgaaaatcggttacgagtgtctgtgtcccgacggtttccagctggtggcgcagcgaaggtgcgaagatattgatgagtgtcaagaccctgacacatgcagccagctatgtgtgaatctggagggcggctacaagtgccagtgcgaggaagggtttcagttagacccacacaccaaggcctgtaaagcagtcggctcaattgcctacttgtttttcaccaaccgacacgaagtgaggaagatgacccttgatcgctcagaatatacatctctgatccccaatctcagaaacgtagtggccctggacaccgaagttgcgtccaatagaatttattggagcgacctaagccagcgcatgatctgctctacacaactggatcgcgcgcatggagtgagtagttacgatacagttatcagtcgagacatacaagcccccgatggcctggccgttgattggattcatagtaacatctattggaccgacagcgtgctgggcacggtatccgttgcagacaccaaaggcgtgaaacgcaaaaccttattccgcgaaaacggatcaaagcctcgggccatagtggtcgaccccgtgcatggctttatgtattggacggactgggggacccccgccaagatcaaaaaggggggactgaacggagtcgacatctactctcttgtgaccgagaatattcagtggccgaacgggattacattggacctgcttagcgggcgtctgtactgggtcgacagcaaactgcactctatttcctccattgatgtgaatggaggaaatagaaaaacgatccttgaagatgagaaaagactcgctcaccctttttcacttgccgtcttcgaagataaggttttttggactgacatcatcaacgaagcaatctttagtgccaatcggctcacaggaagcgatgtcaacctgctcgctgaaaatttgctctcaccagaagatatggttttgttccataaccttacacaacccagaggggtgaattggtgtgaacggacgacattgagcaatggcggttgccagtatctgtgcctgccagccccacaaatcaatcctcacagcccaaagttcacttgcgcctgccccgacggtatgctcctggcacgagacatgcgtagctgtctgacagaggcagaagccgccgttgccacacaggagacaagcacggtccgtcttaaggtgtcctctaccgctgtgcgcacccagcatactaccacgcggccggtacccgacacttcaaggctaccgggagccaccccaggcttaacaacagttgaaattgtgacaatgagtcatcaggccttgggagatgtggcgggacgaggcaacgaaaagaagccgtcctccgtgagagctctatctatcgtactacctattgtgcttctcgtgttcctttgcctaggagtttttctgctgtggaagaactggcgattgaagaacataaactcgataaatttcgataaccccgtctatcagaagacgactgaggacgaagtgcacatctgtcacaaccaggacgggtacagctatccaagtaggcagatggtaagcctagaggacgacgtggct

SEQ ID NO: 11019 - DNA, 2580 bp, Artificial Sequence
  derived and/or modified sequence
atgggcccctgggggtggaaactgcgatggacggttgccttgttactggccgccgctggcactgctgtcggagatagatgtgagcggaacgaatttcagtgccaggacggaaaatgtatctcgtataaatgggtatgtgacggcagcgctgagtgtcaagacggttctgatgaatcgcaggagacatgcctgtccgtcacttgtaaatcgggggacttttcttgtggaggccgtgtgaaccgctgcatcccgcagttttggaggtgcgatggccaagtcgattgcgataatggatctgatgaacagggatgcccacctaaaacgtgtagccaagacgagtttcgttgccatgatggcaaatgtatcagccggcagtttgtatgcgattcagatagggattgccttgacgggagcgatgaagcatcttgcccggtgcttacctgtggtcctgcttcattccagtgtaactctagcacgtgtattccgcaattatgggcctgcgataatgacccggattgcgaggatggctcagatgagtggccacagcgatgtcgcggattgtatgtattccaaggagactcaagcccttgttcggcgtttgaatttcactgtcttagtggtgaatgtatacatagttcttggcggtgcgatggcggaccggactgtaaagacaaatcagatgaagaaaattgtgctgttgcgacgtgcaggccggatgagtttcagtgtagcgatggaaactgtattcacggcagcagacagtgcgatcgcgaatacgattgcaaggatatgtcagacgaggtcggctgtgtcaatgtaacattatgcgagggtccaaacaagtttaagtgtcattcgggtgaatgcatcacgcttgataaagtatgcaatatggctcgagattgccgggattggagcgatgaacctataaaagaatgcgggacaaatgagtgtctagataacaatggcggctgcagccatgtgtgtaatgagttaaaaattggatatgagtgtttatgcccggatggattccaactggtcgcgcagcgccgatgtgaagatatcgacgaatgtcaagatccggacacatgcagtcagctctgcgtaaatttggaaggcggctacaaatgtcagtgtgaggagggatttcagctagatccacacacaaaagcatgtaaagccgtgggtagcattgcctatcttttttttacgaatcgtcatgaagtaagaaagatgacactggatagatcagaatatacatcgcttattcctaaccttcgcaacgtagtagctctggataccgaagtggcctccaatcgtatatattggtcagacctgtctcaacgcatgatttgtagtacacaacttgatagggcccacggcgtctcatcctatgatacggtgatcagccgggatatccaggcgcctgatggtcttgcggtagactggattcacagcaatatttactggacggatagcgtcctgggcactgtgtcagttgctgacacaaaaggcgtaaagagaaaaactctctttcgggaaaatggctcaaagcctcgcgccattgttgtagatcctgtacacgggtttatgtattggacggactggggtacaccggctaagatcaaaaaagggggccttaatggagtggatatttattccttggtgacggaaaatattcaatggccaaacgggataactctcgatctactgtcaggtcggctttattgggtggatagtaaacttcatagtattagctctattgatgtcaatggcggaaatagaaaaacgatcctggaagacgaaaagcgtctggcacaccctttctccttagcagtattcgaagataaagtgttttggacagatattatcaatgaagccatctttagcgcgaatcgacttactggcagtgacgtaaaccttcttgctgaaaacttgttatctccagaagatatggtcttatttcataacttaacacagccacgcggagtcaattggtgcgaaagaacaacgctttctaacgggggatgccaatacctttgcttacctgcacctcagattaacccgcattcccctaagtttacatgtgcgtgccctgatgggatgcttttggcgagagatatgcgctcctgtctcactgaagctgaagctgctgtagcgacacaggagacgagcacagttagattgaaggtgagctcgacggcagttagaacacagcatacgaccacaagacctgttccggataccagccgtttgccgggcgcgacccctggtctgaccacggtcgaaatcgttacaatgtcccaccaggcgttgggtgatgttgccggaaggggcaatgagaaaaaaccgtcttccgtgcgtgccttatcgatcgtcctgcctatcgtgttgttagtatttctttgccttggtgttttcttgctttggaaaaattggagactcaagaatattaactcaattaactttgacaatcctgtataccagaagacaacggaagatgaagttcatatttgccataatcaagatggctattcttacccttctagacagatggtgagccttgaagatgatgtcgct

SEQ ID NO: 11020 - DNA, 2580 bp, Artificial Sequence
  derived and/or modified sequence
atgggaccgtggggatggaagctgagatggaccgtggcgctgctcctcgctgcggctggcaccgctgtcggcgaccgctgcgaaagaaacgaatttcaatgtcaggacggaaagtgcatctcgtacaaatgggtttgcgacggtagcgctgaatgccaggatggctccgacgagtcccaggaaacttgtctgagcgtcacctgcaagagcggcgatttctcatgcggaggcagggtcaacaggtgcatcccacagttctggaggtgcgacggacaggtggactgtgacaacggctcagacgaacagggatgtcctcccaaaacctgttcccaggatgaatttcggtgccatgatgggaagtgtatttcacggcagttcgtctgcgactcagaccgggattgcctggacggatccgatgaggcgtcctgccccgtcttgacctgtggacctgcctcatttcaatgcaattcttcaacttgcattccgcagctgtgggcatgcgacaacgaccctgactgcgaggacgggagcgacgaatggccgcaacggtgtaggggtctgtatgtctttcagggagactcgtccccttgcagcgcctttgagttccattgtctgagcggggaatgtatccactcgagctggcgctgtgacggaggacctgattgtaaggacaagtcagacgaggagaactgtgcggtggctacgtgtcggccggatgaattccagtgctcggacggcaactgcatccatggatcccgccagtgcgaccgcgaatacgactgcaaggatatgtcggacgaagtggggtgcgtgaatgtgactctctgtgaaggccccaataagtttaagtgccactcgggagagtgcatcactctcgacaaggtctgcaacatggcccgggattgccgggactggtcggatgagccaatcaaggaatgcggaaccaatgagtgtcttgataacaacggaggatgctcccacgtctgcaacgaactcaaaatcggatacgagtgcctctgcccggacgggttccaactcgtggcccagagacgatgcgaagatatcgatgagtgccaggatccggacacctgctcccaactctgcgtgaacctcgagggcggatacaagtgccagtgtgaagaagggttccagctcgatcctcatacgaaggcgtgtaaggctgtcgggagcatagcctacctcttcttcacgaaccgccatgaggtgcgcaagatgaccctcgaccgcagtgagtacacctcccttatcccgaacttgcggaatgttgtggctttggacaccgaagtggcctccaatcggatctactggagtgatctctcacagagaatgatctgctcgacgcaactcgaccgcgcccacggtgtgagctcgtacgatactgtgatctctcgggatatccaagcaccggatggcctggcggtggactggatccactcgaacatctactggactgactcagtgctggggaccgtgtctgtggcggacaccaaaggagtgaagcgtaaaaccctcttccgagaaaacgggtcgaaaccacgagcgatcgtggtggatccggtccatggattcatgtactggactgattggggaacgccggctaagattaagaaaggaggactgaatggagtggacatctactcactggtgaccgaaaacattcagtggccgaatggtattactctggacctgctcagcgggcgcctgtactgggtggactcgaagctgcacagcatctcctccatcgatgtgaacggaggaaatcgcaaaactattttggaggatgaaaagagactggctcaccctttcagcctcgcagttttcgaggacaaagttttctggactgacattatcaatgaggccatcttttccgccaaccgactgactgggtctgacgtcaacctgctggccgaaaatctgctgtcgccggaagatatggtcctctttcacaatctgacccaaccccgcggcgtgaactggtgcgagaggactactcttagcaacggcggatgtcagtacctgtgcctgcctgcgccccagattaacccacatagtccgaagttcacctgcgcctgccctgacggaatgttgctggctagggacatgagatcgtgtctgactgaggccgaggcggcggtggcgactcaagagactagcaccgtccgcctgaaggtcagttccaccgccgtgagaactcagcatacgaccacccgcccagtgccggataccagccggcttccgggagcgactccaggcctgactaccgtggaaatcgtaacgatgtcacatcaggccctgggggacgtggcaggccggggaaacgaaaagaagccatcatcagtgagggcactgtcaatcgttctccctatcgtccttctggtgtttctgtgcttgggcgtgtttctgctgtggaagaattggaggttgaaaaacatcaactcgatcaatttcgacaacccggtgtaccaaaaaactactgaggacgaagtccacatctgtcacaatcaagatggatactcgtacccatcgagacagatggtcagtctggaagatgatgtggcc

SEQ ID NO: 11021 - DNA, 2580 bp, Artificial Sequence
  derived and/or modified sequence
atgggcccgtgggggtggaaacttaggtggaccgtcgcccttctgctagccgccgccgggaccgcggtaggagatcgatgtgagcgtaacgagtttcagtgccaggatggcaagtgtatttcctacaagtgggtgtgtgacggttctgcagagtgccaggacgggtctgacgagagccaagagacatgcctttcagttacctgcaagtcaggggatttttcctgtggggggagggtgaatcgctgcattccccaattttggagatgtgacggtcaggtggactgcgataacggatccgatgagcaggggtgtcctcctaagacctgttcgcaagatgagttcaggtgtcatgatggtaagtgtatatcccgccagttcgtgtgcgactccgatcgggattgtctggatgggagtgatgaggccagttgccctgtcctcacatgcggccctgcgtccttccaatgcaacagctccacgtgtatcccgcagctctgggcctgtgacaacgaccctgattgcgaagacggcagcgacgaatggcctcagcgctgtcgcggcctatacgttttccagggcgatagctctccatgttctgctttcgaatttcactgcctgagcggagagtgcatccatagcagttggagatgcgacggcgggccagattgcaaggacaaatccgacgaggaaaactgtgccgttgccacgtgtcggccggacgaattccagtgtagcgacggaaactgcatccatggaagtcgtcagtgtgaccgtgagtatgactgcaaagatatgtcagacgaggtggggtgcgtaaatgtcactctctgcgaagggcctaataagttcaagtgccacagcggggagtgcattaccctagataaggtatgcaatatggcgcgggactgcagagattggtctgatgagcctattaaagagtgtgggaccaacgagtgtctcgataataatggaggatgcagccatgtatgtaatgagctgaagataggctacgagtgcctatgtcctgacggcttccagctggtcgctcagagaaggtgcgaggacatcgatgagtgccaggaccctgacacttgtagccagctctgcgtgaatctggaaggtggatataagtgccagtgcgaggagggtttccagcttgacccccacacaaaggcgtgtaaagctgtcggatctatcgcttacctgttttttactaacagacatgaagtgcggaagatgactctggaccgctccgaatacacaagcctgatccctaacctgcgcaatgtggtggccctggacaccgaagttgctagcaacaggatttattggtctgacctctcccagcgcatgatctgttccactcagctggatcgggcccatggggttagctcctatgacacggtgatctctcgagatattcaggcgcctgacggcctggctgtggattggattcattcaaatatctactggacagactcagtccttggtaccgtcagcgtggctgacactaagggagtcaagaggaaaaccctgttcagggagaacgggtccaagcctagggccattgttgtggatcccgtccatggctttatgtactggaccgactggggcacacctgctaagattaagaaagggggcttgaatggagtggatatttacagtctggtcaccgaaaatatacagtggcctaacggcattaccttagacctgctgtccgggcgactgtattgggttgattccaagctccacagcattagctccattgacgtgaatggaggcaatcggaaaaccattctggaggacgaaaagaggctggctcacccgttctcactcgcagtgtttgaggacaaagtgttctggacagatatcataaacgaagcgatctttagcgccaaccgacttacaggttctgacgtaaacctgctggccgaaaatctcctgtctcctgaggacatggtcttgttccataatttgactcagccgaggggcgtgaactggtgcgagaggaccacattaagcaacggcggctgccagtatctttgcctgccggcaccacagatcaatccccacagccctaaatttacatgcgcctgtcctgatgggatgctgctcgcccgcgacatgagaagctgcctcacagaggcagaggcagcggtggccacccaggagacatccactgttagactgaaagtaagctcaactgctgtgagaactcagcatacgactacgagacctgtgccagatacatcccgcttacccggagcgacccctggcctgactacagtcgaaatagttacgatgtcccaccaggctcttggagacgttgcggggcggggaaatgagaagaagcctagctccgtccgggccctgtcaatcgtactgcccattgtcttgctcgtgttcctttgcctgggcgtgtttctgctgtggaaaaattggcgacttaagaacatcaactcaatcaatttcgataatcccgtgtaccaaaagacaacagaggatgaagtgcacatttgccataaccaggatggatatagttacccatctagacagatggtcagcctggaagatgacgtcgca

SEQ ID NO: 11022 - DNA, 2580 bp, Artificial Sequence
  derived and/or modified sequence
atgggcccatggggatggaagctacggtggaccgtagcgttgctcctggcggcagcagggaccgcagtgggagatcggtgcgagcgaaatgagttccagtgccaggatggcaaatgtatcagctataagtgggtgtgtgacggttcagccgaatgccaggacggcagtgacgagtcacaggaaacctgtttatccgtcacttgcaaaagtggcgactttagctgtggggggagggtgaatcggtgtatccctcagttttggcgatgtgacggtcaagtcgactgcgataacggttccgacgagcagggatgcccacccaagacatgctcccaggatgaatttagatgtcatgacggcaagtgcatatccagacagttcgtgtgtgattcagatcgggactgcctggatggtagtgatgaggcatcctgcccagtccttacatgtggtccagcctcatttcagtgtaatagcagcacttgcatcccacagctgtgggcttgcgataatgaccccgactgtgaggacggatccgatgaatggccccagcgctgtcgtggcctttatgtgttccagggcgatagcagcccatgctctgcatttgaatttcattgcctgtctggggaatgcatacatagctcctggaggtgtgacggagggccagattgtaaagacaagtcagacgaggagaattgcgccgtcgcaacatgcagacctgatgagtttcaatgcagtgatggaaactgtattcatggcagcaggcaatgcgaccgggaatatgactgcaaagacatgtccgatgaagtcggatgcgtcaacgttacgctgtgtgaaggccccaacaaatttaaatgtcacagtggggaatgcatcacactggataaagtttgtaatatggctcgagattgtcgcgactggagcgacgagccgattaaggaatgtggaacgaatgagtgcttggataataatggcggatgtagccatgtctgtaacgagctgaagattggctacgaatgcttgtgcccggacggcttccaactggtagcccagaggcgctgcgaggatatcgacgaatgtcaagaccccgacacgtgctcgcagttgtgtgtgaatctggaaggtggatacaaatgtcaatgcgaggagggctttcagctggaccctcacaccaaggcatgtaaggctgtaggcagtattgcgtacctctttttcacgaacagacacgaggtccgaaaaatgacgcttgacaggtcagaatatacttccttgattcccaatttgcgaaatgtcgtggcgcttgataccgaagtcgcatctaatcgcatttattggagtgatctcagtcagagaatgatctgctccactcagctggatagagcccatggcgtgagctcatacgacacagtgatttcccgtgacatacaggcaccagatggactggcagtagactggattcatagcaatatttactggacggactctgtcctggggactgtgagcgtagccgataccaagggcgtcaagaggaagactctgtttagggagaatggttccaagcctagggcaatagtggtggatccggtccacgggtttatgtactggactgattggggaacccctgctaaaatcaagaagggcggcttgaatggggtggacatctactcactggttacggaaaacattcaatggcctaacgggattacacttgatctgctgtctggccgattgtactgggtggattctaaacttcactccattagttctatcgacgtgaacggagggaatagaaagactatactagaggacgagaagcggctggcccaccccttcagcctggcagtgttcgaggataaggttttctggacggatatcataaacgaagcaatttttagtgctaaccggctgacaggcagcgacgtgaatctgctggctgaaaacctactgagcccagaggatatggtgttatttcacaacctgacgcagcctcgcggcgtgaattggtgcgaacgcaccactctttccaacggcggctgccagtacctctgtctgcctgccccacagatcaaccctcacagcccaaagtttacatgcgcctgcccagatggaatgttgctggcacgcgacatgcggagctgtttgaccgaggccgaggcagctgtggctacccaggagacatcaaccgttaggttaaaggtgtctagtaccgcggttcggacgcagcacaccactactcgaccagttcccgatacatcccgactgccaggggcaacgcctggattgaccacagttgaaattgtcaccatgagccatcaagccctgggcgatgtagccggccgggggaacgagaaaaagccgtccagcgtgcgtgccctgagtatagtgctgccaatagtgttacttgtgttcctctgcctcggggtctttctcttatggaaaaactggcgcctcaagaacatcaactcaatcaacttcgacaatccagtctatcagaagacaaccgaggatgaagtccatatttgtcataatcaggatggatacagctacccttcacgccaaatggtttcgctggaggacgacgtcgct

SEQ ID NO: 11023 - DNA, 2580 bp, Artificial Sequence
  derived and/or modified sequence
atgggaccgtggggatggaaattacgttggaccgtcgccctgctgctagccgccgccgggaccgccgtgggagacagatgcgagcggaatgagtttcagtgccaggacggcaagtgcatctcctacaaatgggtctgcgacgggagcgcagagtgccaagacgggtcggatgagtcacaggagacgtgtctatccgtgacgtgcaagagtggtgacttcagctgcgggggcagggtcaatagatgcatccctcaattctggcgctgtgatgggcaggttgactgcgacaacgggagtgatgagcaggggtgcccaccgaaaacctgttctcaggatgaattccgatgccacgatgggaagtgtatctctcggcaatttgtgtgcgatagcgatcgagattgtctggatggcagcgatgaagccagctgcccggtgctaacctgtggccctgcctcatttcagtgcaattcatctacgtgcatcccacagctgtgggcgtgcgataatgatccagactgtgaggacggctccgacgaatggccacagcgttgcagaggactctatgtgtttcaaggtgactcctcaccctgtagcgcgtttgaattccattgccttagtggcgagtgtatacactcctcatggcggtgtgatggcggtccagactgcaaggacaagtcagacgaggaaaattgtgccgtcgccacgtgcagaccggacgagttccagtgtagcgacggaaactgcatacacggtagcagacagtgtgacagggagtatgactgtaaagatatgagcgatgaggtaggatgtgtaaacgtcaccctctgcgaggggcccaataaatttaagtgccacagcggggaatgcattacgctggataaggtttgcaatatggcacgcgactgtcgtgattggtccgacgagcccataaaggagtgcggtacaaacgagtgcctagacaacaatggtggctgcagccacgtttgtaatgagctgaagataggttacgaatgcctctgtcctgacggttttcagctggtggcccagcgcaggtgcgaagatattgacgagtgccaagaccccgacacttgtagtcagctgtgcgtgaacctggaaggcggctataaatgtcagtgcgaggagggattccagctggacccacacacaaaagcatgcaaagcagtgggaagtattgcgtatttattcttcacaaatcgacacgaggttaggaaaatgacgttagaccgatcagagtacaccagtctaattcccaaccttcgtaatgtggtggcactggatacagaggtcgcatctaaccgcatctactggagcgatttgtctcaaaggatgatctgcagcacgcagctggaccgtgcacatggtgtgtccagctatgatacggtcatatcaagagacattcaggctccagatggcctcgcagtggattggatccacagcaacatttattggacagattccgtactcgggaccgtcagtgtggcggacacaaagggcgtgaaacggaagacccttttccgggaaaatgggtctaaaccacgagctattgtcgtagatcccgtacacggctttatgtattggaccgactgggggacacctgcgaaaatcaagaagggcggacttaacggagtcgacatatatagcctggtcaccgaaaatatccagtggcctaatgggatcacactcgatctgctgtccggtcggctatattgggtcgactccaagctgcatagcatcagttccattgatgtgaatggcggcaaccgtaagaccatcttagaagacgagaagcggctagcacacccattttcattagctgtgttcgaggataaggtgttttggacagacatcatcaacgaagccatattctcagccaatcgtctgactggatccgacgttaacctgctggctgagaaccttctatctccagaggatatggttctgttccataacctgactcagcccagaggagtcaattggtgtgagcggaccacactatcaaatggcggatgtcagtacttgtgcctgccagcgccccagataaatccgcactcacccaagtttacctgtgcctgcccggatggcatgctgctggcccgagacatgaggtcctgcctgacagaagctgaggccgccgtggccacgcaggaaacctccactgtgcgattaaaggtaagcagcaccgcagtcaggactcagcacaccacaacccgcccagtacctgatacctccaggctccctggtgccacgccgggcctgaccactgtggaaatcgttaccatgagccaccaggcattgggcgacgtagcgggacgggggaatgagaagaagccttccagtgtgcgcgcactgtccatcgtgcttccaattgtccttctggtctttctgtgtctcggggtattccttctctggaaaaactggagactgaagaatataaattctattaattttgacaacccagtatatcagaagaccaccgaggacgaggtgcacatctgccacaatcaggacggctactcatatccttcccgccagatggtgagcctggaggacgatgtggca

SEQ ID NO: 11024 - DNA, 2580 bp, Artificial Sequence
  derived and/or modified sequence
atgggaccatggggttggaaactccgatggactgtggccttgctcctggcggctgcaggaacagcggtgggcgatcgctgcgagcgaaacgagtttcagtgccaagatgggaagtgtatttcctacaagtgggtgtgcgatggaagcgctgaatgccaggacggtagcgacgagtctcaggaaacttgcctgtctgtaacctgcaaatccggcgattttagctgtggagggagggtgaatcgatgtattccgcagttttggcgctgtgacggacaggtcgactgtgacaatggcagcgatgagcaaggttgccctccaaagacctgttcccaggacgagttcaggtgccatgacggcaagtgcatcagtcggcagttcgtatgcgacagtgaccgcgattgcctggacggttctgacgaagccagctgtccagttttgacctgcgggcccgcaagtttccagtgtaattcctcaacctgcatcccccagctgtgggcgtgcgacaacgaccccgactgcgaggacggatcagacgaatggccccaaaggtgccggggcctgtacgtgtttcagggggactccagcccatgttctgccttcgagtttcactgcctgtcaggggagtgtattcacagctcttggcgctgtgatgggggtccagattgcaaggacaaatccgatgaagaaaactgcgccgttgctacctgtcgacctgacgaattccagtgttccgatggcaattgcatacatgggagtcggcaatgtgaccgcgaatacgattgcaaagacatgtcagatgaagttggttgtgtaaacgtcaccctgtgcgaagggcccaacaaattcaagtgccacagtggcgagtgtattactctggataaggtctgcaacatggccagagactgtcgagattggtccgatgagccgatcaaggaatgcggcaccaatgaatgtctggataataatggagggtgcagccacgtgtgcaatgaactgaagattgggtacgagtgcctgtgtcctgatggattccagctggtagctcagcggaggtgcgaggatattgacgaatgtcaggaccccgatacatgttcacaactgtgtgttaatctggagggcgggtacaaatgtcagtgcgaagaaggtttccagctcgatccccacaccaaggcgtgtaaggcggtggggtctattgcatacctcttctttacgaaccggcatgaagtgcggaaaatgactctcgacaggtccgaatatacatccctcataccaaacctgcgcaacgtggtcgcgttggatactgaggtggcttctaatcgcatttactggtccgatctgagtcagcgcatgatctgttcaacccaattggacagagcgcatggcgtgtcttcatacgacacagtcatttccagggacatccaggcgcccgatggtttggcagtcgactggatccattcaaatatctattggactgactccgtattgggtaccgtgagtgtcgccgatacaaagggagtcaaaaggaagaccctgtttagggaaaatggctccaagccacgcgctatagtcgtggacccagtgcacgggtttatgtactggaccgattggggaactcccgccaagatcaagaaaggaggcctgaacggtgtcgatatttattccctcgtgacagaaaatatacaatggcctaatgggatcaccttggacctgctgtccggccggctctattgggttgattccaagctgcactccatttcaagcatagatgtcaatgggggcaaccgcaagaccattcttgaggacgagaagcgcctcgcccaccctttctcactggccgtctttgaggataaggtgttttggaccgacatcattaatgaggcaattttcagcgcaaatcggctgacaggcagtgatgtgaacttgctggcagaaaatttgttgtcaccagaggacatggtgctgtttcacaaccttacgcagccccgaggggtgaactggtgcgagcgcacaaccctgtccaatggcggctgccagtacctttgccttcccgccccccagataaatcctcactctccgaagttcacatgcgcatgtcccgacgggatgctcctcgcgagggacatgcgctcctgcctcaccgaagccgaggctgcagtcgccacgcaggagactagcactgtcagactcaaagtgtcttccacagcagtgcgcactcagcacaccacaacccggccagtccccgataccagtagactgccgggtgccaccccaggccttacaaccgtcgagatcgtgaccatgtctcatcaggctctcggagacgtcgcaggaagaggaaatgagaagaaaccaagttccgtgcgagccctttccattgtcctgccgatagtgctgctggttttcctgtgtctgggggtattcctcttgtggaaaaattggagactcaagaatataaactctattaatttcgacaatcccgtctaccagaagacaaccgaagacgaagtacatatctgtcacaaccaggacgggtattcctatccatctaggcagatggtgagtctggaagatgacgttgca

SEQ ID NO: 11025 - DNA, 2580 bp, Artificial Sequence
  derived and/or modified sequence
atgggcccttggggctggaagctgaggtggacggtggcgctcctgctcgcggcggcgggaaccgccgtcggcgaccggtgcgagcgcaacgaatttcagtgtcaggacgggaaatgcatcagctacaagtgggtctgcgatggatctgcagagtgccaggatggctcagacgagagccaagaaacctgtctttccgttacttgtaaatcgggcgacttcagctgcggaggacgggtgaaccggtgcatcccacagttttggcggtgcgacggacaggtggattgtgacaatgggtccgacgaacaaggctgcccgccaaaaacttgctcccaagacgagttccgctgccatgatggaaagtgcatctcacgacaattcgtgtgcgattcggatcgggattgtctcgacggatcggatgaagcgtcgtgcccggtgctcacttgcggaccggccagctttcaatgcaattcgtcaacctgcatccctcagctgtgggcctgcgacaacgatccggactgcgaggatggatcggacgaatggccccaaagatgccgcggtctgtacgtgttccaaggtgactcctcaccgtgttcggcgttcgagttccactgtctcagcggggaatgcatccactcgtcatggaggtgcgacggtggtccagactgtaaggacaagtcggatgaagagaactgcgctgtcgccacgtgcaggcctgatgagtttcagtgctcggacggaaactgcattcacggaagccggcagtgcgaccgggagtacgattgcaaagacatgtccgatgaggttggttgtgtcaatgtcacgctctgtgagggaccgaataagttcaagtgccattccggagaatgtatcaccttggataaggtctgcaatatggcgagagactgccgcgactggagcgatgagccgatcaaagaatgcggaactaacgaatgtttggataacaatggcggctgtagccacgtgtgcaacgagctgaagattggatacgagtgcttgtgccctgatggatttcaactggtcgcacagagacggtgcgaggacatcgatgaatgccaggatcctgacacctgcagccagctctgtgtcaacttggagggaggatacaagtgccagtgtgaggagggctttcagctggacccgcacaccaaggcatgcaaggccgtggggtccatcgcctacctctttttcaccaataggcatgaagttcggaagatgacccttgaccggtcggaatatacttcgcttatcccgaatctccggaacgtggtggccctggatactgaggtggcatcgaaccgcatctactggtctgacctgagccagcggatgatctgctcgacccagctggaccgggcccacggagtgtcctcctacgacactgttatatcccgagacatccaggctccagacggactcgcggtcgattggatccattccaacatctactggaccgattccgtgctgggaactgtgtccgtggccgatactaaaggggtgaagcgcaagaccctgttccgcgagaacggatcgaagccgcgcgcgattgtggtcgaccctgtgcacggatttatgtattggaccgactggggtactccagccaagatcaagaaggggggactcaacggtgtggacatctactcacttgtgaccgaaaacatccaatggcccaacggcatcactcttgacctgctctcgggcagactgtactgggtggacagcaaactccatagcatatcctcaatcgacgtcaacggcggaaataggaaaacgatccttgaagatgagaaaagactcgcacacccattctcactcgcggtctttgaggataaagtgttctggaccgacatcattaacgaagcaatcttttcggccaaccgcctgactggatccgacgtgaacctgctggcagagaacttgttgtccccggaggacatggttctcttccataacctcacccagccccggggtgtcaactggtgcgaaagaaccactctctcgaacggtggctgtcaatacctgtgcctgcccgctccccagattaacccgcactctccgaagttcacttgtgcctgccccgatggaatgctcctggctcgcgacatgagatcatgcctcacggaggccgaggctgccgtggcaacgcaggaaacctccactgtcagactgaaggtgtcgagcaccgccgtgcggacccaacatactacgactagaccagtcccggacacctcgagactgccgggagctaccccgggcctgaccaccgtggaaatcgtgacgatgtcccaccaggcactgggagacgtggcgggacgcgggaatgagaaaaaaccttcgtcagtcagagctctcagcatcgtgcttcctatcgtgctgttggtgttcctttgtctgggagtgttcctcctttggaaaaactggagactcaagaatatcaattcgatcaattttgacaatccagtgtaccaaaaaacgactgaggatgaggtccacatctgccacaaccaggacggctactcatatcctagccgccaaatggtttcgctggaagatgacgtggcg

SEQ ID NO: 11026 - DNA, 2580 bp, Artificial Sequence
  derived and/or modified sequence
atgggcccatggggttggaagctgagatggaccgtggcgctgcttctcgcagcagcagggactgcagtgggtgacaggtgtgagcggaatgaattccaatgccaagatggaaaatgcatttcatacaaatgggtgtgcgacggaagcgcagagtgtcaagacgggtcagatgaaagccaggaaacttgcctttcggtcacttgtaagagcggagatttttcctgtggaggacgcgtgaacagatgtatccctcaattctggagatgcgacggtcaagtggactgcgataacgggtcggatgaacaaggatgtccacccaaaacttgcagccaggatgaatttaggtgtcacgatgggaagtgtattagcagacagttcgtgtgtgattccgatcgtgattgcctggatggtagcgacgaagcctcgtgcccggtgttgacttgtggacccgcctcatttcagtgtaactcgtccacttgtatacctcaactgtgggcatgcgacaacgatccagattgtgaggacggatcggacgaatggcctcaaaggtgcaggggactctacgtgtttcagggagactcaagcccatgctcagcattcgaatttcactgtctgtcgggtgaatgtatccatagctcgtggcgatgtgacggcggtcccgattgcaaggataagtccgatgaggaaaattgtgccgtcgcaacctgcaggccggatgagtttcaatgttccgatggtaactgtatccatggttcgcgccagtgtgatcgggaatacgattgtaaggacatgtccgacgaagtgggttgtgtcaatgtgaccctgtgtgaaggacctaacaaattcaagtgccattcaggagaatgtattaccttggacaaggtgtgcaacatggcacgcgactgcagagattggtcagatgaaccaataaaggagtgtggaaccaacgagtgcctggacaacaatggaggatgttcccacgtctgtaatgagcttaagatcggatacgaatgcctctgccctgatgggtttcagcttgtggcccaacgaagatgtgaagatatcgatgaatgtcaagaccctgatacttgcagccaactgtgtgtcaatctggaaggtggctacaaatgtcaatgtgaggaaggatttcaacttgatccacataccaaagcatgcaaggccgtgggctcgattgcatatctcttctttactaacagacatgaagtgaggaagatgacccttgatagatccgaatacacctccctcatacctaacctccgaaacgtcgtggccctcgacaccgaagttgcctcgaacagaatatactggtcggatcttagccagagaatgatctgttcaactcaacttgatagggcacatggcgtttccagctacgatactgtgatatcgcgggatattcaggcgcccgacggtcttgcggtggattggattcacagtaacatatactggactgattctgtgttggggactgtctcggtggctgatactaagggagtgaaacgtaaaaccctgtttcgcgaaaatgggtctaaacctcgggccatcgtggtggatcccgtgcatggttttatgtactggaccgactgggggactcctgcaaagataaagaagggcgggctgaatggcgtcgatatctacagccttgtgaccgagaatatccaatggccgaacggaatcacccttgatctgctttcggggagactctactgggtggatagcaaacttcattccatttcctctattgatgtgaatggtggcaaccgcaagaccatcctcgaagatgaaaagcgtctcgcacaccccttctcactggcagtattcgaggataaggtgttttggactgacattatcaatgaagctattttctcggccaacaggttgaccggaagcgacgtgaacttgctcgccgaaaatctcctttcccctgaggacatggtcctgtttcataacctcactcagcccaggggggtgaactggtgcgagcgcacgaccctttccaacggtggatgccagtacctttgtctgccagcaccccagataaaccctcattcgcccaagtttacctgtgcatgtcctgatgggatgcttctggctagagacatgcgtagctgtctgactgaggctgaggccgccgtggccacccaagaaaccagcactgtgaggcttaaggtgtcgtccactgcagtcaggacccagcataccactaccagacctgtgccagataccagcagactgccaggggccacccccggccttacgactgttgagatcgtgactatgtcgcaccaggcgctgggggatgtggccggaagagggaacgagaaaaagccatcctccgtcagggcactctccattgtgttgccaattgtcctgctggtgtttctctgtcttggcgtctttctcctttggaagaactggcggttgaaaaacattaactccatcaatttcgacaatccagtgtaccagaaaaccacggaggacgaagtgcacatatgtcataatcaagacgggtactcatacccttcgaggcagatggtgtcgctggaagatgatgtggca

SEQ ID NO: 11027 - DNA, 2580 bp, Artificial Sequence
  derived and/or modified sequence
atgggtccatggggatggaaactgaggtggacagtggccctcctccttgccgccgctggcacagcagtcggcgaccgatgtgagagaaacgaatttcagtgtcaggacggaaagtgtatctcttacaagtgggtctgcgatggatccgccgagtgccaggatggatcagacgaatcccaggagacctgcctgagtgtgacctgcaagtcaggagatttctcctgtggggggcgtgtcaaccgctgtatcccgcagttctggcgttgtgatggacaggtggattgtgacaacggctcggatgagcaaggatgtccacccaaaacatgctcacaggacgaatttagatgtcacgacgggaagtgcatctccaggcagttcgtatgcgatagcgatcgggattgtctggacggtagcgacgaggcgtcttgtcctgtcttgacctgtggcccagcgtcttttcagtgcaattccagcacctgtattcctcagttgtgggcttgcgataacgacccagactgtgaagacggctctgatgagtggccacagaggtgccgtgggctgtatgtgttccaaggagattcctccccgtgcagcgccttcgaattccactgcctgtccggcgagtgtattcattccagctggcgatgtgatggggggcccgactgtaaggataagagtgatgaagagaattgtgccgtggccacatgcagaccagacgaatttcagtgttctgacgggaattgcatccatggctctcgccagtgcgacagggagtatgactgcaaggatatgagcgatgaagtcggatgtgtcaacgtcaccttatgcgaaggtcccaataagttcaagtgtcattctggcgaatgcattacactggacaaggtatgtaatatggcacgtgactgtagagattggagcgacgagccaattaaggaatgcgggaccaacgagtgcctggataacaacgggggctgcagccacgtgtgtaatgagctgaaaataggatatgaatgcctgtgccctgatggtttccagctcgtggcgcagcggaggtgcgaagacatcgacgagtgtcaggatccggacacatgtagccaactctgcgtcaacttggagggcgggtataagtgccagtgcgaggagggcttccagctcgacccccacaccaaagcttgcaaagccgtaggctcaatcgcatacttattcttcacgaacaggcatgaagttcgaaaaatgaccttagaccggtccgaatacactagccttatcccaaatctgcgcaacgtggtggcgcttgacacagaagtggccagcaaccgtatatactggagtgacttgtcgcaaagaatgatttgctccacccagttggaccgggcccatggggtaagttcatacgacaccgtcatcagcagagacatacaggcacctgatgggctggcggtcgactggatacattctaacatctactggaccgattccgtcctcgggaccgtgtctgttgcagataccaaaggtgtaaagcgtaaaacactttttagagaaaatggctcaaagcccagagccatcgtcgtcgatccagtgcatggattcatgtactggaccgactggggaaccccagccaaaattaaaaagggcggcctgaacggggtggacatctactcactggtaaccgaaaacatccagtggccaaacggcattaccttagatctgctgtctggccgcctgtactgggttgattcaaagctccatagtatctctagtattgatgtcaatggggggaaccgtaagaccatcctggaagacgagaagcgcctcgcccaccctttcagtttggcagtgttcgaggataaagtcttttggacagacatcataaatgaagctatattcagcgctaatcgcttgaccggtagtgatgtgaatttgctggccgaaaacctactctcgcctgaagacatggtgctgtttcacaatctgacacagcctcgcggggttaattggtgcgagcgcacgacattgtccaatgggggctgccagtacctctgtctgcccgctccccagatcaatccacactctccaaaatttacatgcgcttgcccagacggcatgctcttagcacgggatatgaggtcttgtttgactgaagcggaagccgctgtagccacacaagagacatcaactgttcgactcaaggtcagctccactgcagtccgcacccagcataccacgactagacccgtcccagatacaagtcggttacccggcgcgacacccggtctgaccaccgtggagattgttactatgtctcaccaagcgcttggggatgtggcggggagggggaacgagaagaaaccgagttctgtgcgtgctctaagtatcgtgctccccattgtcctccttgtgttcctgtgcctcggagtctttcttttgtggaaaaactggcgccttaaaaacataaacagcatcaactttgacaatcctgtgtaccagaaaacaaccgaggacgaagtccacatatgtcataatcaggacgggtatagttacccatccaggcaaatggtgtcattggaggacgacgttgca

SEQ ID NO: 11028 - DNA, 2580 bp, Artificial Sequence
  derived and/or modified sequence
atggggccctggggctggaaactgaggtggactgttgcacttctgctcgcggcagccggtacagcagtaggagatcgatgcgaacgaaacgagtttcaatgccaggacggcaaatgtatatcatataaatgggtctgcgacggaagcgcagagtgtcaagatgggtcagatgagtctcaagaaacatgcctgagcgtgacctgtaagagcggcgatttctcctgcggcggaagggttaataggtgtatcccccagttctggagatgcgatggccaagttgattgtgataacggttccgatgaacaaggatgtccacccaaaacctgctcccaggacgaattccgttgccatgacggaaaatgtatttcacgacaatttgtttgtgatagtgaccgtgattgtttggatggctcagatgaagcttcgtgtccagttcttacttgcggaccagcgtccttccagtgtaactcgagcacctgtattccgcagctttgggcatgcgacaacgatcccgattgcgaggatggctcagacgagtggccacagaggtgcaggggactatacgtgttccagggggattccagtccatgttctgcctttgaatttcactgtctgtcaggggaatgcattcactccagttggaggtgcgatgggggaccagattgcaaagataagagcgatgaggagaattgtgccgtggccacttgccggcccgacgagtttcaatgtagtgatggaaattgtattcacggatctcgacagtgtgaccgagagtatgactgcaaggatatgtccgacgaggtgggatgtgtaaacgtcaccctgtgtgaaggtccaaacaaattcaagtgccacagcggcgaatgtatcacactggacaaggtatgtaacatggctagggattgccgagattggtctgacgagccaattaaggagtgtggcacaaacgagtgcctggataacaatggtgggtgcagtcatgtgtgcaatgaactgaaaatcgggtacgaatgcctttgcccagatggctttcagctagtggcccagaggagatgcgaagacatcgatgagtgtcaagacccagatacatgtagccagctgtgtgtaaacctcgaaggaggatacaagtgtcagtgtgaggaaggcttccagctggacccgcacaccaaggcttgtaaggccgttggatctatagcttacctcttttttaccaataggcacgaggtacggaagatgaccctggacaggagtgaatatacatccttgatacctaacctcaggaatgtggtagcgttggacacagaggtggcttccaaccgtatttactggtccgacctgtcccagcgcatgatttgtagtacccagctcgacagggcccatggagtctcaagttatgataccgtcatttctagggatatacaggctcccgatggcctggcggttgattggattcattcaaacatctactggaccgattccgtcctcggcaccgtgagtgtcgccgacacgaagggggtcaagcggaagactctgttcagggagaacggttccaaaccgcgtgccattgtagtggaccccgtgcacggttttatgtactggacggactggggcaccccagcaaaaattaagaaaggcggattgaacggtgtggatatctacagcttggttaccgaaaatatccagtggcctaatggcattacattggacctccttagcggcaggctctattgggttgatagcaaactccacagtattagctccatcgatgtgaacgggggcaatcgaaaaacaatccttgaggatgagaaaagattggcccatcctttcagtctggctgtttttgaagataaagtcttctggacagatattatcaacgaagctatattctccgcgaatagattgaccggcagcgacgttaacctattagccgagaaccttctgagccccgaagacatggtcctatttcataacctcacccaacccagaggcgtgaattggtgcgaacgtacgactctctctaacggcggctgccagtacctttgtctcccagctccacaaatcaacccccactctccaaaatttacgtgcgcatgtcctgacggcatgttgctggctcgtgacatgcgaagctgcctgacagaagccgaagctgcagtggctacacaggagacgagtacagtgcgactgaaggtgtcttcaacagccgtcagaacgcagcacaccactacccggccagtgcccgatacttccagactgcccggcgccactccaggcctgaccaccgttgaaatcgtgacgatgtcacatcaggccctgggggatgttgcagggagaggaaacgaaaagaagccctccagcgtgcgtgctctcagcattgtgttacctatagtactcctagtcttcttatgtctgggtgttttcttactatggaagaactggagacttaaaaacatcaactcgatcaacttcgacaacccggtgtaccaaaaaactacagaggatgaggttcacatctgtcacaaccaagatggctactcctacccctcacggcagatggtttcgttggaggatgatgtcgct

SEQ ID NO: 11029 - DNA, 2580 bp, Artificial Sequence
  derived and/or modified sequence
atgggtccgtggggttggaagctgcgttggactgtagctctgctcttggcagcggctggcacagcagtaggtgacagatgtgagcgtaatgaatttcaatgtcaagatggtaagtgcatatcttataagtgggtctgcgatggtagcgcagagtgccaagatggttctgatgagagccaggagacctgcttgtccgttacctgcaagtccggggattttagctgcggtggccgcgtcaatcgttgtataccgcagttttggcgatgcgacggtcaggtcgattgcgataatggctctgatgagcagggctgccctcccaagacctgtagccaagatgagtttaggtgtcatgacggcaagtgcataagccgccagttcgtgtgcgactctgatcgtgactgtctggacgggtccgacgaagccagctgtccggtccttacctgcggcccggctagcttccagtgcaacagcagcacctgtatcccccagttgtgggcgtgcgacaatgatccagactgcgaggacggtagcgatgaatggcctcagcgttgtcgcggtctgtatgttttccagggcgattcgtccccatgtagtgcattcgagtttcattgcttgtcgggtgagtgcatccacagctcgtggcgttgcgacgggggtccggattgcaaggataagagcgacgaggagaattgcgcggtggcgacctgccgcccggatgaattccagtgcagcgacggcaattgtatccatggctctcgccaatgcgaccgcgagtatgactgtaaagatatgagcgacgaggtcggctgcgtgaatgttaccctgtgtgaggggcccaataagttcaagtgtcacagcggcgaatgtatcaccctggataaggtatgtaatatggcgcgtgactgtcgcgactggagcgatgaaccgatcaaggagtgcgggactaatgagtgcctcgataataatggtggttgtagccacgtctgcaatgagttgaagattggatacgagtgtctctgccctgatggctttcagctggtggcacaacgtcgctgtgaggacatcgatgaatgtcaggacccagatacttgcagccagctgtgcgtcaatctggaaggcgggtataaatgtcagtgtgaagaaggcttccaattggaccctcacacaaaagcatgtaaggcagttggttcgatcgcgtaccttttctttacgaaccgccacgaagtaaggaaaatgacgttggatcgatcagaatatacctcactgattcctaatctgcgcaacgttgtggccctcgacaccgaggtggctagcaaccgcatttattggtctgacttgagccaacgcatgatttgcagcacccagttagaccgtgcccacggtgttagctcctatgacacggttattagccgcgacatccaagctcctgatggtctggctgtggactggatccattccaatatttactggacggactctgtcctcggcaccgtcagcgtagcagacaccaagggcgtcaaacggaaaacactgtttcgcgaaaacggcagcaagccgcgcgcgatcgtggttgaccctgtccacggcttcatgtactggacagactggggtacccctgctaaaattaagaagggtggtctgaatggtgtcgatatttacagcctggtaacagagaacattcaatggcctaacggcatcaccctggacctgctgagcggccgcttgtactgggtggattccaagctgcactccatttcttctattgatgtcaatggcggcaatcgcaaaacgattctggaggatgagaaacgcctcgcccacccatttagcctggccgttttcgaagataaagtgttctggactgatataatcaatgaagctattttcagcgcaaatcgactgactggtagtgacgtgaatttgttggcagagaatctgctgagccctgaagacatggtgctgttccataacttaacccaaccgcggggtgtgaattggtgcgaaagaactaccctgtccaacggtggctgtcagtacctgtgcctccctgccccccagattaatccacactctcccaagtttacctgtgcatgcccggatgggatgctgctggcaagggatatgcgctcctgcctgaccgaagccgaggcagccgttgctacccaagagacgagcaccgtgcgcctgaaagtcagctccactgcggttaggactcagcacacgactacgcgccctgtcccggacacgagccgcttgcctggtgcgaccccaggcctgaccactgtggagattgtgaccatgagccatcaagcgttgggggacgtggccggccgcggcaatgagaagaagccttcctcagtgcgcgctctgtctattgtgctgcctattgtgctcctggtcttcttgtgccttggcgtgttcctactgtggaaaaactggaggcttaagaacatcaacagcattaatttcgacaatccggtgtaccagaaaacgaccgaggatgaagttcacatttgccataaccaggatggctactcataccctagccggcaaatggtgagcctggaggatgatgtggct

SEQ ID NO: 11030 - DNA, 2580 bp, Artificial Sequence
  derived and/or modified sequence
atggggccttgggggtggaaactacgctggacagtcgccctgctgttagctgccgccggaactgcagtgggagacaggtgcgaacggaatgaatttcagtgccaggatgggaagtgtatatcttataaatgggtgtgcgatggatcagcagagtgtcaggatggaagtgatgagtctcaggaaacatgtttaagtgtcacgtgcaaatccggagatttctcatgcggggggcgggttaatcgatgtatcccacagttctggcgctgtgatggacaagttgattgtgacaacggatctgatgaacaggggtgcccaccaaaaacatgctctcaggatgaattccggtgtcatgacgggaagtgcatctcacggcagtttgtttgtgattctgacagagattgtcttgacgggtctgatgaggcttcgtgtccagtactgacttgtgggcctgcttctttccagtgcaattcttcaacatgcatcccacagctgtgggcttgtgataatgatccagattgtgaagatgggtcagatgaatggccccagcgatgtaggggactctatgtatttcagggggattcttcgccatgttccgcattcgagtttcactgtctgtcaggggaatgtatacactcttcctggagatgtgatgggggacctgattgcaaagataagagtgatgaggaaaattgcgccgtggccacttgcaggcctgacgaatttcagtgttcagatgggaactgtattcatgggtcaagacagtgcgatcgggaatacgattgtaaggatatgtctgatgaggtgggatgcgtaaacgtgacattatgcgagggacctaataaattcaaatgtcactcaggggaatgcataacacttgacaaagtgtgcaatatggcccgggactgtagggattggtcagatgaacctatcaaggagtgcgggactaatgaatgtctcgataacaatggagggtgctctcatgtatgcaatgaacttaaaataggatacgaatgcctatgcccagatggatttcagctggttgcccagaggcggtgtgaagatatcgacgaatgtcaggaccctgatacgtgttctcagttatgtgtgaacctcgagggaggatataaatgccagtgcgaagaaggattccagctcgacccccatacaaaagcatgtaaagctgtcgggagtatagcttatctgttttttacaaacaggcatgaagtccggaaaatgacattagatcgctccgaatatacatccctgataccaaatcttcgaaatgtggttgccctcgatactgaagtggcatcgaatcgcatctactggtccgatctgtctcaaaggatgatctgcagtacacagctagatcgggcccacggagtgtcaagttatgatactgtgatttctagggatattcaggcgccagatggactagctgtcgattggatacactcaaatatctattggactgattcagtattgggaacagtgtccgtagcagatacaaaaggggtcaaaaggaaaactcttttcagagaaaacgggtcaaaaccccgagccatagtggtggatccagttcatggattcatgtattggacagattggggaacaccggcgaaaatcaaaaaaggaggactcaacggagtggatatctattcacttgtcactgaaaatatacagtggccaaatggaataacactagatctactctctgggcggttatattgggttgattcaaaactacacagtatctcatccatcgatgtgaatggaggaaatagaaaaacaatcctcgaggatgagaagaggctggctcacccattttcattagccgtttttgaagacaaagttttctggacagacattatcaatgaggctatattctctgccaatagactgacaggatctgatgtgaacctccttgcagaaaacttattgtctcccgaggacatggtgctgttccataatttgactcagcctcggggggttaactggtgcgaacgaacaactctgtccaacggggggtgtcagtatctttgtttgcccgctccacagatcaatccccactccccaaaattcacatgcgcatgccctgatggaatgctactagcccgggatatgagaagttgcttgacagaagctgaagccgctgttgctactcaggaaactagtacagtcaggcttaaagtgtccagtactgccgtgcggactcagcacacaactactagaccagtgccagatacttctaggttacctggggctacacctgggctaactactgtagaaattgtgacaatgtcacaccaggctctaggggacgtggctgggcgcgggaacgaaaagaaaccttcatccgtgagagcactatctatagtattaccaatagtccttttagttttcctttgccttggagtgttcctcctctggaagaactggaggctgaaaaacattaactctatcaactttgacaatccggtgtatcagaagacaacagaagatgaggttcacatatgtcacaatcaggatggatattcctatccatcacgtcagatggtaagtctcgaagatgatgtagcc

SEQ ID NO: 11031 - DNA, 2580 bp, Artificial Sequence
  derived and/or modified sequence
atgggaccgtggggctggaagctgcgctggaccgtcgctctgctcctcgctgcagcaggaaccgctgtgggagatcgttgcgaaagaaatgaattccagtgccaggacggtaaatgcatctcgtacaagtgggtgtgcgacggatccgcggagtgtcaagacggctcagacgaatcacaagaaacctgtctgtcagtgacgtgtaagtcgggggatttctcctgcggcggaagagtcaacagatgcatacctcagttttggaggtgcgatggacaggtggattgcgacaatggctccgacgagcaaggctgtccgcccaagacgtgctcccaggacgagttccgctgtcacgatggaaagtgcatctcgcggcaatttgtctgtgatagcgatcgggactgcctcgacggaagcgatgaggcctcgtgcccagtgctgacttgcggtcctgctagcttccagtgcaacagctcgacttgcatcccacagttgtgggcctgcgacaacgatccggattgcgaggacggatccgacgaatggccgcaacgctgcagaggactgtacgtctttcagggagactcgtctccttgctcggcgtttgagttccattgcctttccggtgagtgtatccactcaagttggcggtgcgatggtggacccgactgcaaagacaaaagtgacgaagagaactgtgcagttgctacttgcagaccggacgagttccagtgctccgatggaaattgtatccacggctcccgacaatgtgatcgggaatacgattgtaaggacatgtcagacgaagtgggttgcgtcaacgtgactttgtgtgagggcccaaacaagttcaaatgtcattcaggagaatgtattaccctggacaaggtctgcaatatggcgcgcgattgtcgggattggtcggacgagccgatcaaagaatgtggaacgaacgagtgccttgacaataacggtggatgttctcacgtgtgcaacgagctcaagatcggatatgaatgcctctgcccagacggcttccagctcgtggcgcaaaggcggtgcgaggacatcgacgaatgccaggaccctgacacttgctcgcaactttgcgttaatctggaaggggggtacaagtgccagtgcgaggaggggttccaactggatccccacaccaaagcgtgcaaagccgtgggatcgattgcctacctgttcttcaccaatcgccacgaagttcggaagatgactctggaccggtccgaatacacctccctgatcccgaacctccgcaacgtggtggctcttgatacggaagtggcttccaaccgcatctactggtcggacctgtcgcagcgcatgatttgctccactcagttggacagggcgcatggcgtgtcgtcgtatgacaccgtgatttccagagacatccaggccccagacggactcgccgtcgattggatccactcaaatatctactggaccgactcagtcctcggaactgtctcggtcgccgacactaagggcgtcaaacgcaagacgttgttcagggaaaacggatctaagccgcgcgccattgtggtggatccggttcacggctttatgtactggaccgattggggcactccagcgaaaatcaaaaagggaggacttaatggagtggatatctatagcctggtgactgaaaacatccagtggcccaatggcataaccttggatctgttgtcgggtcgtctttactgggtggattccaaactgcattcaatctccagcatcgacgtgaacggcgggaaccgaaagaccattctcgaagatgaaaagcggcttgcccacccgttctcactggccgtgtttgaggacaaagtgttctggaccgatatcatcaacgaagcgatcttctccgcaaaccggctgaccggctctgacgtcaatctgctggccgaaaacctgctgagcccggaggacatggtactgttccataacctgacccagccgcgcggcgttaattggtgcgagcgcaccactttgtcaaacggggggtgccagtatctgtgtttgcctgctccacagattaatccacattcgcctaagttcacctgtgcatgccctgacggaatgctgctggctcgggacatgagatcatgccttactgaagccgaagccgccgtggcaacgcaggaaacttcgactgtgcgactgaaggtgtcctctactgccgtcagaacccaacacaccacgacccggccagtcccggacacttcacggctgccaggcgcgactcccggcctcaccaccgtagagatcgtgaccatgtcgcatcaagcccttggagatgtggcgggtcgcggtaatgagaagaagccatcctctgtgcgcgccctgtcaatcgtgctgccgatcgttctgctcgtctttttgtgcctgggggtgttcctgttgtggaagaattggcgactcaagaacatcaatagcatcaactttgataacccagtgtaccaaaagactaccgaagatgaagtacacatctgtcacaaccaagacggctactcctacccatccagacagatggtgagcctcgaggatgacgtggct

SEQ ID NO: 11032 - DNA, 2580 bp, Artificial Sequence
  derived and/or modified sequence
atgggtccctggggatggaagttgcgatggaccgtggcgctgctgcttgcggcagcaggcacggcggtgggagatcgttgtgaacgaaacgaattccaatgtcaggacggaaagtgcatttcttacaagtgggtctgtgatggctcggcagagtgtcaggatggatcagatgagtcgcaagaaacctgtctcagcgtgacctgcaagtccggggacttctcctgtggtggaagagtgaacaggtgtatcccacagttctggcggtgcgatggtcaggttgattgcgataatggctccgatgagcaaggctgtccgcccaagacctgttcacaggacgaattccggtgccacgacggcaagtgcatcagccgccaatttgtatgcgattcagatcgcgattgtcttgatggtagcgacgaagccagctgtccagtgctgacctgcggtcctgcatcattccaatgtaactcaagcacttgtattccccagctttgggcctgtgataacgatcctgactgtgaagatggatcggacgaatggcctcagagatgtaggggactgtacgtgtttcaaggagactcatcaccctgttcggcattcgaattccactgtctttccggagagtgtattcactcgtcctggagatgcgacgggggtcctgattgcaaagataaaagcgatgaggagaattgcgcagtcgccacttgtagaccagacgaatttcagtgtagcgatggaaattgtattcatggatcgcgacagtgtgatagggaatacgactgtaaagatatgtccgatgaagtcgggtgtgtgaacgtgaccttgtgcgaaggacccaataagtttaagtgtcattccggtgaatgtataacgctggataaggtctgtaatatggcacgtgattgccgcgactggtcagacgaacccatcaaagaatgtggaaccaacgagtgcctcgataacaacggggggtgttcgcatgtgtgtaacgagctcaagattggttacgaatgtctttgtccggatggatttcaacttgtggcacaaagacgttgtgaagatatcgatgaatgccaggatcctgacacttgctcacaactctgcgtgaacctggaaggaggatacaagtgtcaatgtgaagaaggctttcaacttgaccctcataccaaagcatgcaaggccgtcggatcaattgcataccttttcttcaccaacagacacgaggtgcgcaagatgactctggatagatcagaatacacttcgttgatacctaatcttcgaaacgtggttgcactcgataccgaagtcgcctctaatcggatctactggtcagatctgagtcaaagaatgatttgctccacccaactcgatcgggcccatggagtcagctcctatgacactgtgatcagcagagacattcaagctcccgatggactggcggttgattggattcattctaatatctactggactgactcagtgttgggtaccgtgtcggtggccgataccaaaggagttaagcgtaagacgctttttcgagaaaatggatccaagcctagggcaatcgtcgtcgatccagtgcatgggtttatgtactggaccgattggggaactccagcgaagatcaaaaaggggggacttaatggagtggatatctattcacttgtcactgagaacattcagtggccaaatggtatcacccttgatctgctgtcgggcaggctttactgggtggatagcaaacttcattcgatttcctccattgacgtgaacggaggtaatcggaaaaccatactggaggatgaaaaaagactcgcacatcctttctcgctggcagtctttgaggacaaagttttttggaccgatatcattaacgaggcaattttctccgcaaatcgacttactggctccgacgtaaatcttcttgcagagaacttgctctcacccgaggatatggtcctctttcataatctgacccagccaagaggtgtgaactggtgcgagaggaccacgctctcgaacggcggctgtcagtacctctgcctcccagcgccgcaaatcaaccctcactccccaaagtttacgtgtgcgtgtcctgatggcatgttgctggcaagagatatgagatcatgcctcactgaagccgaggccgccgtggcaactcaggagacttccactgtgcgattgaaggtgtcgtcgacggcagttcggacccaacacaccaccactagaccagtgcccgatacctcacggctgcctggagcaacccccggactgactacggtcgagattgtgactatgtcgcaccaggcactgggtgacgtcgccggtagaggaaatgaaaagaagccatcatcggttagggctctttcgattgtgcttccaatcgtgttgctggtgttcctttgcctgggagtctttcttctgtggaagaactggcggctcaaaaacattaacagcattaactttgacaatcccgtttaccagaaaacgaccgaggatgaagtccacatttgtcataatcaagatggttacagttacccatcgagacagatggtgtcgttggaggatgatgtggca

SEQ ID NO: 11033 - DNA, 2580 bp, Artificial Sequence
  derived and/or modified sequence
atgggcccctggggatggaagttgcgttggaccgtagctttgttgctggcagcagcaggaactgcagtgggtgacagatgcgagcgcaatgaatttcagtgccaggatggaaagtgcatcagctacaagtgggtgtgcgacgggagcgccgagtgccaagacggctcggacgaatcccaggaaacttgcctcagcgtgacctgcaaaagcggagactttagctgcgggggccgtgtgaacagatgtatcccgcagttctggcggtgtgatggacaggtcgactgcgacaacggttctgacgagcagggatgccctcctaaaacgtgttcccaggacgaatttaggtgccatgatggaaaatgcatctcaaggcaattcgtgtgtgactcggaccgcgactgcctcgatggatcagatgaggcgagctgccctgtgctcacctgtggacctgcctccttccagtgcaatagcagcacttgcatcccgcagctgtgggcctgtgataacgacccggactgcgaggatggatcggatgaatggccgcagaggtgccgcgggctgtacgtgttccaaggagattcgagcccatgctcggctttcgaattccactgcctttcaggagaatgcatccactccagctggcgctgtgatgggggccccgactgcaaggataagagcgatgaggagaactgcgctgtcgcgacctgcaggccagatgagttccaatgttccgatggaaactgtatccatggttcgcgccagtgcgatagagaatacgactgtaaggacatgagcgatgaggtcggttgcgtgaacgtcaccctgtgcgaaggaccaaacaaattcaagtgccattcgggagagtgtatcaccctggacaaggtctgcaatatggcaagagactgccgggattggtcagacgaaccgattaaggaatgcggaaccaatgaatgcctcgacaataacggaggttgttcccacgtgtgtaacgagctcaagatcggatacgaatgcttgtgcccagacgggttccaactcgtcgctcagagaaggtgcgaggacatcgacgaatgccaggatccagacacgtgctcacagctgtgtgtgaacctggaaggcggatacaaatgtcaatgcgaggagggtttccagctggacccgcacactaaggcatgtaaggccgttggatcgatcgcttacctgtttttcacgaatcggcacgaagttcgcaagatgactttggacagatctgaatacacctccctcattccgaatttgagaaacgtcgtggcacttgatacggaagtggcctcgaaccgcatatactggtcggacctttcgcaaagaatgatctgctcaactcaactggaccgcgcccacggggtgagttcttacgacaccgtcatctcgagggatatacaggcgccagacggcctggccgtcgattggatccactctaacatctactggaccgattcagtcctgggaactgtgtctgtcgcggacactaagggtgtgaaacgcaagactcttttccgggagaatggatccaaaccacgcgcaatcgtagtagatccagtccatggctttatgtactggacggactggggtactccggcgaagatcaagaaaggcgggctcaatggtgtggatatctattccctcgtgaccgaaaacattcaatggcccaacggcatcacccttgacctgctctccgggcgactgtactgggtggacagtaaactgcactcgatcagcagcatcgacgtgaatggcggaaatcgcaagactatcctggaggatgagaagcgcctcgcccatccgttctccctggcagtttttgaagataaggtgttctggaccgatatcattaacgaagcgatcttttcggccaatcggctgactgggtcggacgtcaacctgttggccgaaaacctgctctccccagaagatatggtactcttccacaatctgacccaaccgagaggggttaactggtgtgaacgcactaccctgtccaacggaggatgtcaatatctgtgcctgccggccccgcagataaacccgcatagccctaagttcacttgtgcctgcccagatggaatgcttctggcccgagatatgcgcagctgcctcaccgaggctgaagccgcagtggcgactcaggagacttccaccgttcggctgaaggtgtcatcgacggcggtgcggacccagcacacgaccacccggcctgtgccagacacttcacggctgccgggtgcgacccccggccttactaccgtggagattgtgactatgtcccaccaggccttgggcgacgtggctggaaggggaaatgagaagaaaccgtccagcgtgcgcgccctgtcaattgtcttgccgattgtcctcctcgttttcctgtgcctgggcgtgttcctgctgtggaaaaactggcggctgaagaacatcaacagcatcaattttgacaaccctgtgtaccaaaagaccactgaggatgaagtgcatatctgccacaaccaggacggatactcatacccctcgcggcagatggtgtcgctcgaggacgacgtcgct

SEQ ID NO: 11034 - DNA, 2580 bp, Artificial Sequence
  derived and/or modified sequence
atggggccgtggggctggaagttgcgctggaccgtggcgctcctcctcgcggccgccggaacggccgtgggggatcgctgcgaacggaatgaattccagtgccaagatggcaagtgcatctcgtacaagtgggtgtgcgacggctcagcagagtgccaggacggaagcgacgaatcccaggaaacctgcctgtcggtgacctgtaaatccggagacttcagctgcggaggtcgggtgaatcgctgcatccctcagttctggaggtgtgacggacaggtcgactgcgacaatggctcggatgagcagggatgcccgccaaagacctgctcgcaggacgaatttcgctgccacgacggaaagtgtatctcccgtcaattcgtctgtgattcggacagagactgcctggacggatccgatgaggcgtcgtgcccggtgctcacctgcggacccgcatccttccagtgcaactcctcaacgtgcatcccgcagctgtgggcttgcgacaatgacccagactgcgaagatgggagcgacgaatggccacagcgctgcaggggactgtacgtgttccaaggagactcgtccccatgctccgcattcgagttccactgtctcagcggagagtgcattcacagctcgtggagatgcgacgggggtccggactgcaaggacaagtccgacgaggaaaattgtgccgtcgcaacttgccggccggacgagttccagtgttccgacggaaattgtatccacggatcgcgacaatgtgatcgcgagtacgattgcaaagacatgagcgatgaagtgggatgcgtcaatgtgaccctgtgcgagggaccgaacaagttcaaatgccacagtggagaatgtattactctcgataaagtgtgcaatatggcgcgggactgccgcgactggtcggacgaaccaattaaggaatgcggaaccaacgaatgcttggataacaacggaggctgcagccacgtgtgcaacgagcttaagatcggctacgagtgcttgtgcccggacggatttcaactggtagcgcaaagacgatgcgaagatatcgacgagtgtcaagaccctgatacctgctcacaactgtgcgtgaatctggaaggagggtacaagtgccagtgtgaagagggatttcagctcgaccctcacactaaggcatgtaaggcagtcggctcgatcgcatacctgttctttactaatagacatgaggtgagaaagatgacccttgaccggtcggagtacacgtcgctcataccgaacctccggaacgtggtggcgttggataccgaggtggcatcgaatcgcatctactggtcggatctgtcacagcggatgatttgttcaacccaacttgacagagcgcacggagtgtcctcgtacgatactgtgatcagccgcgacattcaagccccagatggacttgccgtggactggatccactccaacatctattggaccgactccgtcctcggcactgtgtcagtggccgatactaagggagtgaagcgcaaaactctgtttcgcgagaacggctcgaagcccagagccatcgtggtcgacccagtccatggattcatgtattggaccgattggggaactcccgctaaaatcaagaagggaggactcaacggcgttgacatctactccctcgtgactgagaatatccagtggcctaatggaattaccctggatctgctctccggccgcctgtactgggtggactccaagctgcattcaatttcttccatcgacgtcaacggaggaaaccggaaaacgatccttgaggacgagaaacggctcgcgcacccgttttcgctggcggtgtttgaggacaaagtgttctggacggacatcatcaacgaagccatctttagcgcgaatcggctgaccggatccgacgtgaatctcctggccgaaaacctgttgagcccggaagatatggtgctgttccataacctgacccagccgagaggagtgaattggtgtgagcgcaccaccctgtccaacggaggatgccaatacctgtgccttccagctccccagattaacccacattccccgaagtttacctgcgcttgcccagatggcatgctgctggcccgcgacatgagatcatgtttgactgaagccgaagccgcggtggcgacgcaggaaacgtcgactgtcagactcaaggtgtcaagcactgcagtccgcactcagcataccactacccggccagtgccagacacctcaagacttccaggagcgaccccgggactcaccaccgtggagatcgtgactatgtcccatcaagcgctcggtgacgtggccggacgcggcaacgagaaaaaaccatcgtcggtgagggccttgtccatcgtcctgccgattgtcctcctcgtgttcctctgtctgggggtctttctcctctggaagaactggagactgaaaaacataaacagcatcaacttcgacaaccctgtgtaccagaaaaccactgaagatgaagtccatatttgtcataatcaggatggatactcatacccctccagacagatggtttccctggaagatgatgtggcc

SEQ ID NO: 11035 - DNA, 2580 bp, Artificial Sequence
  derived and/or modified sequence
atgggaccatggggatggaaacttagatggacagttgcattacttctcgcagcagctggaacagcagttggagatagatgcgaacgtaatgaatttcaatgtcaagatggaaagtgtatttcatataagtgggtttgtgacgggtcagctgaatgtcaagatggttctgatgaatctcaagagacatgtttatcagttacttgtaagtcaggagatttttcttgtggtggtagagttaacagatgtattcctcaattttggagatgtgatgggcaagtagattgtgataatggaagtgatgaacaaggttgtcctccaaaaacttgttcacaagacgaatttagatgccacgatggaaaatgtattagtagacagttcgtatgtgattctgatagagattgtttagatggttctgatgaagcttcatgtcctgttttgacatgtggtccagcttcatttcaatgtaatagttctacctgtattccacaattatgggcttgtgataatgatccagattgcgaagatggtagtgatgaatggcctcaaagatgtagaggattatatgtttttcaaggagatagttctccatgttcagcttttgaatttcattgtttatcaggtgaatgtattcacagtagttggagatgtgatggaggacctgattgtaaagataagtcagatgaagaaaattgtgctgttgcaacctgtcgaccagacgaatttcagtgtagtgatggtaattgtattcatggaagtagacaatgcgatagagaatatgattgcaaagatatgagtgacgaagttggatgtgttaacgttactttgtgtgaaggacctaataagttcaaatgtcattcaggtgaatgtattacattagataaggtttgtaatatggcaagagattgtagagattggagtgatgaaccaattaaagaatgtggaacaaatgaatgtcttgataataatggaggatgttcacacgtttgtaatgaattaaaaattggatatgaatgtctttgtccagatggatttcagcttgttgcacaaaggagatgtgaagatatagatgaatgtcaagatccagatacttgttctcaactttgtgtcaatttagagggaggatataaatgccaatgtgaggaaggatttcaattagatcctcatacaaaagcttgtaaagctgtaggaagtatagcatatcttttttttacgaatagacatgaagttagaaaaatgacattggatagatcagaatacactagtcttattcctaatttacgaaatgttgttgctttagatactgaagtcgcatcaaatcgtatttattggtccgatttgtctcaaagaatgatttgttcaacacaattagatagagctcatggagtttctagttatgatactgtaatatcaagagatatccaagctccagatggattagctgtcgattggattcattctaatatttattggacagatagtgtgttaggtacagtttctgttgcagatacaaaaggagttaaaagaaaaacattatttagggaaaatggaagtaaaccaagagcaattgttgttgatcctgttcatggatttatgtattggactgattggggtacaccagcaaaaatcaagaaaggaggattaaatggtgtagatatatacagtttagtaactgaaaatatacagtggccaaacggtatcactcttgatttactatcaggacgattatattgggttgattctaaacttcattcaataagttctattgatgttaatggaggtaatagaaaaactattttggaagatgaaaaacgacttgctcacccattctcattggctgtatttgaagataaagtattttggacagatattattaatgaagcaattttctcagctaatagattaacaggatctgatgttaatcttttagctgaaaatcttctttcaccagaagatatggtcctttttcataatttaactcaaccaagaggtgtcaattggtgtgaaagaacaactttatctaatggaggttgccaatatttatgtcttccagctcctcaaattaacccacatagtccaaaatttacgtgtgcatgtccagacggaatgcttttagctcgagatatgagatcatgtttaactgaagcagaagctgctgtagctacacaagaaacttcaactgttagattaaaagtttcgtctactgctgttcgtacacaacatactactacacgacctgttcctgatacttcacgattaccaggtgctacaccaggacttacaacagttgaaattgtaacaatgtcacatcaagcattaggtgatgtagctggacgtggaaatgaaaaaaaaccatcttcagttagagcattgtcgatagttttaccaattgttcttttagtttttctttgtttaggtgtatttttactttggaaaaactggagattaaaaaatattaatagtataaattttgataatcctgtttaccaaaagactacagaagatgaagtacatatttgtcataatcaagatggatacagttacccatcaagacaaatggtttcattagaagatgatgtagca

SEQ ID NO: 11036 - DNA, 2580 bp, Artificial Sequence
  derived and/or modified sequence
atggggccatggggctggaagctgagatggactgtggcccttctgttggcagcagcagggactgccgtgggggatagatgtgaacgcaatgagtttcagtgtcaggacggaaagtgtatcagctacaagtgggtgtgtgacggaagcgcggaatgtcaagatggaagtgacgaatcgcaagaaacgtgtctgagcgtgacctgtaagagcggtgatttttcgtgtgggggacgggtgaatagatgtattccacagttctggaggtgcgatggacaagtcgactgtgataatggatccgatgaacaaggctgcccccctaaaacttgttcccaggatgagtttagatgtcatgatggaaaatgtatctcgcgacagttcgtgtgcgactccgacagggattgcctggatggaagcgatgaagcatcgtgccctgtgctgacttgtggtcccgctagctttcaatgtaactcgtcgacctgtatacctcagctctgggcatgtgacaatgaccctgattgtgaggacggctccgatgagtggcctcaaagatgtagaggactgtacgtgtttcagggagatagctctccttgttccgcctttgaatttcattgtctgtccggagaatgcatccacagctcatggcgttgtgacggtggaccggactgtaaggacaaaagtgatgaagagaactgcgctgtcgccacctgccgtcctgatgaattccagtgctcggacggaaattgtatccatggaagtcgacagtgtgatagagaatacgactgtaaggatatgtcggacgaagtgggttgtgtgaacgtgaccctgtgcgagggaccgaataagtttaagtgccactccggagagtgtataaccctggataaggtgtgcaacatggcacgggattgtagagactggtccgatgaaccaattaaggaatgtgggaccaatgaatgtctcgacaataacggtggatgttcacatgtgtgtaacgagttgaaaatcgggtacgagtgtctgtgcccagatggattccaattggtcgcacagagacggtgtgaggatatagatgagtgtcaagaccccgacacgtgttcgcagctctgtgtgaatctcgagggaggatacaagtgccagtgtgaagaaggatttcagctggatccgcataccaaagcctgtaaggcagtcggttcgatagcctacctctttttcactaaccgccacgaagtcagaaagatgactcttgatcgctcagaatacacttcactgatcccaaatttgcgcaacgtggtcgcccttgacacggaagtcgccagcaacagaatttactggtccgacctcagccagcggatgatttgtagcacccagctggatcgagcacacggggtgagcagctatgatacggttatctcccgagacattcaggcaccagatggcctcgcagtcgattggattcattcgaacatctactggaccgactcggtgctgggcactgtgagcgtggcggataccaagggggtgaaacgcaaaactctttttcgggaaaatggatcgaaacctcgggcaattgtcgtggatcctgttcacggtttcatgtattggactgactggggtacccccgcaaagatcaaaaagggaggtctgaacggagtcgacatttactcgcttgtcaccgagaacattcaatggccaaatgggattactcttgacctcctctcaggtagactgtactgggtggattctaagctgcattcaatttcgagcatcgatgtgaacgggggtaacagaaagaccatacttgaagatgagaagcgcctggcacatcctttttccctggccgtgttcgaagataaggttttctggactgacataatcaatgaagcaatattctccgcaaacagactcaccggatccgacgtcaacttgctggcagaaaacttgctcagcccggaggacatggtgctctttcacaatctgactcaaccaagaggcgtgaattggtgtgaaaggactacgctgtcaaatgggggatgtcagtacctttgtttgccggccccccagattaaccctcattccccaaagtttacctgtgcatgccctgatggaatgttgctcgcccgagatatgcgctcgtgtcttaccgaggcagaggcagcagtagctactcaggaaacttcaaccgtccggcttaaggtgtcgtcaaccgctgtccggacgcagcataccactactagacctgtgccagatacctcccggctgcctggagccacccccggactgactactgtggaaattgtgactatgtcccatcaagccctgggcgacgtggcgggtaggggcaatgaaaagaagccatcgtcggtgcgcgcactgtctatagtgctgccaattgtgctccttgtgtttctttgtctgggagtctttctgctttggaagaattggaggctgaagaacattaactcaattaactttgacaatcctgtgtatcaaaagactaccgaggacgaagtgcatatttgtcataaccaagatggatacagctacccctcaagacagatggtttcactggaagatgacgttgcg

SEQ ID NO: 11037 - DNA, 2580 bp, Artificial Sequence
  derived and/or modified sequence
atgggcccctggggctggaagcttcgctggaccgtagctctgttgctggccgccgctgggaccgcagtgggagacagatgtgagcgcaatgagttccagtgtcaggacggaaagtgcatatcctacaaatgggtatgcgacggcagcgccgagtgccaggatggcagtgacgagtctcaggagacatgcctgtctgtgacctgcaaaagcggcgatttttcttgtggtggcagggttaacaggtgtattccacaattttggcgctgcgatggccaagtggattgcgataacggttccgatgaacagggctgcccccccaaaacatgcagccaggatgagttccggtgtcacgatggtaaatgcataagccgacaatttgtctgcgactccgaccgcgattgtctggacggcagcgacgaggcctcctgtcctgtgttgacatgtggacctgcctcatttcaatgtaacagctccacctgtatcccacagctttgggcttgcgataatgacccagattgcgaggacggctccgatgaatggcctcaaaggtgtaggggtctttacgtgtttcaaggggatagctcaccttgcagcgcatttgaatttcattgtctgagcggggagtgtatccatagtagttggaggtgtgatggtggacccgattgcaaagataagagcgatgaggaaaactgtgcagttgccacctgtcggccagacgaattccagtgtagcgacggtaattgtatccacggcagtcggcagtgcgaccgcgagtacgattgcaaggatatgtcagacgaagtaggctgtgtaaatgttaccttgtgcgaggggcccaacaagtttaagtgtcactcaggggaatgcattaccctcgataaggtgtgcaacatggccagagattgccgggactggagcgatgaacccattaaggagtgtgggaccaacgaatgcctggacaataacgggggatgctcccacgtatgtaacgaactgaagattggctacgagtgcctgtgtcctgacggcttccagctggtcgcccagcggagatgcgaggatatcgacgagtgtcaggatccagacacatgcagccagctgtgtgttaacctcgagggcggctataaatgccagtgtgaagaggggttccagctggatcctcacacaaaggcctgcaaagctgttggatctattgcttatctcttcttcaccaacagacatgaggtgcggaaaatgacactggataggagcgaatacacgtccctgatccccaatctgcggaacgttgtggcactggacacagaggtagcttcaaaccggatctactggtccgacttgtctcagaggatgatctgcagcacgcagctggatcgggctcatggggtcagtagctatgatacagtgatctctagggacatccaggccccagatggacttgctgtcgactggatccactccaatatatattggactgatagcgtgctgggaacagtttctgtggccgacaccaaaggagtcaaaaggaagacactgtttcgagaaaacggaagcaaaccgcgagccatcgtagtggaccccgtgcacggttttatgtactggacagactgggggacaccagcaaaaattaagaaggggggcctcaatggggtcgacatttattcactcgtgaccgagaacatacaatggccgaacgggattacactggacttgctgtcaggacgactgtattgggtggacagcaagctccatagcatatccagtattgacgtgaacggcgggaaccgcaaaaccatcctcgaggacgaaaagcgactcgctcatccattttcactggcggtgttcgaggacaaggtgttttggacggacataatcaatgaagctatcttctccgcaaataggcttacaggctctgacgtcaatctgctggccgagaatcttctctcaccagaagacatggtcctcttccataacttgacacagcctcggggcgttaattggtgcgaaagaacaacgctttctaacgggggatgtcagtacttgtgcctgcctgcacctcagatcaatccccatagtccaaagttcacatgtgcatgtcctgatggtatgctcctcgcccgggacatgaggtcatgtctcactgaggctgaagctgcagtggctacccaagaaacgagtacagtgcgactgaaggtgtcctcaacagctgtccgcacacagcatacgacaacaaggcctgtccctgacacaagcagactgccgggtgctacgccaggactgaccacggtagagattgtgacaatgtctcaccaggccctgggggacgtggctgggcgcggcaatgaaaagaagccaagcagcgtgagagccctgagcatcgtcctgcccatcgttctcctggtgttcttgtgtttgggcgtcttcctgctttggaaaaactggagacttaagaatatcaacagtattaattttgataaccctgtataccagaagactacagaggatgaggttcacatatgtcacaaccaggacggttacagttacccatcccgacagatggtcagtctcgaggatgacgtcgcc

SEQ ID NO: 11038 - DNA, 2580 bp, Artificial Sequence
  derived and/or modified sequence
atggggccttggggctggaagctgcgctggaccgtggcgctcctgctggccgcagccggcaccgcagtgggagatcgctgcgaaagaaacgaatttcaatgccaggacggtaagtgcatttcgtacaagtgggtgtgcgatgggagcgcggagtgtcaggacggttcggacgaatcacaggaaacctgcttgtcggtgacgtgcaaatccggagatttcagttgtggtggccgcgtgaatcggtgcatccctcaattctggcgctgtgatggccaagtggattgcgacaacggatcagacgaacagggttgccctcccaagacgtgctcgcaagacgagtttaggtgccacgatgggaaatgcatcagccgccaattcgtctgcgactccgatagagactgcctggacggatctgatgaggcttcatgcccagtgctgacctgcggaccggcctcgttccagtgcaactcgtccacttgtatcccccagctgtgggcctgcgataacgacccggactgcgaggacggaagtgacgaatggccgcaacgctgccgaggactgtacgtgttccagggtgatagctctccgtgtagcgccttcgaattccattgcctgtcgggcgagtgtatccactcaagctggcggtgcgatggggggccagattgtaaagacaaatcagatgaggagaattgcgccgtcgcaacctgccgccccgatgagtttcagtgtagcgacggcaattgtatccacggatcacggcagtgcgaccgggaatacgactgcaaggacatgtccgatgaggtcggctgtgttaacgtgactctgtgcgaaggtcctaacaagttcaagtgccattcgggagaatgcatcaccctcgacaaagtgtgcaatatggcaagagactgtcgcgactggtcggacgaaccgatcaaggagtgcggaaccaatgaatgcctcgacaataatggcggatgcagccacgtctgcaatgaacttaagatcggatacgaatgcttgtgccccgatgggttccaactggtggcccagaggaggtgtgaagatatcgatgaatgtcaggacccggacacttgctcgcagctctgcgtgaacctggaaggagggtacaagtgccaatgcgaggaggggtttcagcttgacccccataccaaggcgtgcaaggctgtcgggtccatcgcctacctgtttttcactaacagacatgaggtgcggaagatgactctggaccgcagcgaatacacgtccctgatcccaaatctccgtaatgtggtggcattggacacggaagtcgcgtcaaacagaatttactggtcggatctgtcgcagagaatgatctgctcaacccagctcgatcgggctcacggcgtgtctagttacgacactgtgatttccagggatattcaagcgccggatggactcgcagttgactggatccactcaaacatctactggaccgattccgtcctgggcaccgtgtccgtggcagacaccaagggtgtgaaaaggaaaactttgtttagggaaaacggatctaagcctcgggcgatcgtggtcgacccagtgcacgggttcatgtactggaccgactggggcactccggcgaaaatcaaaaagggcggactgaacggagtagatatctattcgttggtgactgagaacatccaatggccgaacggaatcactctcgacctgctgtcagggcggctctactgggtagattcaaaacttcacagcatcagttcgattgacgttaatggagggaaccgcaagacgatactggaagatgaaaagagactcgctcatccattctccctcgcggtgttcgaggataaagtgttctggaccgacatcatcaacgaagcgattttcagcgccaaccggctcacgggaagcgacgtcaacctgctggctgagaacctgctgtcgccagaggacatggtgcttttccataacttgactcagcctagaggagtgaattggtgcgagcggaccaccctgtctaacggaggctgtcaatacctctgtctcccggccccacagataaacccgcactccccgaaattcacttgtgcctgtccggacggcatgcttcttgcacgcgacatgcgctcttgcctcaccgaagccgaggcggctgttgccactcaggaaaccagcactgtccggctgaaggtgagctctactgccgttcgcacccaacacaccaccacccgccctgtcccagatactagccgtctgccgggagccaccccgggactcactactgtggaaatcgtcaccatgtcacatcaggcactgggggacgtggcgggacggggaaacgaaaagaagccgtcgtcagtgcgcgctctctccatcgtgctgccgatcgtcctgctcgtgtttttgtgcctgggtgtgttcctcttgtggaagaattggagactgaagaacatcaattcaattaacttcgataacccagtctaccaaaagaccactgaggacgaagtacacatctgccataatcaggacggatacagctatccctcgaggcagatggtttcccttgaggacgatgtcgca

SEQ ID NO: 11039 - DNA, 2580 bp, Artificial Sequence
  derived and/or modified sequence
atgggaccttggggatggaagctgagatggactgtggcactgctgctggccgcagcgggaaccgccgtgggcgatcgctgtgagagaaatgagtttcagtgtcaagatgggaaatgtatttcatataagtgggtgtgtgatggctcggctgaatgtcaggacggatccgatgaaagccaggaaacctgcctgtcggtcacttgcaaatccggcgatttcagctgcgggggacgtgtgaatagatgtatcccacaattctggagatgtgacggtcaggtcgactgcgataacggttcggacgagcagggctgcccacctaagacctgttcgcaagatgagtttaggtgccatgatggtaaatgcatttcgagacaatttgtgtgcgattcggaccgggattgtctggatggttcagatgaagcgtcgtgtcccgtgctgacttgcggtccagctagctttcagtgtaacagctccacctgtattccacaactctgggcatgtgataacgatccggactgcgaggacggatctgatgaatggccccaaaggtgtaggggactgtacgtgttccaaggagattcctcgccttgttcggcattcgagttccattgtctgtccggcgagtgtattcattcctcatggcggtgtgatggcggtccggattgcaaggataagtccgatgaagaaaactgtgccgtggcgacttgtcgtcctgacgaatttcaatgttccgatggaaattgtatccacggttcgagacaatgcgacagagagtacgactgtaaagacatgtcggacgaagtgggatgtgtgaacgtcaccctttgtgaagggccgaacaaattcaagtgtcactccggcgaatgtatcactctcgataaggtgtgtaatatggcccgagattgtagagattggtctgacgaacccatcaaggaatgcggaactaacgaatgtttggataacaacggaggatgttcgcatgtgtgcaacgaacttaagattgggtatgaatgcctctgccccgatgggttccagcttgtggcacaacgccggtgcgaagatatcgatgaatgtcaagatcctgatacctgcagccagctgtgtgtgaacctggagggaggttataagtgccagtgtgaggaagggttccaactcgatccacatactaaggcctgcaaggcggttgggtcaattgcatacctgtttttcaccaatcgccatgaggtgcggaagatgaccctcgatagatcggagtacacctctcttattccaaatcttaggaacgtggtggccctcgatactgaggtcgcatcgaaccggatttactggtccgatctcagccaaaggatgatctgctccactcaactggatcgcgcacatggggtcagctcctacgataccgtgataagccgtgacattcaagcaccagacgggctcgcagtcgactggatccattcaaacatatactggaccgactccgtgctgggaaccgtctcagtggcggataccaagggtgtgaagaggaaaacgttgtttagagaaaacggatcgaaaccccgagcaattgttgtggaccctgtgcatggtttcatgtactggacggattggggaaccccagcaaagatcaaaaagggagggctcaacggagtggatatctacagcctggtgaccgaaaacattcaatggccaaacggtataactctggatctgctgtccggtaggctgtactgggtcgactccaagctccatagcatctcgtccatagatgtgaacggcggaaatagaaagactattttggaagatgaaaagaggctggcacaccccttctcgctggccgtctttgaggacaaggtcttttggactgacatcataaacgaagcgatcttctcagctaaccgactgactgggagcgatgtgaaccttttggcagaaaacctgcttagcccagaagatatggtgctcttccacaaccttacccaaccacggggggtcaattggtgtgagagaactaccctgtcaaacggtggatgtcagtacctgtgtctgcctgcacctcagattaacccgcactctccaaaattcacgtgtgcatgccccgacggaatgcttctggcaagggacatgaggtcctgcctgaccgaagcagaagccgcagtcgcaacccaagagactagtaccgtgcgcctcaaggtttcgtcgaccgctgtgcggacccaacataccaccactcgtccagtgccagacacttcgcgccttccgggtgcaaccccaggccttactactgtggaaatcgtcactatgagccatcaagcgctgggagatgtggcagggagaggaaacgaaaagaagccctcctccgtgagagccctgtcgattgtgcttcccatcgtgctgcttgtattcctgtgcctgggagtctttcttttgtggaaaaactggcgtctcaaaaacatcaactcaataaactttgacaatccagtgtaccagaaaacgactgaagatgaagtgcacatttgtcacaatcaagatggatacagctacccatccaggcaaatggtgagcctcgaggatgacgtggca

SEQ ID NO: 11040 - DNA, 2580 bp, Artificial Sequence
  derived and/or modified sequence
atgggaccgtggggatggaaacttagatggactgtcgcactgctgctggccgcggccggaaccgcagtgggtgatagatgtgaacgcaacgaatttcagtgtcaagatggcaagtgcatatcatacaagtgggtctgtgatggatcagccgaatgtcaagatgggagcgatgaaagccaagaaacctgcctgagcgtcacttgcaagtccggtgacttttcgtgcggtggaagagtcaaccggtgcatccctcagttttggcggtgtgacggacaggttgattgtgataatggttccgacgaacagggctgtcctcctaagacgtgttcacaggatgaatttagatgccacgatggtaagtgcatttcgagacaatttgtgtgcgattccgacagagactgcttggatgggtccgacgaagcatcatgtcccgttctgacctgcgggccagccagctttcagtgcaattcctcgacctgcatcccccagctgtgggcatgtgacaacgatcctgactgcgaagatggatcagatgagtggccgcaacgttgcagagggctgtacgttttccaaggggactccagcccatgtagcgccttcgagttccattgcctgagcggcgaatgcatacattcgtcgtggcgatgtgacggaggtcccgattgcaaagacaagagcgacgaagaaaactgtgcagtggccacctgccgcccggatgaatttcaatgttccgatggtaattgtattcacggatcacgacagtgtgatcgcgagtacgattgtaaggatatgagcgacgaagtgggatgcgtgaacgtgactctctgtgaaggaccaaacaaattcaagtgccattccggggagtgtatcacccttgacaaggtgtgcaacatggcaagagactgtagagattggtccgatgagcccattaaggaatgtggaaccaacgagtgtttggataacaatggcggatgctcccatgtgtgtaacgaacttaagatcggatacgagtgtttgtgtcccgacggatttcaacttgtggcccagcgtcgctgtgaggacatcgatgaatgccaggacccagatacgtgctcacaactttgtgtcaacctcgaaggcggttacaagtgccagtgtgaagaaggttttcaactggacccgcatactaaagcctgcaaggcggtggggtccattgcttatcttttcttcaccaatagacacgaagtgagaaagatgaccctggatcgaagcgaatacaccagccttattccgaatttgcgcaatgtcgtcgcgctggatactgaagtggcctccaacagaatctattggtcagatcttagccaaagaatgatttgcagcactcagcttgatagggcacacggtgtctcctcgtacgacaccgtcataagccgtgatattcaggccccggatgggctggctgtggactggatccactcaaacatatactggacggactctgtcctgggtactgtctctgtggcagataccaagggagtcaaaaggaaaaccctttttcgcgagaacggcagcaagccccgcgcaatcgtggtggatccagtacacggtttcatgtactggaccgactggggtacccctgctaagatcaagaagggagggcttaatggagtggatatctactcgcttgtgaccgaaaacattcaatggccgaacggcattaccctggacctgttgtccggtaggctgtactgggtcgactccaagctgcactcaatcagcagcatcgatgtgaacggagggaatcggaaaaccattcttgaggatgaaaaaaggctggctcatccgttttcacttgcagtctttgaggacaaggtcttttggaccgacattatcaacgaggcaatctttagcgcgaatcggcttactggaagtgatgtgaacctgcttgccgaaaaccttttgtccccagaagatatggtcctgttccataatctgacccagcctcgcggtgtcaactggtgtgagcgcacgactctttcaaatggcggatgtcagtacctgtgcttgccagcccctcagattaatcctcattcgccaaaattcacttgtgcgtgccctgatggaatgctcctggcacgcgatatgcgctcctgtctgactgaggcagaagcagcagtggcgactcaagagacgtcgacggtcagactcaaagtgagttccacggcggtgaggacccagcatactaccacccgccctgtgcctgatacctccaggctgcctggtgccactcctggactcaccactgtggagatcgtgactatgtcgcaccaggcactcggtgacgtcgcaggccggggcaatgagaaaaagccatcttccgtgcgcgcactctccatcgttttgcctattgtgcttcttgtgtttctgtgtctgggtgtgttccttctctggaaaaactggcgcctgaagaacattaactcaattaactttgataatcctgtgtatcaaaagacgactgaagatgaagtgcacatctgtcataatcaagatggatacagctacccatcgcggcaaatggtgtcccttgaagatgacgtggca

SEQ ID NO: 11041 - DNA, 2580 bp, Artificial Sequence
  derived and/or modified sequence
atgggcccttggggatggaaactgcgttggaccgtggccctcctgttggcggccgccggaaccgcggtcggtgatcggtgcgaaaggaacgaatttcaatgccaggatggaaaatgcatatcatacaaatgggtctgtgacggttcggcagaatgccaggacggttcagacgagtcacaggaaacctgcctgagcgtcacttgcaagtccggagatttctcttgcggaggccgcgtgaatcggtgcattccgcagttttggcgctgtgacgggcaggtcgactgtgataacggatctgacgaacaaggctgtccccctaaaacttgtagccaggatgagttccgctgccacgacggaaagtgcatctcgcgacaattcgtgtgtgacagtgatagagactgccttgatggaagtgacgaggcatcctgccctgtgttgacctgcggcccggcttcgttccaatgcaactcgagcacttgcatcccacagctctgggcctgcgacaatgacccggactgtgaagatggttcggacgagtggccacagcgctgccggggactctacgtctttcagggagatagttctccttgttcagctttcgaatttcactgcctgtccggagaatgtatccactcctcgtggcgctgcgacggcggaccggactgcaaggataagtcggacgaggagaattgcgcagtagcaacgtgtagaccggatgaatttcagtgctccgatggaaattgcatccacggctcgaggcaatgtgaccgtgagtacgactgcaaggacatgtcagatgaagtgggctgtgtcaatgtgactctgtgcgaaggaccgaataagttcaaatgccactcgggagagtgcatcactctggacaaggtgtgcaacatggcccgcgattgtcgtgattggagcgatgaaccaatcaaagagtgcggaaccaatgaatgtttggacaacaacggcggttgctcacatgtgtgtaatgagctgaaaataggatacgaatgtctgtgcccagacggcttccagcttgtcgcccagagaaggtgcgaggatatcgacgaatgccaagacccagacacctgcagccaactgtgcgtgaaccttgagggcggatacaagtgccagtgtgaagaaggtttccagctggatccgcataccaaggcatgcaaggctgtgggttcgatcgcgtacctcttcttcacgaaccggcacgaagtgcgcaagatgaccctcgaccggtcagaatatacctcgcttatcccgaacctgcgcaacgtggtggctctggatacggaagtggcgagcaaccggatttactggagcgacctgtcgcagcggatgatatgttcgacccagcttgaccgcgcccatggcgtgtcatcgtacgacaccgtcatctcaagagatatccaagctccggacggcctggctgtggactggatccactccaacatttactggacggattccgtgttgggaactgtgtccgtggctgatactaaaggtgttaagaggaaaactctgttcagagaaaacgggtcaaagcctcgcgcgatcgtggtggacccggtgcatgggttcatgtactggactgactggggtacgccggcaaagatcaaaaagggcggactcaacggagtggacatttactccctcgtgactgagaacatccagtggccgaacggaatcactctggatcttctctccgggcggctgtactgggtggacagcaagctccactcgatctcctccattgatgtgaatggtggtaacagaaagactatcctggaggacgaaaaacgactggcccatccattctcactggcggtgttcgaagataaagtgttttggactgacattatcaacgaggcgatcttctccgccaatcgcctgactggtagcgacgtcaacttgcttgctgagaacctcctgtcaccggaagatatggtactgtttcataacctgacccaaccaaggggagtgaactggtgcgagagaaccactctgtccaacggaggctgccagtacctctgcctcccagcaccacagatcaacccccactccccaaagttcacctgcgcgtgccctgacggcatgctcctcgcccgggacatgagaagctgcctgactgaggcagaagccgcggtggccacgcaggagacgtccacggtgcggctcaaggtgtcatcgaccgctgtgcggacccaacataccaccacgcggcccgtgccggacacttcgcgactcccaggagccaccccgggcctgactaccgtggagatcgtgaccatgagccaccaggctcttggtgacgtggcagggcgggggaatgagaaaaagccgagcagcgtgcgcgcactgtccatcgtgctccctatcgtcctcctggtgtttctctgcttgggcgttttcctgctttggaagaattggcggctgaagaatatcaattcgatcaacttcgacaaccccgtctatcaaaagaccactgaagatgaggtgcatatctgccacaatcaagacggatactcctacccttcgagacagatggtgtctctcgaggatgatgtcgca

SEQ ID NO: 11042 - DNA, 2580 bp, Artificial Sequence
  derived and/or modified sequence
atgggcccctggggctggaaacttaggtggaccgtggcgctattactcgcggccgcgggaacagcggtgggggatcgatgcgagcgtaacgagtttcagtgccaggatggtaaatgtattagttataaatgggtgtgcgatggtagcgccgaatgtcaggatggttccgacgagagtcaagaaacatgcttgtctgtgacatgcaagtccggggacttctcttgcggcggcagagtgaacaggtgcataccacagttctggcgatgtgatggccaggttgactgcgacaatggatccgatgagcagggctgccccccgaaaacatgtagccaggatgaattccggtgccacgatgggaagtgtatttccagacagttcgtatgcgatagtgatcgggattgcctggacggatccgatgaggccagctgccctgtgctgacatgcggtcctgcatctttccagtgtaattcatcaacttgcatacctcagctgtgggcctgcgataatgatcccgactgcgaagatggttcagacgaatggcctcagagatgccgagggctgtatgtatttcagggggactcttccccttgctcagccttcgagtttcattgccttagcggagagtgtatccatagtagctggaggtgcgatggcggaccagactgtaaagacaagagtgacgaagagaactgtgccgtggccacctgccgaccagatgaattccaatgttctgacggtaattgcatccatgggagtcgccagtgcgacagagaatacgactgcaaggacatgtccgatgaagtgggttgcgtgaatgttactttgtgcgaaggcccaaataaattcaaatgtcattccggcgaatgcatcacactggacaaagtgtgcaatatggcgcgggactgtagggattggagtgacgaacctataaaggagtgtggcactaatgagtgtctggacaacaatggtggttgtagccacgtgtgtaatgaacttaagatcggatacgaatgcctttgtcctgacggatttcaattggtggcccagcggcggtgtgaggacattgatgagtgccaggatcccgacacctgcagtcagctctgtgtcaacctggagggaggctacaagtgtcaatgtgaggagggattccagctggacccccatacgaaggcctgcaaggctgttggttctattgcttacctctttttcaccaatcggcacgaagtgcggaagatgacgctggatcgctcagaatacacgagccttataccgaaccttcggaacgtagtggccctcgataccgaggtagctagcaacaggatttactggtctgatctgtctcagcggatgatttgctctacgcagctggacagggcccacggggtgtcctcctacgatactgtgatcagcagagatatccaggctccggacggactggctgtggattggatccactcaaatatatactggaccgattctgtgctggggacagtatcagtggccgacacaaaaggggtgaaaaggaaaactctcttcagagagaatggcagtaagcctcgggctattgttgttgaccctgtacatggcttcatgtactggactgattggggaacgcctgctaagatcaagaaaggggggctgaacggagttgatatttactccctcgtcacggagaatatccagtggcccaatggcatcactctggacctgctttctggccgactgtattgggtggactctaagctccattccattagtagcatcgatgtgaatggagggaatcgtaagacgatattggaagacgagaaacgcctcgcccaccccttttccctggccgtattcgaggataaagttttctggacagacatcattaacgaggcaattttttccgcgaataggctgacagggtccgacgtaaatctcctggctgaaaacttgctgagtcctgaggacatggtgctgttccacaacctcacgcagcctagaggggtgaattggtgtgaaaggacgaccttgtccaacggcggttgccagtacctctgcctccctgctccacagattaatccacactcacctaagtttacttgtgcctgccccgacggaatgctgctcgctcgcgacatgcggtcttgcctgacagaagctgaagccgcggtggccactcaagagacaagcaccgttagactcaaggtatcaagcaccgcagtgcgaacacagcatacaacgacgcggccggtccccgatacgtccagactccctggagcaactcctgggctaactactgtggaaatcgtgacaatgtcccaccaggcgctgggtgacgtagcagggcggggcaacgaaaagaagcctagctctgtcagagccctgagcatcgtactacccatcgtgcttctggtgtttctatgtttgggagttttcctgctttggaagaattggcgactgaaaaacataaattcaatcaatttcgataaccccgtgtaccagaaaacgacggaagatgaggttcacatctgccataatcaggatggctattcctaccctagtcgacagatggttagtctggaagatgacgtggcg

SEQ ID NO: 11043 - DNA, 2580 bp, Artificial Sequence
  derived and/or modified sequence
atgggcccatggggctggaaacttagatggaccgtggcactgcttcttgcagcagctggaactgcggttggagatcgctgtgagcggaacgaatttcaatgtcaagacggaaagtgcatttcatacaagtgggtgtgcgatggttcggcagaatgtcaagatggtagcgacgaatcgcaggaaacctgtctttcggtgacttgcaagagcggtgattttagctgtgggggccgcgtgaacagatgtattccacaattttggagatgcgatggacaggtggactgtgacaatggttcagatgaacagggatgtcctcccaagacctgttcacaagatgaattccgctgccacgatggaaagtgtatctcgcgccaatttgtatgcgacagcgatcgcgattgtctggatggatcggatgaagcctcctgccctgtgctcacttgcggaccggcctcgtttcagtgtaacagcagcacctgtatcccgcagctttgggcatgcgataacgaccctgattgtgaagatggttcggatgaatggccacaaagatgtcggggtctttatgtgtttcaaggagactcgtccccctgctcggccttcgagttccattgtctttcaggggaatgtatccactcgtcctggcgttgtgacggtgggcctgactgtaaggataagtccgatgaagagaactgtgctgtggcaacttgccgccctgacgagttccaatgctccgatgggaattgcattcatggaagccgccaatgcgatagagaatacgactgtaaggacatgtcggatgaggtgggctgtgtcaatgtgaccctctgtgaaggaccaaacaagtttaagtgtcactcgggagagtgtattaccctggataaggtttgtaatatggcaagagattgtcgcgattggtccgatgaacctattaaggaatgcggaactaatgaatgccttgataacaatggtgggtgctcacacgtctgtaacgaactcaagatcggatacgaatgtctttgtcctgatggctttcaattggtcgcgcaacggagatgtgaagatattgatgaatgccaggatcccgacacgtgctcgcaactctgtgtcaacctcgaaggagggtacaagtgtcagtgtgaagaaggttttcagcttgacccacataccaaggcatgcaaggcagtgggaagcattgcatacctgtttttcaccaacaggcacgaggtcaggaaaatgacccttgacaggagcgagtacaccagcctgatcccaaatctgcgcaacgtcgtggcacttgacactgaagtcgcatcgaatcgaatctactggtccgacttgagccagcgcatgatttgtagcactcagctggatagggcccatggtgtctcgagctacgacaccgtgatttctcgtgatattcaggcccctgatggtctggcggtggattggatccactccaacatctactggactgattccgtgctcggaaccgtgtcggtcgctgacaccaaaggagtcaagagaaagacgctttttagagaaaatggctcgaagcctagagctatcgtcgtggatccagtccatgggttcatgtactggaccgattggggtacgccagcaaagataaagaagggtggtcttaacggggtggatatctactccctggtgaccgaaaacattcaatggcccaacggaatcaccctcgatctgctttcgggaaggctgtactgggtggatagcaagctgcactcgatctcctcgattgatgtgaacggaggtaaccgtaagaccattctggaagatgagaaacggcttgcacatcccttcagcttggccgtttttgaggataaagtcttttggaccgacatcataaacgaagcaatattctcggcaaaccgtcttactggtagcgatgtcaacctgttggccgagaaccttctgtctcctgaagatatggtcctgtttcataaccttacccaaccaagaggcgtgaattggtgcgaacgcacgacgctttcaaacggaggatgtcagtatctttgtctgccagcacctcagattaaccctcactcccctaagtttacctgcgcctgtcccgacggtatgctcctcgcacgtgatatgcggtcgtgccttactgaagctgaggcagccgtggctacccaggagactagcaccgttagactgaaggtcagttccactgccgtgagaactcagcacactactacccgaccagtcccagatacgtcgcggctgcccggcgccacccccggacttactactgtggagattgtaaccatgtcacaccaagcattgggtgatgtggccggacgaggaaatgagaagaagccctcctcagtgagggcgcttagcatcgtcctgcctattgtgctcctcgttttcctctgcctcggtgtgttcttgttgtggaagaattggcgtctcaagaacatcaattcgattaactttgataaccctgtgtaccaaaaaactaccgaagatgaagtccatatttgccacaaccaggatggatatagttatccttcccggcaaatggtgtccttggaggacgacgtcgct

SEQ ID NO: 11044 - DNA, 2580 bp, Artificial Sequence
  derived and/or modified sequence
atgggaccatggggatggaaactgcgctggactgtggctctgctgctcgccgcggcaggcactgctgtgggtgatagatgcgaaaggaacgagttccagtgtcaggacgggaaatgcatctcgtacaagtgggtgtgtgacggatccgcggaatgtcaagacggatcggatgagtcgcaggagacttgcctgtcagtgacctgcaaatcaggagatttcagctgcggaggaagagtaaatagatgcatcccacaattctggcggtgcgatggacaggttgactgcgataacggctcagatgaacaaggatgcccaccaaaaacctgttcgcaggatgaattcagatgccatgatggtaagtgcattagtcgacaattcgtctgtgattccgatagagactgcctcgacggaagtgacgaagcgtcgtgccctgtcctcacttgtggccccgcttcctttcaatgcaatagctccacctgcatccctcagctgtgggcatgcgataacgacccggattgcgaggacgggtcggacgaatggccgcaaaggtgtagagggctctacgtgttccagggagattccagcccttgttctgcctttgaattccactgcctgtcaggagagtgtatccactcgtcgtggcgttgcgatggcggaccagattgtaaggataagagcgacgaggaaaactgtgccgtggccacctgccggccggacgagtttcaatgtagcgacggcaattgcatccacggttccagacagtgcgaccgcgagtacgactgcaaagatatgtcggatgaggtggggtgcgtcaacgtgaccctttgtgagggtcccaataagttcaagtgccatagcggggagtgcatcacgctggataaagtgtgcaacatggcccgggattgtcgtgactggtctgatgaaccgatcaaggaatgcggcaccaacgagtgtctcgacaacaatggcgggtgctcgcacgtgtgtaacgaactcaagatcggatacgagtgcctttgccccgacggattccagctggtggcccaaagacgctgcgaggacatcgacgagtgccaggacccggacacgtgctcgcagctttgtgtcaacctcgagggcggatataagtgtcagtgtgaagaaggattccagctcgacccgcacactaaggcctgcaaggcagtcgggtccatcgcgtacctcttcttcactaaccgccacgaggtgcggaagatgaccctggacagatcggaatacacctccctgatcccgaatttgcgcaacgtggtggccctggacaccgaagtggcctcgaaccggatttactggtcggacttgtcgcagcgcatgatctgctcaactcaattggacagagcccacggagtttccagctacgacactgtcatcagccgcgacatccaagcgccggacgggcttgcagttgattggatccattcaaacatttactggactgacagcgtcctgggaactgtgtcagtggcagacaccaagggagtcaagcgtaagaccctctttcgcgaaaacggctcgaagccgcgggccatcgtggtggaccctgtgcatggattcatgtattggactgactggggaaccccggccaagattaagaagggaggactgaacggcgtggacatctactcgcttgtaactgaaaacatccagtggcccaatggcatcactctcgacctcctttcgggacgcctctactgggtcgatagcaaactccacagcatctcctccatcgacgtgaacgggggcaatcgaaagacgattctggaggacgaaaaacgcctggcgcatccgttctccctcgccgtgttcgaggacaaggtgttctggacggatatcatcaatgaggcaatctttagcgcaaataggcttaccggatccgacgtgaatctcctggccgaaaatctcctcagcccggaggacatggtattgttccacaatctgacgcagccgcggggggtgaactggtgcgaaaggaccactttgtcaaatggtgggtgtcagtacctttgcttgccagccccgcagatcaacccgcactcaccaaagtttacctgtgcctgccctgacggcatgctgctggcccgcgacatgcggtcttgcctgacggaagctgaggcggctgttgctactcaggaaacctctactgtgcgccttaaggtcagctcgacggcagtgcgcacccagcacactactacgcgcccagtgccagatacctcccggctcccaggtgcgacgcccggcctgaccaccgtcgaaatcgtgaccatgtcccatcaagctcttggagatgtggcgggaagaggaaatgagaaaaaaccctcctccgtcagagctctcagcatcgtgctgccgatcgtgcttctcgtgttcctgtgcttgggggtgtttctgctgtggaagaactggcggctcaagaacatcaattctatcaacttcgataacccggtgtaccaaaaaacgaccgaagatgaggtccacatctgccacaaccaggatggctactcctacccgtcgcggcaaatggtgtcgttggaggatgatgtcgct

SEQ ID NO: 11045 - DNA, 2580 bp, Artificial Sequence
  derived and/or modified sequence
atgggaccatggggctggaaactgaggtggactgtcgccctcttgctcgccgccgcaggaaccgcggtgggagatcgttgcgagagaaacgagtttcaatgccaggatgggaaatgcatctcttacaagtgggtttgtgacggctcagccgagtgccaggacggcagcgatgaatcgcaagaaacttgtctgtctgtcacgtgcaaaagcggcgacttctcctgtggagggagagtgaacagatgcattccgcaattctggcgttgcgacggacaggtcgactgcgataacggatccgatgaacagggatgcccacctaagacttgcagccaggatgagttccgatgccatgacggcaagtgtatctcgcggcaatttgtgtgcgatagcgaccgggactgtctggacggctcggacgaagccagctgcccggtgttgacctgcggccccgcctccttccagtgtaattcgtcgacgtgcatccctcagctctgggcgtgcgacaacgatccggactgcgaagatggtagcgacgaatggccacaacggtgccggggtctgtacgtctttcaaggagattcgagcccgtgctcagcattcgagttccactgcctgtcgggcgaatgtatccactcctcgtggcggtgtgacggaggcccggattgcaaggacaagtctgacgaggaaaactgcgccgtcgcgacctgcagacccgatgaatttcagtgttcggacggcaactgcatccacggttcccgccagtgcgatagggagtacgactgcaaggatatgtcggatgaggtcggctgcgtgaatgtgaccttgtgtgaaggaccgaacaagttcaagtgtcacagcggagagtgtatcaccctggataaggtctgtaacatggctcgcgactgccgggattggtcggacgaaccgattaaagaatgcggcacgaacgaatgcctggacaataatggaggatgctcccacgtgtgtaatgagcttaagattgggtacgaatgcctctgtccagacgggtttcaattggtggcgcagcgccggtgcgaggacatcgacgaatgtcaggatccggacacctgctcgcaactgtgcgtgaatcttgaaggtggttacaaatgtcagtgtgaggaaggtttccaactcgaccctcatactaaggcgtgtaaggcggtcggatcaatcgcctatttgttctttaccaaccggcacgaagtgcgcaaaatgaccctggatagatccgagtacacctcgctcatcccgaatttgcgcaatgtggtcgcactcgacactgaagtcgcctctaatcgcatctactggtcggacttgtctcaacgcatgatctgttcaacccagctggatcgagcccatggagtctcgagctacgatactgtgatttcccgggatatccaggctccagatggacttgccgtagattggattcactccaacatctactggactgattcagtcctgggtactgtgtccgtggccgacaccaagggagtgaaacgcaagaccctgttcagagagaacggctcgaagccaagagcaatcgtcgtggatcctgttcacgggttcatgtattggactgattggggaactccggccaagatcaagaagggcggactgaacggagtggacatatacagcctggtgactgaaaacatccagtggcctaatggaatcacccttgacctgctgtcgggcagactgtactgggtggactcaaagctccacagcatatcctccatcgacgtgaacggaggcaaccgcaaaacgatccttgaggacgaaaaaagactggcccacccattctcgttggcggtgttcgaagataaggtcttttggactgacatcatcaacgaagcaatcttctccgcgaaccggctcactggttccgatgtgaatctcctggccgaaaacttgctgagccccgaggacatggtgctgtttcataacctgacccagccgcgcggcgtgaactggtgcgagcgcacgaccctctcaaatggaggctgccagtacctctgcctgccggcaccgcagatcaaccctcatagccctaagttcacctgcgcctgcccggacggaatgttgctcgcgcgggacatgaggtcctgccttaccgaggcggaagctgccgtggctacgcaggagacttcgaccgtgaggctgaaagtctcttctaccgccgtgagaacgcaacataccaccaccaggccggtcccggacacctctcgtctcccgggggcaactcctgggctcaccaccgtggagattgtgactatgtcacatcaagcgttgggagatgtcgccggaagggggaatgagaaaaagccatcgtccgtgcgcgcgctgtcaattgtgttgccgatcgtcctgctcgttttcctgtgtctcggggtgttcctcttgtggaagaactggcgcctgaagaacatcaattcaatcaatttcgacaatccagtgtatcaaaagaccactgaggacgaggtgcacatctgccacaaccaggacggctattcataccccagccgccagatggtgagcctggaggacgatgtcgcc

SEQ ID NO: 11046 - DNA, 2580 bp, Artificial Sequence
  derived and/or modified sequence
atgggtccgtggggctggaagttgcgatggaccgtagcgctgctgctcgccgcagcaggaaccgcggtgggagataggtgcgagcggaatgaattccagtgtcaggacggtaaatgcatctcgtacaagtgggtgtgcgatgggtcagcggagtgccaagacggatcggacgaatcacaggaaacctgcctgagcgtgacgtgcaaaagcggcgacttctcatgcggaggccgcgtcaacagatgcattccccagttctggcggtgtgatggacaggttgactgtgataacggtagcgacgaacagggatgtccgccaaagacttgctcccaagacgagttcaggtgtcatgacggtaagtgcatctcgaggcaattcgtctgcgattccgatcgcgactgccttgacggttcggatgaggctagctgcccggtgctcacttgcgggccggcctcattccagtgtaattcgtcaacttgtatccctcaactctgggcttgcgacaacgacccagactgcgaagatggatcggatgaatggcctcagcgttgtagaggactttatgtatttcaaggagactcctctccgtgttcggcattcgagttccattgcctgtcgggagaatgcatccactcatcctggagatgtgacgggggaccagactgcaaggacaagtctgacgaagagaattgcgccgtggctacctgccggccagacgagtttcagtgttcagacggcaactgtatccacggctcaaggcagtgcgaccgcgagtacgactgcaaggatatgtccgatgaagtcggatgcgtcaacgtgaccctgtgtgaagggccaaacaagttcaagtgccattccggcgaatgcattacgttggataaggtgtgtaacatggcccgagactgcagagattggtccgacgaaccgattaaggagtgtggaacgaatgaatgcctggacaacaacggtgggtgttcccacgtgtgcaatgaactcaaaatcgggtacgaatgcctctgtcccgacggatttcagctggtggcacaacgccgctgtgaggacatcgacgagtgccaggaccctgacacttgctcgcagctgtgcgtgaatctggaaggcggatacaagtgccagtgcgaagagggcttccagcttgaccctcatactaaagcatgtaaggcagtcggatccatcgcttacctcttcttcactaacagacatgaggtcagaaagatgacccttgacaggagcgaatacacgtctctgatcccgaaccttcggaatgtggtggcactggatactgaagtcgcctcgaatcggatttactggtccgacctgtcccagcggatgatctgcagcacccaactggatcgtgcccatggcgtctcttcctacgacactgtaatctcccgcgatattcaggcccccgatggtctggcggtggactggatacactcaaacatctactggacggatagcgtgctcggaaccgtgagcgtcgccgacaccaagggagtgaagcggaaaaccttgttccgcgaaaacggatcgaagccgcgggccatcgtcgtggacccggtccacgggttcatgtattggactgattgggggactcctgcgaaaatcaagaagggcggactgaacggggtggatatctactccttggtgaccgagaatatccaatggccaaatggcatcacccttgacctgctcagtgggcggctttactgggtggatagcaaactgcacagcatttcctcaattgatgtgaacggaggaaaccgcaagaccatcctcgaagatgaaaagcggctggcgcacccgttctcactggcggtgttcgaagataaagtgttctggacggatatcatcaacgaggccatcttttccgccaatagactcaccggcagcgatgtgaacctgttggccgagaatttgttgagcccggaggacatggttctcttccacaacctgacgcaaccgagaggagtgaactggtgcgagagaactaccctgtccaacggcggttgccaatacctctgcctgccagccccgcagatcaacccacactcgcctaaattcacttgcgcctgtccagacggaatgttgctggcgcgggacatgcgctcgtgcctgaccgaagctgaagcggctgtcgcaactcaggaaacttcgaccgtgcgtctcaaagtatcgtcaacggccgtccggacgcagcacactactacccgaccggtgccagacacctcccggctgccgggagcaacccccggccttactactgtcgagatcgtgaccatgtcgcatcaagccctcggagacgttgctggaagaggaaacgagaagaagcccagcagtgttcgtgccctctcaattgtgctgcccatcgtgctgctcgtgtttctgtgcctcggagtctttctcctgtggaagaactggcgcctgaagaatatcaatagcatcaactttgataatcctgtttaccaaaaaaccactgaggatgaggtccatatctgccacaaccaagacggctactcgtacccttctcgccagatggtgagccttgaagatgatgtcgcg

SEQ ID NO: 11047 - DNA, 2580 bp, Artificial Sequence
  derived and/or modified sequence
atgggtccatgggggtggaaacttaggtggacggtcgcactgcttctggcggccgcaggaactgcagtgggggataggtgtgaaagaaatgagttccagtgtcaagatggtaagtgcatttcatacaagtgggtgtgcgatggaagcgccgaatgtcaagacggctccgacgagtcccaggagacttgtctctcggtgacgtgcaagtcaggagatttctcttgcgggggaagggtgaacagatgcatacctcaattttggcgttgcgatggtcaggtggattgtgataacggaagtgacgaacaagggtgtcctccaaagacttgttctcaggatgagtttagatgccatgacggcaagtgtatttcgagacaatttgtgtgcgatagcgatagagattgcctcgacggatcagatgaagcaagctgtcctgtcctgacgtgcggccccgcttcctttcaatgcaactcgtctacttgtattccgcagctgtgggcgtgtgataacgatcccgattgtgaggacggttcggatgaatggccacagcgttgtcgggggctgtacgtctttcagggcgattcctcgccatgctccgcgttcgaattccattgcctgtcaggagagtgcatccattccagctggcggtgcgatggtggccctgattgcaaggacaagtcagatgaggagaactgtgcagtcgcaacgtgcaggccggatgagtttcaatgttcagacggtaattgcatccatggatcccggcagtgcgatcgcgagtacgactgtaaggatatgtcagatgaagttggatgtgtcaacgttaccctgtgtgaggggcctaataagtttaagtgccatagcggggagtgtatcaccctggacaaagtatgtaacatggcacgagattgtcgggactggagcgatgaacctatcaaggagtgcggaaccaatgagtgtcttgataacaacggtggatgctcccatgtgtgtaatgaactgaagattggctatgaatgtctttgccctgatgggtttcagttggtcgcacagcggaggtgtgaagatatagacgagtgtcaggatcccgatacttgtagccagctgtgtgtcaacctggaaggaggatataagtgtcagtgcgaggaaggattccagcttgacccccatactaaagcatgtaaggctgtgggatccattgcctacttgtttttcactaaccggcacgaagtcagaaaaatgactcttgatagaagcgagtacactagtcttattccaaaccttcggaatgtggtcgcactggatacggaagtggcatccaatcgcatctattggtccgatctttctcaacgtatgatttgttcgactcagctcgaccgagcacatggagtgagcagctacgacactgtgattagccgcgatattcaagcccctgatggtcttgctgtggattggattcatagcaacatttactggaccgacagcgtgcttggtactgtctcggtggcagacaccaagggggtcaaacgtaagaccctgtttcgagaaaatgggagcaaaccacgagcaatagtggtggatcctgtgcatggatttatgtactggaccgattggggcaccccagcgaagataaagaagggaggcctcaacggtgtggacatttactctctggtgactgagaatatccagtggccaaacggtattaccctggatctcctttcggggagactctactgggtcgattcaaaactccactctatttcgagcatcgacgtgaatggcggaaatcgaaagactattcttgaagatgaaaagcgcttggcacacccatttagccttgctgtattcgaagataaggtgttttggactgacattatcaatgaagcaattttctccgccaatcgtctgactggttccgatgtcaacctgcttgccgaaaacctcctttcacccgaggacatggtgctttttcacaatctcacccagcctagaggggtgaactggtgcgaacggactactctgtcgaacggcggatgtcagtacttgtgtctccccgctccccagatcaacccacatagcccaaagtttacttgtgcatgtcctgacgggatgctgcttgcccgcgatatgcgcagctgcctcaccgaagctgaagcagcagtcgcaactcaagaaacctctactgtgcgcctcaaagtgagctccaccgcagttcggactcagcacactaccactcgccctgtgccggatacctcccggctgccaggcgcaacgcctggtcttactacggtcgagatcgtgactatgtcacatcaagcactgggggatgtggccggaaggggaaacgaaaagaaaccgtccagcgtgagagcactttccattgtcctccccatcgtgcttctggtctttttgtgtctgggtgtgtttcttctgtggaagaattggagactcaagaacattaactcaattaacttcgacaaccctgtctaccaaaaaaccactgaagatgaagttcacatatgccacaaccaggatgggtactcatacccttcgagacagatggtgtcgctcgaggacgatgtggca

SEQ ID NO: 11048 - DNA, 2580 bp, Artificial Sequence
  derived and/or modified sequence
atgggtccttggggatggaaactcaggtggaccgtggccctattactagctgccgccgggaccgccgttggcgatcgttgtgagagaaatgaattccagtgtcaggacggaaaatgtatcagctataaatgggtgtgtgacggcagcgcagagtgtcaggacggttctgatgagtcacaggagacatgtctctccgtgacatgcaaatctggggacttcagttgtggcggccgcgttaatcggtgtataccgcaattctggcgatgcgacgggcaggtcgactgcgataatgggagcgacgaacaggggtgccctcctaagacatgctcccaagacgaattccgctgtcacgacgggaaatgcatttcacgtcagtttgtatgcgacagtgatcgggactgtttggatggctccgatgaggccagttgtccagtgctcacctgtggccccgcttcatttcagtgtaacagctctacttgcatcccacagctgtgggcgtgcgacaatgatccagattgtgaggacggttccgatgaatggccacagagatgccgagggctgtacgtgttccaaggggactcgagcccatgtagcgcctttgaatttcattgtttaagcggggaatgcatccatagctcatggcgctgcgacggcggtcccgattgcaaggacaagtcagatgaggagaattgcgccgtggcaacatgccgccccgatgagtttcaatgctccgacggcaattgcatacacggttcgaggcaatgcgaccgcgaatacgactgcaaagacatgtctgacgaggtggggtgtgtcaacgtgaccctgtgtgaagggccgaataagttcaaatgccactcaggagagtgtatcacactggataaggtgtgcaacatggctcgggactgccgcgattggtctgacgagcctattaaagaatgcggaaccaacgaatgtctggacaacaacggggggtgctcacacgtgtgcaacgaattaaagatcggttacgaatgtctgtgccctgacgggtttcagctggtggctcagagaaggtgtgaagacatagacgaatgccaggaccccgacacttgctcacagctgtgcgttaacctggagggtggctacaagtgtcagtgcgaggagggattccagctggatcctcacactaaggcatgcaaggcggtaggcagtattgcctacttatttttcaccaatcggcacgaggtgcggaaaatgaccctcgaccggtccgagtacacctccctgatacctaatcttcgcaacgtggtcgcactggataccgaggtggcaagtaataggatctactggagtgatctgtcccaacgaatgatttgttccacacaattagatagggctcacggtgtgagctcctacgacacagtgatttctagggacatccaggcacccgatggcttggccgtggactggattcattctaacatctattggacagattctgtccttgggacagttagtgttgccgacactaaaggagtaaagcggaagaccttatttagggaaaacggcagtaaaccaagggcaatcgtggtggatccagtgcacgggtttatgtactggaccgactggggtacaccggctaaaattaagaaaggtggtctgaacggggtcgatatttattccttagtgaccgagaatattcaatggccgaatggaatcaccctcgatctgctgtcggggcggctgtactgggtcgattcaaagctacattcaatctccagcatcgacgtgaacggagggaataggaagaccattctagaggatgagaaacgtctggcacatcccttctccctcgcagtattcgaagataaggtgttctggacagacatcataaacgaggctattttctccgcgaacagactgacaggaagcgatgttaaccttctggcagaaaatctactaagtcccgaggacatggtcctattccacaatcttacacagcctcgaggcgtcaactggtgcgaacgaaccacattgtcaaacggtggttgccagtatctgtgcctccctgctcctcagattaacccccacagccccaagttcacctgcgcttgccctgatgggatgctgctggccagggatatgcgctcttgtctgaccgaagccgaagccgcggtagccacacaggaaacatcaaccgttcggctgaaagtaagttcaactgccgtccgcacacagcacacaacaactaggccagtgcctgatacgtctcgcttacccggagctacaccaggacttaccacagtggaaattgtgaccatgagccaccaggctctgggagatgtggcaggaagaggaaacgagaaaaagcccagttctgtgagagccctaagcatagtgctgcccattgtactattggtgtttctgtgccttggcgtattcctactttggaaaaattggaggctgaagaatattaattctatcaactttgataaccccgtctaccaaaaaacgaccgaagacgaggttcacatctgtcataaccaggacgggtattcctacccctctcgccaaatggtgtcactagaagatgacgttgcc

SEQ ID NO: 11049 - DNA, 2580 bp, Artificial Sequence
  derived and/or modified sequence
atgggaccatggggctggaagttgcgctggactgttgcccttttgctggctgcagctggaactgccgtgggagacagatgtgaaagaaacgagtttcagtgccaggacggaaaatgtatcagctacaagtgggtttgtgatggctccgccgaatgccaagatggctccgacgagagccaggagacttgcctttccgtgacctgcaagagtggagatttctcctgcggaggacgcgtgaatcgctgtattcctcagttctggcgctgcgatggacaagtggattgcgacaatggaagcgatgagcaaggctgtcctcctaagacctgttcccaggacgaattcaggtgtcacgacggtaagtgcatctcaaggcaattcgtatgcgattccgaccgcgactgccttgacggaagcgacgaagcttcatgccctgtgctgacttgcggtccagctagctttcagtgtaacagttctacttgtattccccaactttgggcatgtgataacgaccccgattgcgaggacggctctgacgaatggcctcagagatgccgcggcctctacgtctttcaaggcgacagttcaccctgcagcgcattcgaattccattgcctgtctggcgagtgcattcacagcagttggaggtgtgatggtggtcccgattgcaaggacaagtccgacgaggaaaactgtgcagtggctacctgccgtcctgacgaatttcagtgtagcgacggtaattgtatccatggttctcgtcaatgcgacagagagtatgattgcaaggatatgtcagacgaggtgggttgcgtgaatgtcactctgtgcgagggtccaaataaattcaagtgtcacagcggcgaatgcataacactcgacaaagtgtgtaacatggctagagattgcagagattggtctgatgagccaatcaaagagtgtggaactaacgagtgtctggacaacaacggcggatgctctcacgtttgcaacgagctgaaaatcggctacgaatgtctgtgccctgatggcttccagctcgtggcccagaggcgctgtgaagacattgatgaatgtcaagatccagacacctgctcacaactgtgcgtgaacctggaaggcggctataagtgccagtgcgaggagggcttccaactggatcctcacaccaaggcttgcaaggcagtcggttccatcgcttacctgttctttactaatagacatgaagtccgtaagatgacactggaccgctccgagtacacttcactcatacctaatttgaggaacgtggtagctctggacacagaggtagcctccaacaggatatactggtctgacctgagccaacgtatgatttgctccactcagttggatagggctcatggagtatccagttatgatactgtcatctcccgcgatatccaggcaccagatggactggctgtggattggattcatagcaacatttactggacagacagcgtcctgggcactgtaagcgtagccgacaccaagggtgtgaagaggaagacactttttcgcgaaaatggctctaagcccagagctatcgtggtggatcctgtgcatggctttatgtactggaccgattggggtacccccgccaagatcaagaagggtggcctgaatggagtggatatctattctctggtgactgagaatattcaatggccaaatggcatcacattggatctgctttcaggccgcctttactgggtcgattcaaaactgcacagtatctctagcatcgacgtgaacggcggaaaccgtaagaccatcttggaggacgaaaaaaggctggcccaccccttcagtctcgcagtgtttgaagacaaggtcttctggacagacattatcaatgaagcaatcttttctgctaatcgtctgaccggttccgacgtgaatcttcttgctgagaatctgctttccccagaggacatggttttgtttcataatctcacccagccccgtggagtaaactggtgcgaaaggactactttgtccaacggcggctgccagtacctgtgcctgcctgcccctcagatcaaccctcacagtcccaaattcacctgtgcatgccctgacggcatgcttctggctcgtgacatgagatcctgtctcaccgaagcagaggcagctgtagcaacacaagagacttcaacagtgcgtctgaaggtctctagcactgctgttcgtacccagcacacaaccactcgccctgtgccagatacctcccgtcttcccggcgccactcccggcctgactacagtagagatcgtcacaatgtcccatcaagccctgggagacgtcgcaggccgtggcaacgagaagaagcccagttctgtccgtgctctgtctatagtgttgccaattgttctgctcgttttcttgtgtctgggagtgttcctcctgtggaagaactggcgcttgaaaaacatcaacagtattaacttcgacaaccccgtgtatcagaaaactaccgaagacgaagtgcatatctgccataatcaggacggttactcttacccaagcagacagatggtctctctggaggacgacgtagct

SEQ ID NO: 11050 - DNA, 2580 bp, Artificial Sequence
  derived and/or modified sequence
atgggaccgtggggctggaagttgcgctggactgtcgcacttctcttggcggcagcaggaactgcagtgggggaccggtgcgagaggaatgagtttcagtgtcaagacggcaagtgtataagctacaagtgggtgtgtgatggatcggctgagtgccaagatggatcagacgaatcgcaggaaacctgtttgtcagtgacgtgtaagtcaggcgatttttcatgtggtggcagggtgaacaggtgtatccctcaattttggagatgcgatggacaggtcgattgcgataatggatctgacgaacaaggatgtccacctaaaacctgtagccaggatgaattccgctgccatgatgggaagtgtatatcgcgccaatttgtctgcgactcagacagagactgcctggatgggtccgatgaagcatcatgtccagttctgacttgtggaccggcttccttccaatgtaactcctccacctgtatccctcagctctgggcctgtgataatgatcccgactgtgaagatggcagcgacgaatggcctcagcgttgtaggggtttgtacgtctttcaaggagactcgtccccgtgttcggccttcgaattccattgtctgtccggggaatgtattcacagctcgtggagatgtgatggtggaccagattgtaaagataaaagcgacgaggaaaactgtgccgtggcaacctgtcgccccgacgaattccaatgttccgacggaaactgcattcatggttccagacagtgtgacagagaatacgactgtaaggacatgtcggatgaagtgggttgtgtgaatgtgaccctgtgcgaaggtcctaacaagtttaagtgtcattcaggagaatgtataaccctcgataaggtctgtaatatggcacgggactgtagagattggtcagatgaacccatcaaagagtgtgggactaatgagtgtctggacaacaacggaggttgttcgcacgtgtgcaacgagcttaagattggttacgagtgcttgtgcccggatggatttcaactcgtggcacagcgcaggtgtgaagatatcgatgaatgccaggaccctgatacttgttctcaactgtgcgtgaacctcgaaggcgggtacaagtgccaatgtgaggagggctttcaactcgacccccataccaaggcgtgcaaagcagtgggcagcattgcatacctgtttttcaccaataggcacgaggtgagaaagatgaccctcgatcgatccgagtacacctcattgattcctaaccttcggaatgtcgtcgctcttgacaccgaagtggcatcgaacaggatctactggtccgatcttagccagcgaatgatatgttcgacccaattggatagggctcatggcgtctccagctacgataccgttatcagccgtgatattcaagctccagacggccttgcggtggattggatacatagcaacatttactggactgattcggtccttgggactgtcagcgtggcagatactaagggagtcaaaagaaagaccctgttcagagaaaatggatcaaaacctagggcaatcgttgtggacccagtccacggttttatgtactggaccgattggggaactccggcaaagattaagaaggggggactgaacggcgtggacatttactcattggtgactgagaatattcagtggccaaacggcattacgcttgatctgctcagcggtcgcctttactgggtggattccaaactccactccattagctccatcgacgtcaacggcgggaatcgcaagaccattcttgaagatgaaaaacgtctcgcacatcccttctcactcgccgtctttgaggataaggtcttttggaccgacattatcaacgaggccattttctccgcaaatcgtcttaccggatccgatgtgaatctgcttgcagagaatctgctctctccagaagatatggtgctgttccacaatctgacccagcctcgaggtgtgaactggtgcgaaaggactactctgtcgaacggcggatgccagtacctgtgtctgccagcacctcagattaatcctcattcgccgaagtttacgtgtgcctgccctgatggtatgttgctggcacgcgatatgcgcagctgcctgactgaagcggaggcagccgtcgccactcaagagacttccaccgtgagactcaaggtgtcctcgaccgccgtgcgaactcagcatactacgactcggccggtgccagacacttcgagactccccggagcaaccccaggactgaccacggtcgaaattgtcacgatgtcacatcaagcactcggggacgtggcaggacgggggaacgaaaagaagccgtcatcggtgcgggcactcagcattgtgcttcctatcgtgctcctcgtgttcctgtgtctgggtgtgtttcttctgtggaagaattggcgactgaaaaacattaactcgatcaatttcgataaccctgtgtaccaaaagactaccgaggatgaggttcacatttgccacaatcaagacggatactcgtacccatcccgacagatggtgagccttgaagatgatgttgca

SEQ ID NO: 11051 - DNA, 2580 bp, Artificial Sequence
  derived and/or modified sequence
atgggcccttggggatggaaactccgatggaccgtggctttactcttggctgctgccggtaccgccgtgggtgaccgctgcgaacgcaatgaattccagtgtcaggatggcaagtgcatatcttacaaatgggtgtgtgacggctctgcggaatgccaggatgggagcgacgagagccaggaaacgtgcctttctgtcacctgtaaaagtggtgacttcagttgtggcggcagagtgaaccggtgtataccacaattttggcggtgcgacggccaagtcgactgcgacaacggcagcgatgagcaaggatgtcccccaaaaacttgtagtcaggacgaatttaggtgccatgacggcaagtgcatcagccggcagtttgtttgtgacagtgacagagattgcctggacgggtccgatgaagccagctgccctgttctgacgtgcggccccgcctcttttcagtgcaacagctccacttgcatcccccagctctgggcttgcgacaacgatccggactgcgaggacggatccgatgaatggccgcaaagatgccggggactgtacgtcttccagggcgacagttcgccctgctcagctttcgagttccattgtctatctggcgaatgcattcactcttcctggagatgtgacggcgggcctgattgtaaggacaaaagcgacgaggaaaactgtgcagtggccacttgccggccggatgagtttcagtgtagcgatggcaattgtatccatgggtcacgccaatgcgacagggagtacgattgcaaggacatgagtgatgaagtagggtgcgttaacgtgaccctgtgcgaaggtcccaacaagttcaagtgtcactctggggaatgtataacactcgacaaggtttgtaacatggccagggattgccgcgactggagcgacgagccgattaaggagtgcggcacgaacgagtgcttggacaataatggagggtgtagccatgtgtgcaacgagctgaagattggctatgagtgcttgtgcccagatggctttcagctcgttgcacagaggcggtgcgaagatattgacgaatgccaagacccggatacctgtagccagctctgtgtcaacctggaggggggatacaagtgccaatgcgaagaaggctttcagctggatcctcacacgaaggcatgtaaggcggtgggaagtatagcatacttgttcttcacaaatagacatgaggtgaggaagatgacactggataggagcgagtacacctcactgatccccaatctgcgtaatgtagtggccctggacacagaagtcgcaagcaaccgcatctattggagcgatctgtcacagcgcatgatatgttccacccaactggatcgggcccatggtgtgtcctcgtatgacaccgtcattagtagagacatccaggcgccagatgggctcgcagtggactggatccattcgaacatttattggacggattcagttctcggcactgtttccgtggctgatacaaaaggggtgaagcgcaaaaccctgttccgtgaaaatggatctaagcctcgagcaattgtcgttgacccggttcatggcttcatgtactggacggattgggggactcccgccaaaattaagaagggcgggcttaacggggtggacatatatagccttgttacggagaacatccaatggcccaacggaattactcttgatttgctaagcggaaggctgtattgggtcgacagcaagcttcactccatttctagcattgatgtgaatgggggaaatagaaagacgatactggaggatgaaaagcgcttagctcacccattttcactggctgtgttcgaggataaggtgttttggactgacataatcaacgaggcaattttcagtgctaacagactcactggatccgacgtgaaccttctcgccgagaacctactgtctccagaggatatggtgctatttcataacctgactcagccccgcggagtgaattggtgcgagcggacgaccttgagtaatggggggtgtcaatatctttgccttccggccccccagatcaaccctcacagcccaaaatttacctgtgcatgcccagacgggatgttactcgccagggatatgagatcctgcctcactgaggccgaggccgcagtcgccactcaagaaacatccactgtaaggctcaaagtgtcctccaccgcagtgcggacacagcacacgaccactcgccctgtaccagatacctcacgcctccctggggccacgccggggctaactaccgtcgaaatagttaccatgtcgcatcaagcattgggggacgtggccggccggggcaacgaaaagaagccaagttccgtgagagccctgtcaatcgtgttgccaatcgtcctgctggtctttctatgcctgggggtgttcctactgtggaagaactggaggttgaagaatattaatagcataaacttcgataaccctgtatatcagaagacaactgaggacgaggtacatatctgccataatcaggatggctacagctacccatcccgacagatggtgtcactcgaagacgacgtcgcc

SEQ ID NO: 11052 - DNA, 2580 bp, Artificial Sequence
  derived and/or modified sequence
atgggcccatggggatggaagctaagatggacggttgccctgctgctggccgctgctggcacagctgtgggggaccgttgcgagagaaatgagtttcagtgccaggacggaaagtgcatctcttataaatgggtgtgcgacgggagcgctgaatgccaagacgggagtgacgagagtcaggagacctgcctgtcggtcacatgtaaatctggcgattttagctgtggaggtcgcgtgaaccgctgcattcctcaattttggcggtgtgacggacaggtcgattgtgacaatggaagcgatgaacaaggatgtccccctaagacttgctctcaggacgaatttaggtgccatgacgggaagtgtatttccaggcaattcgtctgcgactccgaccgggattgcctagatggatcagacgaggcctcctgcccggtcttgacatgtgggcccgcttccttccaatgtaattcttctacatgtattccacagttgtgggcttgcgacaatgatccagactgtgaggacgggtccgatgaatggccacagaggtgtaggggtctgtatgtgttccagggcgactcctccccttgttccgccttcgagtttcattgcctgtctggcgaatgcatccacagcagctggcggtgtgacgggggccccgattgcaaggacaagagcgatgaagaaaattgtgcagtcgcaacttgcaggcccgacgagttccagtgtagcgacggcaattgtattcatggttctaggcagtgcgaccgggagtacgactgtaaagatatgtcagacgaggtcgggtgcgtcaatgtgaccctctgtgagggtccaaacaaattcaaatgccatagcggcgaatgcatcacgctggacaaggtgtgtaacatggcacgcgactgccgcgattggagcgatgaacccattaaagagtgtgggaccaatgaatgtctggataataacggtgggtgcagccacgtgtgtaatgagctgaagattggctatgagtgcctgtgtccagatggcttccaactcgtcgcacagaggcgttgcgaggacatagatgagtgccaggatcccgacacgtgtagccagctgtgcgtgaacctcgaaggcggatacaaatgccagtgtgaggaagggttccaactggatccacacacgaaggcttgtaaggcagttggctccatcgcctacctgttcttcacgaacaggcatgaagttagaaagatgacgctcgatagatctgaatatacgtctcttatcccaaacctcagaaacgttgtggcattggacacagaagtggccagtaaccggatttattggtcagacctgtcccagcgcatgatctgcagtacacagttggatcgcgcccatggggtatcttcctacgacaccgtgatcagtagagatattcaagctccagacgggctagcggttgattggatccacagcaacatctactggaccgacagcgtgctcgggactgtttcagtggctgacaccaaaggggtgaaaagaaagacacttttccgggaaaatggatcgaaacctcgcgccatcgtggtcgaccctgtgcatgggttcatgtattggacggactgggggactcctgcaaagataaagaaaggagggctgaacggagtggacatttatagcttagttactgagaatatacagtggcctaacggtataacattggacttgctgtctggacgcctatattgggtggactctaaactccatagcatttcatctatagatgtgaacggtggaaatcgcaagaccatcctggaggatgaaaagcggcttgcccacccattttcactggctgtatttgaggataaggtgttctggactgatattataaatgaggcaatcttctccgctaatcgattgaccgggagcgacgtgaacctcctcgctgagaatctgctgtccccagaagatatggtcctgtttcataacctgactcagccgcggggcgtgaattggtgtgagcgcaccactctgtctaacggtgggtgtcagtatctatgcttgccagcaccgcagatcaatcctcactcacccaaatttacctgtgcctgtcccgacggtatgttgctagccagggacatgaggtcttgtctgactgaggcagaggccgccgttgcaacccaggagacaagcacggtgcgcctgaaggtgagctctacagcggttaggacgcagcataccactacccggcctgttccagatacgtcaaggctccccggagctacacccgggctgacaaccgtggagatagttacaatgtcgcatcaggcgctgggtgacgtggccggcaggggaaacgagaagaagccatccagcgtccgggcactttctatagttctgcccattgtcttactcgtgtttctttgtcttggtgtttttcttctgtggaaaaattggcggttgaaaaacattaactcaattaacttcgacaaccccgtttaccagaagaccacggaggacgaagtgcacatatgtcacaatcaggacgggtacagctaccctagcaggcaaatggtaagtttggaggatgatgtggca

SEQ ID NO: 11053 - DNA, 2580 bp, Artificial Sequence
  derived and/or modified sequence
atgggaccctggggctggaaactgcgctggaccgtggccctactgctggctgctgcaggcacggccgtcggcgataggtgtgaacggaacgagttccagtgccaagacgggaagtgtatctcctacaaatgggtgtgcgatgggtccgccgagtgccaagacggttccgatgagtcacaggaaacgtgtctttcggttacctgcaagtcaggcgactttagctgcggcggaagagtaaacagatgcatcccacagttctggagatgtgacggacaagttgactgtgataatggcagcgatgaacaagggtgcccacccaagacctgctcccaagacgagttcagatgtcacgacgggaaatgcatcagccggcaattcgtgtgtgactccgatagggactgcttagacggatcggatgaggccagctgccctgtgttaacatgcggacccgcctcctttcagtgtaattcctccacgtgcatcccacaactctgggcctgcgacaatgaccctgattgcgaggatggcagcgacgagtggccacagaggtgccggggcctgtacgtgtttcagggagatagcagcccatgtagcgcctttgagtttcactgcctgtctggcgagtgcatccattcctcatggaggtgtgacggtggccctgattgcaaagacaagagtgatgaggaaaactgtgcggtggccacctgccgccctgacgagttccagtgttccgacggaaattgtatccacggaagtcggcagtgcgacagagaatacgattgtaaggacatgtcagatgaggtgggatgtgtgaacgtgactctttgcgagggacctaacaaattcaagtgccattccggagaatgtatcacactggacaaggtctgcaacatggcccgagactgtcgtgactggtccgatgaaccaataaaagagtgcggtaccaatgagtgtctggacaacaatggtggttgttcacacgtatgcaacgaactaaaaatcggatacgaatgcctgtgccctgatggattccaattagtagcccagaggaggtgtgaggatatcgacgaatgccaggatccggacacctgctcgcagttgtgtgtgaatcttgaagggggttataagtgccagtgtgaagagggctttcaactggacccccatacaaaggcgtgtaaggcggttgggagcattgcatacttgttcttcactaaccgacacgaggtgcgcaagatgacactggaccgcagcgaatatacatccttgatccctaatctcaggaacgtggtcgcgttagacaccgaggtggcatccaacaggatatattggtctgatttatcgcaaaggatgatctgttcaacacagctggaccgggcccatggcgttagttcatatgacaccgtgatcagtcgcgatattcaggcccctgatggtctggcagttgattggatccacagtaatatatattggaccgattccgtactgggcaccgtgtccgtagcggacaccaagggcgtcaagcgtaaaaccttgtttcgggaaaatggaagtaagcctcgggccatcgtggttgatcctgttcatggatttatgtattggacagactggggcactcccgctaagataaagaaaggtggtctaaatggcgtggatatctactcattagtgacagagaacatccagtggcccaatgggattacactggatctgctgtctggccgtctctactgggtggatagtaagctccattccatcagttcaatcgacgtgaatggaggcaaccgtaagactatccttgaggacgagaagcggctggcacatccgttctccctagcggtgtttgaagataaggtgttttggactgacattatcaatgaagctatctttagtgcgaataggttaaccgggtcggatgtgaacctgttagccgaaaatcttctgtccccagaggatatggtcctgtttcataacctaacccagccgaggggtgtgaactggtgcgagcgcacgactctgtcaaatggcggatgtcagtacctgtgcctgccagctccacagattaacccgcacagcccgaagtttacctgcgcatgtcccgatgggatgctactggctagggatatgaggagctgccttacagaagcagaggcagcagtcgccacccaagaaacctccacagttaggctgaaggtttcatcgacagcagtcagaacccagcacactacaacacgtcccgtgcctgacacctcacggctgcctggggctactcccggactcacgacagtggaaattgtgaccatgagccaccaagcgcttggagatgtggctgggagagggaacgaaaaaaaacccagctccgtaagagccctgtctatcgtcttgccaattgttctgctggtcttcctgtgcttgggcgttttccttctatggaaaaactggcggctgaagaacatcaactctatcaattttgacaaccccgtatatcagaaaaccacagaggacgaggtacatatctgtcacaatcaggacggttattcttacccatcccgacagatggtgtcattggaagatgatgtcgcc

SEQ ID NO: 11054 - DNA, 2580 bp, Artificial Sequence
  derived and/or modified sequence
atgggaccctggggatggaaactgcgatggacggtggccctcctgctagccgccgccgggaccgccgtcggtgacaggtgcgagcgtaacgagttccaatgccaagatggaaagtgcatctcttataagtgggtatgtgatgggtcagctgagtgtcaggatggctcagatgagagccaggaaacttgcctgtccgttacttgcaagtctggcgatttctcatgcggcggacgcgtcaataggtgcattcctcagttctggaggtgcgacgggcaggtggactgcgataatgggagcgatgagcaaggctgcccaccaaaaacctgttcccaggacgaatttcggtgccacgacggcaagtgtattagccggcaattcgtgtgtgatagtgaccgggactgtctggatggctcggacgaagcgtcttgtcccgtgctcacctgtggaccagcgagcttccagtgcaattcaagcacctgcataccacagctttgggcatgcgataacgatcctgattgcgaggatgggtccgacgagtggcctcagcggtgccgcgggctgtacgtgtttcagggcgacagttccccctgttccgcctttgaattccactgcctttcaggcgagtgcatccatagctcctggcgctgcgacggaggccccgattgtaaggataaaagtgacgaggaaaattgtgccgttgctacttgccggccagatgagttccagtgttccgatggtaattgcatccatggttccagacaatgtgatagagaatatgattgcaaggatatgtccgacgaagtgggctgtgtgaatgtcacactgtgtgagggaccaaacaaattcaagtgtcactccggggagtgcattacactcgataaagtgtgtaatatggcccgtgattgtcgggactggtcggacgagccaataaaggaatgtgggacgaatgagtgtctggacaataacggtggatgttcgcacgtgtgcaatgagctgaagatcggttacgagtgcttgtgtcccgacgggttccagctcgtcgcacagcgtcgctgcgaggacatcgacgagtgccaggaccctgatacctgctcccagctgtgcgttaatctggagggaggatacaagtgtcagtgcgaggagggcttccagcttgatccccacaccaaagcttgtaaagccgtggggtccattgcttacctgttcttcaccaacagacatgaagtgagaaaaatgacactggaccgcagtgaatatacttccttgatccctaacttgcggaatgtggtagcgctggacaccgaagttgcatccaataggatctactggtccgaccttagccagcgcatgatttgctccacccagcttgaccgagcccacggagtatcctcttacgatacggtgatttcacgcgacatccaggcacccgacggacttgccgtggactggatccactcaaacatctactggactgactccgtactcggtaccgtgagcgtagccgataccaagggcgttaagcgcaaaacattgttccgtgagaatggcagcaagcctcgcgcaattgtcgttgacccagtgcatgggttcatgtattggaccgactggggcactcccgcaaagattaaaaaaggtggcctgaatggcgtggacatctactcattggttactgagaatatacagtggcccaatggcataacattggacctactgtctgggcggctatattgggtcgatagcaagctgcacagcatctcatcaatcgatgtcaatggcggtaatcggaaaaccatcttggaggacgagaaacggctggcccacccctttagtctggctgtatttgaagataaagttttctggaccgatatcattaatgaggctattttttcagctaatcgactcaccgggagcgacgtcaacttactggccgagaatctcctgtcaccagaagacatggttctatttcacaacctgacacagcctcggggcgtgaactggtgtgagcggacaactctctccaatggaggatgtcagtacctttgtcttccagctcctcagataaacccgcacagtcccaagttcacttgcgcctgccctgatggcatgctgttagctcgtgatatgcggtcatgcttaacggaggccgaagcggcggtggccactcaagaaacgtctacggtcagactcaaggtatcatctacagcggtgaggacacagcacacaacaaccagacctgtgcctgatacaagcaggctgccaggggccactccagggctcactactgtagaaatcgtgacaatgtcacatcaggccctaggggacgtggctggacgcggaaacgagaagaaaccaagctccgtccgggctctgtcaattgttctgcctattgtgctgttggtgttcttatgtctcggggtttttctgctctggaagaactggcggctgaaaaacattaactcaattaatttcgataacccagtttatcaaaaaactaccgaggacgaggtgcatatctgtcacaaccaggacgggtatagctacccctctcggcagatggtctcactggaggacgatgtggcc

SEQ ID NO: 11055 - DNA, 2580 bp, Artificial Sequence
  derived and/or modified sequence
atgggaccatggggatggaagctgcggtggaccgtcgctctcctccttgccgcggccggaactgcggtgggagacagatgtgaacggaacgaatttcagtgtcaagacgggaagtgcatctcgtacaagtgggtgtgcgatggtagcgcagagtgccaagacggctcagacgaaagccaagagacgtgcctctcagtgacgtgtaagtcaggcgacttctcgtgcggcggacgggtgaacaggtgcatcccgcaattctggagatgcgacggacaagtggactgcgacaacggcagcgatgagcagggatgtccccccaagacctgctcgcaggacgaattcaggtgccatgatgggaagtgtatctcgcgccagttcgtgtgcgactccgaccgcgactgtctcgacggatccgacgaagcctcctgcccggtcctgacttgcgggcctgcaagtttccagtgcaattcatcaacttgcatcccgcagctgtgggcttgcgacaacgacccagactgcgaagatggatcagatgagtggccgcagagatgcagaggactttacgtgttccaaggcgactcgagcccttgctccgcgtttgaattccattgtctctcaggtgaatgcatccattcgagctggagatgtgacggaggcccagactgcaaagataaatcggatgaagagaactgcgctgtagccacgtgccgcccggatgagtttcaatgttcagatggaaactgtattcacgggtccagacaatgcgacagggagtacgattgcaaagacatgtcggacgaggtcggatgcgtcaacgtcaccctctgcgagggacctaacaagttcaagtgccactcaggggaatgcattactctggacaaggtgtgcaatatggccagagactgtcgcgattggtcagatgaaccgatcaaggagtgcggcacgaatgagtgcctggataacaatggcggatgcagccacgtgtgcaatgagcttaagatcggatacgagtgcctttgtccggatggattccagttggtggctcagcgccgctgcgaggacattgatgaatgccaagatccggacacgtgctcgcagctctgcgtgaacctggagggcggatacaaatgccagtgcgaagagggatttcagttggatccacacactaaggcgtgtaaggcagtggggtccatcgcctacctgttcttcacgaacaggcatgaggtccgcaaaatgacgttggatcggtcagaatacacctcactgatcccaaatctcagaaatgtggtggcgctggacactgaggtggcatccaaccgcatctactggtccgacctgtcgcagcgcatgatctgctcaacccagctcgaccgagcacacggcgtgtcatcctacgataccgtcatttcacgtgacatccaggcgccggacggcctggccgtggactggatccattcgaacatttactggactgattcggtgctgggtaccgtgtccgtcgccgatactaagggagtgaagcgaaagaccctcttccgagagaacgggtccaagcctagagctatcgtggtggatccggtccatggtttcatgtactggactgactggggaaccccggcgaaaatcaagaaaggtggactgaacggagtcgatatctactcgctggtcaccgaaaacatccagtggccaaacggcatcacgctggacttgctgtcgggccggctctactgggtggactccaagctgcattcgattagttcaattgacgttaacggaggaaaccgcaagactatcttggaagatgagaaacgcctggcgcatccgttctctctcgccgtgttcgaggacaaggtgttctggacggatatcatcaatgaggcgatcttcagcgcaaataggttgactggcagcgacgtgaatctgctggccgagaacctcctctcgcctgaggatatggtgctctttcataacctcacccagccacggggagtgaattggtgtgaacggaccaccctctcgaacggcggatgtcagtacctctgcctccctgccccacagatcaacccacactcgccaaagttcacgtgcgcatgcccggacggcatgctgctggcgagagacatgcggtcctgcctgactgaagccgaggccgccgtcgcgacccaagagacttcgactgtgcgcctgaaagtgtcctccactgccgtgcggactcagcacaccacgacccggccggtcccggacacctcccggctccctggcgcgactccggggctcaccaccgtggagatcgtgactatgtcccaccaggccctgggtgacgtggctggccggggtaatgagaagaagccgagctccgtgcgcgcgctgagcatcgttctcccgatcgtgcttctggtgttcctgtgcctcggagtgtttctgctctggaaaaactggcgactgaagaacatcaattcaatcaatttcgacaatccggtgtaccaaaagaccactgaggacgaagtccacatctgtcataatcaagatggatactcgtacccgtcacgccagatggtgtccctggaggacgatgtcgca

SEQ ID NO: 11056 - DNA, 2580 bp, Artificial Sequence
  derived and/or modified sequence
atgggaccttgggggtggaaacttaggtggaccgtcgcactgctgcttgcagctgccgggaccgccgttggagatcggtgcgagagaaatgagtttcagtgccaggacggaaagtgtatatcatacaaatgggtgtgtgatggttcggctgaatgtcaagacggctccgatgagtcgcaagagacttgtctgtcggtcacttgcaagtcaggcgacttctcctgcggtggtcgggtcaacagatgtattcctcaattctggagatgcgatggtcaagttgactgtgataacggatcggatgaacagggctgtccaccaaagacttgctcccaagacgaatttcgctgccacgatggcaagtgcatttcaagacaatttgtctgtgactcggatagggactgtcttgacggtagcgatgaagcatcctgcccagtccttacttgcggtcccgcctcgtttcagtgtaattcgtcgacttgcattcctcagctttgggcatgtgataatgatcccgattgtgaagatggaagcgacgaatggccacaacgttgtaggggactctacgtctttcaaggtgatagctcaccgtgttccgcattcgaattccactgcctgtcgggagagtgtattcatagcagctggcgctgtgacggaggaccggattgtaaggataaatccgatgaggagaattgtgcagtggccacctgtcgcccagacgaatttcagtgttccgacggaaactgtattcatggatcccgacagtgtgacagggagtacgattgtaaagatatgtctgatgaagtcggatgcgtcaacgtcactctgtgcgagggacccaacaagttcaaatgccattcaggagaatgcatcaccctcgataaggtgtgtaacatggcccgtgattgtcgagactggagcgatgaacccatcaaagaatgtggaacgaacgaatgtcttgataacaacggtggttgttcccatgtctgcaacgagttgaaaataggttacgaatgtctctgtcccgacggattccaactcgtggcacagcgtagatgtgaagatattgacgagtgccaggatcctgacacttgctcgcaactctgtgtcaaccttgagggaggctataagtgtcagtgtgaagaaggttttcagctggatccgcatactaaggcatgcaaggccgtcggttcgattgcgtatctgttctttactaacaggcatgaagtgcgcaaaatgactcttgaccgatcagaatacacttcactcataccaaacttgagaaatgtggtggcactggacactgaggtcgcatccaataggatatactggtccgatctgtcccagcggatgatctgttcgacccagcttgatagagcgcatggcgtgtcgtcatacgacactgtgatttcccgggatatccaagcacctgacggtcttgcggtggattggatacactcgaacatatactggactgacagcgtgcttggaaccgtctccgtggctgacaccaagggagtgaagaggaaaactctttttcgtgaaaatggatctaagccgagggcaatcgtggtcgatcctgtgcatgggttcatgtactggaccgattgggggaccccggcaaagatcaagaagggcggactgaatggcgtggatatctactcgcttgtgacggaaaacatccaatggcccaacggaatcactctcgacctcttgagcgggcgattgtactgggtggattcgaaacttcactccatttcttcgatcgacgtcaacggcggaaatcgtaaaaccattctggaggatgaaaaacgacttgcacacccattttcgctggcggtctttgaagataaggtgttctggaccgacattatcaatgaggccatcttttcagcgaaccgactgaccggctcggatgtcaatctgttggcggaaaacctgctgtcgccagaagatatggtcctttttcataatctgacccaacctcggggagtgaattggtgtgagcgtactacgctctcgaacggtgggtgccagtacctgtgtctgcccgcaccccagataaacccccactcccctaagtttacttgtgcatgtcctgatggcatgctcctggcgagagacatgagaagctgcttgacggaggcagaggccgctgtggctacccaggaaacttccactgtcaggctgaaggtttcgtccaccgcagtccgtacccaacacacgaccactagacccgtgcccgatacctcacgccttcctggagccactccagggcttaccaccgtggaaattgtcaccatgagccatcaagcacttggggatgtggcaggtcgggggaacgaaaagaaaccgtcgtcggttcgcgccctttcgattgttctgcctatcgtgcttcttgtgttcctgtgcctcggcgtgtttttgctgtggaagaactggcgccttaagaacatcaactcaatcaactttgataatccagtctaccaaaaaactacggaggacgaagtgcacatttgtcataaccaggacggatactcatatccgtcccgccaaatggtttccctcgaggatgacgtggcc

SEQ ID NO: 11057 - DNA, 2580 bp, Artificial Sequence
  derived and/or modified sequence
atgggcccttggggttggaagctgcgctggaccgtggcactgctcctggccgctgccggcaccgcggtaggtgataggtgcgaaaggaacgaattccaatgtcaggatggtaaatgcatctcatacaaatgggtgtgtgatggctcagctgagtgccaggatggttcagacgagagccaagagacatgtctcagcgttacctgcaaatcaggagacttcagctgcgggggtcgtgtaaataggtgcatcccacagttttggaggtgcgatggacaggtggactgcgacaacggatctgatgaacaaggctgcccaccaaaaacctgttcacaggacgaatttcgctgccatgatggcaaatgcatcagccgtcagttcgtgtgcgattctgatcgggattgcttagacggctcagatgaggccagttgcccagtgctgacctgcggcccagcctcatttcaatgtaactcgtctacctgtattcctcagctgtgggcatgcgataacgacccagactgtgaggacgggtctgacgagtggcctcagagatgcagaggtctgtatgttttccagggcgactcttccccttgctctgcattcgagtttcactgtctgtcaggcgaatgcatccattcttcctggagatgtgacggtgggcctgactgcaaagacaaatctgacgaggagaactgtgcggtggctacctgtaggcccgacgaattccagtgcagcgatggcaattgtatccacggttccaggcagtgcgatcgggagtacgactgcaaggatatgagtgacgaggtaggatgcgtgaacgtcaccctgtgtgaaggtcccaataaatttaagtgccatagcggggaatgtataacccttgacaaagtctgcaatatggccagggattgccgcgactggagtgacgaacctattaaagagtgtggaacgaacgaatgtctggataataatgggggctgctctcacgtgtgtaatgaattgaagatcggatatgagtgtctctgccctgatggatttcagctggtcgcacagcgacgttgcgaagacattgatgagtgtcaggatccagacacttgttctcaactatgcgtgaacctagaaggagggtataaatgccaatgtgaggagggctttcaactcgaccctcacaccaaggcttgcaaggctgtgggcagcatcgcatatctgtttttcacaaatcggcacgaggtgcggaagatgacattagacagatcggaatatacgtcccttatccccaacctcaggaacgtggtagccctggatacggaagtcgcctctaacaggatatattggagcgatctctctcaaaggatgatctgcagcactcagctggaccgggcacacggggtttcttcctacgacactgtcatctcccgagatattcaggcccctgatgggctggctgtggactggatccacagcaacatctattggactgattcagtgttaggcaccgtgagcgttgcggataccaaaggcgttaaaaggaagaccttatttcgggagaatgggagcaaaccaagagccatcgtcgtggacccagtccacggttttatgtactggactgactggggcacgccagctaaaatcaagaagggcggactgaacggcgtcgacatttactcactagttacagagaatatccagtggcccaatggcatcacgctcgacctcctttcaggcaggctgtactgggttgatagtaagcttcacagcatcagcagcatcgacgtaaatggaggcaataggaaaacgatcctcgaggatgaaaaacgactagctcacccatttagtttagccgtgtttgaagataaagtgttctggactgatattattaatgaagccattttctcagctaaccgcctgactgggtctgatgtaaacttactggcagagaatttattgagccctgaggatatggtgctgttccataatcttactcagccacggggagttaactggtgtgaacgcaccaccttgagcaacggaggatgccagtacctatgcctcccagcaccacagattaacccacactcaccgaagttcacttgtgcatgccccgatgggatgctcttggccagagacatgcggtcgtgtttaaccgaagcagaagccgccgttgccacccaagaaactagtacagttagactaaaagtaagctcaaccgccgtgcgcacacaacataccactacccgtcccgtgccggatacctcccgcctgcctggcgctactcctggactgactaccgtcgagattgtcaccatgtctcaccaagccctgggcgatgttgcaggcagaggaaatgagaaaaaaccatccagcgttcgtgcactatccattgtcctgccaatagtcctgctggtgtttctctgtctcggcgtcttcctattatggaaaaattggaggttaaaaaatatcaatagtatcaactttgataaccctgtctatcagaagacgactgaggatgaggtgcatatttgtcataaccaggacggatatagttacccttctagacagatggtgagtcttgaagacgatgtagct

SEQ ID NO: 11058 - DNA, 2580 bp, Artificial Sequence
  derived and/or modified sequence
atgggcccgtggggatggaagctgcgctggaccgtggcgctgctcctggccgccgcaggcactgccgtgggggacaggtgcgaacggaatgaatttcagtgccaagatggtaagtgcatcagctacaagtgggtgtgcgatggttcggccgagtgtcaggatggctcggacgaaagccaggaaacctgcttgagtgtcacttgcaaatcaggcgacttttcgtgcggaggcagggtgaatagatgtatcccacagttttggcgctgtgatggccaggtggactgcgacaacgggtcggacgagcaaggctgccctcctaagacttgcagccaggacgaattcagatgccatgatggaaagtgtatctcgcggcagtttgtgtgcgattcggatagagattgcctggacggatcggacgaagcatcctgcccggtgctgacctgcggacccgcctccttccagtgtaacagctcaacctgcatccctcagctgtgggcctgtgacaatgatccggattgtgaggacggatcagacgagtggccgcagagatgccgcggcttgtacgtgttccaaggagactcctcgccgtgctcagccttcgaattccactgcctcagcggagaatgcatccattcgtcgtggcggtgcgatggcggaccagactgcaaagacaagagcgatgaagagaactgcgccgtggcaacctgtcgtccggatgaattccaatgctccgatggaaattgcatccatgggtcgcgccagtgcgaccgcgaatatgactgtaaagacatgagcgatgaggtgggctgcgtgaatgtgaccctgtgcgagggcccaaataagttcaagtgccactccggtgagtgcatcaccctggacaaggtttgcaatatggcacgggactgccgggattggtcggatgagccgattaaggaatgcggcaccaacgaatgcttggacaacaacggaggctgttcgcatgtgtgtaatgagctgaagatcggatacgagtgcctgtgtcctgatggattccagctggttgcccaacggcggtgcgaggacatcgacgagtgccaagatccagacacctgctcccagctgtgtgtgaatctggaaggtgggtacaagtgccagtgtgaggaagggttccaactggacccgcacactaaggcctgcaaggcggtgggttccattgcgtacctgttcttcaccaaccggcacgaggtccggaagatgaccctcgatcggtccgagtacacttcactgatccccaatctgcgtaacgtggtggcgctcgacaccgaagtcgcatcgaaccgcatatactggagtgacctgagccaaaggatgatctgctctacccagctcgatcgggctcacggtgtctcgtcctacgatactgtgatctcccgcgacatccaggccccggatggcttggcggttgactggatccattcaaatatctactggactgacagcgtgctgggcactgtcagcgtggcggatacgaagggcgtgaagcggaaaaccctgttccgcgaaaacggcagcaagccaagggccatagtggtggatccggtccacggattcatgtattggaccgattggggaaccccagccaaaatcaagaaaggaggcctcaacggagtggatatctacagcctggtcactgagaacatccagtggccgaacggaatcaccctggatctcctgagcgggcgcctctactgggtcgactcgaaactccactcaatctcgtccatcgacgtcaacggcgggaatcgaaaaactatcctggaggacgaaaagcggctcgcacacccgttctcgcttgctgtgttcgaagataaggtgttctggaccgacattatcaacgaagcgatcttttccgcgaaccgcctgactggtagtgacgtcaacctgttggccgagaatctgttgtcaccggaggacatggtgctgttccataacctgacgcaaccgaggggagtcaactggtgtgagcggaccaccctgtctaacgggggttgccagtacctctgtctgccggcgccacaaatcaacccccattcgcccaagttcacctgcgcctgcccagacggaatgctgttggcacgggacatgcggtcctgtctgaccgaagccgaagctgccgtggcgactcaagaaacgtcaaccgtgagactcaaggttagctcgactgccgtgagaacccagcataccactactaggccggtcccggacaccagccggctgcccggggccaccccgggactcaccaccgtggagatcgtcactatgtcacatcaggcactcggtgacgtcgcaggaagagggaatgagaaaaagccgagctccgtgcgggccctgtcaatcgtgctgccgatcgtgcttctggtgtttctttgtctcggagtgttcctcctttggaagaactggcgcctgaagaacattaactcgatcaacttcgataacccagtgtaccagaaaaccacggaggacgaagtgcatatctgtcacaatcaggatggttactcctacccttccagacagatggtatccctggaggatgacgtggca

SEQ ID NO: 11059 - DNA, 2580 bp, Artificial Sequence
  derived and/or modified sequence
atgggaccttggggctggaaactccggtggactgttgccttgctactcgccgcagctgggactgccgtcggggatcgatgcgagaggaatgagtttcagtgtcaggacggcaaatgtatctcatacaaatgggtgtgcgatggcagcgccgagtgccaggacggcagcgacgagagccaggaaacctgcttatccgtaacttgcaaatcgggcgatttctcttgtggcggccgagtcaatcgatgtattccacagttctggcgatgcgatggacaagtagactgcgacaatgggtccgatgagcaaggatgtccccccaagacctgcagtcaagatgagttccggtgccatgacgggaagtgtatctcccgccagttcgtgtgtgattctgacagagattgcctggatggttccgatgaggcctcctgcccggtgctgacatgcgggcctgcttctttccagtgcaatagctccacgtgcataccgcaactttgggcatgtgataatgatcccgactgcgaggatgggtccgatgagtggccacagcgctgcagaggcttgtatgtttttcagggggactcctcaccctgctccgcctttgaattccactgcctctcaggcgagtgcattcactccagttggaggtgcgacggcgggcctgactgcaaagacaaatctgacgaagagaattgcgccgtggccacatgccgtcccgatgaatttcaatgtagtgatggcaattgcatccacggcagccgccagtgtgatcgggaatacgattgcaaagacatgtccgacgaagtggggtgcgtgaatgttaccctgtgcgaaggtcctaacaaatttaagtgtcactctggggagtgtattacgctcgataaggtctgtaacatggctcgggactgtagggactggtcggatgagccaatcaaggagtgcggcacaaatgaatgtctcgataacaatggagggtgtagtcatgtgtgcaacgagttgaaaatcggctacgagtgtctctgccccgatggattccagctggtggcacaaagaaggtgtgaggacatagatgagtgtcaggaccctgacacctgctcacagctttgtgtaaacctggaaggaggatataagtgtcagtgcgaggaggggttccagcttgaccctcataccaaggcgtgcaaggctgttggcagcatagcatacctgttttttacaaaccggcacgaggtccggaaaatgaccttagacagatctgaatacacatcactcataccgaacctgcggaatgtagtggccctagatacagaagtggcatccaaccgcatctactggtccgacttgtctcagcgcatgatctgtagcacccaactagaccgagctcatggcgtctcatcctatgatacagtcatctctcgagacatacaggctcctgacggtttggcagtggactggatacattccaatatatactggaccgattccgtattgggcaccgttagtgtagctgatacaaagggagtgaaacgcaaaaccctgttccgcgagaacgggagcaaaccgagagccatcgtcgtcgaccccgtccacgggttcatgtattggacggactggggaacacctgcaaagataaagaaggggggtctgaacggcgttgacatctacagtttggtgacagagaatatccagtggccaaatgggattaccttggatctgctgtcgggacgactctactgggtcgactctaaactccatagcatttcctccatcgacgtgaatggcggcaaccgtaagacaattctggaggacgaaaagaggctggcacacccattctcccttgccgtgttcgaggataaagttttttggaccgacatcatcaatgaggcaatcttctctgctaacaggctcaccggatccgacgtcaaccttttggccgaaaatctcttgtcacccgaagacatggttttgtttcacaacctgactcaacccaggggcgtgaattggtgtgaaaggactactctgtccaatggaggctgccaatatctctgcctgcccgcccctcaaattaatccccactcgcctaagtttacctgcgcctgcccggatggtatgctgctagctagggatatgcgttcctgcctaacagaggccgaagccgccgttgctacccaggaaaccagcactgtgcgactgaaagtgtcttccactgccgttcgcactcagcatacaactactcgacccgtccccgacaccagcagactcccaggcgcaacgcctggtttaacaaccgtggaaatcgtgaccatgtcacatcaggcacttggtgacgtcgctggtcgggggaacgaaaagaagcctagctctgtgcgcgctctgagcattgttctgcccattgttctgctggtttttctgtgtcttggagttttcctcctatggaagaactggcgattgaaaaacataaattccatcaactttgacaacccagtgtatcagaagacgacggaggacgaggtccatatttgtcacaaccaggatggctattcatacccttccaggcagatggtgtcactggaggacgatgtggcc

SEQ ID NO: 11060 - DNA, 2580 bp, Artificial Sequence
  derived and/or modified sequence
atgggcccatgggggtggaagctcaggtggacggttgctctgctgcttgctgccgcgggtacagcagtcggcgataggtgcgaaaggaacgaatttcagtgccaggacggcaaatgtatctcatacaaatgggtttgcgacgggagcgcggagtgccaagatggctctgatgaatctcaggagacttgcttgtccgtcacatgcaagagtggagactttagctgcggcggccgggtcaacagatgtataccccaattttggaggtgcgatggacaggtggactgcgataacggctcagacgagcagggatgccctccaaagacttgttcacaagatgagtttcgctgccacgacggtaagtgcatctcccgccagttcgtgtgcgactccgatcgggactgcctagacggcagcgacgaggcttcctgtcctgtgctcacctgcggacctgccagtttccagtgcaactctagcacttgtattccacagctttgggcctgtgataacgatccagattgtgaggatggcagcgacgaatggccacaacggtgtcgcggactttacgtgttccagggggactcttctccctgttccgcatttgaatttcactgcctaagcggagaatgcatccattcctcctggagatgcgatggtggccctgactgcaaggacaagtcagacgaggagaactgtgccgtcgcaacctgtcgccccgatgagtttcagtgctccgatggtaactgcattcacggatcaaggcagtgtgaccgtgagtatgattgtaaggacatgagtgatgaggtcggctgtgtcaatgttacactgtgcgaaggtcccaataagtttaagtgccatagcggggagtgcatcactttagacaaggtctgtaatatggcacgtgactgcagggattggtccgacgagcccatcaaggagtgcggtaccaatgagtgcttagataataacggtggatgttcccatgtgtgcaatgaactgaaaattgggtatgagtgtctatgtcctgatggatttcagctagtggcgcagcgccgttgcgaagatattgacgaatgccaggaccccgatacatgtagtcagctgtgtgtgaaccttgaaggtggctacaagtgtcagtgcgaggagggttttcagctagatccacacacaaaagcatgcaaggccgtgggaagcattgcctatctgttttttaccaaccggcatgaagttcggaagatgactttggaccgctccgagtacacgtcactgataccgaacctgcgaaacgtcgtagctctggataccgaggtagctagcaaccgcatctactggtcagatctctcccagcgcatgatctgcagcacgcagctggaccgtgctcacggcgtctcttcctacgacacagtgatttctagagacatacaagctccagatggcctggctgtggattggatacacagcaatatctactggacagactcggtgctagggacagtctcagtggcggataccaagggagtgaagaggaagacattgttccgagaaaatggctcaaaaccgagagcaattgtagtggatcccgttcacgggtttatgtattggacggactggggcaccccggccaagataaagaagggaggcctgaatggagttgatatttactctttagtgactgagaacattcagtggcccaacggaattaccctggatctccttagtgggcgcctgtactgggtggactccaagctgcacagcatctcgagcattgacgtgaacggcggcaatcggaagactattcttgaagatgaaaagagattggcacaccctttctcccttgcagtctttgaggacaaggtgttttggacagatatcatcaacgaggcaattttttcagcgaaccggcttacggggtctgatgtaaacttactggccgagaatctgctgtcaccagaagatatggtgcttttccataaccttacgcagccccgtggtgtaaattggtgcgaaagaactactctgtctaatgggggctgccagtatctttgccttccagctccccagatcaatccccatagtcccaagttcacttgtgcttgcccggatgggatgctccttgctagggacatgaggagctgtctgaccgaggccgaagcggcggtggctacccaggagaccagtactgtgcggttgaaagtcagctccaccgctgtgcggacgcagcacacgacgacaagaccagtcccagacacatcacgcctgcccggagctacgccggggttaaccactgttgaaatcgtaacaatgagccatcaagccctcggcgacgtcgctggacgcggcaacgaaaaaaaaccctccagtgtcagggcactatctatcgtactgcccattgttctccttgttttcctctgccttggagtgttcctgctttggaagaattggcgtcttaagaatataaatagcatcaacttcgataaccccgtttaccagaagacaaccgaggacgaggtccacatctgtcataatcaggacgggtactcttacccgtcccgccagatggtcagcctggaggatgatgtggcc

SEQ ID NO: 11061 - DNA, 2580 bp, Artificial Sequence
  derived and/or modified sequence
atgggaccttggggctggaagttgcgttggaccgtggccttgctgctggcggctgccggaactgctgttggggacagatgtgaacggaatgaattccagtgccaggacggaaagtgcataagctataagtgggtgtgcgatgggtctgccgaatgccaggatgggtctgatgaatcacaggagacttgtctctcagtaacatgtaagagcggcgatttcagctgcggcggcagggtgaaccggtgtatacctcagttctggcggtgcgacgggcaggtggattgtgataatggttctgacgagcagggttgcccccctaaaacatgtagtcaggacgaatttaggtgccatgatggcaaatgcatctcaaggcagtttgtttgtgacagcgatagagactgcttggatggctctgacgaggcatcatgcccagttttgacatgcggcccggcatctttccagtgcaacagcagtacctgcattccacagctgtgggcctgtgacaatgatccggattgtgaggacggctccgacgagtggcctcagaggtgtcgcggtctctatgtctttcagggcgattcctcaccctgcagcgcttttgagtttcactgcctctcaggagaatgcattcattcttcctggcggtgtgacggtgggcccgactgtaaggataaaagcgatgaggagaactgcgctgtggcaacatgccgtccagatgagtttcaatgctctgatggcaactgtatccacggttccagacagtgtgaccgggagtatgactgtaaggatatgtccgacgaagtggggtgcgtgaacgtgaccctttgcgaaggtcctaataagttcaagtgtcatagtggtgagtgtattactctggacaaggtgtgtaacatggcccgtgactgccgcgattggtccgacgaacccatcaaggaatgcggcactaacgaatgcctagacaacaatggtggatgttcacacgtgtgcaatgagctcaaaatagggtatgaatgcctatgtcctgatggttttcagctggtggcccaacggaggtgcgaagatattgatgagtgtcaggacccagatacgtgctctcagctgtgtgtgaacctcgaggggggctacaaatgtcagtgtgaggagggatttcaactggatccgcatactaaggcctgcaaagctgttgggtccatcgcttacttgttctttaccaaccggcacgaggttcggaagatgactctggaccgatctgaatatacaagtctgatcccaaacctccgaaacgtcgtggccctggatacggaagtcgcctcaaacagaatttactggtcggatctctcccagaggatgatctgctccacgcagttggatagggcacatggagtgagttcgtatgacacagtgatctctcgggacatccaggctcccgatggcttggcagttgactggatccatagcaatatatactggactgattctgttctgggcactgtgagtgtcgccgatactaagggggtgaaacgaaaaactctctttcgggagaacggaagcaaacctcgggcaattgttgtggatcctgtgcatggatttatgtactggaccgactgggggacaccagcgaagatcaagaagggcggtttaaatggggttgatatttatagccttgtaaccgagaatatccagtggcctaatggtattacgctggacctgctctcgggtcgtctgtactgggtcgattctaaattgcacagcattagcagcattgacgttaatgggggtaacaggaagactattctggaggatgagaagaggttggcgcatccgtttagtttggcagtcttcgaggataaagtattttggaccgacataataaacgaggcaatttttagtgcaaaccgattgactggatccgatgtcaacctgttggccgagaacctcctgagtcccgaggatatggtgttattccataacctgacacagcctaggggcgtcaattggtgtgagagaacaaccttaagcaacggaggctgccagtacctttgtttgcccgcaccccaaattaatccacactcaccgaagttcacatgcgcctgtcctgatggtatgctactagctcgagatatgcgcagttgcctgactgaagctgaggctgcggtggctactcaggaaacttccactgtaaggctgaaggtgtcgtcaacagcggtccgaacacagcacaccacaacccgacctgtccccgacacatcacgactgcccggcgcaacacctgggctgactactgtcgagatcgtgactatgtcccaccaggccttgggggatgtggcgggccgtggaaatgaaaaaaagcctagcagtgtaagggccctctctatcgtgctccccattgtcttgctcgtcttcttatgcttgggagtgtttctcctttggaagaattggcgactgaaaaacatcaatagcatcaacttcgataaccccgtgtaccagaaaacaacagaagacgaggtgcatatttgtcataaccaggacggttactcctatccatctcggcagatggtgtcactcgaagatgacgtcgct

SEQ ID NO: 11062 - DNA, 2580 bp, Artificial Sequence
  derived and/or modified sequence
atgggaccctggggatggaagttgagatggactgtggcacttctcctggcagccgccggtaccgcagtgggagatcggtgtgaaaggaacgaattccagtgtcaagatggaaagtgtatctcctataagtgggtgtgtgatggttccgcagaatgtcaggacggatcggatgagtcccaggaaacttgcctgtcggtgacttgcaaatcgggagacttctcgtgtggaggtcgcgtcaacagatgtattcctcaattttggagatgcgatggccaagtggattgtgacaacgggagcgatgagcaaggttgtccccctaagacttgctcccaagatgaatttcgatgtcatgatggaaaatgtatttcccgtcagtttgtgtgcgattcggaccgcgactgcctcgatggcagcgacgaggcgtcctgtccagtgttgacctgcggtcctgcatcgtttcagtgtaattccagcacctgtattccccaactctgggcatgtgacaacgaccctgattgtgaggacggttcggatgaatggcctcagagatgtcgcggcctttacgtctttcagggagactcctcaccttgttcggctttcgaatttcattgcctgtcgggcgaatgtattcactcgtcgtggcgttgtgacggcggacccgattgtaaggacaagtcggacgaggaaaactgtgcggtcgcaacctgccgcccagatgaatttcaatgttcggacggtaattgcattcatggaagccgtcagtgcgaccgtgaatacgactgcaaggatatgtcagatgaagtgggatgcgtcaatgttaccctgtgcgagggccccaacaagttcaagtgtcattccggagaatgtattactctcgataaggtttgtaacatggcccgcgactgtcgggactggagcgatgaacctatcaaggagtgtggtactaacgaatgccttgataacaatggcggttgttcccatgtttgtaatgaacttaagattggatacgagtgtctttgtcccgatggatttcaactggtcgcacagaggcgttgcgaggacattgatgaatgtcaagacccagacacttgctcgcaactctgtgtcaaccttgaaggagggtacaagtgtcagtgtgaagaaggttttcagctcgacccacataccaaggcatgtaaggcggttggatcgattgcgtacctgttctttactaaccgtcatgaagtgaggaaaatgactttggatagatcggaatacacctcgctgattcccaacctccgcaacgtggttgccctcgataccgaggtggcaagcaacagaatctactggtcggatctgtcccaacgtatgatctgctccactcagctcgatagagcacatggtgtctcatcctacgataccgtgatttcccgggacattcaagcacccgatggcttggcggtcgattggatccatagcaacatttactggactgattccgtgcttggaaccgtgtcagtggcagataccaagggcgtgaagcgtaaaaccctctttagagaaaatggttcaaaaccaagggccattgtagtggatccggtccatggatttatgtactggaccgattggggaaccccagcaaagatcaagaagggtggcctcaatggagtggacatctactctctggtcaccgagaatattcagtggcccaacggtatcactctggatctgctgtccggtaggctctactgggttgactccaagctgcactccatttccagcatcgatgtgaacggcggaaaccggaaaactattctcgaggacgagaagagactcgcgcatcctttcagcctggcagtgtttgaggataaggtgttttggaccgacatcataaacgaggccattttctcggcgaatagacttaccgggtccgacgtgaatctgcttgccgagaacctgctttcacctgaagatatggtgttgtttcataaccttacccaaccgagaggggtcaattggtgtgagcggaccaccctgtcgaatggaggctgtcaatacctgtgccttcctgcgcctcagatcaacccgcactcccccaagttcacctgcgcctgtcccgatggtatgctgctggcaagggatatgagatcctgccttaccgaggcagaagctgcagtggctactcaggaaacttcaacggtgcgccttaaggtgagctcgacggcagtccggactcaacatactaccaccagacctgtccctgatacttcgcgccttccaggagcaacgccagggctcactactgtggaaatcgtgaccatgagccatcaggcactgggagatgtcgccggtcgtggtaatgagaagaagccttcgagcgtcagggcactctcgatagtgcttcctatagtgctgctcgtgtttctgtgtctcggggtctttctgctttggaagaactggcgactgaagaatatcaactccatcaactttgataaccctgtctaccagaaaactactgaagatgaagtgcatatttgccataatcaggacggctactcttacccatcgagacaaatggtgtcactcgaggacgacgtcgca

SEQ ID NO: 11063 - DNA, 2580 bp, Artificial Sequence
  derived and/or modified sequence
atgggcccatggggttggaagttgagatggaccgtggcactgcttctggcggctgcggggactgcagtgggggaccggtgtgagaggaacgaattccagtgccaggatggaaagtgtatcagctacaaatgggtgtgtgacggttcagcagaatgtcaagatggttcggacgagtcccaggaaacctgcctgtccgtcacttgtaagtcgggcgacttttcgtgcggcggaagggtgaacagatgtataccacaattttggcgctgcgacggacaagtggactgtgataacggaagcgatgaacagggctgtccccccaagacttgctcgcaagacgaatttaggtgtcacgacggcaagtgtattagcagacaatttgtgtgtgattcggatcgtgattgtcttgatggctcagacgaagcatcctgccctgtgcttacctgtggcccggcctcgttccagtgtaattcatccacctgtattccccaactttgggcttgcgataacgacccggattgcgaagatggctcagatgagtggcctcagaggtgtcgggggctgtacgtgtttcagggtgactcatccccatgctcggcatttgaattccattgtttgtcaggggaatgcatccactcctcatggcgctgtgatggagggccagactgtaaggataaatccgatgaggaaaattgcgcagtcgcaacctgccgacctgatgaatttcaatgttcagacggtaactgtattcacggatctcgccaatgtgatagagaatacgattgtaaggacatgtccgatgaagtgggatgcgtgaacgtgactctctgtgaaggaccaaataagtttaagtgccactctggagaatgcattactctggacaaggtgtgtaatatggcaagagattgtcgggattggtcggacgagcctataaaggaatgtggaactaatgagtgtctggataacaacggtggatgttctcatgtgtgtaacgagctgaaaataggatacgaatgcctttgtcctgacggttttcaactcgtcgcacagagacggtgtgaagatattgacgaatgccaagatccagatacttgtagccaactttgtgttaaccttgaagggggctacaagtgtcaatgtgaagaaggctttcaactcgatcctcacactaaggcatgtaaagcagtcggcagcatagcctatcttttctttactaataggcacgaggtccgaaagatgacccttgaccgctccgaatacacttcgctgataccaaacttgcggaacgtggtggcactggataccgaagtggcatcgaaccgaatatactggtcggatctctcccaacgtatgatttgctcaactcaactggatagagcacatggggtttcttcctacgataccgtgatcagcagggatattcaagctcctgacggactcgcggtcgattggattcattcaaacatctactggaccgactccgtccttggtactgtgtcggtggcggatacgaagggcgtgaagagaaagaccctgttccgggaaaatggtagcaagccaagagcaattgtggtggatccggtgcatggttttatgtactggactgactggggcactccagcaaaaatcaagaagggtggcctcaacggagtggacatctacagcctggtgactgagaatattcaatggccaaacgggatcactctggatcttctctcgggaagattgtattgggtggattcaaaactccacagcatctcgtctatcgacgtgaacggaggaaaccgtaagactatccttgaggatgaaaaacgtcttgcccatcctttttccctcgctgtgtttgaggacaaggtgttctggaccgatatcattaacgaggcaatcttttcggccaatcgacttaccggttcggatgtgaacctcctggcagaaaatctgctttcacccgaggacatggtcctgtttcacaacctcactcagcctcggggagtgaactggtgtgaacgcaccactcttagcaacggaggttgccagtacctctgcctgcccgccccccagattaatcctcacagcccaaagttcacctgcgcatgccccgacggaatgcttcttgcacgcgacatgcgctcctgtctgactgaagcagaggcagccgtggcaactcaggaaacttccactgtgcgtcttaaagtgagctcgaccgccgtgaggactcaacataccaccaccagaccagtccctgacacgtccaggcttcctggggccactcctggtcttacgaccgtggaaattgtaacgatgtcccaccaagccctgggagacgtggcggggcgaggcaacgaaaagaaaccctcctcggtgcgcgcactttcaatcgtcctgcctatagtgcttctggtgtttctgtgtctgggagtgtttctcctctggaagaactggagactcaagaatatcaatagcataaacttcgacaatcctgtctaccaaaagaccactgaggatgaagtccacatctgtcataatcaggacggctactcttatccttcgcggcaaatggtatccctcgaggacgatgtcgcc

SEQ ID NO: 11064 - DNA, 2580 bp, Artificial Sequence
  derived and/or modified sequence
atgggtccatggggctggaaactgagatggaccgtcgctcttctgttggcggcggcaggtaccgccgtcggtgaccgctgtgaacgcaacgagttccagtgtcaagatggtaaatgtatttcatacaaatgggtgtgtgatggttccgcagagtgtcaggacggatcagacgaaagccaggaaacttgcctgtcagtcacctgtaaatccggggacttctcctgcggtggacgcgttaaccgctgcattcctcagttctggcgctgtgatggacaagtcgattgcgacaacggctcggatgagcagggttgcccaccaaagacttgctcgcaagatgaattccgatgccatgacggaaagtgcattagccggcaattcgtctgtgattccgatcgcgattgccttgatggaagtgatgaggcatcctgtcccgtattgacctgcggtcctgccagcttccaatgcaacagctccacctgtattcctcaactttgggcttgcgacaatgacccagattgtgaagatggatcagatgagtggcctcaaagatgccgaggactttatgttttccagggggattcctccccttgttcagctttcgaatttcactgcctttcgggtgagtgtattcattcgtcctggagatgtgacgggggtccagactgtaaggacaagtcagatgaggaaaactgtgccgtggcgacctgtagacctgacgaattccaatgcagcgacggaaattgtattcatggatcgaggcagtgtgatcgcgaatacgattgtaaggatatgtcggacgaggtcggatgtgtcaacgtcactctttgcgaaggcccaaacaagtttaagtgtcacagcggagaatgcataacccttgacaaagtgtgtaacatggctagagactgcagggactggtcggacgagccaatcaaagagtgcggtaccaatgagtgcctcgacaacaacggaggttgtagccacgtctgtaatgaacttaagattggatacgaatgtctgtgtccagacggattccaactcgtggcacagagacgatgcgaagatattgatgagtgccaagatcccgacacttgttcccaactgtgtgtgaatctggaagggggctacaagtgtcaatgcgaagaaggatttcaacttgaccctcatacgaaggcatgtaaggcagtgggatccattgcatacctgtttttcaccaatcgccacgaggtgaggaagatgactcttgatcgtagcgaatacactagcctgattcccaatcttcgcaatgtggtggcactcgataccgaagtcgcatccaacaggatctattggtcggacctctcacaacgcatgatttgttcaacccagctggatagagcccatggtgtgtcctcgtacgataccgtgataagccgcgacatccaagcaccggatggcctggccgtggactggattcattccaatatctactggacggactcagtcctcgggactgtctcggttgcggacaccaagggtgtgaagcgcaagaccctgtttcgggaaaacgggagcaagcctagagcgatcgttgtggaccctgtgcatggtttcatgtactggaccgattggggaactccagctaaaatcaagaaaggaggccttaacggagtggacatctactcacttgtgacggaaaacattcaatggccaaatggaattactcttgatcttctttcaggtcgtctgtactgggtggattcaaaactccattccatttccagcatagatgtgaatggaggaaacagaaagactattctggaggatgagaaacggctcgcccatccttttagcctggcggtttttgaggataaagtgttttggacggacattatcaacgaggcaattttcagcgcaaataggcttaccggttccgatgtgaaccttctcgcagaaaacctgctttcacctgaggacatggtcctgttccataatcttacccaacctaggggcgtgaactggtgtgaacgtactactctgtcgaacgggggttgtcaatacctgtgtttgccagcgccgcagattaatccccattcgcctaagttcacgtgtgcatgtccagacggcatgctgctggccagggatatgagatcgtgcctcacggaagcagaagcagccgtcgcaacccaggaaactagcaccgtgcggctcaaggtgtcctcgaccgcagtgcgcacccagcatacgactactcgcccagtccccgatactagcagacttcccggggcaaccccgggactgactaccgtggaaattgtgactatgtcccatcaggcactgggagatgtggcaggaagaggcaatgagaagaagccttcgtcagtgcgagccctctcgattgtgctgcctattgtgcttctggtgttcctgtgccttggagtgtttcttctctggaaaaactggcggctgaagaacatcaatagcatcaactttgataaccctgtctaccagaaaaccaccgaagatgaagtccatatttgtcataatcaggacggatattcgtaccctagccggcaaatggtgagccttgaagatgatgtggcg

SEQ ID NO: 11065 - DNA, 2580 bp, Artificial Sequence
  derived and/or modified sequence
atgggtccttgggggtggaagctccgttggaccgtcgcactgctccttgcagctgcaggtaccgcagtcggtgacaggtgcgaacgcaacgagttccagtgtcaagatggaaagtgcattagttacaaatgggtgtgtgatggctcagcagaatgtcaggacggttccgatgaaagccaggaaacttgcctctcggtcacctgtaagtctggagatttttcgtgtggcggcagagttaaccgatgtatcccacaattctggcggtgcgatggccaagtcgattgtgacaatggttcggatgaacaaggatgtcctccaaagacctgttcgcaagatgaatttcgatgccacgatggtaagtgcatttccaggcaatttgtgtgcgattcggatcgagattgtttggacggatcggacgaggcatcgtgccctgtgcttacttgtggccccgcatcgtttcaatgtaactcctccacttgcattccccagctttgggcatgtgataacgatccagactgtgaagatggctcagatgagtggccacagcgctgcaggggactgtacgttttccagggcgattcctcgccgtgttcggcatttgaatttcattgcctgtccggtgaatgcatacatagctcgtggcggtgcgacggtggtcctgactgtaaggataagtcagatgaggagaattgcgcagtggccacttgtaggccggatgaattccaatgctcagatggtaactgtattcacggctcgcgccaatgtgaccgagaatacgattgtaaggatatgtcagatgaagtgggctgtgtcaatgtcactctgtgtgagggacctaacaaattcaaatgtcactccggagaatgtattactcttgataaggtgtgtaacatggcaagggactgccgcgattggtcggatgagcccataaaagaatgtggtactaacgaatgtctggataacaacggaggttgttcacatgtgtgtaatgagctgaagatcggatacgaatgcctttgcccagatggctttcagctggtcgcgcagcgcagatgcgaagatatcgacgagtgtcaagatccagacacgtgttcgcaactgtgtgtgaatctggagggaggatacaagtgtcaatgtgaagaaggtttccagttggatcctcatactaaggcatgtaaggcagttggctccattgcctacctcttctttacgaataggcatgaggtccgcaagatgaccctcgatagaagcgaatacactagccttattcctaacctgcgcaatgtggtcgcccttgatactgaagtggcatcaaatcggatttactggtccgatctgtcacaacgaatgatttgctcgacccagcttgacagagcccatggtgtctcctcgtacgataccgtcatttcacgggatatacaggcaccagacggcctggcggtggactggatccactcgaatatctactggactgactccgtcctgggaaccgtgtcagtggcagacactaagggcgtgaagagaaaaaccctgttccgcgaaaacggatcaaaaccccgggcaattgtggtggaccctgtccacggatttatgtactggactgattggggaacgcccgcaaaaatcaagaagggtggactcaatggagtggacatctattcactggtgactgaaaacattcagtggcccaatggtataactttggatctgctgtcggggcgcctctactgggtggacagcaaacttcattcgattagctcgattgatgtcaacggagggaatcgaaagaccatccttgaagatgaaaaacgacttgcccatccattttcgcttgcggtgtttgaagataaggtcttttggaccgatatcattaacgaagcaatcttctcagcaaatagacttaccggtagcgatgtcaacctccttgcagagaacctcctgagcccagaggatatggtgctgttccataacttgacccagcctagaggagtgaactggtgtgaacgcactactttgtcaaacggaggctgccagtacctttgtttgcctgcaccccaaatcaatccccattctcccaaattcacctgcgcatgtccagacggaatgctgttggcccgagacatgcgctcctgtctgaccgaagcagaagcggcggtggctactcaagaaacctccactgtccggttgaaggtgtcctcaaccgccgtgcgtacccagcacaccactactcgccctgtgcccgacacctcccggcttccaggcgcgacgcccggactcacgaccgtggagatcgtgaccatgtcccatcaagcactgggtgatgttgctggcagaggaaatgagaagaagccctcaagcgtcagagccctgtccatagtcctccccattgtgctgcttgtgttcctgtgtctcggggtgtttcttctttggaagaactggaggcttaagaacattaactccattaactttgacaaccccgtgtaccaaaaaaccaccgaagatgaggtgcacatttgtcacaatcaggatggatactcctacccctctaggcaaatggtgtcacttgaagatgatgtggcc

SEQ ID NO: 11066 - DNA, 2580 bp, Artificial Sequence
  derived and/or modified sequence
atggggccttggggctggaaactccgttggacagttgcactgctactagccgcagctgggaccgctgttggggacaggtgcgagagaaatgagtttcagtgccaggatggcaagtgcatcagttacaagtgggtgtgcgatgggagcgccgaatgccaggacggaagcgatgaatcccaagagacctgtctgtccgtaacctgtaagagtggagacttctcctgtggcggccgtgtgaaccggtgtataccacagttctggcggtgtgacggccaggtggactgcgataatggcagcgacgagcagggctgccctccaaagacctgctcccaggatgaattccggtgccacgacggtaagtgcatatcacggcagttcgtttgcgattccgaccgcgattgtcttgatgggtcagatgaagcctcttgtcctgtattgacctgtggcccagcttctttccagtgtaattccagtacatgtattcctcaactgtgggcatgcgacaatgatccagactgcgaggacggatccgatgagtggccacagaggtgtagaggcctgtacgtgtttcagggggattccagtccatgctccgcctttgagtttcactgcctgagcggcgaatgcatccacagctcttggcggtgcgacggcggcccagactgtaaggataagagtgacgaggaaaactgcgccgtggcaacatgtagacccgatgaattccagtgtagcgacggcaactgcatacatggctcaaggcaatgtgatcgggagtacgactgcaaagacatgagcgacgaggtcggctgcgtcaatgttacactatgcgagggaccaaacaagtttaagtgccacagtggagaatgtataaccctggacaaagtttgcaatatggctcgtgactgcagagattggagcgacgaacctattaaagaatgtggtactaacgagtgcctagacaacaacggcggctgcagccacgtttgcaatgagctaaaaataggttatgagtgcctatgtcccgacggcttccagctcgtggcacagcggcggtgtgaggatattgatgagtgccaggaccctgacacttgctcccagctatgtgtgaatctcgaaggtggttataagtgccagtgtgaagaggggttccagttagacccacatactaaggcctgcaaggctgtgggatctattgcctatctcttttttaccaaccggcatgaggtgaggaaaatgacactggaccggtctgaatacaccagtctgatacccaacctacggaatgtagttgcactcgacactgaagttgcctctaatcgaatctactggagtgatctgtcacaacggatgatatgcagcacacagctggatagggcccacggcgtatcttcttatgataccgttatctcacgcgacattcaggccccagatggacttgctgtcgactggattcactccaacatctactggaccgattctgtgctggggactgtttccgtggcagataccaagggcgtgaagagaaagactctattcagggagaacggatctaagccacgggctatcgttgttgaccccgtgcacggctttatgtattggacagattgggggaccccagctaaaataaagaaaggcggcctgaacggagtcgatatatattccttagttaccgagaacatccagtggccaaacggaattactctggatttactttctggcagactgtactgggttgatagtaagctacactctatcagctccatagacgtgaacggtggcaaccgcaaaaccattctagaagatgaaaaacgtctggcccaccccttcagcttagctgtgttcgaagacaaagtgttttggacagacatcatcaacgaagccatttttagcgccaaccggctaaccggtagtgacgtgaacttactggcagaaaatttactgagcccagaggatatggtgctcttccacaacctgactcagccacgcggggtgaactggtgtgaaaggaccactctgagcaacggaggctgccagtatctttgtctgccggctccccagataaacccacactctccaaaattcacctgcgcatgccccgacgggatgctactggctcgggacatgcggagttgcctgacagaagccgaagcagcagtggccactcaggaaaccagtactgtcagactgaaagtgagcagcactgcagtgaggacccagcacactaccacccgtcctgttcccgacacctcccgcctgcctggtgccacacccggccttaccacagttgagatcgtcaccatgtcccaccaggcattgggagatgttgcagggcgcggcaatgaaaagaaaccaagttccgtgcgcgctctgagcatcgtgttaccaattgttctgctggtgtttctgtgtctgggcgtgtttttactgtggaagaactggcgcctgaagaatataaatagtatcaatttcgacaatccagtttatcagaaaaccaccgaagacgaggtacacatttgccacaaccaagacggttatagctaccccagcagacagatggtgtccctagaagacgatgttgca

SEQ ID NO: 11067 - DNA, 2580 bp, Artificial Sequence
  derived and/or modified sequence
atgggcccctggggctggaagttgagatggacggtagcgctgctattggcagccgccggcactgcagtgggggataggtgcgaacgaaatgaatttcagtgtcaggatggaaaatgtatctcctacaaatgggtctgtgatgggtccgccgaatgccaggacggcagtgacgagtcacaggagacatgcttgtctgtcacctgcaagtctggcgacttctcttgcgggggacgggtcaaccggtgcattcctcaattctggaggtgcgatggccaggtcgactgcgacaatggaagtgatgagcagggatgtcctccaaagacctgtagtcaggatgaattcaggtgtcacgacggcaaatgcattagccgacagtttgtttgcgattccgacagagattgtctcgatggatctgacgaggcctcttgtccggtcctgacatgcggccctgcctccttccagtgtaatagcagtacatgcatccctcagttgtgggcttgtgataacgatccagactgcgaggatggctctgatgagtggcctcaacggtgcaggggtctctacgtgttccagggtgattcttccccctgcagcgctttcgaatttcattgtctaagcggtgagtgtatacattcgagctggaggtgtgacggtggaccagactgtaaggacaagagcgacgaggaaaactgtgcggtcgcgacgtgtcgcccagacgagtttcagtgttcagatggcaactgcatacacgggtcccggcagtgtgatcgggagtacgattgtaaggacatgtctgatgaggttggctgcgtgaatgttactttgtgcgagggacccaacaagtttaaatgccattccggggaatgcataacactggataaggtatgcaacatggctagggactgtagagattggagcgatgagcccatcaaagaatgtggaacgaacgagtgcctcgacaacaatggggggtgttctcacgtctgcaatgaactgaagatcgggtacgagtgtctctgtccagatggctttcagcttgtcgctcaaagaaggtgcgaggatattgacgaatgccaggaccccgacacctgctcccaactttgcgtgaaccttgagggtggatataaatgtcaatgcgaggagggattccagttggacccgcacaccaaggcttgcaaagccgtgggctctatagcttatctgttcttcacaaatcgacatgaggttcggaagatgaccctcgataggagtgagtatacaagcctgatacctaacctgaggaatgtggtcgcactggacacagaggtggctagtaataggatatattggagcgacttatcacaaagaatgatctgcagcactcagctggacagggcccacggtgtctcgtcatatgacacagttataagtagggatattcaagctcctgatggcctagccgtggattggattcatagcaacatttattggacggacagcgttctgggcacagtgtcagtcgcagacactaaaggagtcaaacgaaaaaccctctttcgagaaaatggctcgaaaccccgcgcaatagtcgtcgatcccgtgcacggttttatgtattggactgattggggaacaccagccaaaatcaagaagggaggactaaatggggttgacatctattcacttgttaccgagaatattcagtggcccaacggcattaccctcgatctgctgagtgggcggctctactgggtggattcaaagctccattccatttcctccattgatgtaaacggaggaaaccgtaaaaccatcctggaggatgagaagcggctcgcccaccctttttcactcgcagtcttcgaggataaagtgttttggaccgacatcatcaacgaagccatcttcagcgctaaccgactcaccggatcagacgtcaatctgttggcagaaaacctgttgtctcctgaggacatggtgctgtttcataatctcacccagcccagaggggtcaactggtgtgagcgaaccaccctcagtaatggagggtgtcagtatctctgcctccccgctccccagatcaacccacactcaccaaaattcacctgcgcgtgtcccgatggcatgctgttggctcgcgatatgcgctcatgtctcactgaggcggaggccgcagtcgcaactcaagaaacaagtacagtgcggttaaaggtgagcagtaccgctgtccgaacccagcatacaacaacgcggcctgtaccagataccagtagacttccaggcgccactcctgggttaacgaccgtggagatcgtgacaatgagccaccaggctctgggcgacgttgcagggagaggaaacgagaagaaaccgtcgtccgttcgggcccttagcatcgtgctaccgattgtcttgctggtgtttctgtgccttggggtgtttctgttgtggaaaaactggcgtttgaaaaacatcaactcgattaacttcgataaccctgtgtaccagaaaaccacagaggatgaagtgcacatatgccacaaccaggatggatattcttacccatctcgccagatggtgagcctggaggacgacgtcgcc

SEQ ID NO: 11068 - DNA, 2580 bp, Artificial Sequence
  derived and/or modified sequence
atgggcccttgggggtggaagctgcggtggacggttgccctgcttctcgctgccgccgggacggccgtgggcgaccgatgcgaacgcaacgagtttcaatgccaggatggcaaatgcatttcctacaagtgggtgtgtgatggcagcgctgaatgtcaggatggctctgatgagtcccaggaaacctgtctgtcagtgacttgtaagagcggagactttagttgtggaggtagagtgaatcgctgtatcccccagttctggcgatgcgacggtcaagttgactgcgataatggctctgatgagcagggttgtcctccgaagacttgctctcaggatgaatttcggtgtcatgacggcaaatgtattagccggcagttcgtctgcgattcagacagggactgcctcgatggtagcgacgaggcaagctgccccgtgctgacctgcggccctgccagcttccagtgcaacagctctacgtgtatacctcaactgtgggcgtgcgataatgatccagattgcgaagacggctctgatgaatggccccagagatgtcgcggactgtatgtgttccaaggcgacagcagtccatgcagcgcttttgaatttcactgcttgagcggagaatgcatacatagctcttggcgatgtgatggtgggcccgactgtaaggataagtccgatgaggaaaactgcgccgtggccacctgcagaccggacgagttccagtgttcagatggcaattgtatccacggcagcaggcagtgtgaccgagagtatgattgcaaggatatgagtgatgaggtcggctgcgtcaacgtgaccttgtgcgagggacccaacaagtttaaatgtcactctggcgagtgcatcactctcgataaagtgtgtaatatggccagagattgccgcgattggtccgacgagcctatcaaggaatgtggcactaatgagtgcctggacaataatggaggatgctctcacgtctgtaatgagctcaagattggatacgaatgtttgtgcccagacgggtttcagctggtcgcacagaggcgctgtgaggacattgatgagtgtcaggatcctgacacatgttcacagctgtgtgtaaatctcgagggtggctacaagtgccagtgcgaggagggtttccagctggacccacatacaaaagcttgtaaagccgttggctcaatagcctacttgtttttcacaaatagacatgaggtgcgcaaaatgaccctggacaggtccgaatatacatctctcatccccaacctgagaaacgtggtcgcccttgacaccgaggtcgcctcaaacaggatttattggagtgatttgagccagcggatgatttgtagcacgcagcttgaccgagcacacggtgtttcatcttatgacaccgtaatctctagggacattcaggcccccgacggcctggcggtggactggatccatagtaatatctattggacagatagtgttctgggcactgtttccgtcgcggacacaaaaggggtgaaacggaaaaccttgttccgggaaaacggatcaaaacccagggctatcgtggtcgatccggttcatggtttcatgtactggaccgactgggggacgcctgccaagatcaaaaaaggcgggctcaacggcgtggatatctacagtctggtgaccgaaaacattcagtggcccaacggcatcacccttgacctgctgtctggcagactctattgggtggattccaaactccatagtatcagttccatagatgttaacgggggaaacagaaaaaccatcctggaggacgagaagagactggcccacccattttccctcgcagtcttcgaagacaaagtgttctggactgacatcatcaatgaagccatcttttcagctaatagactgacggggtctgacgtcaatctgctcgcagaaaacttgctgtcccccgaggatatggtgctgtttcacaacctcactcagccgaggggcgtgaattggtgtgagcggaccactctgtccaatggggggtgccagtacctgtgcttgcctgccccccagatcaaccctcatagccctaagtttacttgtgcgtgccctgatgggatgctgcttgcgcgggacatgagatcctgccttactgaggcagaggcggctgttgcgactcaagagaccagcacagttcgccttaaggtaagcagtactgccgtgaggacacagcataccactaccagacccgtcccggacaccagccggctgcctggagctacacctggcctgacaacagttgagattgttactatgagccaccaagcattgggggatgtagccggacggggcaacgagaagaagccttcatccgttcgcgcgcttagcatagtccttccaattgtgctgcttgtgttcctttgccttggtgtcttcctcttgtggaaaaactggaggctgaaaaatataaatagcataaatttcgacaatcctgtgtatcagaagacgacggaggacgaggtgcatatatgccacaaccaggatggatatagctatccctctaggcaaatggtttctttggaggacgatgtggcg

SEQ ID NO: 11069 - DNA, 2580 bp, Artificial Sequence
  derived and/or modified sequence
atgggaccgtggggatggaagctgcggtggaccgtggcactgctcttggccgccgccggaacggcagtcggcgacaggtgcgagagaaatgaattccagtgtcaggacggtaaatgtatcagttacaaatgggtgtgcgacggtagcgccgaatgccaagacggatcggacgaatcccaagaaacttgtctgtcagtgacctgcaagagcggagacttttcctgcggagggagagtgaatcgctgcatcccgcagttctggcggtgtgacggccaggtagactgcgataacgggagcgatgaacaggggtgcccgcctaaaacctgcagccaggatgaatttcggtgccacgatggcaagtgcatctcacgacaattcgtttgcgactcggacagggattgtctcgatggatcggatgaggcaagctgtccggtgcttacgtgcggcccggcttcgttccagtgcaattcgagcacctgtatccctcaattgtgggcgtgtgataacgacccagactgcgaggacggaagcgatgagtggccgcaaaggtgccgcggactgtacgtgttccagggagacagctcgccgtgttccgcgttcgaatttcactgcctgtcgggagaatgcatccatagctcctggagatgcgacggcggaccagattgcaaagacaagtccgacgaggagaactgtgctgttgcgacttgtcgcccggatgagtttcagtgctcggatggcaattgcatccacggttcccgccaatgtgaccgggagtacgactgtaaagatatgtcggacgaggtcggatgcgtgaacgtgactctgtgcgagggaccaaacaagttcaagtgccactcaggcgaatgcattaccctcgacaaagtgtgcaacatggccagagattgtcgggactggtcggatgaaccgatcaaagaatgcggaactaatgagtgtcttgacaacaatggcggatgttcgcatgtctgcaatgaactgaagatcggatacgaatgcctctgcccagacggtttccaattggtcgcccagcggcgttgcgaggacattgacgagtgccaagaccccgacacgtgttcccagctgtgtgtgaatcttgaaggtggatacaagtgccagtgcgaagagggattccagttggatccgcatactaaggcttgcaaagcagtgggttccatcgcgtacctgtttttcactaaccgccacgaagtccgcaagatgaccttggaccgctccgagtacacttcgctcatacctaaccttaggaacgtggtcgccttggatacggaagtggcctccaaccggatctactggtccgatctgtctcaacgaatgatctgctcaacccagctcgacagagctcatggggtgtcgtcctacgataccgtgatctcgagagatatccaggcccccgacgggctggcagtggactggatccattcaaacatctactggaccgactcagtcctgggaaccgtctcagtggccgacacgaagggtgtcaagcgcaagacccttttccgggaaaatggctcaaagcctcgggctatcgtggtggaccccgtccacggattcatgtattggactgattggggcactcccgcgaagatcaagaagggaggcctcaacggggtggatatctactcccttgtgaccgaaaatattcagtggccaaatgggattaccctggacctgctgtctggccgcctgtactgggtcgatagcaagctgcatagcatttcctcaatcgacgtgaatggaggaaaccggaaaaccatcctggaggatgaaaagcggctggcacaccctttcagcctcgcagtgttcgaagataaggtcttttggaccgacatcatcaacgaggccatcttctcagctaacaggttgaccggaagcgacgtgaacctcctcgcggagaacctgctttcacctgaagatatggtgctcttccataacctgactcaaccacgcggggttaattggtgcgaaagaactactctgtccaatggaggatgccaatacctgtgcctgccggcgccacagatcaacccgcactcccccaagttcacctgcgcatgcccggacggaatgctgctggcgcgcgacatgcgctcctgcctgactgaagccgaagcggccgtggccacccaggagacttcgaccgtgagactgaaggtgtctagcactgccgtccgcacccagcatactaccactcggccggtcccggacacgtcccggctcccaggcgcgacccccggcctgactaccgtggagatcgtgactatgtcgcaccaggctctcggagacgtcgccggtagagggaacgaaaagaaaccatcaagcgtgcgcgccctgtccatcgtcctgcctattgtcctcctcgtgtttctgtgcctgggcgtgttcctcctctggaagaactggcgcctgaagaacatcaactcgattaatttcgataacccggtgtaccaaaaaaccactgaagatgaggttcacatctgccacaaccaagatggatattcgtacccatcgaggcagatggtgagcctcgaggatgacgtggct

SEQ ID NO: 11070 - DNA, 2580 bp, Artificial Sequence
  derived and/or modified sequence
atgggaccatgggggtggaagctcagatggactgtggcgctcctgcttgcggccgctggcactgccgtaggagatagatgtgagaggaacgaattccaatgtcaggatggtaaatgcatcagctacaaatgggtgtgcgacggaagcgctgagtgtcaagatggtagcgacgaatcgcaagaaacgtgcctgtccgttacttgtaagtcaggagacttcagctgcggcgggcgagtcaacagatgcataccgcaattctggaggtgcgatggacaggtggactgcgacaatgggtccgacgagcaaggatgcccgcctaagacgtgctcacaggacgagtttcgctgccacgatggaaagtgcatttcccgccagttcgtgtgtgacagcgaccgcgattgcctcgacggctccgacgaagcatcgtgtcctgtgttgacctgcggaccggcatcatttcagtgcaactcctctacctgcatcccccagctgtgggcgtgtgataacgaccctgactgcgaggacgggtcggatgaatggcctcaacggtgcagaggactgtacgtgtttcaaggcgactcatccccatgcagcgcgttcgagttccattgcctctccggtgagtgcatccactcgtcatggcgctgcgatggagggcccgactgcaaagataagtcagacgaagaaaactgcgcagtggccacctgtcgcccagacgaattccagtgctctgacggaaactgcattcacggatctcggcaatgcgatcgagaatacgactgtaaggacatgtccgatgaagtgggctgtgtcaatgtgacgctgtgtgagggaccgaacaagttcaagtgccactcaggcgaatgcatcactttggacaaggtttgcaatatggctcgggattgccgcgactggtcggacgaacccatcaaagaatgcggaaccaatgaatgtctggacaacaatggaggctgcagccacgtgtgtaacgagctgaagatcggctacgaatgcctgtgcccagatggttttcagctcgtcgcgcagagaagatgtgaggacatcgatgaatgccaggaccctgacacttgttcgcagctttgcgtcaacctggaaggtgggtacaaatgtcagtgcgaagaaggatttcagttggatccacacactaaggcgtgtaaggcggtgggctccatcgcttatctgttcttcacgaataggcacgaggtgcggaaaatgactctggaccggtcagagtacacctccttgatccctaatctgcggaacgtcgtggctctggacaccgaagttgcctcgaatagaatctactggtcagacctgtcccagcggatgatctgctcaacccagctggatagggcccacggggtgagctcatatgacacggtaatctcgcgggacatccaggcccccgatggacttgctgtggactggatccatagcaatatctactggaccgattcagtgctgggcaccgtctctgtagccgatactaagggagtgaaaagaaaaactctgttccgggaaaatgggagcaaaccacgtgccattgtcgtggatccggtgcatggtttcatgtactggactgactggggaacgccggccaagataaagaagggcggactgaacggagtggacatctactcgctggtgaccgagaacatccagtggccgaacggaattaccctggacctcctttcgggtagactctactgggtcgactccaagctccattcaatcagctccatcgatgtgaatggcggtaaccgcaagactatcctggaggacgagaaacgcctcgcccatccgttcagcctggccgtgttcgaggataaggttttctggactgatatcatcaacgaggcaatcttcagcgcgaaccggctcacggggtccgatgtgaacctgctggctgagaacctgttgagcccagaggacatggtactgttccataacttgactcagccccgcggagtcaattggtgcgaaaggaccaccctctccaacggtgggtgtcaatacttgtgccttcctgccccgcagattaacccgcacagccccaagttcacctgtgcgtgccccgatggaatgctgctcgcacgtgacatgcggtcgtgcctcaccgaagccgaagctgcggtggcgactcaagaaacttcaaccgtccgcctgaaagtgtcgtcgaccgcggtgcgcactcagcacacgaccacccggccggtgccagataccagccgcctcccaggagccactccggggctgaccaccgtggaaattgtcactatgtcgcatcaagctctgggtgacgtggcaggccgcggaaacgagaagaagccgagcagcgttcgggcgttgagcatcgtcctcccaatagtgctgcttgtctttctctgcctgggtgtctttttgctctggaagaattggcgcctgaagaacatcaactcgatcaatttcgataacccggtttaccaaaaaaccactgaagatgaggtgcacatctgtcacaatcaggatggatattcgtacccttccagacagatggtgtcgctcgaggacgacgtggcc

SEQ ID NO: 11071 - DNA, 2580 bp, Artificial Sequence
  derived and/or modified sequence
atgggtccttggggttggaagctgcggtggaccgtggcactccttcttgcggctgcaggcaccgccgtgggagacagatgtgagagaaatgagtttcaatgccaggatggtaagtgcatttcgtacaaatgggtctgcgacggctctgcagaatgccaagatgggtcggacgaatcgcaagagacttgtctcagcgtgacttgcaaatccggagatttttcgtgtggtggaagagtcaacaggtgtattcctcagttctggcgctgtgatggtcaggtcgattgtgacaacggctcggatgaacagggatgccctcccaagacctgttcgcaagacgagtttcgatgtcatgatggcaagtgtatctcgcgccagtttgtctgcgactccgatagagattgtcttgatggctctgatgaggcctcctgtcctgtgcttacttgtggtcccgcatcctttcaatgcaactcctctacctgcatcccacagttgtgggcgtgcgataatgatccagattgtgaggacggatcagacgagtggccgcagcggtgtaggggactgtacgtgtttcaaggagactcgtccccatgttcggcatttgagtttcactgcctctccggggaatgtattcattcttcctggcgttgcgacggaggccctgattgtaaagataagtccgacgaggaaaactgcgcagtggccacgtgtagaccagatgagtttcagtgttcggatggcaactgcattcatggcagccggcaatgtgatagggaatacgactgtaaggatatgtcagatgaggtcggctgcgtgaacgtgacgctgtgcgaaggcccaaacaaattcaaatgtcacagcggtgaatgtattaccctggacaaggtctgtaacatggcccgtgactgtcgcgattggtcggacgagcccattaaggaatgcggtaccaatgaatgcctcgataacaatggcggatgctcgcacgtgtgtaacgaactgaaaatcgggtacgagtgtctttgtccggacggttttcagttggttgcacagcgcaggtgtgaagatatagatgagtgtcaagatcccgatacttgctcacaactgtgtgtcaacctggagggtggctacaaatgtcagtgtgaggaagggtttcaactggaccctcataccaaggcatgtaaggcagtggggtccatcgcttacctcttctttaccaaccgccatgaagtccgcaagatgaccctcgaccgatctgaatacacgagcctgatccctaacctgaggaatgtcgtggcacttgatactgaggttgcaagcaaccgtatctactggagcgatctcagccaaaggatgatttgcagcactcagcttgatagagcacacggagtgtcctcatatgataccgtcatctcgcgggacattcaggctcccgacggtctggcggtggactggatccattccaacatttactggacggacagcgttctggggaccgtgagcgtggcagatactaaaggggtgaagcgaaagactcttttcagggaaaacggatcgaagcccagggccatcgtggtcgatcctgtgcacggttttatgtactggaccgattggggcaccccagccaagatcaagaaaggtggacttaacggagtcgacatatactcgctcgtgactgagaacattcagtggcctaacggcattactctcgacctgctttcaggccggctctactgggtcgactcaaagctccattcaatctcgtcaatagacgtaaatggcggaaaccgcaagacgattctggaagatgaaaagagattggcgcatcccttttcgcttgccgtgttcgaggataaggtgttttggaccgatatcatcaacgaagcaatcttttcagcaaatcggcttaccggatccgatgtgaacctgcttgcggaaaacctgctctcacctgaggacatggtgctgtttcataacctgacccaaccgaggggggtaaattggtgtgaaagaactaccttgtcgaatggtgggtgtcaatacctgtgccttcctgcgccgcagattaaccctcactcaccaaaattcacgtgcgcgtgtccagacggtatgctgctcgcacgagacatgagatcctgcctgactgaggcagaagccgccgtggccacgcaggaaactagcactgtgagacttaaggtcagctcgaccgccgtcaggacgcagcataccaccactcggcctgtgccagatacgagccgacttccaggagcaactcctggactgactaccgtggagatcgtgacgatgtcgcaccaagctctcggtgatgtggcaggacgagggaatgagaagaagccttcgtccgtccgggcactctcaatcgtgcttccaattgtgctgcttgtgtttctgtgtttgggcgtctttttgctctggaagaattggcgactcaagaacattaactcaattaacttcgacaaccccgtgtaccaaaagactaccgaagatgaggttcatatttgtcataaccaggacggttacagctaccctagccggcaaatggtgtcgctggaggacgacgttgca

SEQ ID NO: 11072 - DNA, 2580 bp, Artificial Sequence
  derived and/or modified sequence
atgggcccatggggatggaaactgaggtggactgttgccttgctgcttgccgctgcggggacagcagtcggtgatcggtgtgaacggaacgaatttcagtgccaggacgggaaatgcatttcctacaaatgggtgtgtgacggttctgctgagtgtcaggacgggagtgatgagagccaggagacctgtctgtccgtcacgtgtaaatcaggagatttcagctgcgggggacgcgtgaatcgatgtattcctcagttctggcgctgtgatggtcaggtcgactgcgataacggcagcgatgagcagggatgcccccctaaaacttgctcccaggatgagttcaggtgccacgatggcaagtgcattagcagacagttcgtctgcgactccgatagagattgcctcgatggctccgacgaggcttcctgtccagtactgacatgcggccctgcaagttttcaatgtaatagttctacctgtattccacagctgtgggcatgcgacaatgacccagattgcgaggatggtagtgatgaatggccacaaaggtgcaggggattgtatgtgttccagggagattcctcgccttgctccgccttcgaattccattgcctaagcggtgagtgcatccatagcagctggaggtgtgacggcgggcctgactgtaaggataagagcgatgaagaaaattgcgcagtggccacttgcaggcctgatgaattccagtgttctgatggcaactgcatacatgggtcccggcagtgtgaccgggagtatgactgcaaggatatgagtgatgaggtaggttgcgtgaatgtaaccttgtgcgaaggaccgaataaatttaaatgccactccggagaatgcatcacattagacaaggtctgtaatatggctcgggattgtcgggactggagcgacgaaccgattaaggaatgcggcactaacgaatgtttagacaacaatggtggctgctcccatgtgtgtaatgaactaaagatcgggtacgagtgcctgtgtcccgacggttttcaactggtcgcacagcggaggtgtgaagatattgacgaatgccaggaccctgacacttgttcgcaactgtgtgtgaatttggagggagggtacaagtgtcagtgcgaagaggggtttcagctcgacccacacacaaaggcctgcaaggcagtcggctctattgcttatctgttctttactaaccgccacgaggtgcgaaaaatgacacttgatcgtagcgagtatacctccctgattcctaacctccgcaacgtggtggccctggatacagaagttgcttcaaatcgtatttactggagtgacctttcccaaagaatgatatgtagcactcagctggatcgggcccatggggtctccagttacgacactgttatctcaagggacattcaagcgccagacggccttgccgtggattggatccatagcaacatttactggaccgatagtgtgctcggaaccgtgagtgtggccgacaccaagggggtcaagcggaagacactgtttcgggagaatgggtcgaagcccagagctatagtggtcgacccagtccacggcttcatgtattggaccgattggggcacgcccgccaagatcaagaagggaggtcttaacggggtagatatatactcccttgtgaccgagaacattcagtggcccaacggaattactctcgacctactgtcgggacggttatactgggtcgacagtaaactgcatagtatcagctccatcgatgttaatggaggaaacagaaagaccatcttagaggatgaaaaaaggctggctcacccatttagtctcgcagtgtttgaggacaaggtgttttggacggacatcattaacgaggccatcttctcggccaacaggttaaccggaagcgatgtaaacttgttagccgagaatctgctgagcccagaggacatggtgctgtttcacaacctcacacagccccggggagtgaattggtgcgagaggactaccctgagtaatggcgggtgccagtatctttgtctgccagcacctcaaatcaacccccacagcccaaagttcacctgcgcctgtccagacggaatgttgttagctcgtgatatgcgcagctgtctgaccgaagctgaagccgccgttgccacccaggaaacctccacagtgagattgaaggtgtcaagtacagccgtgcgaacccagcatactacaacccgccccgtacctgatacaagtcggctgccgggcgcaaccccgggcttaacaactgtggagatcgttacaatgtctcaccaggccctaggtgacgtagctgggagaggcaacgaaaagaagccttccagcgtaagagctctttccatcgtgctgcccatagtgttgcttgtctttctgtgtctcggggtgttccttctgtggaagaactggagactgaagaatattaattctataaacttcgataacccagtatatcagaagacaaccgaggatgaggtgcacatatgtcacaatcaggatggatacagttacccatcccgccagatggttagccttgaagatgacgtggcc

SEQ ID NO: 11073 - DNA, 2580 bp, Artificial Sequence
  derived and/or modified sequence
atggggccttggggatggaaattgagatggacagtagccctcttactcgctgcagcagggactgctgttggtgacagatgcgaacgcaatgaatttcaatgtcaggatggtaaatgtatttcctacaagtgggtttgtgacggaagtgctgaatgccaggacggatccgacgagagtcaagagacttgtttaagcgttacttgtaagtccggtgattttagttgcggtggacgcgtgaataggtgtattccacagttttggaggtgtgatggtcaagtggattgcgataacggatcagacgaacaggggtgccctcctaagacttgctctcaagatgagttcaggtgtcacgacggaaagtgcatttctaggcaatttgtttgcgatagcgatagggattgcttggatgggtcagatgaagccagctgcccggtccttacttgcggccctgccagcttccaatgtaactcgtcgacttgcatcccccaactctgggcttgtgataacgatccagattgtgaagatggtagtgacgagtggcctcagcgttgcagaggactttatgtattccaaggcgattcttcgccatgttcagctttcgaatttcattgccttagtggagaatgcattcattcctcatggagatgcgatgggggtcccgattgtaaagacaagtcggatgaagagaattgtgctgtggcaacctgtagaccagatgaatttcagtgctccgacggtaattgcatccatggttccagacagtgtgatcgtgagtatgactgtaaagacatgtctgatgaagtcggttgtgtcaacgttaccctttgtgaaggcccaaataagtttaagtgtcactccggagagtgcattacattggacaaagtttgcaatatggctagggattgtagggattggtccgacgaacctatcaaggagtgcggaacaaacgagtgcttagataacaacgggggttgtagccatgtatgtaacgaactgaaaataggatatgagtgcttgtgtccagatggctttcagcttgttgcacaacggcggtgtgaggatatcgatgaatgccaagacccggatacttgctctcaattatgcgttaatctggaaggggggtacaagtgtcagtgcgaggagggcttccagctagatccacatacaaaagcatgcaaagctgtaggaagtattgcttatcttttttttacgaaccggcacgaggtacgcaagatgactcttgacagatccgagtacacatccctaatcccaaatttaagaaatgtcgttgctctagacactgaggtggccagcaatagaatctattggtccgatctttctcaaaggatgatttgctcgacacaacttgacagagctcacggtgtgagttcgtatgacacggttatcagtagggatatacaagctccagatggcctggccgttgattggatccattctaatatttactggactgatagtgtgttgggaactgttagtgtggcggataccaagggagtaaagcggaaaactctttttcgcgagaatggttccaagcctagagcgattgttgtcgatcctgtgcatggctttatgtactggaccgattgggggactccggcaaaaattaagaagggcggattgaatggcgtcgacatctacagtctggttacggagaacatccagtggcctaacggcattactctagatctcctatcaggtcgtttatactgggttgattctaagcttcacagtatctcctccatcgacgtaaacgggggaaacagaaaaaccatattggaggatgaaaaaagactcgcacatcctttcagtctcgcagtttttgaggataaagtgttttggacagacatcataaatgaagctattttctccgccaataggctcacaggtagtgatgtgaatcttttggcagaaaatttactatcacctgaagatatggttttgtttcataaccttactcaaccaaggggggtcaattggtgtgaaaggaccactctctcgaacggtggatgccagtacttgtgtcttcctgctccacagattaacccccactcgccaaaattcacatgtgcttgtccagacggaatgcttctagcacgcgatatgcgtagttgcttgacagaagctgaagcggctgttgccacccaagaaacatctactgttcgattgaaggttagttccaccgctgtccggacgcaacacacgacgaccaggcccgttcctgatacaagtaggttgcctggtgccacccccggacttactacggtggaaatcgtgactatgtcgcatcaagcactaggagacgtagcaggtagaggaaacgaaaagaaaccatcttcagtgagggcgttatcgatcgtgttgcctatcgttctgttggtgtttttgtgtctgggcgtttttttactctggaaaaattggagacttaagaacatcaatagtattaatttcgataacccagtgtatcaaaagacaactgaggatgaggtccatatttgccataaccaggatgggtatagctatccatcccgccaaatggtgtcattggaagatgatgtagct

SEQ ID NO: 11074 - DNA, 2580 bp, Artificial Sequence
  derived and/or modified sequence
atgggtccttggggctggaaactcaggtggactgtcgccctgcttctcgccgccgcagggaccgccgtgggcgataggtgtgagcggaacgaatttcagtgtcaggatgggaaatgtataagctataagtgggtgtgcgatggaagtgccgagtgccaggacggtagcgatgaatcgcaggaaacatgcctgagtgtgacctgtaagtccggagacttctcatgcggaggacgcgttaaccggtgcataccccagttctggagatgcgacggtcaagtcgactgcgacaatggatcagatgagcaaggctgtcctcctaaaacctgctctcaggacgagttcaggtgccatgatgggaagtgtatttctcggcagttcgtatgtgattcagaccgggattgcctagatggttcagacgaagcctcctgtccagttctgacctgtgggccagctagctttcagtgtaacagctcaacatgcatccctcaattgtgggcatgcgacaatgatcccgactgcgaggatgggagcgacgagtggccacagcggtgtcgggggctgtacgtgtttcagggggattcttccccatgttcagcgtttgagtttcactgtttatctggagagtgcatccacagtagctggcggtgtgacgggggaccggactgcaaggacaagagcgacgaggagaattgtgcagtggccacgtgccgtcccgatgagtttcagtgttccgacggcaactgtatacatggtagtaggcaatgcgaccgggagtacgattgtaaagatatgtcagacgaagtcggctgtgttaatgtcactctgtgcgagggccccaataagttcaagtgtcactcaggtgaatgtattacccttgacaaggtgtgcaacatggcccgtgattgtcgagattggtcagacgagcccatcaaggagtgcggaactaatgagtgcctggacaataatggcggatgctcgcatgtatgcaacgagctcaaaataggttatgaatgtctgtgtcccgatggatttcagctagtggcacagaggcggtgtgaagatattgatgaatgccaggaccctgacacctgtagccagctgtgcgtaaacctggaaggcggctacaagtgccagtgtgaagaggggttccagttagacccgcacactaaggcatgtaaagccgtaggttcaatcgcgtacctttttttcacaaacagacacgaagtcagaaaaatgaccttagaccgctctgagtacacctctctcataccaaacctaaggaatgtagtcgctcttgacaccgaggttgctagcaatagaatctactggtccgatctatctcagagaatgatttgctccacgcagctggatcgcgcacacggggtgtccagttatgatacagttatatcgcgcgacatacaggcacctgacggtctcgccgttgattggatccactctaacatttactggactgactccgtgctgggtaccgtgagcgtggccgacacaaaaggtgtgaagagaaagaccctgttcagagaaaatggttctaaacccagggcaatcgtcgtggatccagtgcatggtttcatgtattggactgactggggtaccccggctaagatcaagaaaggcgggttgaacggtgtagatatatattctttagtcacagagaacattcaatggcccaatggcattactctggacctgctgagcgggcgactgtactgggtcgactccaaattgcactctatctcaagcatagacgtgaatggcggtaataggaaaacgattctcgaggacgaaaagcgcctcgcccatccgttcagcctggccgtcttcgaggacaaggtattctggactgatatcataaatgaggcaatattctcagcaaaccgacttaccggttctgacgtcaacctgctcgccgagaatttactctcccctgaagatatggtgctcttccataacttgacccagccacggggcgtgaattggtgcgagcgcacaactctgtccaatggaggttgtcagtacctctgtctaccggcgccccagatcaatccccactctcctaagttcacttgtgcttgcccggacggtatgttactggcgcgggacatgaggtcatgtttgaccgaggcagaggccgctgtggccacccaagaaacaagcaccgtgcgactgaaagtttctagtactgcagtgagaacccagcatacaacaaccagaccagtgcccgatacaagcagattacctggggcgactcccggtcttaccacagtggaaatcgtcaccatgagtcaccaggccctgggtgacgtggccgggcgcgggaatgaaaagaaaccgtcatccgtgagggcactttctattgtgttacctatagtccttctcgtgtttctgtgtctgggcgtgttcctgctatggaaaaactggcggcttaaaaacataaattcgatcaatttcgacaatccagtgtatcagaagaccacagaggacgaggtgcacatttgtcacaaccaagatggttatagctacccatctcggcagatggtgagtctcgaagatgatgtagct

SEQ ID NO: 11075 - DNA, 2580 bp, Artificial Sequence
  derived and/or modified sequence
atggggccatggggatggaaattgcggtggaccgtggctcttctcttggccgccgctgggacggccgtgggggaccggtgtgagagaaatgaattccagtgtcaggacggtaaatgcatcagctacaagtgggtgtgtgatggcagtgccgagtgccaggatggctctgatgagtcccaagagacatgcctgtccgttacctgtaagtctggggactttagttgtggcggacgggtgaaccgttgcatccctcagttctggcgctgtgatggtcaggtggattgcgataacggctctgatgagcagggttgtcctccgaaaacctgtagtcaggacgagtttcgatgtcatgatggaaagtgtatctcccgccagttcgtgtgtgatagcgatcgggactgtctggacgggtctgacgaggcaagctgtccggttctcacatgtggccctgcgtcctttcaatgtaattcaagcacctgtatcccgcagctctgggcatgcgataatgatcccgactgtgaggatggatccgatgagtggccgcagcgatgccggggcctttacgtctttcagggagactcaagcccatgttctgcctttgagttccactgtctgtccggcgagtgcatccactcatcctggcggtgtgacggcggccctgattgtaaagacaaatcagacgaggagaactgcgctgtcgccacctgccggcctgacgagttccagtgttcagatggcaactgcatccatgggtcccgtcaatgtgaccgcgagtacgactgtaaggatatgtccgatgaagtcgggtgcgtaaacgtcactctctgcgagggtcccaacaagtttaaatgccacagcggggagtgtatcaccttggataaggtctgtaacatggctcgagattgcagagactggtctgatgagccgattaaggaatgcggtaccaatgagtgcctggataataatggtgggtgttcacacgtgtgtaatgaactgaagatcggatacgagtgtttatgtcctgacggatttcagctcgtggctcagcgccggtgcgaagacattgatgagtgccaagacccggacacatgtagccagctctgtgtgaatttggagggaggttacaagtgtcaatgcgaagaaggtttccaactcgacccacatactaaggcctgcaaggccgtggggtctatcgcctacctcttctttaccaaccgccacgaagtcaggaagatgacccttgaccggagcgaatatacctccctcattcccaatttgagaaacgtagttgccctggacaccgaagttgcgtcaaataggatctactggagtgatctaagccaaagaatgatctgcagcacgcaactggacagagcgcacggggtatccagttatgataccgtcatctcccgcgacatccaggctcccgacggtctcgccgtggactggatccatagcaacatctattggaccgattcagttcttggaacagtgtctgtggcagataccaaaggcgtgaagaggaagaccctgttcagggagaatggttccaaacctcgagccatcgtagtggacccagtgcacggatttatgtattggaccgattggggcacacctgccaaaataaagaagggaggcctgaacggagtggacatttactcactggttacagaaaacatccagtggcccaacggcattacccttgacctattatccggtcgcctctattgggtggatagcaagctccactctatcagttcaatcgacgttaacggagggaaccgaaaaacgatcttggaggacgagaaaagactcgctcaccccttctccctcgccgtatttgaagacaaggttttttggaccgacatcattaatgaggcaatttttagcgccaacagacttactgggtccgacgtcaacctgctggcagagaatttgctaagtccagaagatatggtcctattccacaatttaacgcaacctagaggggtgaactggtgcgaacgcactaccctgtccaacggaggctgccagtatctgtgcctgccggctccacagataaatccacacagccctaaattcacatgtgcttgtcccgatggaatgctgctggcacgcgatatgagatcttgtctgacagaggccgaagcagcggtggctacacaggagacatccactgttcggctgaaggtgtcctctaccgccgtgcgaacacagcacaccactacccgtcctgtgcccgacacatcccgcttacctggtgcaaccccaggcctgaccacagtggaaattgtcacaatgagccaccaggcccttggagacgttgcaggacgtggaaatgaaaagaagcccagttcagtcagagccttaagcattgtgctgcccattgtcctgctcgtgttcctctgtctcggggtattcctattgtggaagaattggcgacttaagaacattaacagtattaatttcgacaacccagtttaccagaagacaacagaggatgaggtgcatatatgccacaatcaagacggctactcttatccgtcaaggcagatggtgtctcttgaagatgatgtagcc

SEQ ID NO: 11076 - DNA, 2580 bp, Artificial Sequence
  derived and/or modified sequence
atgggtccgtggggctggaagctcagatggacagtggcgctattgttggccgccgctggcacggcggtcggtgataggtgcgagaggaacgagtttcagtgccaggacgggaagtgcatctcctataagtgggtctgcgacggcagcgccgaatgccaggatggcagcgacgagtcgcaggagacctgcctatccgtcacgtgcaagagcggcgatttttcctgtggcggccgtgtgaaccgatgcatcccccaattttggcgatgtgatggacaggtcgactgcgacaacggctcggatgagcaaggatgcccccccaaaacatgtagccaagacgaattccggtgccatgacggtaagtgtatcagtcgccagttcgtctgcgactcggatagggactgtctagatggctcagatgaggcctcgtgcccggtccttacgtgcggccccgcctcatttcaatgcaactccagcacatgcattccacagctgtgggcgtgcgacaatgatccggactgtgaggacggatccgacgagtggccgcagaggtgtcgaggcctgtatgtgttccaaggagactcgtcgccatgctcggcctttgaatttcactgcttgtccggagaatgcatccatagcagctggcgatgcgacggcggccctgattgcaaggacaagagcgatgaggaaaactgcgcggtggcaacgtgccgcccagacgaatttcagtgctcggatggcaactgcatccacggctcgcgtcagtgtgaccgcgaatatgactgcaaggacatgtcagacgaggtcggctgcgtcaacgtgacactgtgcgagggccccaataagttcaagtgccactccggagagtgtatcacattagataaggtttgcaacatggcccgcgattgccgcgactggtcggacgagccaatcaaagagtgtggcactaatgagtgcctggacaataatggcggatgttcccacgtgtgtaacgagttgaagattggttatgagtgcttgtgtccagacgggttccagcttgttgctcagaggagatgcgaagatatcgatgagtgccaagacccggacacatgtagtcaactctgtgtcaacctggagggcggctacaaatgtcagtgcgaagagggatttcagttggatccgcataccaaggcatgcaaagctgtcggctcgatcgcgtacctattttttacgaaccgtcacgaagtccgtaaaatgactttggatcgctccgagtacacatctctaatccccaaccttcgcaatgtggtcgcgctggacactgaggtagccagcaataggatctactggagcgatttgtcccagcgcatgatatgctcgacacaattggatagggcacacggcgtcagttcgtacgacaccgtgatttcgcgcgacattcaggccccagatggccttgccgtcgattggatacattctaacatctactggacagactccgtgctaggcacggtaagcgtcgccgatacgaagggagtgaagaggaaaaccctgttccgcgagaacggcagcaagcctcgcgctatagtcgtggatccggttcacggattcatgtattggacggactggggcactccggcaaagatcaaaaaaggcggactgaatggtgtagatatttatagtcttgtgactgagaacatccaatggcccaatggcataaccttggacctcctctcaggccgcctgtattgggtagacagcaaactgcacagcatttcaagtatagatgtgaacggaggaaaccgtaagactatcctggaggacgaaaaacgtctcgcccacccctttagccttgctgtgttcgaggacaaagttttctggacagatataatcaatgaggccatcttcagcgctaatcgcctcacaggctccgatgtgaatctgctagctgagaacctactgtccccggaggatatggtcctgtttcacaacctaacccaaccacgtggtgtgaactggtgcgagaggaccaccctgtccaacggaggctgccagtacttgtgccttccggcaccccaaatcaatccccatagcccaaagtttacatgcgcgtgccccgatggtatgctgcttgccagggacatgaggagctgcctgaccgaggcggaggccgccgtggccacccaggaaacatcgaccgtccgcctgaaagtaagtagcaccgcggttaggacgcaacacaccacaacccgtcccgtccccgacaccagccgtttgcccggcgccacgcccggtctgactaccgttgagatagtgacaatgagccaccaagcgttgggagacgtagcaggacgaggaaacgagaagaaaccgagctcggtaagagccctgagcatagtactccctatagtgctactggtgttcctgtgtctgggggtgttcctgctgtggaagaactggcggttgaagaatattaacagtatcaacttcgacaacccagtgtaccaaaagaccacggaggacgaggtgcacatctgccacaatcaggatggttatagttatccgtcccgccagatggtgtctctcgaagacgacgtggcc

SEQ ID NO: 11077 - DNA, 2580 bp, Artificial Sequence
  derived and/or modified sequence
atgggcccctggggttggaaacttcgctggactgtggcgctgctgctggccgccgcaggtacagcagttggagataggtgcgaacgtaatgagtttcagtgccaggatggaaaatgcatcagctacaagtgggtgtgcgatggtagtgcggaatgtcaggacggatctgatgaaagccaagaaacctgtctctccgtgacttgtaaatccggagacttctcttgcggcggtagggtgaaccgatgtataccccagttctggagatgcgatggacaggttgactgcgataacggttctgatgagcaagggtgtccacccaagacctgctcacaggacgagtttcggtgccacgacggaaaatgtattagtagacagtttgtgtgcgactctgaccgtgactgcttagatggaagtgacgaggcgtcctgccccgtcttgacctgcgggcccgctagttttcagtgcaacagctccacgtgtattccccagctctgggcctgcgataacgatcctgactgtgaagacggcagcgatgagtggcctcagcggtgccgggggctgtacgtgtttcaaggggacagtagcccctgcagcgcatttgaatttcattgcttaagcggcgagtgtatccactcatcctggaggtgcgatgggggcccagactgcaaagacaagagtgatgaggagaattgcgccgtagcgacatgccgtcctgatgaatttcagtgcagcgatggcaactgcatccacggcagcaggcagtgcgacagagagtatgactgtaaggacatgtctgacgaggtggggtgtgttaatgtgacattgtgcgagggtcccaacaaattcaagtgccactcaggggagtgtattaccttggacaaggtgtgcaatatggcccgagattgccgcgactggtctgatgagcccattaaggaatgtggcacaaatgaatgtctggataacaacgggggctgctctcatgtctgtaacgaacttaaaataggatacgagtgtctctgccccgatggtttccagttggtggcacagcggcggtgtgaggacattgatgagtgccaggatcccgacacctgctcccagctctgtgtcaatctagaaggggggtataaatgccaatgtgaggaaggctttcagctcgacccacacacaaaggcctgtaaggctgtgggcagtatagcatacctgttctttactaaccggcacgaggtccgcaagatgacgttagacagaagcgagtatacaagcctcatccccaatctgcggaacgttgtggcacttgacacagaagttgcgagcaatagaatctattggagtgatctgagtcagagaatgatttgttctacccagctggaccgggcccatggggtaagtagctatgacacggtcatcagtagagatatccaagccccggacggacttgccgttgattggatccactccaatatatactggacagattctgttcttgggaccgtctcggttgccgacaccaagggagttaagcgcaagaccctgttccgcgagaatgggtctaagccaagagcgatagtggttgacccggttcacggcttcatgtactggactgattggggaacacctgccaagattaagaaaggggggctaaacggggtagatatctattctctcgtgactgagaacatacaatggcctaacgggatcactctggacctcctaagcggtcgactctactgggtggattcgaaacttcattcaatcagttccatagacgtgaacggcggaaaccgaaagactattttggaagatgagaagcgccttgcccatcccttctcactggcggtatttgaggacaaggtattctggacagacataatcaatgaagccatattttcagcgaatcgcttaacaggttcggacgtgaacttgcttgccgaaaatttactgagtcccgaggatatggttctgtttcacaatctgacacaaccccgaggagtcaattggtgcgaaaggactacgttatccaacggaggctgtcagtacttatgtcttccggctcctcagatcaatccccattctcccaaattcacctgtgcctgccccgatggcatgctcctggcaagagatatgcggagttgcttgacagaggcagaggcagcagttgcaacacaggagaccagcactgtaaggctgaaagttagttccactgccgtgcgtactcagcatactaccactcgccctgtccccgacaccagcagactcccaggagcgactcccggactgactaccgtggagattgtgaccatgtctcaccaggctcttggagacgttgcaggccggggtaacgagaaaaaaccttctagcgttagggcccttagtatcgtccttcccattgtactcttggttttcctatgcctgggcgtgttcctactgtggaagaactggagacttaagaacattaatagcataaatttcgacaacccggtgtaccagaaaactacggaagacgaggtgcacatatgtcacaatcaagacgggtatagttatccttctaggcaaatggtgagcctcgaagatgatgttgcg

SEQ ID NO: 11078 - DNA, 2580 bp, Artificial Sequence
  derived and/or modified sequence
atgggaccatggggctggaaactgagatggaccgtggcgctactattagccgctgcgggaacagctgtcggcgatagatgtgaacggaacgaattccagtgccaggatggcaaatgcatctcgtataagtgggtctgcgatgggagtgcagaatgtcaggatggctccgacgaatcgcaggaaacatgtctttctgtgacctgcaaatctggggatttctcatgtggtgggagagtgaaccgttgtattcctcagttctggaggtgtgacgggcaggtggattgtgacaatgggagtgacgaacagggttgcccgcctaagacgtgtagtcaggacgaattccggtgtcatgacgggaagtgcatatcaaggcagttcgtctgtgacagcgatcgcgattgtctggatggcagtgacgaggcttcttgccccgtgctcacgtgcggccccgcttcattccagtgtaactcttctacgtgcatcccccagctttgggcctgcgacaatgatcccgactgcgaggacggttcagacgaatggccccagcggtgcaggggtttgtatgttttccaaggcgattcctctccatgtagcgcctttgagttccactgcctctccggggaatgcatccactctagttggcgatgtgatgggggaccagactgcaaggataagtccgatgaagagaactgcgccgtcgctacatgtcggcccgacgaatttcagtgctctgacgggaattgtatacacggttctcggcagtgcgatagagaatacgactgcaaggacatgagcgatgaggtcggctgcgtgaacgtgaccctgtgcgaaggacccaacaagttcaaatgccactctggcgagtgcataactctcgacaaagtgtgtaacatggcccgcgactgtcgggactggtcagacgagcccataaaggaatgcggaacgaacgaatgcctagacaacaacggggggtgctctcatgtgtgtaacgaactgaagattggctacgaatgcctgtgtcctgatggcttccaacttgtcgcacagagaaggtgcgaggacatagacgagtgccaggaccctgacacatgcagccagctgtgcgtgaatttagaaggtggatacaagtgtcagtgtgaggaaggatttcaactcgatccacatactaaggcatgcaaagcagtgggctcaatcgcttatctcttctttaccaatcgccacgaagtaagaaaaatgaccctggaccggtcggagtatacctcattgatccctaatctgaggaatgtagtcgccctcgataccgaggtggcctcaaacaggatctattggtccgacctgagtcagaggatgatctgctctacccaacttgatcgggcacacggtgtttctagctacgacacggtcatctcaagggacatccaggctccagacggtctagcagtggactggatacacagcaacatatactggaccgattctgtacttggtacggtatcagtggcagacacgaaaggagtgaaacggaagacccttttcagggagaatgggtctaagccccgcgccatcgtggtggaccccgtacatgggttcatgtactggacagattgggggactcctgcaaagatcaaaaagggcggactgaacggagtcgacatctacagtctggtcacagaaaacattcagtggccaaacggaataaccctggatctcctgtccggtaggctgtactgggtagactctaaattgcactctataagctcaatagacgtgaatggcgggaatcggaagaccatcttagaggatgagaagaggctagcacaccccttctcactagctgtcttcgaagataaggtcttctggaccgacatcataaatgaagcgattttttcagctaatagattaaccggcagcgatgtgaacctactcgcggagaatctcttatcacccgaggacatggtgctttttcataatctcacacagcctcggggggtgaactggtgcgaacgtactaccctgagtaacggtggatgccaatacctttgcttgccggcgccacagataaacccccactccccaaaattcacgtgcgcttgtccggatggcatgctgctagcgcgtgacatgaggagctgcctcactgaggcagaagctgcagtggccacgcaggaaacatctaccgtgcggctgaaagtttctagcaccgccgtgaggactcaacatacaaccacgcgtcccgtccctgacacgtcacggctcccaggtgccacccccggattgacaaccgtggaaatagtgaccatgtctcatcaggctctcggagacgtagcgggccgagggaatgaaaagaagccgtcaagcgtccgggcccttagcatagtgctccctattgtgctcctcgtatttctatgtctgggggtcttcctcttgtggaagaattggcggctgaagaatatcaatagtattaatttcgacaaccctgtctatcagaaaacaacagaagacgaggtgcacatctgccacaatcaagacgggtacagttatccttcaaggcagatggttagtctggaggacgacgtggcg

SEQ ID NO: 11079 - DNA, 2580 bp, Artificial Sequence
  derived and/or modified sequence
atgggaccctggggctggaaactcaggtggaccgtagcgctgttgctggcggccgcaggcactgcagtgggcgaccggtgcgagcgcaatgagtttcagtgccaggacgggaaatgcatatcgtacaagtgggtctgcgatggctctgcagaatgtcaggacggaagcgacgaaagtcaggagacctgtctgtctgtgacgtgcaaaagcggcgatttttcttgtgggggacgggtcaatcggtgcattccacagttttggcgctgcgacggtcaggtcgactgtgacaatgggtcagacgaacaaggctgtccacctaagacatgttcccaggatgagttccgatgtcacgatggcaagtgtatttctcgccagttcgtatgcgattcggaccgcgactgtctcgacggatccgacgaagcatcttgccctgtcctgacgtgtggaccagcttcctttcaatgcaactcttctacctgtattccacagctttgggcctgtgacaacgatcccgactgcgaggatggttctgacgagtggccgcaaaggtgtcgtggactctatgtgtttcagggcgatagctccccctgttccgctttcgaattccactgtctctcaggggaatgcatccacagctcctggaggtgcgacgggggtcctgactgtaaggataagtccgatgaagaaaattgtgctgtggctacgtgtcggcctgatgaatttcaatgttccgatggcaactgtattcacgggtcccgacagtgtgatcgtgaatatgactgcaaggatatgagtgatgaggtcgggtgtgtcaacgtgaccctgtgtgaaggtcccaataagtttaaatgtcattccggcgagtgtatcacgctcgataaagtctgcaacatggcacgtgactgcagagactggagcgatgagcctataaaggaatgtgggaccaacgagtgcctggacaataacgggggatgcagtcacgtatgtaatgaattgaaaattggctacgagtgcctatgcccagacggcttccagctggtggcccaacgtcgctgcgaggatatcgatgaatgccaggaccctgatacatgctctcaactgtgtgtgaatctggaaggaggctataaatgtcagtgcgaagaagggtttcagctggacccacacaccaaggcatgtaaggcggtcggtagcatcgcttacctgttctttactaatcggcatgaggtgcgcaagatgaccttagatcggtccgaatacacctccttaatcccgaacctcaggaacgtggtcgcccttgacaccgaagtggcttcaaatcgaatctactggtctgatctgtcccagcgaatgatctgtagtacccagctagatcgggcccatggagtctcctcctatgataccgtgatctcaagagacatccaagcaccagatggcttagctgtcgattggatccactcaaacatctattggaccgactcagttttaggaacagtttccgtcgcagacaccaagggtgtcaagcgcaaaaccctctttcgcgaaaatggaagtaaacctcgcgcgattgtcgtggatccggtccacggatttatgtactggaccgactggggcacaccggcgaagattaagaaggggggactgaatggagtagatatctattcactcgttacagagaacattcagtggcccaacggcattacactagacttgctgagcggccgcctgtattgggtcgattccaaactgcactccatcagcagtatcgatgttaacggagggaatcgcaaaactatactcgaggacgaaaagagactggcacacccctttagcttggccgtcttcgaagacaaggttttctggaccgacattatcaatgaggcaatcttcagtgcaaatagacttacagggagtgacgtgaacttgctggcagaaaatttgctgagccctgaggacatggttctgttccataacctgacacagccacgaggagtgaactggtgtgagagaaccaccctttccaatggtggctgtcagtatctctgtttgccagctccacagattaacccacacagcccgaagtttacatgtgcatgccctgacgggatgctgctcgcacgcgacatgagaagctgcctgacggaggccgaggcggccgtggccacccaagagacaagcaccgtcagactgaaggtgtcctctaccgccgttaggacgcagcatacaacaaccaggccggtgccagataccagccgcctgcctggcgccacacctgggctgacaactgtggagatcgtaaccatgtcccatcaagcactgggagatgtcgctggccgcggaaatgagaagaaacctagctccgttcgggcgctttccatagtactcccgatcgtccttctggtttttttgtgcttaggagtgttccttctctggaagaactggcggctgaaaaatatcaactctataaattttgacaatccagtctaccagaagaccacagaagacgaggttcacatctgtcataaccaggatggctactcctacccgtcccgtcagatggtctccctggaagatgacgttgcg

SEQ ID NO: 11080 - DNA, 2580 bp, Artificial Sequence
  derived and/or modified sequence
atgggtccgtggggttggaaattacgatggacggttgcgttattattagcggcggcgggtacggcggtaggtgatcgatgtgaacgtaatgaatttcaatgtcaagatggtaaatgtatatcgtataaatgggtttgtgatggttcggcggaatgtcaagatggttcggatgaatcgcaagaaacgtgtttatcggtaacgtgtaaatcgggtgatttttcgtgtggtggtcgagtaaatcgttgtataccgcaattttggcgatgtgatggtcaagtagattgtgataatggttcggatgaacaaggttgtccgccgaaaacgtgttcgcaagatgaatttcgatgtcatgatggtaaatgtatatcgcgtcaatttgtatgtgattcggatcgtgattgtctagatggttcggatgaagcgtcgtgtccggttctaacgtgtggtccggcgtcgtttcaatgtaattcgtcgacgtgtataccgcaactatgggcgtgtgataatgatccggattgtgaagatggttcggatgaatggccgcaacgatgtcgaggtttatatgtatttcaaggtgattcgtcgccgtgttcggcgtttgaatttcattgtttatcgggtgaatgtatacattcgtcgtggcgatgtgatggtggtccggattgtaaagataaatcggatgaagaaaattgtgcggttgcgacgtgtcgtccggatgaatttcaatgttcggatggtaattgtatacatggttcgcgacaatgtgatcgagaatatgattgtaaagatatgtcggatgaagtaggttgtgttaatgttacgttatgtgaaggtccgaataaatttaaatgtcattcgggtgaatgtataacgttagataaagtatgtaatatggcgcgtgattgtcgagattggtcggatgaaccgataaaagaatgtggtacgaatgaatgtctagataataatggtggttgttcgcatgtatgtaatgaactaaaaataggttatgaatgtttatgtccggatggttttcaattagtagcgcaacgacgttgtgaagatatagatgaatgtcaagatccggatacgtgttcgcaattatgtgtaaatctagaaggtggttataaatgtcaatgtgaagaaggttttcaattagatccgcatacgaaagcgtgtaaagcggttggttcgatagcgtatttattttttacgaatcgtcatgaagtacgtaaaatgacgctagatcgatcggaatatacgtcgctaataccgaatttacgaaatgtagtagcgctagatacggaagttgcgtcgaatcgtatatattggtcggatttatcgcaacgaatgatatgttcgacgcaactagatcgtgcgcatggtgtatcgtcgtatgatacggttatatcgcgtgatatacaagcgccggatggtttagcggttgattggatacattcgaatatatattggacggattcggttttaggtacggtatcggttgcggatacgaaaggtgttaaacgtaaaacgttatttcgtgaaaatggttcgaaaccgcgtgcgatagtagttgatccggttcatggttttatgtattggacggattggggtacgccggcgaaaataaaaaaaggtggtctaaatggtgtagatatatattcgctagtaacggaaaatatacaatggccgaatggtataacgttagatctattatcgggtcgtctatattgggtagattcgaaattacattcgatatcgtcgatagatgtaaatggtggtaatcgtaaaacgatattagaagatgaaaaacgtctagcgcatccgttttcgctagcggtatttgaagataaagtattttggacggatataataaatgaagcgatattttcggcgaatcgtctaacgggttcggatgtaaatctactagcggaaaatttactatcgccggaagatatggtactatttcataatttaacgcaaccgcgtggtgtaaattggtgtgaacgtacgacgctatcgaatggtggttgtcaatatctatgtctaccggcgccgcaaataaatccgcattcgccgaaatttacgtgtgcgtgtccggatggtatgttactagcgcgtgatatgcgatcgtgtctaacggaagcggaagcggcggttgcgacgcaagaaacgtcgacggttcgattaaaagtttcgtcgacggcggtacgtacgcaacatacgacgacgcgaccggttccggatacgtcgcgtctaccgggtgcgacgccgggtttaacgacggttgaaatagtaacgatgtcgcatcaagcgctaggtgatgtagcgggtcgaggtaatgaaaaaaaaccgtcgtcggtacgtgcgttatcgatagttttaccgatagtattattagtatttttatgtttaggtgtttttttattatggaaaaattggcgtctaaaaaatataaattcgataaattttgataatccggtttatcaaaaaacgacggaagatgaagtacatatatgtcataatcaagatggttattcgtatccgtcgcgtcaaatggtatcgttagaagatgatgtagcg

SEQ ID NO: 11081 - DNA, 2580 bp, Artificial Sequence
  derived and/or modified sequence
atgggaccttggggttggaagttgagatggactgtggccctgttgttggcggcggctggcaccgcggtgggagacagatgtgagagaaacgaattccaatgccaggatggcaagtgtatctcttataagtgggtctgcgatggttccgcagaatgccaagatggctctgacgagagccaggagacatgcctctctgtgacctgtaaaagcggagatttcagctgtgggggtcgcgtgaatcgttgcatcccacaattttggcggtgtgatggacaggtggattgtgacaacggtagtgacgagcaaggctgtccccctaagacctgttcccaagacgagttccgctgccatgacggcaagtgcatcagtaggcagtttgtttgcgattcagatagggactgtctggatggatctgacgaggccagttgtccagtgttaacctgcggcccggcgagcttccaatgtaatagctctacttgtataccccagctttgggcttgcgataatgacccggactgcgaagatggcagtgatgaatggccacaaagatgcagaggattgtacgtcttccagggagactctagtccttgcagcgcctttgagttccactgtctgagcggtgagtgcattcattctagctggcggtgcgacggcggacctgattgtaaggacaagagtgatgaggagaactgtgccgtggcgacatgtcgcccggatgagttccagtgctccgatggaaactgtatccacggatcacgacaatgcgacagggaatacgattgcaaggatatgagtgacgaggtagggtgcgtgaacgttacactttgcgagggaccaaacaaatttaaatgccattctggcgagtgtatcacactggataaagtctgcaacatggcccgcgactgtagggattggtccgacgagccaatcaaagaatgtggcacaaacgagtgtctcgacaacaacgggggttgcagccacgtttgcaacgagctgaaaatcggttatgagtgtctgtgccctgatggcttccagctggtggcgcagcggagatgtgaggacattgatgaatgccaggatccagatacatgttcccaactctgtgtcaatctggagggcggctataagtgccagtgtgaagaaggattccagctcgatccgcacacaaaggcgtgcaaagctgtaggatccatagcttatcttttcttcactaatcggcatgaggttagaaagatgaccctggatcgctcggaatatacctctctgatccctaacctccgcaacgtggtggcgcttgacaccgaggttgccagtaacagaatctactggagcgacctcagccagcgcatgatctgttcaacccagcttgacagggctcatggcgtgagcagctatgacacggttataagtcgagacattcaggctcccgatgggctggccgtggattggatccacagcaacatttattggaccgacagtgttcttggcactgtgagcgtggctgataccaagggggtgaaaaggaagaccctctttagggaaaacgggagcaagccccgtgccatcgtggttgacccggtccatggattcatgtactggaccgactggggaaccccagctaaaataaagaaaggaggactgaatggcgtggacatctactcactcgtgaccgagaacatccaatggcccaacggcatcacactagatctgcttagcgggcgcttgtactgggttgattccaaactgcacagcataagcagcatcgacgtgaacggaggaaaccgaaaaacgatactcgaggatgagaaacgcctggcacatcctttcagcctggcggtgtttgaagacaaggtgttctggaccgacatcattaatgaagctattttctctgcaaacagactcaccggaagcgatgtgaatcttcttgctgaaaacctgctgagtccagaagatatggttctgtttcataatctgacacagcctaggggagtcaactggtgtgaacggaccaccctctccaacgggggttgtcaatatttgtgcttgccagctcctcaaataaatccacatagccccaaatttacatgtgcctgccccgacggcatgctgctggcacgagatatgcggagctgcttgaccgaggcagaggcagccgtggctacacaggagacatctaccgtgcggctgaaagtgagtagtacagcagtcagaacccagcatactaccacccggccagtgccagatacttcaagactgcccggcgcaacacccgggctgacaacagttgagatagtgacaatgagccaccaggccctcggcgatgtggcaggacgcgggaacgagaagaaaccttccagcgtgagggccctcagcatcgtgttgccaatagtcctgttggtctttctgtgcctgggggtgttccttctctggaagaactggaggctgaaaaacattaactctatcaacttcgataatcctgtgtaccagaaaacaaccgaagacgaggttcacatttgtcacaaccaggacggatattcctaccccagccgccagatggtctcactggaggatgacgttgca

SEQ ID NO: 11082 - DNA, 2580 bp, Artificial Sequence
  derived and/or modified sequence
atgggcccgtggggctggaaactccggtggacggtggccctgttgctggccgccgcaggaaccgcggtgggagatcgctgcgaacgcaacgagttccagtgtcaggacggtaagtgcatctcctacaagtgggtgtgtgacggatccgccgaatgtcaagacggatcagatgagagccaggaaacctgtctgtccgtgacctgcaagtcgggcgacttctcgtgcggaggccgggtcaatcgctgcatcccacagttttggcggtgtgatggacaagtggactgtgataacggaagcgacgaacagggatgtcccccaaagacttgttcgcaagacgaatttcgatgccacgacggcaaatgtatctctaggcaatttgtctgcgattccgaccgggattgcctggacggatcggatgaagcgagctgccctgtcctgacttgtggaccagcgagctttcaatgtaactcctcgacctgtatcccgcagctgtgggcctgtgataatgatccggactgcgaggatggctccgacgaatggcctcaaagatgccgcggcctgtacgtcttccagggtgatagctccccctgctccgcttttgagttccactgcttgagcggagaatgcattcattcaagctggcgctgtgacggcggtccagattgtaaggataagtcagatgaggagaactgcgccgtggccacttgccgcccggatgaattccagtgcagcgacggcaactgcattcacggatcgagacagtgcgaccgcgagtacgactgtaaagatatgtcggacgaggtgggctgcgtgaacgtcaccctgtgcgagggacccaacaaattcaagtgtcactcaggcgaatgcatcactcttgataaggtgtgcaatatggcgcgggactgtcgggactggagcgatgaaccgatcaaggaatgtggcactaacgagtgcctggacaacaacggaggatgctcccatgtgtgtaacgaactgaagatcggatacgaatgcctgtgcccagatggttttcagctggttgctcagcggcgctgcgaagacatcgacgagtgccaggatccggatacctgtagccagttgtgcgtgaacctcgaaggcggatacaagtgccagtgcgaggagggatttcagctcgaccctcataccaaggcgtgtaaggcggtgggatcaatcgcctacctctttttcaccaatcgccacgaggtgcgaaagatgaccctggatagatccgaatacacttcgctcattcctaatttgcggaatgtcgtcgccctggatactgaggtggcatcaaatcggatctattggagcgatctctcacagcggatgatctgttcgactcaactcgaccgcgcccacggagtcagctcgtacgacaccgtgatatcgagagatatccaagcccctgacgggctggcagttgactggatccattccaacatctattggaccgactccgtgctgggtaccgtgagcgtggcagacactaaaggagtcaagcggaagaccctgtttagggagaacgggagcaaacctcgggccatcgtggtggacccggtgcacggatttatgtactggaccgattggggcaccccagctaagatcaagaaaggagggcttaatggagtcgacatctactcgctggtgaccgagaatatccagtggcccaatggcatcactctggacttgctgtctggccggctctactgggtggactccaagctgcactcgatctccagcatcgatgtgaacggcggtaacagaaagaccattctcgaagatgaaaagcgcctcgctcacccattttcgctcgcagtctttgaagacaaggtgttctggactgacatcatcaatgaagctatcttttcggcgaataggctgaccggctcagatgtgaacctccttgcggagaaccttctttcgccagaagacatggtgctcttccataatcttacccagccacgcggcgtgaactggtgcgaaaggactactctcagcaatggtggatgccaatacctctgccttccggccccgcagatcaatcctcactcgccgaagttcacttgcgcgtgcccagacggcatgctgctggcgagggacatgaggtcctgtctgactgaggcggaggcggccgtggccacgcaggagacttcaactgtgcgcctgaaggtgtcctccaccgccgtgcggacccagcataccactacccgtccggtgccggacacgtcacggctgccgggagcgaccccggggcttactaccgtcgagattgttaccatgtcccaccaggcactgggagatgtggccgggcgcggaaacgagaagaaaccaagctccgtgcgcgctctgtcaattgtgctgcctattgtactgctggtgttcctctgtctgggagtgtttctcctgtggaaaaactggagactgaaaaacattaacagcattaacttcgacaacccagtctaccagaaaaccactgaagacgaggtgcacatttgtcataaccaggacggatacagctacccatcccggcagatggtgtcgttggaggacgacgtggcc

SEQ ID NO: 11083 - DNA, 2580 bp, Artificial Sequence
  derived and/or modified sequence
atgggcccatggggctggaagctgcggtggactgtggcgcttctcctggcggcggcgggaactgcagtgggagatagatgtgaacgtaacgaatttcagtgccaagacggcaagtgtattagctacaagtgggtgtgcgacggttccgcagaatgtcaggacggatccgacgaatcgcaggagacttgtctctcagttacttgtaagtcgggagatttctcatgtggtggacgcgtgaatcgctgtattccgcaattctggagatgtgatggacaagtcgattgtgacaacgggagcgacgaacaaggatgccctccaaagacttgttcacaggatgaattccgttgtcacgacggaaagtgcatatccagacagtttgtgtgtgacagcgatcgggactgtcttgatggttcggacgaagcctcctgtccagtccttacttgtggacccgcgagctttcaatgtaatagctcaacgtgtatcccgcaactgtgggcgtgcgacaatgatccagactgtgaagatggaagcgacgaatggcctcagcgctgtagaggcctgtatgtgtttcaaggggattccagcccttgttcagcctttgagtttcattgcttgagcggcgaatgtattcattcctcatggcgctgtgatggagggcctgactgtaaagataaatccgatgaagaaaactgcgcagtggcaacttgccgtcccgatgagttccaatgcagcgacggcaattgcatacatggaagccgtcagtgtgatcgcgaatacgattgcaaagatatgtccgacgaagtgggatgtgtgaatgtgaccctgtgtgagggcccgaataagttcaagtgtcactcaggagagtgtattacgctggataaggtgtgtaacatggcccgtgattgtagggactggtcggatgaaccaatcaaggagtgtggtactaatgaatgtctggacaacaacggaggttgcagccatgtgtgtaacgagcttaagatcggttacgagtgcctgtgtcctgatggtttccagctggtggcacagcgacgctgtgaggacatcgacgagtgccaggaccccgacacctgctcgcagctttgcgtcaatctcgaaggcggatacaagtgtcaatgtgaagaaggatttcaactggacccccatactaaagcatgtaaagcagttgggtctattgcatacttgttctttaccaaccgtcacgaagtccgaaaaatgacgctggataggtcggaatacaccagcctcattccaaatctgcgcaacgtggtggcgctggataccgaggtggcatcgaataggatttactggtcggacctctcccaacgcatgatctgtagcacccagctcgatagagctcacggggtgtcatcttacgatactgtgatttcccgtgatattcaggcccctgatggcttggctgtcgactggatccatagcaacatatactggaccgattcggtgcttggtactgtctcggtggcagacaccaaaggcgtgaagaggaaaacgctttttagagagaacggatccaaacctagagcaatagtcgtcgatcccgtacacgggtttatgtattggacggactggggtacgcccgcaaaaatcaagaaaggaggcctcaacggcgtcgatatctactcgctggtgactgaaaacattcagtggcctaatgggatcacccttgatctgctttcagggcggctttactgggtggatagcaagctgcactcgataagctcgatagacgtgaacggcggaaatcgtaaaactatactcgaggatgaaaagcgattggcacatcctttctcactggcagtctttgaggataaggtgttttggaccgatatcatcaacgaagcgatcttttccgcaaacagacttaccggttcggacgtgaacctcctggcggaaaacctcctttcgcctgaggatatggtgttgtttcataacctcactcaaccaagaggcgtgaattggtgcgagaggaccacgttgtcaaatggaggatgccaatacctgtgtctcccggccccacaaatcaaccctcactcccccaaattcacctgcgcctgcccagatggtatgctgcttgccagagatatgcgaagctgcttgaccgaggccgaagcagcagtcgcgacccaagaaacttctactgtgaggctgaaggtatcgtctaccgcagtcagaacgcaacataccaccactagaccagttcctgatacctcgcggcttccgggggccaccccaggtctgacgacggtcgaaattgtgactatgtcgcatcaagcgcttggagacgtggcaggtcgcggaaacgaaaagaagccgagcagcgtccgggctctgtccattgtcctccccatcgtgcttcttgtgtttctttgcttgggagttttcctgctctggaagaactggagactgaaaaacatcaatagcattaacttcgataacccagtgtaccagaaaaccactgaagatgaagtccacatttgtcataaccaggacggttactcgtacccttctcgtcaaatggtgagcttggaggacgatgtggcg

SEQ ID NO: 11084 - DNA, 2580 bp, Artificial Sequence
  derived and/or modified sequence
atgggaccatggggatggaaactcaggtggacggtggctcttctattggccgcggcagggaccgcggtcggtgatagatgtgagcggaatgaattccagtgtcaggacggcaagtgtatctcttacaaatgggtctgtgatgggtctgcagagtgccaagatgggagcgacgagtcacaagagacatgtttgtccgttacgtgcaaaagcggcgatttctcgtgtggtggccgagttaatcgctgtatcccacaattttggcgttgcgatggacaggtcgattgcgataacggctcggacgagcagggttgcccgcctaaaacttgcagccaggatgagtttcgatgccatgacggcaagtgtatctcccgccagttcgtctgtgattccgatagagattgcctcgatgggtcagatgaagcatcctgcccagtgctgacctgtggcccggcatctttccagtgtaattcttctacatgcattccgcagctgtgggcatgtgataatgatccggattgtgaggatggctcggatgaatggccgcagcgctgccgcggactgtatgtcttccaaggtgattcctccccatgcagcgcgttcgagttccactgcctatccggagagtgtatccactcgtcgtggcggtgcgatggtggaccagactgtaaagacaaatcagatgaagagaactgtgctgttgctacctgcagacccgacgagttccagtgtagcgatggaaactgcatccacggcagccggcaatgcgatcgagaatatgattgtaaagatatgtcagacgaagtgggctgcgttaacgtcacactctgtgaagggccaaacaaatttaagtgccatagtggtgaatgcattaccctggataaggtatgcaatatggcacgcgattgccgggattggtcggatgagcccatcaaggaatgcggcactaacgagtgccttgataacaatggcggatgcagccatgtctgcaatgaacttaagatcggctacgaatgtctttgtccagatggatttcaactagttgctcaaaggcgatgcgaggacattgatgaatgtcaagaccctgacacttgtagccagctgtgcgtcaatctcgaaggtggctacaagtgtcagtgtgaggaaggttttcaacttgacccccacaccaaagcgtgcaaggcggtgggttccattgcctatttgttctttacaaatcgtcatgaggttcggaaaatgacgcttgaccgctctgagtataccagtcttataccaaacctccgcaatgtggtcgctctcgatacagaggtggcctccaatcgtatttactggtccgatttgtcccagcgaatgatttgttctacccagttggaccgggctcacggcgtctcttcctacgataccgttataagccgggacattcaggcccccgatgggttggccgtcgattggatccattcgaacatttactggaccgattctgtattgggcactgtctcggtcgctgacacaaagggtgtgaaacggaaaacgctgttcagagagaatggatccaagcctcgggccatcgtggtggatcccgtccacggcttcatgtactggaccgattggggcacgcctgccaagataaaaaaggggggtttgaacggagtcgatatctactcgttggttacggaaaatattcaatggcctaatggtatcaccttggatctgctttcaggacggctgtactgggtggactctaagctacattccatatcgtcgatcgatgtcaacggcggtaataggaaaacgatacttgaggatgagaagcggctcgcacaccccttctcactcgctgttttcgaggataaagtgttctggacggacattataaacgaagcaattttctcagctaatcgacttaccggcagcgatgtcaatctgctcgccgagaatctgctgagtcccgaagacatggtgcttttccacaacctaacccagcctcgtggggtcaattggtgtgagaggacaaccctgtccaacggcggttgtcagtatctatgcctgccagctccgcagatcaacccacactcacccaagttcacctgcgcttgccctgacggtatgcttttagcgcgcgacatgcgaagctgccttacggaggccgaagccgcagtggcaacccaagaaacatccactgtgagattgaaggtgtcttccacagcagtccggactcagcatactacgacccgaccggttcccgacacaagcaggctccccggtgccactccgggtttgactacagttgagatcgtgactatgagtcaccaggcactcggagacgtggcggggcgtggtaacgagaagaaaccttcgtcagtgcgagcattgtcgattgtgctaccaatagttcttcttgtcttcctgtgtcttggagtattcttactgtggaagaattggagactgaagaacatcaatagcattaacttcgataaccctgtttaccagaagacaacagaagacgaggtccatatttgccataatcaggatggctattcgtatccttcacgtcaaatggtctctcttgaagacgacgtcgcg

SEQ ID NO: 11085 - DNA, 2580 bp, Artificial Sequence
  derived and/or modified sequence
atgggaccctggggatggaaacttcggtggactgtggcacttctgctggcagcggcaggaaccgccgtgggtgatagatgtgagcggaacgagttccaatgtcaagatggtaagtgcatcagctacaagtgggtgtgtgatggatcggccgaatgtcaggacggctcggatgaatcgcaagagacttgtcttagcgtcacttgcaagtcgggtgatttttcgtgtggtggcagagtgaaccggtgtatcccccagttttggcgctgcgatggtcaggtcgactgtgataatggatcagatgagcaaggttgtcctccaaagacctgctcgcaagatgaatttcggtgccatgatggtaagtgtatatcgagacaattcgtctgtgattcagaccgggattgcctggacggctccgatgaagccagctgcccggtgcttacttgtggtccagcatcattccaatgcaattcctcgacttgtattcctcagctgtgggcatgtgataacgacccagattgtgaagatggatctgacgagtggcctcaacggtgtagaggtttgtacgtgttccaaggagatagcagtccttgttcagcattcgaatttcactgtttgtccggtgagtgcatccattcctcctggcggtgcgacggaggccctgactgtaaagacaagtcagatgaggaaaattgcgcagtcgcaacttgccggccagacgagttccagtgttcagatggcaactgtattcatggatcaagacagtgcgatagggaatacgattgcaaggatatgagcgacgaagtggggtgtgtcaacgtgactctttgtgaaggtccgaacaagtttaagtgtcattccggcgagtgtatcaccctcgacaaggtgtgcaatatggccagagactgtcgggactggtcggatgagcctatcaaggagtgtggaaccaacgaatgcctcgacaataacggtgggtgctcgcatgtgtgtaacgagctgaagatcggttacgaatgcctctgtcctgacggattccaattggtggcacaacgccgctgtgaggacatagatgaatgtcaagatcctgacacgtgttcgcaactttgcgtgaacctcgaaggtggctacaagtgccagtgcgaagaggggttccagctggatccacacaccaaagcctgtaaggcagtaggatcgattgcatatctgttctttactaaccgtcatgaggtccgcaagatgactcttgacaggtcagagtacaccagcctgattcctaatctgcggaacgtggtggcacttgacaccgaagtcgcttcaaatcgaatttactggtcggacctcagccagagaatgatttgtagcacccagctcgaccgtgctcatggtgtgtcgagctacgataccgtgatctccagagatattcaagcaccagatggtcttgctgtggattggatccacagcaatatctactggaccgattcggtcttgggaaccgtgtcggtggctgacacgaagggcgtcaagagaaagaccttgtttagggaaaacgggtcgaagcccagggcaattgtggtcgatcccgtgcacggctttatgtattggaccgattggggaactcctgcaaagattaagaaaggagggctgaacggtgtggacatttactcgcttgtcaccgagaacatacagtggcctaatggaattactcttgatcttctttcagggagactgtactgggtggattcaaagttgcactccatcagctcaatcgacgtgaacggtggaaacagaaagactattcttgaagatgagaaaagactggctcatccttttagccttgccgtgttcgaagataaggtcttttggaccgacattatcaatgaagcaatcttcagcgccaacagactgaccgggagcgatgtgaatttgcttgctgagaatctcctctcgcctgaggacatggtcctcttccataaccttactcaaccaaggggtgtgaactggtgtgaacgaaccaccctgtccaacggggggtgccagtacctttgtctcccggcaccacaaatcaaccctcattcgcctaagtttacctgtgcatgtccagatggaatgctgctggcaagggatatgagatcatgtctgaccgaggcagaagcagccgtggcgacccaagagactagcaccgtgcggctcaaagtttcctccacggccgtgaggactcagcataccactaccaggcctgtcccagacacctcgagactccccggagccacgcccggtctgaccacggtcgaaatagtcaccatgtcgcatcaggcattgggagatgtggcaggaaggggtaatgagaaaaagccctcgtcggtgcgagcattgtccattgtgcttcctatcgtgctcctcgtttttctctgcctgggggtctttctgctttggaagaactggcgactcaagaacataaactccatcaattttgataatcctgtgtaccaaaagaccactgaagatgaggtgcacatttgtcataaccaggacgggtattcatacccgtctcgtcagatggtgagccttgaggatgatgtcgca

SEQ ID NO: 11086 - DNA, 2580 bp, Artificial Sequence
  derived and/or modified sequence
atgggtccgtggggttggaaattgcgctggacggtcgcgcttctcctcgcagccgccggaaccgcggtgggagatcggtgcgaaaggaacgagttccagtgccaggatgggaagtgtatcagctacaagtgggtctgcgacggttcggccgaatgccaggacggaagcgacgaatcgcaggagacgtgcctgtccgttacttgtaagtcgggagacttctcgtgcggtggacgcgtgaatcgctgcattcctcagttctggaggtgtgatggacaagtcgactgcgacaacggatccgacgaacagggctgccctcctaagacctgctcccaagacgagttcagatgccacgacgggaagtgcatctctcgacaatttgtgtgcgattcggaccgcgattgcctggatggctccgatgaagcatcctgtcctgtgctgacttgcgggccagccagcttccagtgcaattcgagcacttgcatcccacaactttgggcgtgtgacaacgacccagactgcgaagatggttcagacgagtggccacagcgttgccggggactgtacgtctttcaaggcgacagctccccgtgctcagcctttgagttccactgtctctcgggcgaatgcatccattcctcatggagatgcgatgggggccctgactgcaaggataagtcagacgaagagaattgtgccgtggctacctgccgcccggacgagttccaatgcagcgacggaaactgcatacatgggtcacggcaatgtgatagagaatacgattgcaaggatatgtcggatgaagtcggatgtgttaatgtcaccctttgcgaaggacccaacaagttcaagtgccactccggcgagtgcatcactttggataaggtgtgtaatatggccagggactgccgggattggtcagacgagccgatcaaggaatgcggaaccaacgaatgcctcgacaacaacggcggatgtagccacgtgtgcaacgaactgaagatcggttacgaatgtctgtgcccagacggcttccagcttgtggcccaacggaggtgcgaggacatcgacgagtgtcaggatcccgacacttgcagccagctgtgtgtcaacttggagggagggtacaagtgtcagtgtgaagaagggtttcaacttgatcctcacactaaggcttgcaaggccgtcggttcaatcgcttaccttttctttaccaatcgccacgaggtgagaaaaatgaccctcgatcgcagcgagtacacttcgctgatcccaaacttgcggaacgtggtcgcgctggacaccgaagtggcttccaatagaatatactggtctgacctgtctcagaggatgatctgctccacgcaattggatcgggcacatggagtgtcgtcctacgacacggttatctcaagggacatccaagctccggacggcctcgcggtggactggattcactctaacatctactggacggactccgtgctgggaaccgtctccgtcgccgatactaaaggcgtgaagcggaaaactctgtttcgggaaaatggcagcaaaccccgagccatcgttgtggacccagtccacggattcatgtactggactgactgggggaccccagcaaaaatcaagaagggcggactgaacggagtggacatctattcccttgtcactgagaatatacagtggccgaacggcattacgctggatttgctgtcgggccgactgtactgggttgactcgaaactgcatagcatttccagcatcgatgtgaatggaggcaaccggaaaactatcctcgaggacgaaaagcgccttgcacacccgttcagcctggccgtgtttgaggacaaggtcttttggacggacattatcaacgaggccatcttctcagcaaatagacttactggatccgatgtgaatctcctcgcagagaaccttttgtctccggaagatatggtgctcttccataacctcacccaaccgcgcggagtgaattggtgtgagcgcactaccttgagcaatgggggttgccagtacctctgcctcccggctccccagatcaatccgcatagcccaaaattcacctgcgcctgtcctgatgggatgctgctcgcgagagacatgcggagctgcctgaccgaagccgaagcggccgtggccacgcaagaaacgtcaaccgtgcgccttaaggtcagctcaactgcagtgagaactcagcataccaccacccgccctgtcccggacacctcccggctgccaggagccacccccggcctgacgaccgtggaaattgtgaccatgagccaccaggcgctgggcgacgtggcgggacgcggaaacgagaagaagccgtcatctgtgcgcgcgctgtcaatcgtgctgcctattgtcctgcttgtgttcctgtgcctgggcgtgttcctgctgtggaaaaactggaggctcaaaaacatcaactcaatcaatttcgataacccggtctaccagaaaaccactgaggacgaggtgcacatttgccataaccaggacggatactcctatccgtccagacaaatggtgtctctggaagatgacgtggcc

SEQ ID NO: 11087 - DNA, 2580 bp, Artificial Sequence
  derived and/or modified sequence
atgggcccgtggggatggaagctccgctggaccgtggctctcctcctcgctgccgccggaactgccgtgggtgatcgatgcgagcggaacgagttccaatgccaggatggaaagtgcatttcatacaaatgggtgtgtgacggcagtgcggaatgccaggacggttccgatgagtcgcaagagacttgtctgtcggtcacttgcaaaagcggagacttcagctgtggtggacgagtgaaccggtgcatcccgcagttctggagatgcgatggccaggtcgattgcgacaacggttcagacgaacagggatgcccaccgaaaacctgctcccaggacgagtttaggtgccacgatggcaaatgtatttcccgccagttcgtgtgtgattccgacagggattgtctggacggctcggacgaggcgtcatgcccggtccttacttgtggtccggcctcattccaatgcaattcaagcacctgcatcccccaactgtgggcatgcgataacgatccggactgcgaagatggtagcgacgaatggccacagagatgccggggactctacgtttttcaaggggatagctcgccttgctctgcatttgagtttcactgtctttccggagagtgtatccactcctcgtggcgctgtgacgggggacctgactgcaaagacaaatcggatgaggaaaattgcgcggtcgctacctgcagacccgacgaatttcagtgttccgatggcaactgtatccacgggagtcggcagtgcgaccgtgagtacgattgcaaggacatgtcggacgaagtggggtgcgtcaatgtgacgctgtgcgaagggcccaacaaattcaagtgccactctggagagtgcatcaccctggacaaggtctgcaatatggcacgcgactgcagggattggtcagatgagccgataaaggaatgtggaactaacgagtgtttggataacaacggcggttgctctcacgtgtgcaatgaattgaagatcgggtacgaatgcctgtgcccagacggttttcagctggttgcgcagcgcagatgtgaggacatcgacgaatgccaagacccggacacttgttcacagctgtgcgtcaatcttgaaggtggatacaaatgccagtgcgaagaaggtttccaacttgacccgcacactaaggcctgcaaggcagtcggatcgattgcttatctcttcttcaccaaccgccatgaggtgcggaagatgaccttggaccggtcagaatacacgtccctcatcccgaatctcagaaacgtggtggccctcgacaccgaagtggcctccaaccgcatctactggtccgacctttcacagcggatgatctgctcgacgcaactcgaccgggcacatggagtgagtagctacgacactgtgatctcgcgggatatccaggcaccagatgggctggctgtggattggatccattcaaacatctactggaccgactccgtgctgggcactgtgagtgtggccgacactaagggagtcaagcgcaagaccttgttcagggaaaacgggagcaaacccagggctatcgtggtggaccccgtgcacggcttcatgtactggaccgattgggggaccccggcaaaaatcaagaagggcggactgaatggagtggacatctactcgctggtgaccgagaacattcagtggccaaatggaatcactctggatctgctgtcaggtaggttgtattgggtagactcgaagctgcattccatctcctcaatcgatgtgaacgggggaaacaggaaaacgatcctcgaggacgaaaaacggctggcgcacccattttcactggccgtgttcgaggataaggtcttttggactgacatcattaatgaagctatcttctccgcaaatcgcctcacgggctccgatgtgaatctgctcgcagagaatctgctgtcgccagaggacatggtgctgttccacaaccttacccaacctcgcggggtcaactggtgcgaaagaactaccctgtccaatggtggatgccagtacctttgtctcccggcgcctcagatcaacccgcatagcccgaagttcacgtgtgcatgcccggacggaatgctgctcgcccgggacatgagatcgtgcctgactgaagcggaggccgccgtggccacgcaggaaacttcaactgttaggctcaaggtgtcgtcgacggccgtcagaacgcaacataccactacccgccctgtgcctgacactagcagactcccaggagccaccccgggactgactactgtggaaatagtgactatgtcgcatcaagcactcggagatgtcgcgggacgcggaaatgagaagaaaccgtccagcgtgcgagcgctgtcgattgtcctcccgatcgtcctgttggtgttcctgtgtctcggagttttcttgctctggaagaactggcgtctgaagaatatcaatagcattaacttcgacaacccggtttaccagaaaactaccgaggacgaagtgcacatctgtcataaccaggacggatactcgtacccaagccggcagatggtatccctggaagatgacgtggcc

SEQ ID NO: 11088 - DNA, 2580 bp, Artificial Sequence
  derived and/or modified sequence
atgggcccctgggggtggaagctgcgttggaccgtggcgctgttgctggccgccgcggggacggctgtgggggatcgatgtgagcggaacgagtttcaatgccaggacggtaaatgtatatcctacaaatgggtgtgtgatggtagcgctgaatgtcaggatggaagtgacgagtctcaagagacttgcctgagcgtaacctgcaagtctggagacttttcttgtggcggaagggtcaacaggtgcataccacaattttggcgctgtgatggccaggtcgactgcgataatggcagcgatgagcagggttgtccacccaagacatgcagtcaggacgaattccggtgtcatgatggaaagtgtatctctaggcagtttgtgtgtgatagtgatcgggattgtctggatggcagcgacgaagctagctgccctgtcttgacttgtggacccgcttcattccagtgcaattctagcacttgcattccacagttatgggcgtgcgataacgatcccgattgtgaggatggcagcgacgagtggcctcaaagatgtcgcgggctctacgttttccagggggactcatccccatgctctgcattcgagttccactgtctatccggagagtgcattcacagcagctggaggtgtgacggcgggccagactgcaaagataagtcagatgaggagaattgcgcagttgccacctgtaggccagatgagttccaatgtagtgatgggaattgtatacacggctccaggcagtgtgatagagagtacgactgcaaggacatgtctgatgaagttgggtgcgtgaatgtaacactgtgcgagggaccaaataaattcaagtgccatagcggcgagtgtattacgctggataaagtttgcaacatggctagagactgtcgggattggtctgacgaacccattaaagaatgtggcactaatgaatgcctcgataacaatggggggtgcagccatgtttgtaacgagctgaagatcggatacgagtgtctgtgtcctgacgggtttcagttggttgcccaacgcaggtgtgaagatattgatgagtgccaggatcctgatacgtgcagccagctctgcgttaacttagagggtgggtacaaatgtcagtgcgaggagggatttcaattagaccctcatacgaaagcatgcaaggctgtggggtctatcgcttatctcttttttacaaatcgacatgaggtgaggaagatgacgttagatcggagtgagtatacctccctgattcccaatctgcgcaatgttgtcgcgcttgacactgaggtcgcatctaatcgcatctattggagcgatctgagccaaaggatgatctgttccacccagctggatcgagcccacggggtcagttcctatgataccgtgatttccagagacattcaggccccagacggcctggccgttgactggatccactccaatatctactggactgattccgttctggggactgtgtccgtggctgacactaaaggggtcaaaagaaagactctgtttagagagaatggttccaaaccaagagcgatcgtcgtggaccccgtgcatgggtttatgtattggacagactggggaacacccgccaaaatcaagaaaggtggcctgaacggcgtcgatatctatagtctcgtcaccgaaaatatccaatggcccaacgggattactcttgatctgctctccgggcggttatactgggtcgacagtaagttacacagtattagttccatcgacgtgaacgggggcaatagaaagaccatcctggaggatgagaaaagactggctcatccattctccctggccgtgtttgaggataaggtgttctggaccgatatcattaatgaagccattttcagtgcaaatcggcttaccggttctgacgtaaatttgttagccgaaaatctactcagtcctgaagatatggtcttgttccacaatctcactcagcctcgtggggtgaattggtgcgagaggacgacgctttccaacgggggttgtcagtatctctgcctgcctgctccgcagataaatccgcatagtccgaaatttacttgcgcctgcccagatggcatgctgctagcccgagacatgagaagctgcttgacggaggctgaagccgctgtagccacccaggagacgagcacagtccgactaaaagtgagctcaaccgctgttcgcactcagcacacaaccaccagaccggtgcccgatacatcacggctccctggtgcaactccaggcctcaccaccgttgaaatagtgacaatgtcccaccaagccctaggcgacgtggcaggccgcggcaacgagaaaaagccgagttcggttcgggccctaagtattgttttacctatcgtcctgctggtcttcctgtgcctgggagtgttccttctgtggaaaaactggaggctgaaaaacattaacagcatcaactttgacaacccggtctaccagaagactaccgaggacgaagtgcacatttgtcacaatcaggatggctactcctaccccagtagacaaatggtcagcttggaggatgacgtcgcc

SEQ ID NO: 11089 - DNA, 2580 bp, Artificial Sequence
  derived and/or modified sequence
atgggcccttggggttggaagctgcggtggaccgtcgctctgcttttggcagcggccgggaccgcagtgggcgatcgctgcgaacggaacgagttccagtgtcaggatggaaagtgtattagctacaaatgggtatgcgacggtagcgcggagtgccaggatggcagtgatgagtcccaggaaacgtgcctatcagtcacgtgtaagtccggcgattttagttgcggcgggcgggtgaacagatgcatccctcagttctggcgttgcgatggtcaggtcgattgcgacaacggatctgacgagcagggctgcccgccaaaaacctgttcgcaggacgagtttagatgtcacgacgggaaatgcatatctagacagttcgtttgtgactcagatcgagactgcctggacgggagtgatgaggcctcctgccctgttctcacgtgtgggccagcctctttccagtgcaattcttccacttgcatccctcagctgtgggcttgcgacaacgatcctgactgtgaggatggatctgatgaatggcctcagaggtgccgcggactgtatgtcttccaaggggatagctccccatgcagcgccttcgaattccactgtctgagcggtgaatgcatccacagtagctggcgttgcgacggtggacctgactgcaaagataagagcgatgaggaaaactgcgccgtagcgacctgcaggccggacgagttccagtgtagtgacggtaactgtatccacgggtcccgtcagtgtgatcgggagtacgactgtaaggacatgtccgatgaagtcggctgtgtgaacgtgacactctgtgaaggcccgaacaagttcaagtgtcactctggggagtgcattacgctagacaaagtatgcaatatggctcgggattgtcgggactggagcgatgaacctatcaaagagtgtggtaccaacgaatgtcttgataacaatgggggctgctcacacgtgtgcaatgaattgaagatcgggtatgaatgcctctgtccggacgggtttcaactagtggcacagcgccgttgcgaggacattgacgaatgccaggaccctgacacgtgcagccagctgtgtgtgaacctggagggcggctacaagtgtcagtgcgaagagggcttccagctcgatccccacaccaaggcctgtaaggccgtaggcagcattgcatatctgttttttactaatagacacgaagtccggaagatgacgttggacaggtccgagtacacctcactgatcccaaatctgagaaatgtcgtggcgctggataccgaggtagcttcgaacagaatctattggagcgatctgtcgcaacggatgatctgctccacccagctggaccgggcccatggtgtcagtagctatgacactgtcatcagccgggacattcaggcgcctgacggcctggccgtggattggatacattccaacatctactggactgattctgtgcttggcaccgtttcagtggccgacacaaaaggtgtcaagaggaaaaccctttttagagagaacggttcaaagcccagagccatcgtggttgaccccgtgcatggcttcatgtactggaccgattgggggactccagcaaaaataaagaaaggtggccttaacggagtggacatctactctctcgtgactgaaaatatacagtggcctaatggcattaccctggacctgcttagcggtcggctgtattgggtggactctaagctgcattcaatttctagtatagacgtaaatggggggaacagaaagaccattctggaggatgagaaacgccttgctcacccgtttagcctggcggtatttgaagacaaggttttctggacagacatcattaacgaggcgatcttctccgccaacaggctcacagggtctgatgttaacctgttggctgaaaacctgcttagccccgaggacatggtgctttttcacaatctgacacagccccgcggcgtgaactggtgcgaacggacaacactgtccaacggaggatgtcaatatttgtgcctcccagccccccagattaatcctcacagtccgaaattcacatgcgcttgccccgatggaatgctcctggctcgcgatatgcgaagctgcctgacagaggcagaggctgccgtcgccacccaagaaaccagtactgtgcgattaaaagtctccagcaccgcagttagaacccaacataccaccacgcgtccggtgcccgacaccagcaggctccctggcgcaaccccaggcttgactacagtcgagattgtgacaatgagccaccaagctttgggggacgttgccgggcgaggaaatgagaagaaaccctcttcggtccgcgccctgagcatcgtgttacctattgttttactcgtttttctatgccttggagtgttcctgctctggaagaactggagactgaagaatatcaacagcattaattttgacaatccagtgtatcagaagacaaccgaggacgaagtccatatttgccacaatcaggacggttactcatacccatcacggcagatggtttccttggaggatgatgtggcc

SEQ ID NO: 11090 - DNA, 2580 bp, Artificial Sequence
  derived and/or modified sequence
atggggccgtgggggtggaagctgcgctggaccgtggcattgttgctcgcagccgccgggacggccgttggtgacagatgtgaaaggaatgagtttcagtgtcaagatggcaaatgtatttcatataaatgggtgtgtgacggatctgctgaatgccaagacggttcagacgagtctcaggaaacgtgcctgagcgtgacgtgtaagtctggggattttagttgtggaggccgggtgaatagatgcattccccagttttggcgctgcgacggacaggttgactgcgacaatgggagtgacgagcagggctgcccgcctaagacctgctcccaggacgagttccgctgccatgatggtaagtgtatttcacggcagttcgtgtgtgactccgatcgggactgcctggatggctccgacgaagccagctgccccgtgctgacatgcggtcccgcctccttccagtgtaactcatctacctgcatcccccaactgtgggcctgtgataatgaccccgattgtgaggatggatccgacgagtggcctcagcggtgtagggggttatatgtgttccaaggcgactccagcccctgtagcgcatttgagtttcattgcctgtctggagagtgcattcattcctcttggaggtgcgacggggggccagactgcaaggataagtcagatgaggagaattgtgccgttgctacttgtcgcccagacgagtttcaatgctctgatggtaactgcatccacgggtctaggcaatgcgatcgggaatacgactgcaaggatatgtctgacgaagttggttgcgtaaatgtgacattgtgcgaggggcctaacaagtttaaatgtcattcaggggagtgtattacgttggacaaagtgtgtaacatggctcgcgactgccgagactggtctgacgaaccaattaaagagtgcggcaccaacgagtgcctcgataacaatggtggctgttcgcatgtctgcaacgagctgaaaatcgggtacgagtgcctgtgccccgatggatttcagttggtggctcaacggcggtgtgaagacattgacgagtgtcaggacccagatacatgttcccagctttgcgttaacttggagggagggtacaaatgccaatgcgaagaggggttccaactcgacccccacaccaaagcgtgcaaggccgtgggttctatcgcatacctcttcttcacaaatcgtcacgaggtccgtaaaatgacccttgatcggagcgaatataccagcctcattccaaacctgcgcaacgtcgtggctctggatactgaagtcgccagcaatcgaatttattggtccgacctctctcaacggatgatctgttccacacagctggatagggctcatggggtgagctcctatgataccgtgatcagcagggacatccaagcccccgacgggctggcagtcgactggatccactccaatatctattggactgattccgtgctgggcaccgttagcgtggccgacacaaagggagtgaagcggaagaccctgtttcgcgaaaacggttctaaacccagagcgattgtggtggatcctgtgcatgggtttatgtactggaccgattggggcaccccagctaagatcaagaagggaggcttgaacggggtcgacatttattctctggtgacagagaacatccagtggccaaatggcatcaccctggacttattatctggcagactatactgggtggattccaagttgcactccatttcatcaatcgacgtcaatggtggcaatagaaagacgatcctggaggatgagaaacgcctagctcacccattcagtctggcagtctttgaggataaagtgttttggaccgatatcatcaacgaggcaattttctcagccaatcgcctcaccggaagcgatgtcaacctactggccgagaacctgttatccccagaagatatggtcctgttccacaatctcactcagcctcggggcgttaattggtgcgaaagaaccactctatcaaatgggggctgccagtatttgtgcctacccgccccgcaaatcaatccccacagtcctaaatttacctgcgcatgtccggatgggatgctcctggcccgggatatgcgtagttgccttacggaagctgaggccgcggttgcgactcaggagacctctacagtgaggctgaaggtctcgtccactgcggtcaggacgcagcacactaccacccggccagtccccgataccagccggcttcctggggcaacccctgggctgaccacagtggagatagtcactatgagccatcaggccctcggcgatgtggccggcagagggaatgagaagaagccttcttcagtgagggcgctgtccatcgtactccctatcgttctactggtattcttatgtttgggcgtgttcctcctgtggaagaactggaggctcaagaatattaattccataaattttgataatccggtttaccagaagacaaccgaggacgaggtacacatatgtcacaatcaggacggctatagctacccctctagacagatggtctccctggaggacgacgtagcg

SEQ ID NO: 11091 - DNA, 2580 bp, Artificial Sequence
  derived and/or modified sequence
atgggtccctgggggtggaagttgcgatggactgtggcccttttgttagctgccgccggcacagctgtaggcgaccgttgcgaacgcaatgagtttcagtgccaggacgggaaatgcatcagttacaagtgggtgtgcgacggttcggccgaatgtcaggacggctccgacgaatctcaggaaacctgcctatctgttacctgcaaatcaggcgatttctcttgtgggggtcgagtgaacagatgcataccgcagttctggaggtgcgacggacaggtagattgcgacaatggatcagatgagcagggctgcccaccaaaaacctgtagccaggatgagttcagatgtcacgatggtaaatgcatatcccggcagtttgtatgtgactctgatcgcgattgcctggatggctctgacgaagcaagctgccctgtgctcacctgcggtcctgccagtttccaatgtaactccagcacctgcatcccccagctgtgggcgtgcgacaacgaccctgactgtgaggatggttctgacgagtggccacagcggtgcagaggcctgtacgtattccaaggcgactcaagtccttgtagtgctttcgagttccactgcctgtccggggagtgcatccacagttcttggcgctgcgacggcgggcctgattgtaaggacaagtcagatgaggagaattgtgccgttgcaacttgtcggcctgacgaattccagtgctctgatggaaattgcattcacgggtccaggcagtgcgaccgagaatacgattgcaaagatatgtccgatgaagtagggtgtgtgaatgtaacattatgtgagggtcccaataaatttaagtgccacagtggcgagtgcattacattggacaaggtgtgcaacatggctcgcgactgtagggactggtccgacgagcccatcaaggagtgtggtaccaacgaatgcctggacaataacgggggatgttctcatgtctgtaacgagttaaagattggctacgaatgcttatgcccggatggctttcagctcgtcgctcagaggaggtgcgaagacatcgacgagtgccaggatccggatacctgctcccaactatgtgtgaatctggagggtgggtacaaatgccagtgtgaagaggggttccagctcgaccctcatactaaggcctgtaaggccgtgggcagcatagcttatcttttcttcacgaacaggcacgaggttagaaagatgacactcgataggtctgagtacacttcactgattccaaacctgcggaacgtggtggccctggatacggaggtcgcgagtaatcgcatttattggtcggacctctcgcagcgaatgatatgtagcactcagctggaccgcgctcatggtgtaagtagctatgatactgtcatctctcgggatatacaggctccggacgggctggcggttgactggatccattcaaacatttactggactgatagcgtgctgggaaccgtaagcgttgccgacacaaaaggcgtgaagcgaaaaaccttgtttagggaaaacgggagcaagccaagggccattgtcgtcgaccccgtgcacggatttatgtactggacagattggggaaccccagcgaagattaagaagggcggattgaacggcgttgatatttacagtttagtgacagagaatatccagtggccgaacggcatcacacttgacctactgagcggccgattgtattgggtcgactctaaactgcatagtatcagcagtatagacgtgaacggagggaataggaagactatccttgaggatgagaagcgactagctcaccctttcagcttggcggtgttcgaagacaaggtgttttggaccgatattataaatgaagcaatttttagtgcaaaccgactaacagggagtgacgtcaacctgctagcagaaaacctgttgtctccagaggatatggtgctttttcacaacctgacccaacctagaggcgtcaactggtgcgagcgtactacactgagtaacggtggctgtcagtatctgtgtcttcccgccccacagattaaccctcattctcccaagtttacttgtgcatgtccagatggtatgctgctagcgcgggacatgcggtcttgcttaacagaggccgaagctgcagtggcaacacaagagaccagtacagtacgcttgaaggtctcttccacggccgtacgaacgcaacacaccaccacccgtccggtcccagacactagccgtctgccaggagcaacaccagggctgaccacagtggaaatcgtgacaatgtctcaccaggccctgggggacgtcgctggccgggggaatgagaaaaaaccgagcagcgtgcgagccttgtctatagttctgcctattgtgttgctggttttcctttgcctgggcgtgtttcttctgtggaagaattggaggcttaagaatattaacagcataaatttcgacaaccccgtgtaccaaaagacgaccgaggacgaagtgcacatttgccacaatcaggatggctacagctatccttcccggcagatggtgtccctcgaggacgacgtggct

SEQ ID NO: 11092 - DNA, 2580 bp, Artificial Sequence
  derived and/or modified sequence
atggggccctgggggtggaagctcagatggaccgtggccctcctgcttgccgccgccggcactgcagttggtgatagatgcgaaaggaatgagttccagtgccaggacggcaagtgcattagctataagtgggtttgcgacggttctgcggagtgtcaggatggctcagatgagtctcaggagacttgtctctccgtgacgtgcaagagtggagacttcagctgtggtggcagagttaaccgctgcattcctcaattttggcggtgtgacggccaggtggattgtgacaacggttccgatgagcagggatgcccaccgaagacttgctcccaggacgagtttcgctgccacgacggtaaatgcatttctcggcagttcgtgtgcgactctgatcgtgactgccttgacggttccgatgaggccagctgcccagtgctcacgtgcgggcccgcttcgttccagtgtaactcctccacatgcatccctcagctctgggcgtgtgacaacgatcccgactgcgaggacggatcagacgagtggccacagcgttgccggggcctgtacgtctttcagggtgactcgtccccttgctcagccttcgagttccactgcttatcgggcgagtgcattcactcgtcgtggagatgcgacggcggacctgattgcaaggacaagtctgacgaggagaactgtgccgtggccacctgtcggcccgacgagtttcagtgtagtgatggtaactgtattcatgggagccgacagtgcgatagggaatacgactgtaaggacatgtccgacgaggtgggctgcgtgaacgtcaccctgtgtgagggccctaacaagttcaagtgtcacagtggtgagtgcatcactcttgataaggtttgcaacatggctcgggattgtcgtgattggagcgacgaacccatcaaggagtgcgggaccaacgaatgcctggacaataacggcggctgttctcatgtttgcaatgagctgaagatcggttacgaatgcctttgccccgacgggtttcagctcgtagcccagcgtcggtgcgaggacattgatgagtgtcaggacccagacacctgtagtcagctttgcgttaatcttgagggcggttacaaatgtcagtgcgaggaaggtttccagctggacccccacaccaaggcctgcaaggccgtaggtagcatcgcttacctgttctttaccaaccgccacgaggtccgcaagatgactcttgaccgtagtgaatacacgagcctgattccgaacctgagaaacgtcgtcgccttagacaccgaggtggcaagcaaccgcatctattggagcgatttgtcgcagcgcatgatttgctccacccagctcgatcgcgctcacggcgttagcagctatgatactgttatctcgcgtgacatccaggcaccggatggcctcgccgtcgactggatccacagcaacatctattggaccgattcggtcctgggtacggtctccgtcgccgataccaagggtgttaagcggaagaccctgttcagagagaacggctctaagccccgtgcgattgttgtcgacccagtccatggtttcatgtactggaccgactggggcacacccgccaagataaagaaaggcggtctaaatggtgtcgacatctactcccttgtcaccgagaatatccagtggccaaatggtataacattagacctgctcagcggtagactttactgggtggattccaagctccatagcatctcctcgatcgacgtaaacggtggcaaccgtaaaactatcttggaggatgagaagagacttgctcatccattctctctggctgtcttcgaagacaaagtgttttggacggatatcatcaacgaggcgattttctccgccaaccgcctgaccggctccgacgtcaacttgctggcagagaatctcctctcccccgaggacatggtgctctttcacaacctgacccagcctcgcggcgtcaactggtgtgagcgcaccacgttgtccaacggcggctgccagtatctttgtctgcccgctccccagatcaacccacactcacccaagttcacttgcgcttgccccgatggcatgttgctcgcccgcgatatgaggtcttgcctcacagaggccgaggcggccgttgctactcaggagacgtcgaccgtacgactgaaggttagctccacggccgtcagaacccagcacaccacgacccgcccagttcctgatacctcccgtctgccgggcgccacccccggactgaccaccgtcgaaatcgtcaccatgtcacatcaggctctcggcgatgtcgccggccgcggtaacgaaaagaaacccagcagtgtccgagctctgtccatcgtgctacccattgtcctgctcgtgttcctgtgtcttggggtctttctgttgtggaagaactggaggctgaagaacataaattcgatcaacttcgacaacccggtgtaccagaagacgactgaagatgaggtccacatctgccacaaccaggacggctactcctacccctctaggcagatggtgtccctcgaggacgacgtcgct

SEQ ID NO: 11093 - DNA, 2580 bp, Artificial Sequence
  derived and/or modified sequence
atgggcccttggggttggaagctccggtggacggtggccctgcttctcgccgcggcggggactgcggtgggcgaccgttgcgagcgaaacgagttccagtgccaggacgggaaatgtatctcctataagtgggtgtgcgacggctccgcggaatgccaggatggctcagatgaatcccaagaaacctgcctgtcggtgacgtgtaagtcgggagacttctcctgtggtggaagagtgaatagatgcattccgcagttctggcgctgtgatggtcaagtggactgtgacaacggctccgacgaacagggctgcccaccaaaaacctgctcccaagatgagttccgctgccatgacggaaagtgcatctcacggcaattcgtctgcgacagcgatagagattgcctggatgggtccgacgaagcctcctgcccggtgctcacctgcggtccggccagcttccaatgcaactcctcgacttgcatccctcagctttgggcatgcgacaatgacccggattgcgaggacgggtctgatgagtggccccagcggtgcagaggactgtacgtgttccagggcgacagttcgccatgttccgctttcgagtttcattgcctgtcaggagagtgcatccactctagctggcggtgcgacggggggcctgattgtaaggacaaatcggatgaggaaaactgcgcggtggcgacttgcaggccggacgagtttcagtgctccgacggcaattgcatccatggatcgcgccagtgcgaccgcgagtacgactgcaaggatatgagcgacgaagtcggatgtgtcaatgtgactctgtgtgaaggaccaaacaagtttaagtgccactccggagaatgcatcaccctcgacaaggtctgcaacatggctcgcgattgccgagattggtcggacgagccgatcaaggaatgtggtaccaacgagtgtctggacaataacggcgggtgctcacacgtttgcaacgaactgaagatcggatatgagtgtctttgtcctgatggctttcagttggtggctcaacgccggtgcgaggacatcgacgaatgtcaagatccagacacctgttcacaattgtgcgtcaatctcgagggagggtacaagtgccagtgcgaagaaggattccagttggatccgcatacgaaggcctgtaaagccgtgggatccatagcttatctgttcttcaccaaccgacacgaggtcagaaagatgaccctggacagatcggaatacacctcgctcatcccgaacctgcgcaatgtggtggcgcttgacactgaagtggcatccaaccggatctattggtcagacctctctcagaggatgatctgctccactcagctggaccgcgcgcatggagtctcatcatacgataccgtgatctcgcgcgatatccaggcaccggacggcctcgccgtcgattggatccacagcaacatttactggactgattccgtgcttggcaccgtgtccgtggcggacactaaaggagtgaagcgcaagacgttgttccgggagaacgggtcaaagccgcgagcaattgttgtcgatccggtgcacggatttatgtactggaccgactggggcactccagcaaaaatcaagaagggcggactgaacggtgtggacatctactccctggtgaccgaaaacattcaatggccgaacggcattaccctcgacctcctttccggtcggctgtactgggttgattccaaactccattcaatttctagcatcgacgtgaacggaggaaatagaaagacgatcctggaggacgaaaagagactcgcgcacccgttctcactggccgtgtttgaggacaaagtgttctggactgacatcatcaatgaggccatcttctccgcaaaccgcctgaccggcagcgacgtgaacctgctggccgaaaacttgctgagcccagaggatatggtgctgttccataatcttacccagccaaggggggtgaactggtgcgaaagaaccacgctctcgaatggcggatgtcagtacctgtgcctgccagcaccgcagataaacccgcattccccgaagtttacctgcgcgtgcccggatgggatgctgctcgcgcgggacatgaggagctgtctgactgaggcggaagccgccgtggcaacccaggaaacctctactgtgcgcctgaaggtgtcgtccaccgcggtgcgcacccaacataccaccactcgccctgtcccagatacttcacgcctgcccggcgccaccccgggcttgaccactgtggagattgtgactatgtcgcaccaagccctgggtgatgtggctgggcgcggaaacgaaaagaagccaagctcggtgagggccctctcgattgtgctgccaatcgtcctgctcgtgttcctgtgcctgggtgtgttcctcctttggaagaactggcggttgaagaacatcaacagcatcaatttcgacaatccagtgtaccaaaaaaccactgaggacgaagtgcatatctgccacaaccaagatggctacagctacccaagccggcagatggtgtcgcttgaggacgacgtggcc

SEQ ID NO: 11094 - DNA, 2580 bp, Artificial Sequence
  derived and/or modified sequence
atgggtccgtggggttggaagctgcggtggactgtggcattgctcctggctgcggcgggaactgcagtgggggatcgctgcgagcggaacgagttccagtgccaggacggaaagtgcatctcctataagtgggtgtgcgatggctcagccgagtgtcaagacggtagcgacgaatcgcaagagacttgcttgtcggtgacgtgcaaatcaggggatttctcgtgcggaggacgggttaaccgctgcatccctcagttttggaggtgtgatggacaggtggattgcgacaatggaagcgacgagcagggttgtccgccgaaaacctgttcccaggacgagttcagatgtcatgatgggaagtgcatctcgcggcaatttgtgtgtgatagcgaccgcgactgcctcgatggatcagacgaggcgtcgtgcccggtcctcacgtgtggcccggcctcctttcaatgtaacagctcgacctgtattccccaactctgggcgtgcgacaatgacccggattgcgaggacggctctgacgagtggccgcaacgctgcaggggactgtatgtgtttcaaggggatagctccccgtgctcggcattcgaatttcactgcctcagcggggaatgcatacactcatcctggcgctgcgacggaggccctgactgcaaagacaagtccgacgaagaaaattgcgcagtggccacgtgccgcccggatgaatttcagtgctcggacgggaactgcatccacggatcacgccagtgtgaccgcgaatacgattgcaaggatatgtcggacgaagtgggatgcgtgaacgtgactctctgtgagggaccaaacaagtttaagtgccattcaggcgagtgtatcactctggacaaggtgtgcaacatggccagagattgccgggattggtcggatgaacccatcaaggagtgtgggactaacgagtgcctggataacaatggagggtgctctcacgtgtgcaacgaactgaaaatcggatacgaatgcctgtgcccggatggtttccagctggtggctcaacggcgttgcgaggatattgacgaatgtcaggacccggacacctgtagccagctgtgcgtgaacctggaaggcggatacaagtgccaatgtgaggaaggcttccaattggaccctcataccaaggcctgtaaagcagtcggttcaatcgcttacctcttcttcactaatagacacgaagtgcgcaagatgaccctggataggtcggaatacacttcgctcatccctaatctgcggaatgtggtcgcactggataccgaagtggcttcaaaccgcatctactggtcagacctctcgcagcgcatgatctgctctactcaactcgacagggctcacggtgtgtcatcctacgacaccgtgatctcccgcgatatccaggcaccagatggactggctgttgattggatccacagcaacatctattggactgacagcgtgctcggaactgtgtcggtcgcagacaccaaaggggttaagcgcaaaaccctgtttcgcgaaaatggctcaaagccacgggccatcgtggtcgatccggtgcacggattcatgtactggactgattggggaacccccgctaaaatcaagaaggggggacttaacggagtggacatctattccctcgtgaccgaaaacatacaatggcccaatggaattaccctggacctcctctctggacgcctctactgggtggattccaaactgcactcgatctcatcaatcgatgtcaatggaggaaacagaaagaccatcctggaggacgaaaaaaggctggcacacccgttctcgctggccgtctttgaggacaaagtattttggaccgacatcattaacgaggccatcttctcggcgaatcggctgactggctccgacgtgaacctcctggcagaaaatctgctttcgcccgaggacatggtcctctttcataacctgactcagccgaggggcgtgaactggtgcgaacggaccactctttcaaatggcggttgccagtacctgtgccttccggctcctcagataaatccgcacagcccaaagttcacttgtgcctgccctgacggcatgctcttggctcgcgatatgcgctcatgtctgacggaggcagaagccgcggtggccacgcaggaaacctctactgtccggctcaaggtgtcgtcaaccgctgtccggactcagcacactactacccgcccggtgccggataccagccggctcccaggagcgacccctggacttaccaccgtggaaatcgtgactatgtcccaccaggcccttggagacgtggcgggcagagggaacgagaaaaaaccgtcgtccgtccgcgcgttgagcattgtgctcccaatcgtgctgctcgtgtttttgtgcctcggagtgttcctgctgtggaagaattggcggcttaagaacatcaactccatcaacttcgacaaccccgtctaccagaaaactacggaggacgaggtgcatatttgccacaaccaggatggctactcctacccttcgcggcagatggtcagcctggaagatgatgtcgcg

SEQ ID NO: 11095 - DNA, 2580 bp, Artificial Sequence
  derived and/or modified sequence
atgggtccctggggttggaaattgcgctggaccgtggccttactccttgccgctgcagggacagccgtgggagatcggtgtgaaaggaacgaatttcaatgtcaggatggcaaatgtatcagttacaaatgggtttgtgatggatccgcagagtgccaggatggaagcgatgagagccaagagacatgcctgtctgtcacatgtaagagcggcgattttagctgtgggggccgtgtaaacaggtgcatcccacaattctggagatgcgatggacaagtggattgcgataatggcagcgatgaacaggggtgtcccccaaagacgtgttcacaggatgagtttcgatgccacgatggcaaatgtattagcagacagttcgtttgtgacagcgaccgcgactgcctcgacggaagcgacgaggcctcctgtcctgtgctcacctgcggccccgctagcttccagtgtaatagctccacctgcatcccacagctgtgggcttgtgacaacgatcctgactgcgaagacggtagcgatgaatggccccaaagatgtagaggactatatgtgtttcagggagatagtagcccatgttccgcgttcgaatttcattgcctgtccggcgagtgcattcactctagctggagatgcgacggcggccctgactgcaaggataagtctgacgaagaaaactgtgctgtggccacctgccggccagatgagttccagtgtagcgatggcaactgcatccacggttctcgtcaatgcgatagagagtacgactgcaaagatatgtctgacgaagtcgggtgcgttaacgtgaccctttgtgaaggaccaaataagtttaagtgtcactcaggcgagtgtatcactctggataaggtgtgcaacatggccagggactgcagggattggagcgacgaaccaattaaagaatgcggcaccaacgaatgcctggacaacaacggaggttgttcccacgtgtgcaacgagcttaaaatcggctatgaatgcctgtgcccagatggattccagctagttgctcagaggagatgtgaggacattgatgagtgccaggaccctgacacatgttcacaactttgtgtcaacctggaaggcggctacaaatgtcaatgtgaggaagggttccagctcgacccccacactaaggcttgtaaggcggttggctctatagcatacttgttcttcacaaatagacacgaagtacggaaaatgaccctcgaccgctcagagtatacctctctcatccctaatctgcgcaacgtcgtggcattggacactgaagttgcctccaatcgcatctattggagcgacctatcgcagagaatgatttgttcaacacagctggatcgcgctcacggagtgtccagctacgacacggtcatctctagggacatacaggcacccgatggactcgcggtcgattggatacactcaaacatctactggacggattctgtcctcggaacagtgagcgtggcagataccaaaggggtgaagaggaagacattattcagggagaacggatctaagccgagagctatcgtagtggatccagtccatgggttcatgtactggacagactgggggacccccgccaaaatcaaaaagggcgggctcaacggcgtggacatctatagcttggttactgagaatatccagtggcccaatggaataactcttgatctcctgagcggacggctctattgggtagacagcaaattgcattcaataagctccatagatgtcaacggaggaaaccgcaaaaccatactggaggacgaaaagcgcctggcacatccattttcgctggccgtgtttgaggacaaggtgttctggacagatatcatcaacgaagccatattcagtgcgaacaggttgacaggatccgatgttaacctgctggctgaaaacctgttgagcccagaggatatggtgctgtttcataacctgacccagcccaggggagtgaactggtgcgaacggactaccctgtcaaatgggggttgtcaatacctgtgcctgcctgctccccagataaaccctcacagcccaaagtttacctgcgcctgcccggacggaatgctcctcgctagggacatgaggtcctgcttaacagaagcggaggccgcagtggctacccaggagacatccactgtccgattgaaggtgagctccacagctgtccgcacccaacataccactacccgcccagtacccgatacctccaggcttccaggagccaccccaggactgacaaccgtcgagattgttaccatgagccatcaggcactgggcgacgtagctggacgaggaaacgaaaaaaagcctagcagcgtcagagcattatcaattgtgctgcccatcgttttactggtgttcctctgtctcggagtctttctactgtggaagaactggcggctcaagaatatcaactctattaacttcgataacccagtgtaccagaaaactaccgaggatgaagtgcatatttgccataaccaggacgggtactcctatccttcccgacaaatggtctcactggaggatgacgtggca

SEQ ID NO: 11096 - DNA, 2580 bp, Artificial Sequence
  derived and/or modified sequence
atggggccatgggggtggaagctgcgttggacagtggccttgctcctcgctgcggcgggcaccgctgtcggtgataggtgcgaacgaaatgagttccaatgtcaggatggaaagtgtatttcttacaagtgggtgtgcgacgggtctgctgagtgccaggacggttccgacgaaagtcaggaaacttgtttgagtgtgacttgtaagagtggggacttcagctgcgggggacgagtaaataggtgcatcccacaattctggagatgcgacggacaagtggactgcgataacggatccgacgaacagggatgtcccccaaagacatgctctcaggatgagtttcgttgtcatgacggaaagtgcatcagccggcaatttgtttgcgactccgatcgcgactgcctagatgggagcgatgaggccagctgcccagtgctgacatgcggtcctgcctcttttcagtgtaattcttcaacatgcattccacaactgtgggcgtgtgacaatgaccccgactgcgaagacgggtcagatgagtggccccagcgctgccgcggactctacgtgtttcaaggtgattctagcccatgcagcgcgtttgaattccactgcctcagcggggaatgcatccatagttcctggcggtgtgacggcgggccagattgcaaagataagagcgacgaggaaaactgcgcggtggcaacgtgccgcccagatgagttccagtgcagcgatggtaactgcattcacggctccaggcagtgcgatcgcgagtatgattgcaaagacatgtcagacgaggtcggctgtgttaacgtgactctgtgcgaaggacccaataaattcaaatgccacagcggagagtgtataactctcgacaaggtatgcaatatggcgagggactgtagggactggagcgatgagcctataaaggaatgtggcaccaatgaatgtctcgataataatgggggctgctcacacgtatgcaacgaattgaaaatcggatatgaatgcctctgtccggatggattccaactcgtcgcccaaagacgctgcgaggatattgacgagtgccaagacccagacacgtgctcacagctctgcgtcaatttagagggcggctataagtgccagtgcgaggaggggttccaactcgatccccacaccaaagcctgcaaagctgtgggaagcattgcatacttgttctttacgaatcgacacgaggtcagaaagatgactttagacagatcagagtacacctccctgattcctaacctgaggaatgttgtggcgctcgacactgaggtcgcatccaaccgaatctattggagcgatctgtcccaacgtatgatttgttctactcagctcgatcgagcccacggggtcagcagttacgacacagtgatatcccgggacatccaagctcccgatggactggccgtggattggatccattcgaacatctactggactgatagtgtccttggaacagtgtcagtggcggacaccaagggcgtgaagaggaaaacactatttcgagaaaacggtagtaaacctcgagccatagtggtcgacccggtccacggatttatgtattggaccgactggggcactccggccaagataaaaaaaggcggcctgaatggggtggatatctactcgcttgtgactgagaacatccagtggcccaatgggataaccctagacttacttagtggcaggctatactgggtggatagtaagctgcactcgatttcaagcatcgacgtcaacgggggaaaccgaaagacaatcctggaggacgaaaaacggcttgcgcaccccttttctttagcagtgttcgaggataaggtcttctggaccgatatcatcaacgaagcgatcttcagcgcaaaccgattgacaggttcggatgtaaacttgcttgcagagaatctgctaagtccagaagatatggtgctgtttcacaacttgacccagcctcggggcgtgaactggtgtgagaggaccaccctgtctaatggtggatgtcagtacctgtgcttgccggcccctcagattaatccacattccccaaagtttacctgcgcctgcccggacggaatgctcctggcgagagacatgcggagctgcttaacagaagctgaagcggccgtagcaacgcaggagactagtacggtccggctaaaagtgtcctctacagctgtgcgcacccagcacactactacccgcccagtgcccgatacatccaggctgccaggcgcaacaccaggattaactacggtggagatcgtgacaatgtctcaccaggcgctgggtgacgtggccggaaggggtaatgaaaaaaaacctagctctgtcagagccctgagtatagtacttccaatagttctgctggtctttttatgcctgggtgtgttcctgctgtggaaaaattggcgccttaaaaacattaatagcatcaacttcgacaaccctgtttatcagaaaactaccgaagatgaagttcatatctgccacaaccaggacgggtatagctaccccagccgccagatggtgagcctggaggacgacgtggcc

SEQ ID NO: 11097 - DNA, 2580 bp, Artificial Sequence
  derived and/or modified sequence
atgggaccctggggctggaaactcagatggaccgttgccctactgctggccgccgctgggactgctgttggagatagatgcgaacggaatgagtttcaatgccaggacggtaaatgcatctcatacaaatgggtgtgtgacggatccgccgagtgccaggatgggagcgatgaatcccaagaaacctgcctgtccgtgacctgtaaaagcggggatttctcatgcggaggaagggttaatcggtgcatcccacagttctggcgctgcgacggtcaggtggattgcgacaacggtagtgatgaacagggatgccctcctaagacatgctcacaggatgagtttaggtgccatgatggtaaatgtatttctcggcagttcgtttgtgactcagaccgggactgtctcgatggatcagatgaagcctcctgtcctgtgctgacctgcggcccggcatcgtttcagtgtaatagtagtacctgcattccccagttgtgggcctgcgacaacgatcccgactgcgaggatggcagtgatgagtggcctcagcgctgccgtggactttatgtgttccagggagacagttctccatgctcagcctttgagtttcattgtctatctggcgaatgtattcactcctcatggagatgtgatggcggcccggattgcaaggataagtccgacgaagaaaactgcgctgtagccacatgtagacccgatgagtttcaatgctcggacggcaattgcattcatggatcccgtcagtgcgatagagagtatgactgtaaggacatgtcggatgaagtcgggtgtgttaatgttacgttgtgcgagggcccaaacaaattcaaatgtcatagtggcgaatgcattacactcgacaaggtgtgcaatatggctagggactgtagagactggtccgacgagccaatcaaggagtgcggaaccaacgagtgtctcgacaataatggcggatgttcacatgtttgtaacgaactcaagattggctacgagtgcctttgccctgacggttttcagctcgttgcgcagagacgctgcgaagatatcgacgaatgtcaggacccggatacctgtagccaactgtgcgtcaacttagaaggaggctacaagtgccagtgtgaagagggtttccagttggatccgcacactaaagcctgcaaggcagtcggttccatcgcatacttgttctttacaaaccgtcacgaagtacgcaaaatgactcttgaccgctccgagtacacctcactgatccctaatctacgcaacgttgttgctttggacaccgaagtggcctctaaccgcatctactggtcagatctatcccaacgtatgatctgtagcacacagctcgacagggctcacggagtgagctcctacgataccgtgatcagccgagatatacaggcccccgacggtctggctgtggactggatccactccaacatttactggactgactctgtgctcgggaccgtgtccgtcgctgacactaaaggagtcaagcggaagacactgtttcgggagaacggaagcaagcctcgagcgatcgtggtcgatcccgttcatggctttatgtattggaccgactgggggactcctgcaaaaattaaaaagggaggacttaatggcgttgatatatactctcttgtcactgagaacatccaatggcctaatggtataacgctggacctattgagtggtaggctctattgggtcgattctaagctgcactctataagtagcatcgacgtgaatgggggtaatcggaagaccatcctagaagacgagaagagattggctcacccgtttagtctggccgtgttcgaggataaagtgttctggactgacattattaacgaagccattttctcggccaatcggctgactggttctgatgtgaacctgctcgcagagaacctcttgtccccagaagacatggtactgtttcacaacttaacccagccgagaggggtgaactggtgtgaacgaaccacattgtctaatggcggctgtcagtacttgtgcctgccagcgccccagatcaacccacacagtccaaaattcacttgcgcgtgcccagacgggatgcttctcgcccgggatatgaggagctgcctcaccgaagctgaggctgccgtggcaacacaagagactagcactgtacgcctgaaagtctcgtcaacagccgttcgaacacagcacacgactaccaggccagtgcctgacacatcacggcttccaggggctacaccgggacttaccaccgtggagattgtcaccatgagccaccaggccttgggagacgtggccgggcgcggaaacgagaaaaagccatcttccgtgcgggctttatctatagtgttgccaatcgtcttgttggtctttctctgccttggcgtcttcctgctttggaaaaattggaggctgaagaatattaacagtatcaactttgacaatccggtataccaaaaaaccactgaagatgaagtgcatatttgtcataaccaggacggctatagttatccaagccggcagatggtgtctctggaggacgatgtcgca

SEQ ID NO: 11098 - DNA, 2580 bp, Artificial Sequence
  derived and/or modified sequence
atgggaccctgggggtggaagctgcgctggacagtggcactgcttttggcagccgctggaactgctgtgggagataggtgtgagagaaacgaatttcagtgccaagatggaaagtgcatcagttataagtgggtttgtgacggcagcgcggaatgccaggatggcagtgacgagtcgcaggaaacttgtttgagcgtgacctgcaagagtggcgacttttcttgcgggggtcgggtcaaccgatgtatccctcagttctggaggtgcgatggtcaggtggactgtgacaacggttcagacgaacagggatgcccccccaaaacctgctcccaggatgagttccgctgtcacgacgggaaatgtataagcaggcagttcgtctgtgactccgatcgggattgcctggatgggtcggacgaggcctcatgccccgtgctcacgtgcggtccagcctcttttcaatgtaacagcagcacatgtattccccagttgtgggcttgtgacaatgatccagactgcgaagacggatctgatgagtggccgcagagatgtcgaggattgtacgtttttcagggcgattcttcaccatgcagcgcctttgaattccactgcttgtctggggagtgcatccattcctcttggcgatgcgacgggggccctgattgcaaggataaaagcgatgaggagaattgcgccgtggcaacctgcaggcccgatgaatttcaatgctcagacggcaattgtatccatggcagcagacagtgcgaccgagagtatgattgtaaagacatgtccgacgaggttggctgtgttaacgtgacactgtgcgagggccccaataaattcaagtgtcacagcggggaatgtattactctggataaggtgtgcaatatggctagggactgcagggactggagtgatgaaccaataaaggagtgtggcactaatgagtgcctagataataacggcggttgcagtcatgtgtgcaacgagctcaaaatcggctacgagtgcctgtgcccagacggattccagctggtggctcagcggagatgtgaggatatcgatgagtgccaggatccagacacatgcagccagctgtgcgttaacctggagggcggatacaagtgccagtgcgaggagggttttcagctagatccccacacgaaagcgtgtaaggcggttggttccattgcctacctcttcttcacgaaccgtcatgaggtgagaaaaatgacacttgacagatctgagtacacctccctcattccaaacctgaggaacgttgtcgctctggataccgaagtcgccagcaacagaatttactggtcagacctgtcccagcgcatgatatgctccacccaactggacagggctcatggagtttccagctacgacacagtaatctctagggatatccaggcccccgacgggctcgcagtggactggattcactccaacatctactggacagacagcgtactgggcaccgtttcagtggccgacaccaagggagttaagcggaagactttgttcagggaaaacggaagtaagcctagagcgatcgtcgttgacccagtccatggctttatgtactggaccgattgggggactccggcaaagatcaagaaggggggtctgaatggcgtggacatctacagcctggttacagaaaatatccagtggccaaacggcatcacccttgatctgctgtcaggtcgactctattgggtggattcaaaactacattccatttcaagcatcgatgtcaacggggggaacagaaaaactatcctagaggacgaaaagcgactcgcacatcccttcagcctagcagtcttcgaagacaaagtattctggactgacatcatcaacgaagccattttctcggccaacaggctgaccgggtcagacgtgaatctgttggccgagaatctactgagtccagaagatatggtgttattccacaatctaacccaacccagaggggtgaactggtgtgagcgtacaaccctcagcaacggcggttgtcagtacctgtgcctgcctgccccacagatcaacccccactcccccaagttcacttgcgcgtgcccagacgggatgctcctggctcgcgatatgcgctcttgtcttacagaagccgaagccgctgtagctactcaggaaacctccaccgtccgcctgaaagttagcagcactgccgtgaggacccagcacacgacaactagaccggtgcccgacacaagcagactcccaggggctacccccggtttaaccacggtagagatcgtgacaatgtcacatcaggctcttggggatgtggccgggcgcggcaacgaaaagaagcctagtagcgtgagagctctgtccattgtgctgcctatcgttctgctagtgttcctgtgtttaggcgtgtttttgctctggaagaactggcgtctgaagaacataaactccattaacttcgacaaccccgtctatcagaagaccaccgaggatgaagtccacatctgtcacaaccaggatggctactcctaccctagtaggcaaatggttagcttggaggatgacgtggca

SEQ ID NO: 11099 - DNA, 2580 bp, Artificial Sequence
  derived and/or modified sequence
atggggccctgggggtggaaactgaggtggactgtggcactccttctggcagccgctgggactgctgtgggagatcggtgtgaacgcaatgaattccagtgtcaggatgggaagtgcatctcttataaatgggtttgcgatgggtccgccgagtgccaggatgggtctgatgaatcccaggagacatgtctctccgtcacatgcaaaagtggggatttctcgtgcgggggaagggtgaaccggtgcatcccccagttttggcggtgtgacggacaggtcgattgcgataacgggtccgatgagcaggggtgcccacctaagacatgctcgcaggatgaattccggtgccatgatggaaaatgtatatctcgccagtttgtatgtgacagtgatagggattgtctggatgggagtgatgaagcatcttgtcccgtgctaacatgtggaccagcaagttttcagtgcaatagttctacttgtatacctcagctctgggcttgtgataatgatcccgattgcgaagatgggtcagatgaatggcctcagaggtgcagagggttatatgtctttcagggagattcatctccctgctctgccttcgaatttcactgcttatccggggaatgtatccacagttcttggcgctgtgatggagggccggactgtaaagataaaagtgatgaggagaattgcgcggttgctacatgccggcccgatgaatttcagtgttccgatgggaattgcatccacggaagtagacagtgtgatagggagtatgactgtaaagatatgagtgatgaggtgggatgcgttaacgtaacactctgcgagggacctaataaattcaagtgtcattcaggagaatgcatcacactcgacaaggtgtgtaacatggctagagattgtagagattggtcagatgaacccatcaaagaatgtgggactaacgaatgcctcgataataacggggggtgttctcatgtttgtaatgaactcaaaataggatatgaatgcctgtgtcccgatgggtttcagttagtggcccagcgccgatgcgaggatattgatgaatgtcaggatcctgatacttgcagtcagctgtgtgtaaatctcgaggggggatataaatgccagtgcgaagaagggtttcagctggatccccacactaaagcttgcaaagctgtgggatctatagcctacctattttttacaaatcggcatgaagtgaggaagatgacactggatagatctgaatatacatctctcatcccaaacctacgcaatgtggtggccctggatactgaagtggcctcaaaccgaatctattggagtgacttaagtcagcgaatgatatgctcaactcagctggatagagcccatggagtttcaagttatgatacagtgatatctcgagatatacaggcccccgatggactagctgtggattggatacattcaaacatatactggacagattcagtcttgggaactgtgagtgtggctgatactaaaggggttaaacgcaaaacactgtttagagaaaacgggtctaaaccccgggccattgttgtcgatcctgtccatgggttcatgtattggactgattggggaactcctgcaaaaatcaaaaaagggggactcaacggagttgatatctacagtctcgtcacagaaaatatacagtggccaaacgggattacactagatttattgtccggaagactatattgggtcgatagtaaactgcactcaatttcttctatagatgttaatggggggaacaggaaaacaatacttgaagacgaaaaacggctcgcccacccattctccttggctgtgttcgaagataaagtgttctggactgatattataaacgaggccatattttcggcaaacagactcactggatcagacgttaacctcctggctgaaaacctgctctcccccgaggatatggttcttttccataatcttactcagccaaggggggtcaattggtgtgagcggactactctcagtaatggggggtgtcagtatctctgcttacccgcaccccagattaacccacacagtccaaagttcacatgtgcctgcccagatggaatgttattagcccgcgacatgcggagttgcctcacagaagccgaggccgctgtggccactcaggaaactagtacagtgcgccttaaggtgagtagtacagcagtgcggacacagcacacaacaactaggccagttcctgatacatctcgccttccaggagccactcccgggcttacgactgtcgaaattgttacaatgtctcaccaagcacttggagacgtggccggacgaggaaacgagaaaaaacctagttccgtgcgcgctctttccatagtgctaccaatagtattactcgtcttcctatgcctcggagtatttcttctctggaaaaactggaggcttaaaaacataaactcaatcaatttcgataatcccgtttatcagaaaacgacggaagatgaggtccatatctgtcacaaccaggatggatattcttatccttccaggcagatggtgtctttagaggacgatgtggca

SEQ ID NO: 11100 - DNA, 2580 bp, Artificial Sequence
  derived and/or modified sequence
atggggccttggggttggaagctcaggtggactgtggctcttcttcttgcagcggcagggacggctgtgggcgaccgctgcgaacggaacgaatttcaatgccaagatggaaagtgtatttcctacaagtgggtgtgtgatgggtctgcagaatgtcaagacggttcagatgaatcacaggaaacctgtctgtcagtgacttgtaagtctggagactttagctgtggtggacgtgtcaacaggtgcattccccagttctggcggtgtgacgggcaagtggattgcgataacgggtcagacgagcaaggatgccctccaaagacgtgttcgcaagacgaatttcgttgccatgacggaaaatgtatcagccgccaattcgtctgtgactccgatcgggattgtctcgatggatcggacgaagcatcatgtccagtgcttacttgtggccccgcttcctttcaatgtaacagctcgacctgtatccctcagctttgggcgtgcgacaacgatccagactgtgaagatggttccgacgagtggccccaacggtgtcgaggcctctacgtgtttcaaggagattccagcccgtgctccgcatttgagttccactgtctctcgggggagtgtattcattcgtcatggaggtgtgatgggggtccagattgtaaggataagtcggacgaagaaaattgtgccgtcgcaacctgtcgccctgatgaatttcagtgttcggatggtaactgcattcacggtagccggcagtgtgacagagagtacgattgcaaggacatgtcggatgaggtgggttgtgtgaacgtgactctgtgtgaaggcccaaacaagtttaagtgtcattcaggggaatgtattaccctggacaaggtgtgtaacatggccagagactgccgagattggtccgatgaaccgattaaagaatgcgggaccaatgagtgcctcgataacaatggaggttgtagccacgtgtgcaacgaactcaagataggatacgaatgcctgtgtcctgatggtttccaactcgtggcgcagcgacgctgcgaagatattgatgaatgccaggaccccgatacctgctcccaactgtgtgtcaacctggaaggaggatacaagtgccaatgcgaggagggtttccagctggatcctcacactaaggcatgtaaggccgtgggttccatcgcatacctgttctttacgaatcgacatgaagtgaggaagatgactcttgataggtcggaatacacctctctgattccaaatcttcgcaacgtggtggcgctggatactgaagttgcatccaatcgcatttactggtcggatctgtcgcaaaggatgatttgttctacgcagctggacagagcgcatggagtgtcatcgtacgatacggtgatcagccgtgatatccaggctcctgatggccttgctgtggattggatccattcgaacatttactggaccgatagcgtgcttggcaccgtcagcgtggcagatactaagggtgtaaagcgcaagaccctgtttagggaaaatggatccaagcctagagcaatcgtcgtcgacccagtccatggttttatgtactggactgattggggaacgccagcaaagatcaagaaagggggacttaatggcgtggacatttactcattggtcactgaaaacatccagtggcccaacggaatcaccctggacttgttgtctggtagactgtactgggtggactcgaaactgcatagcatttcctcaattgatgtgaacggaggaaatcggaaaactatcctggaggacgagaagaggcttgcacaccccttttccctggcagtgtttgaagataaggtgttctggaccgatatcattaacgaggcgatattctcagcaaacagactgactggaagcgacgtgaatcttctggctgagaatctcctgtcccccgaagatatggtgctgtttcataacttgacccagccaaggggcgtcaactggtgcgaaagaaccaccctctcaaacggtggttgtcaatacctgtgtttgccagcaccccagattaaccctcactcaccaaaattcacctgcgcatgtccagatggcatgctccttgcaagagatatgagatcctgtctcaccgaggccgaagccgcagtcgcaacccaagagactagcactgtgcgtctcaaggtgagctcgactgccgttcggactcaacatacgaccactaggccggtacctgatacctccaggctccccggagcaactcctggccttactaccgtggaaattgtgaccatgtcacatcaagcgctcggagatgtcgccggcagaggtaatgaaaagaaaccttcgtcagtgcgtgccttgtcgatagtactgccgatagtgctgttggttttcctgtgtctcggagtctttctgctttggaagaactggaggctcaagaacatcaactccattaacttcgacaaccctgtgtaccaaaagaccactgaggacgaagtgcacatatgccacaatcaggacgggtactcttacccatcgcgccaaatggtgtcgcttgaagatgatgtcgcc

SEQ ID NO: 11101 - DNA, 2580 bp, Artificial Sequence
  derived and/or modified sequence
atggggccttggggatggaaactgagatggaccgttgctctgctgttagccgccgctggtaccgcagttggagacaggtgcgaacgcaatgagtttcagtgccaagacgggaaatgcatctcctataagtgggtctgtgacggatctgctgagtgccaggatgggagcgacgagtctcaggaaacatgtctgtctgtaacctgcaagtccggtgacttcagctgcggcggccgggtaaatcggtgtatcccacaattttggcgctgtgacggccaggtggattgtgacaacggatctgatgaacagggatgcccccctaagacctgctcacaggacgaattcagatgtcacgatggtaaatgcatttcaagacaatttgtgtgtgactctgacagagactgcctggatggtagcgatgaggcaagctgccccgtgttgacttgcggaccagcttcttttcaatgcaactcaagtacatgtattccccagctttgggcctgcgacaatgaccctgattgcgaggatggtagtgatgagtggccacagaggtgcaggggtttatatgtgttccagggtgatagttcaccttgctctgccttcgagtttcactgtctgagcggtgagtgtatacattcctcctggcgctgcgacggagggcccgactgcaaggataaatccgacgaggagaactgcgccgtggccacgtgtaggcctgacgaattccaatgctccgacggtaattgtatccacggatctcgtcagtgtgaccgcgaatatgactgcaaagatatgtccgatgaagttggctgcgttaacgtaactctctgcgaggggcctaacaagtttaagtgtcattccggcgagtgtatcacgctggacaaggtgtgtaatatggcgcgtgactgcagagattggtccgacgaacctattaaggaatgcggcacaaatgagtgtctcgacaataacgggggatgcagccatgtctgcaatgagctcaagatcggctacgagtgcctgtgcccggacggctttcagctggtcgcccaacgaagatgcgaggacattgatgagtgccaggacccagacacatgttcacaactgtgtgtaaatctggaggggggatacaaatgtcagtgcgaagaaggatttcaactagacccacataccaaggcctgcaaggcggtaggatccatagcctacctgtttttcactaaccgacacgaggtgagaaagatgactcttgacagaagtgaatacacctctctgatcccaaacctgcgaaatgtcgtggctctggacactgaagtcgcctccaatcgcatctactggtcagatctgtctcagaggatgatatgttccacccagctggacagggctcacggagtgtccagttacgacacagtgatttcccgagatatccaggctcctgacggactggccgtggactggattcactcaaatatctactggacggatagtgtgctgggcactgtgtctgtcgcggacacgaagggggtcaagcgcaagacgcttttccgtgagaatgggtccaaaccccgcgcaatcgtcgtcgacccagttcatggttttatgtattggacagattggggtacccccgcaaagattaaaaaaggcggcctcaacggggtcgatatctatagcctcgtgaccgagaacatccagtggcctaatggcattacactcgacctgcttagcggacgactgtattgggtggactctaaacttcactccatcagcagcatcgatgttaacggaggcaaccgcaagacgatcttagaggatgaaaagaggctcgcccaccctttctccctagccgtgtttgaagacaaggtgttttggactgacatcataaacgaggctatctttagtgcaaacaggttgacggggagcgatgtgaatttgctcgccgagaaccttctcagtcccgaggacatggtcctgttccataacttgacccaaccaaggggagtcaactggtgtgaaagaaccacgttaagcaacggagggtgccagtacctgtgtttgccagccccacaaatcaatcctcattcaccgaagttcacctgcgcctgtcccgatgggatgctcctggcgcgggacatgagaagttgtctgaccgaagccgaggcggccgtcgccacacaagagacttctactgtccgcctgaaggttagttccaccgctgtgcggacacagcacaccacaaccagaccagtgccagacacttcccgcctccctggcgccacacctgggctgactaccgtagaaatcgtaactatgtcccatcaagccctcggagacgtcgctggtcgggggaatgaaaagaagccctcgtctgtgagggcgctgtccattgtcctgccgatagtgctgttggttttcctctgccttggggtgttcctactttggaagaactggcggctcaagaatattaatagcatcaatttcgataatccggtgtaccagaagaccaccgaggacgaggtgcacatttgccacaaccaggacggctactcttacccctccaggcaaatggtgtccctggaggatgacgtcgca

SEQ ID NO: 11102 - DNA, 2580 bp, Artificial Sequence
  derived and/or modified sequence
atgggtccgtggggatggaagctcaggtggaccgtcgccctgctcctggctgccgcgggaacggcggtcggagacaggtgcgagcggaacgaattccaatgccaagacggcaagtgcattagctacaagtgggtctgcgacggaagcgccgaatgtcaggatggctccgacgaaagccaggaaacctgcctgtccgtgacttgtaaatccggtgacttctcctgcggcggaagggtgaaccggtgtatcccgcagttttggcggtgtgatgggcaggtcgactgtgataacggatccgatgagcagggttgccctccaaagacttgctcacaggacgagttcaggtgccacgatggaaaatgcatctcccgccagttcgtatgcgatagcgacagagactgtctcgacggctcggatgaggcaagctgcccagtccttacctgcggtccagcgtcgttccaatgcaactcctccacctgcatcccccagctttgggcatgcgacaacgaccccgattgcgaggatggatcggatgaatggccgcagcgctgtcgggggctctacgtctttcagggggactcatcgccgtgctccgccttcgaatttcattgtctgtcgggcgaatgcattcattcgtcctggcgctgcgatggaggaccagactgcaaggacaagtcagacgaggaaaattgcgccgtggcgacgtgccgccctgatgagttccaatgttcggacggtaactgcatccacggctcccggcagtgcgatcgcgaatacgattgcaaagacatgagcgacgaggtcgggtgtgtcaacgtgaccctgtgcgagggaccgaataagttcaaatgccactccggtgagtgcataactctcgataaggtgtgcaatatggcccgcgactgcagggactggagcgacgaaccgatcaaggaatgtgggaccaacgagtgtctcgataacaacggaggctgtagccacgtgtgcaatgacttgaagatcggatacgagtgcgattgtcctgatggatttcagctggtggcacaacgccgctgcgaagatatcgatgaatgccaggacccagatacgtgctcccagttgtgtgtgaacctggaaggcggttataagtgccaatgtgaggagggtttccagctggacccgcacaccaaggcgtgcaaggccgtcggatccatcgcttacctcttcttcaccaacagacacgaggtgcgcaagatgactctggatagatccgaatacacttcgctgatccccaatctccgcaacgttgtggctctggacaccgaagtggcttcaaatagaatctactggtcggatctgagccagagaatgatttgctcgacgcaactcgaccgcgctcatggagtcagcagctacgacaccgtgatctcaagagatattcaggcaccggacgggctcgctgtagactggatccactccaatatctactggaccgattcggtgctgggtactgtgtcagtcgccgataccaagggagtaaagcgcaagactctgttcagggaaaatggaagcaaaccaagagcgatcgtcgttgacccggtgcatggcttcatgtattggaccgattggggcacgcctgccaagatcaaaaagggaggtcttaatggagttgatatctacagcctggtcaccgagaacatccagtggcccaacggcatcacgctggatctgctgtcaggacggctgtactgggtcgactcgaaactgcattcgatttcctccatcgatgtgaacgggggcaacagaaagactatcctggaggacgagaagcgccttgcccatcccttctcgctcgctgtgtttgaagataaagtgttctggaccgatatcatcaacgaagccatcttttccgctaatcggctgacggggtcagacgtgaatttgctggctgagaacctgctgtccccagaagatatggtcctgtttcataacctgactcaaccgagaggagtgaattggtgtgaacgcactacgctctctaacgggggatgccagtacctctgcctccctgcaccgcaaatcaacccacactcgccgaagtttacgtgcgcgtgtcccgatggaatgctcttggcgcgggacatgcggtcctgcctcaccgaggcggaggcagccgtggccactcaagaaaccagcactgtccggcttaaggtgtcaagcactgctgtccgcacccagcatactaccactaggccagtgccggacacgtcccggctgcctggagccactccgggcttgaccacggtggagattgtgaccatgtcccaccaggcgctgggagacgtcgcgggtcgcggtaacgaaaagaagccgagctccgtgcgcgcgctctccatcgtgctgccaatcgtcctcctggtgtttctgtgtctcggcgtgttccttctttggaaaaactggcggctcaagaacatcaatagcattaacttcgacaacccagtgtaccagaaaactaccgaagatgaagtgcacatctgccacaaccaagatggttactcatacccatcaaggcagatggtgtcgctggaagatgacgttgcc

SEQ ID NO: 11103 - DNA, 2580 bp, Artificial Sequence
  derived and/or modified sequence
atggggccatgggggtggaagctacgttggacagtagccctgctgctcgccgcagctgggacagccgtgggagacaggtgtgaacggaatgagttccaatgtcaggatggaaaatgtatctcctataaatgggtgtgtgatgggtccgcagaatgccaggatgggtccgatgaatctcaagaaacatgtctgagtgttacttgtaaatctggggacttctcatgcgggggaagggtcaacaggtgtattccacagttctggcggtgtgatgggcaggtggactgcgacaatggaagtgatgagcaggggtgcccacctaagacatgctctcaggatgaatttcgctgtcacgatggaaagtgtatttcaaggcaattcgtctgtgactctgatcgagattgccttgatgggtccgatgaagcctcttgtcctgttctcacatgcggaccggcttctttccagtgcaactcttccacatgtataccccagctgtgggcgtgtgacaacgaccccgattgtgaagacggatcagatgaatggcctcagcgatgtcgggggctgtatgtcttccagggagattcttcaccttgcagtgcattcgaattccattgcctctccggagagtgtatccatagtagttggcggtgtgatgggggacccgattgtaaagacaaatccgatgaagaaaattgtgctgtggcaacatgccgcccagatgaatttcagtgttctgatgggaattgtatccacgggtccagacagtgcgatagggagtacgattgtaaggatatgtccgacgaagtgggatgtgtgaatgttacactgtgtgaagggcctaataaattcaagtgccacagtggagaatgtatcacattagataaagtctgtaacatggcccgggactgccgggattggtctgatgaacctataaaagaatgtgggacaaacgagtgcctcgataacaacggaggatgttctcatgtatgcaatgacctgaaaatagggtacgaatgcgactgtcccgatggattccagctcgttgcccagcgccgttgtgaagatatagatgagtgccaggaccctgatacatgtagtcaactatgtgtgaacttagaagggggatataaatgccagtgtgaagagggattccagctcgatccccacacaaaagcctgcaaagcagtggggtctatcgcatatcttttcttcactaaccgccatgaagtgcgcaaaatgacattagatcggtctgaatatacatctctcatacccaatctccgcaacgtggtggctctcgatactgaagtagcttcaaatcggatttattggtcagatctgagtcagagaatgatctgctctactcagctcgatcgagctcatggggtgtctagttatgatactgtgatttcccgcgatatacaggcccccgacgggctagccgttgattggatccattcaaatatttactggacggattccgttctgggaactgtgtctgtggcagatactaaaggagtcaagcgaaaaactctttttagggaaaacgggagtaaacccagggctatcgtcgtggacccagtccacggatttatgtactggactgattgggggacacctgcgaaaatcaaaaaaggaggactcaatggggtcgacatatattctttggtgacagagaacattcagtggcctaacggaatcacactggatctcctgagtggacggctgtactgggtagattccaaactccactctataagttctatagacgtgaacggagggaatagaaaaacaattctcgaggatgaaaaacgccttgcacaccctttcagtctcgcagtcttcgaggataaagtgttctggactgatattatcaacgaagccattttctctgccaatagacttacaggatcagatgtcaacctattggctgaaaacctcctgagtcctgaagatatggtgctgttccacaatctgacacagcccaggggagtgaactggtgcgagcgcacaacactgtctaacggggggtgccagtatttatgtcttcctgctccacagataaaccctcactctcccaaatttacatgtgcctgcccagacgggatgctactagcaagggatatgagatcttgcttgactgaggcggaggcggctgtagcaactcaggaaacatccacagtaaggttaaaagtctcttctactgccgtgcgaacacagcacacaacaactaggccggtcccagatacatctcgccttcctggagctactcctggattgactactgtcgaaatagtgactatgtcacatcaggcgctaggagatgtagcagggcgtgggaacgaaaaaaaaccatcttccgtcagggcactcagtatagtgctgcccatagtgctactcgtatttctatgtctgggagtattcctcctgtggaaaaactggcggttaaaaaatatcaattccatcaatttcgataaccccgtgtatcagaaaacaacagaagatgaggtacatatctgccataatcaagatgggtactcatacccttctcgccagatggtgtctcttgaggatgatgttgcc

SEQ ID NO: 11104 - DNA, 2580 bp, Artificial Sequence
  derived and/or modified sequence
atgggaccctggggctggaagctgcggtggaccgtggcgcttctgttggcggcggcaggaaccgcggtcggtgacaggtgcgaaagaaacgaattccaatgccaggacgggaaatgcatctcgtacaaatgggtctgtgatgggtcagctgaatgccaggatggaagcgacgagtcgcaggagacttgcctctcagtgacgtgcaagtcaggagatttctcgtgcgggggtcgcgttaatcggtgcatcccgcagttctggcggtgtgacggccaggtggactgcgataacggatccgacgaacagggctgtcctcccaagacctgcagccaggacgagttcagatgccatgacggcaagtgtatctcccggcaattcgtgtgtgactcagaccgcgactgcctggacggttctgatgaagcatcctgccctgtgcttacctgtggccccgcgtcatttcaatgcaactcctcgacctgcatcccgcaactctgggcttgcgacaacgatccggactgcgaagatggatcagacgagtggccacagagatgccgggggctttacgtttttcaaggtgatagctcgccgtgctcggcattcgagttccattgtttgtccggcgagtgcattcactcatcctggcgctgcgacggaggtccggactgcaaggacaagagcgacgaggagaattgcgcggtggcgacttgcagaccggacgagttccaatgttctgatggaaattgtatccacgggtccagacagtgcgacagagaatacgattgtaaggatatgtcggatgaagtgggatgcgtcaacgtcaccctctgtgaaggtcccaacaaattcaagtgccactcgggagaatgcatcacccttgacaaagtgtgcaacatggcgcgggactgccgcgattggtccgatgagccgatcaaagaatgcggtactaacgaatgcctcgacaacaatgggggttgcagccacgtgtgtaacgacctcaaaatcgggtacgaatgcgattgtccagacggattccagcttgttgcgcaaaggcgatgcgaggacattgacgaatgccaagacccggatacctgttcgcagctctgtgtgaatctggaaggagggtacaagtgccagtgcgaagagggattccaactcgaccctcataccaaagcatgcaaggccgtgggaagcattgcttacctgttctttaccaaccgacacgaagtccgcaaaatgactctggaccgcagcgaatacacctccctgatcccgaatctgcggaacgtggtggccctcgacactgaggtggcttccaacaggatctactggtccgacctgtcgcagaggatgatctgtagcacccagctggatcgcgcacacggtgtgtcctcgtatgataccgtcatctcacgggacatccaagcaccagatggactggcggtcgactggatccactcgaacatctactggactgactccgtgcttggaaccgtgagcgtcgccgacactaagggggtcaaacgcaagacgcttttccgcgaaaacggatccaaaccccgggccattgtcgtcgaccctgtccacggatttatgtactggactgattggggcaccccagccaagatcaagaagggagggctgaatggcgtcgacatatactcactggtgaccgagaacatccagtggccaaatggcatcactctcgatttgctgtcgggcaggctgtattgggtggatagcaagctccattcaatctcgtcgatcgatgtgaatggaggaaatcgcaagactatactggaggatgagaaacggctcgcgcatccgttttccctggctgtgttcgaggacaaagtgttttggaccgatatcatcaacgaggccatcttctcggccaatagactcactggatcggatgtcaatttgcttgccgagaatctgctgtcaccggaagatatggtgctgttccacaacctcacgcagcctcggggcgtcaattggtgtgagcgcactaccctgtccaacggaggatgtcagtacctgtgccttcccgcgccacaaatcaacccacacagcccaaaattcacttgcgcatgcccggacggtatgctgctggcgagggacatgaggtcatgtctcaccgaagccgaagcagcggttgcgactcaagaaacttcaaccgtcagactgaaggtgagctcaactgccgttcgcactcagcacactactactcgaccggtgccggatacctcgagactgcctggcgcaacgcccggactgaccactgttgaaatagtgactatgtcgcaccaggccctcggggacgtggcaggacgcggaaacgaaaagaagccgtctagcgtgcgcgcgctttcaatcgtgctccctattgtgctcctggtgttcctgtgcctgggcgtgtttctcttgtggaagaattggagactgaagaatatcaacagcatcaattttgacaatccggtgtaccaaaagaccaccgaagatgaggtccatatctgccataaccaggatggctactcgtacccgtctaggcagatggtgagcttggaagatgacgtggcc

SEQ ID NO: 11105 - DNA, 2580 bp, Artificial Sequence
  derived and/or modified sequence
atgggaccatggggctggaagctcagatggactgtggcactgctgctggccgccgccggaacggcagtgggtgatcgctgtgaacgcaacgaattccaatgccaggacggtaagtgtatttcatataagtgggtctgcgatgggagtgctgagtgtcaggatggatccgacgaatctcaagagacttgtctttccgtgacctgtaagtctggagacttctcgtgcggtggtagagtgaaccgctgtatcccccaattttggcggtgtgatgggcaggtggactgtgataacggcagcgacgaacagggctgtcctcctaaaacctgttcacaagatgaattccgttgtcatgatggaaagtgtatttctcgacagttcgtgtgcgattcggaccgggattgcctcgacggttcggacgaagcctcatgtccggtgctgacttgtggacctgcttcctttcagtgtaactcatcgacttgcattccacaactctgggcatgtgataatgatccggactgcgaagatggatcggacgagtggcctcagagatgtaggggtttgtacgtgtttcagggggattcatcgccatgctcagcctttgaatttcactgtctttcaggcgagtgcatccattcgtcgtggcgatgcgatggaggtcctgattgcaaagacaaaagcgacgaggagaactgtgccgtggcgacttgtcgcccggacgaatttcaatgttcagatggcaactgcatccatggaagccgtcagtgcgaccgagaatacgattgtaaggacatgtcggatgaagtgggatgcgtgaacgtaactctgtgtgagggacctaacaagttcaagtgtcatagcggtgaatgtatcacccttgataaggtgtgtaacatggctagagattgtagagactggagcgatgaacccatcaaagaatgtggtactaacgagtgcctggataacaacggtgggtgttcacatgtctgcaacgatctgaaaattgggtacgaatgtgactgcccggacggttttcagttggtggcacaaaggaggtgcgaagatatcgatgaatgccaggatccagatacctgctcccaactttgcgtcaacctggaaggaggatacaagtgtcaatgtgaagaaggatttcaacttgacccacatactaaggcctgtaaggcagtagggtccatcgcatacctgttctttaccaaccgtcatgaagtgcgaaagatgacccttgatagatccgagtacacttcgctcattcctaaccttagaaatgtcgtggcactcgacaccgaagtcgcgagcaacagaatatactggtccgatctttcccagagaatgatctgttcaactcaactggatcgtgcgcatggtgtgtcgtcgtatgatacggtcatcagccgggatatccaagccccagatggcctggcagtcgattggatccattcaaacatttactggactgattccgtgctcgggaccgtttctgtggcagatactaagggagtgaagcgaaagaccctgttcagagagaacgggtcgaaacctagagcgattgtggttgatccagtgcatgggtttatgtactggactgactgggggaccccggcaaagataaagaaagggggtctgaacggtgtcgacatctactcacttgtgaccgagaacatacagtggcccaacggtataactcttgatctcctttctggacgcctttactgggtggattcaaaattgcactcaatttcctctatagatgtgaatggaggcaatcggaaaactattctggaggatgaaaagcgtctggcacatcctttctcacttgcggtgttcgaggacaaggtgttctggactgacatcatcaatgaggcaatcttttccgccaatcgacttactggcagcgacgtcaatcttctcgcagagaatctgctttcaccagaggatatggtcctgtttcataatcttactcagcctagaggagtgaactggtgcgaaagaaccacgctcagcaatggcggatgtcaatacctgtgtctcccagcgcctcaaatcaatccccattcgccaaagtttacttgtgcatgtcccgatggcatgctgctggccagagacatgaggtcatgtctcactgaagccgaggccgccgtggcaacccaggaaacctcaacggttagacttaaggtgtcgtccacggctgtgcggacccaacatactaccactcggcctgtgcccgacacttcccggctccctggtgcaacccctggtctgaccaccgtggaaattgtgactatgtcgcaccaggcacttggcgatgtggcaggtagaggaaacgaaaagaaaccctcatcagtaagagcactttcgatcgtgcttccaatagtgctgctcgtgtttctgtgcttgggagttttcttgttgtggaagaactggcggctgaagaacatcaattccattaactttgacaaccccgtgtaccagaaaaccaccgaggacgaagtccacatctgtcataatcaggatggctattcctacccttcgcgtcaaatggtcagcctggaagatgatgtggca

SEQ ID NO: 11106 - DNA, 2580 bp, Artificial Sequence
  derived and/or modified sequence
atgggaccgtggggatggaagctgcgctggaccgtggcactcctgctcgctgccgccggtaccgcggtcggtgacagatgcgagcgcaatgagttccagtgccaggatggcaagtgtatttcatacaagtgggtgtgtgatgggtcggcggaatgccaggatggatcggacgaatcacaggaaacgtgtctgtccgtgacctgcaaatccggggatttcagctgcggtggtcgcgtgaatcggtgcatccctcagttctggcggtgcgacggacaagtggattgcgacaacggcagcgacgaacaaggatgccctccaaagacttgctcccaggatgaattcaggtgccacgacggaaagtgtatctcacggcagttcgtgtgtgactccgatagagattgtctggacgggagtgacgaagcctcctgccctgtgctgacttgcggaccagcttccttccagtgcaatagctctacttgcatcccccaactctgggcctgtgacaatgaccctgactgtgaggacgggtcggacgagtggccgcagcgctgcagaggactctatgtgttccagggagactcctcgccgtgctcggcattcgagtttcactgcctctccggagaatgtatccactcctcgtggcgctgcgacgggggaccagactgcaaggataaatctgacgaagagaactgcgctgttgcgacctgccggcctgacgagttccaatgttccgacggaaactgcatccatggttcccgccaatgcgaccgggagtacgactgcaaggacatgtcggatgaggtgggatgtgtcaatgttaccctctgcgaagggccgaataagttcaaatgccactcaggcgagtgtatcaccctggataaggtgtgcaatatggcgagggactgccgggattggagcgacgaaccgatcaaagaatgtggtactaatgagtgcctcgacaataatggcggctgcagccacgtgtgcaatgatctgaaaattggatacgaatgtgactgcccagacggattccaattggtcgcacagcggcgctgcgaggacattgacgagtgccaggaccctgatacttgttcgcagctgtgcgtgaaccttgaaggtggatacaagtgccaatgtgaagaaggcttccaactcgacccgcataccaaagcgtgcaaagctgtgggatcaattgcatacttgttctttactaatcgccatgaagtccgcaagatgactctcgacagatctgaatacacttcccttatcccgaacctccggaacgtcgtggctctggacaccgaagtcgccagcaacagaatttactggtccgatctgtcacagcgcatgatttgctccacccagttggaccgggcacatggagtgtcgtcttacgataccgtgatttcaagggacattcaggcaccggatggactggcggttgactggatccattcaaacatctactggactgattcggtgttgggaacggtatcagtggccgatactaaaggggtcaagagaaagactctgtttagagaaaacggatcgaaaccacgggctatcgtcgtggatccggtgcacggatttatgtactggaccgactggggcaccccagcaaagatcaaaaagggaggtctgaacggcgtggacatttactctctggtcactgagaacattcagtggccaaatgggatcacgttggacctgttgtcgggaaggctttattgggtggactctaagctgcactccatttcctccatcgacgtcaacggaggaaatcggaaaactatcctcgaggacgaaaagaggctcgctcacccgttctcactggctgttttcgaggacaaggtcttttggactgacatcatcaacgaggcgatattctcagctaatcggttgaccggatccgacgtgaacctccttgccgagaacctgctttcgccggaggatatggtcctgttccacaaccttactcagccgcgcggagtgaactggtgtgaacgaactaccctcagcaatggagggtgccagtatctgtgcttgccggcgccgcagatcaacccacactcaccgaaattcacctgtgcgtgcccggatggtatgctgctggcgcgcgatatgcgatcatgcctgaccgaggctgaagccgcggtcgctacgcaagagacttccacggtgcgtctcaaggtgagcagcacggcagtgaggactcaacatactaccacccgtcctgtgcccgatacctcgagactgccgggcgccacccctggcctgactaccgtcgaaatcgtaaccatgtcgcatcaggcgctgggagacgttgccggtcggggaaatgaaaagaagccgagctccgtgcgcgcgctgtcaatcgtactgcccatcgtgctgcttgtgtttctgtgcctcggagtgtttctcctgtggaagaactggcggctgaaaaacatcaactcgatcaacttcgacaaccctgtgtaccaaaagacgaccgaggacgaagtgcatatctgccacaatcaagatgggtactcgtacccctcccgacagatggtgtctctcgaggacgatgtggcc

SEQ ID NO: 11107 - DNA, 2580 bp, Artificial Sequence
  derived and/or modified sequence
atgggaccttggggatggaagttgagatggaccgtagctctgctcctggcggctgccggcaccgccgtgggtgatcgatgcgagaggaatgagtttcagtgccaagatgggaagtgtattagctataaatgggtgtgtgacggatcagcagaatgccaggacggaagcgatgagagccaggaaacttgtctgagtgttacatgcaaaagcggcgacttttcctgcggggggagagtaaatcgctgcatcccacagttttggcgttgcgacgggcaggtggactgtgacaacggatccgatgaacaggggtgccctccgaaaacctgctcgcaggatgagttccgctgtcacgacggtaagtgcatctcccgacagttcgtctgcgattctgatcgcgactgtctggacgggtccgacgaggccagctgccccgtgctaacatgtggtccagccagttttcagtgtaatagtagtacttgcataccacagctttgggcctgcgataatgatcccgactgcgaggatggatcagacgagtggccccaacgctgccggggcctgtatgtgtttcaaggggactctagtccgtgcagtgcttttgagtttcattgtctttccggtgagtgtatccactcttcgtggagatgcgatggcggaccagattgtaaagacaaatcagacgaggagaattgtgcagtagctacttgtagacctgacgaattccagtgctctgacggaaattgcattcatggctcaagacagtgtgaccgggaatatgattgcaaggatatgtccgatgaagtgggatgcgttaatgtcaccctgtgcgagggaccaaacaaatttaagtgccactccggggagtgcataacgctggataaggtgtgtaatatggcaagagactgccgagattggagcgatgagccgatcaaggagtgtggtaccaatgagtgtctggataacaacggagggtgctcacacgtgtgtaacgatctgaagataggatatgaatgcgactgcccagatggtttccagctggttgcccagaggcgatgtgaggatatcgacgaatgtcaggatccagacacctgctcccaattatgtgtgaacctcgaagggggctacaagtgccagtgcgaggagggattccaactcgatccgcacacaaaggcatgcaaggccgttggaagtatagcttatttgttctttacaaaccggcacgaagtgcggaagatgaccctggatagatccgaatatacatcacttatcccaaatcttcgaaacgtcgtggcgttggacaccgaggtggcctccaatcgaatctactggagtgatctgagccagcggatgatttgctccacgcagctcgaccgcgcgcatggtgtctcctcttacgacaccgtaatcagccgtgatatacaggcgccagatggcctggcggtggactggatccattcaaatatctactggactgactccgtcctggggactgtgtccgtggccgacacaaaaggcgtgaaacgtaagacactgtttcgggagaacgggtctaagccgagggccattgtagttgaccctgtacacggctttatgtactggaccgattggggaacccctgccaaaatcaaaaagggcggcctgaatggagtcgatatctacagcctggtcaccgagaacattcagtggcccaacgggattacgttagacctgctctcagggcggctatattgggtagattccaagttgcactccatctcttcaatagacgtaaatggtggcaatcgaaaaaccattctggaggatgagaagcgtctggcccacccattcagccttgctgtgtttgaggataaagtgttttggactgacattatcaatgaggccatctttagcgccaatcggctcaccggttctgacgtgaacctgctagccgagaacctcctgagccccgaagatatggtattgtttcacaacctgacccagccgcgcggggtgaactggtgtgaaagaacaaccctcagtaacggtggttgccagtacctgtgcctgcctgcacctcagataaatcctcactctcccaaattcacctgcgcgtgccctgacggcatgctgttagcgagggacatgcgatcttgtctgacagaggccgaggccgcggtcgctacacaggagacttcaactgtaaggctcaaagttagttcgactgccgtgagaactcagcacaccactacgcggcctgtgcccgacacctcaaggttgcccggtgcaactccagggttaaccaccgtcgagatcgtcactatgagccaccaggcactcggggatgtggcaggcaggggaaacgagaagaagccctcttccgtgcgcgctctgtcaatcgtcttacccattgtgcttcttgtatttctgtgccttggggtatttttactgtggaagaattggaggctgaagaatattaacagtataaattttgacaatccagtctaccagaagacaactgaggacgaggtgcatatttgccataatcaagacgggtattcctacccttctcggcagatggtctctctcgaagatgacgtggcc

SEQ ID NO: 11108 - DNA, 2580 bp, Artificial Sequence
  derived and/or modified sequence
atgggcccttggggttggaagctgcgctggactgtggcactgctgttggcagcagctggaactgccgtgggagatagatgcgaacgcaacgaattccagtgccaggacggaaaatgcattagctacaaatgggtctgcgacggctcagcggagtgtcaagacggaagcgacgagagtcaggaaacctgtctgtcagtgacttgtaagtccggcgacttctcgtgcggcggtcgggtgaatagatgcatccctcagttctggcgttgcgacggtcaggtggactgtgacaatggatccgacgagcaggggtgtccacccaagacttgttcgcaggatgaattcagatgccatgacggaaagtgcatttcgcgccagttcgtgtgcgactcggatcgcgattgcctcgatgggtcagacgaagccagctgtccggtcctcacctgcggaccggcttccttccaatgcaactcgtccacgtgtatcccacagctctgggcgtgcgacaatgaccccgattgtgaggacggatccgatgaatggccgcagagatgtcgcggactctacgtgtttcaaggagactcgtcaccgtgctccgcgttcgagttccattgcctgtccggagaatgcatacacagctcatggaggtgtgacggaggcccggattgcaaggacaagtcggatgaggaaaactgcgcggtggcgacttgccgcccggatgaatttcaatgtagcgatggaaactgcatccatggctcacgtcagtgtgaccgggagtacgactgcaaagatatgtcagacgaagtggggtgcgtcaacgtgacgctctgcgaaggaccaaacaagttcaaatgccattccggcgaatgcattactctggataaggtctgcaacatggcgcgggactgccgggactggtcggacgaacctatcaaggagtgtggaacgaatgaatgcctcgataacaatggaggttgctcacacgtgtgcaacgacctgaagataggctatgagtgtgactgccccgatggcttccagctggtcgcacagcgccggtgtgaagatatcgacgaatgccaagatcccgacacctgctcccagctctgtgttaacctggaaggaggctacaagtgccagtgcgaggaggggtttcagctggatcctcacactaaggcttgcaaagcggtgggatcgattgcctaccttttcttcactaatagacacgaggtccgcaagatgactctggaccggtcggagtacacctctctgattccaaacttgcggaacgtcgtggccctggacactgaagtggcgtcaaatagaatttactggtccgatctgagccagaggatgatctgtagcactcagttggaccgtgctcacggagtctcgtcgtacgatacggtaatctcgcgcgatattcaagcaccagatggcctggcggtggactggatccactcgaacatttactggactgattccgtgctcggcaccgtttcagtggccgataccaagggggtcaaacgcaagactctgttcagagaaaatggatccaagccacgggcgatcgtggtggatccggtccacgggtttatgtactggactgactggggtactccggcgaaaatcaaaaagggagggcttaatggagtcgacatctactcgctcgtgactgaaaacatccaatggccgaacggaatcaccctggatctgctgtcgggccgcctctactgggtggactcgaaacttcactcgatctctagcatcgacgtcaatggcggaaataggaaaactatcttggaggatgagaagcggctggcgcaccctttcagcctggccgtgttcgaggacaaggtgttctggacggacatcatcaacgaggccatcttcagcgccaatcgtctcactggctccgacgtcaacctgcttgctgagaatctgctttcgcccgaggatatggtgctgtttcataaccttacccaaccacggggcgtgaattggtgcgaacggaccaccctgtccaacggtggctgccagtacctctgcctcccggcccctcaaatcaacccgcactcgcctaaattcacttgcgcatgcccggacggtatgttgctggcgagagacatgcggtcgtgccttaccgaagccgaggccgccgtggccacgcaagaaacctccaccgtgcgcctgaaggttagcagcaccgccgtgagaacccaacataccaccaccagaccagtgccggacacctcccgactcccgggggccacccctgggttgaccaccgtggaaatagtgaccatgagccatcaggcacttggggatgtggctggacgcggaaacgaaaagaagccttcctcggtgcgggctctgtcaatcgtcttgcccatcgtcctcctcgtctttctctgcctgggagtattcctcttgtggaagaactggcgcctgaagaacatcaactcaataaactttgataacccagtgtaccagaaaaccactgaggacgaagtgcatatctgtcacaatcaagatggatattcttacccgagcaggcagatggtgagcttggaggacgacgtggca

SEQ ID NO: 11109 - DNA, 2580 bp, Artificial Sequence
  derived and/or modified sequence
atgggcccttggggatggaagttgcggtggaccgtggcactcctacttgcggcagcaggaacggctgtaggtgataggtgcgagaggaatgagttccagtgtcaggatggaaaatgcatttcctacaaatgggtgtgcgacggttctgccgagtgccaggatggatcagatgaaagccaagaaacttgtctgtcggtcacttgtaagtcgggggatttctcttgcggcgggagggtaaatcgatgtattcctcagttctggcgctgcgacggacaagttgattgcgataacggcagcgatgaacagggatgccctcctaagacttgttcccaggatgagttccgatgtcacgatggaaaatgtattagccgccaatttgtgtgcgatagtgacagagattgcctggatgggagtgatgaggcatcttgccctgtgttaacctgcggcccagccagtttccagtgtaattcatcgacatgcatcccacagctgtgggcatgtgataacgaccccgattgtgaggatggtagtgacgaatggccacagcgctgccgaggattgtatgtctttcaaggcgatagtagcccgtgttccgcttttgagttccactgtcttagcggcgagtgtattcactcctcttggcgctgcgacggaggccctgactgtaaagataagagtgatgaggagaattgcgcagttgctacatgtcgcccagatgagtttcagtgttccgacggaaactgtatacacgggagcaggcagtgcgaccgtgagtacgattgcaaagacatgtcagatgaggttggctgcgtgaacgtcacgctctgtgaaggacccaacaaatttaagtgtcacagcggtgagtgtattaccctggataaagtgtgtaatatggccagagattgccgagactggagcgacgaaccgataaaagagtgcggcacaaacgagtgccttgacaataatggcggttgttcacacgtgtgcaacgatctgaagatcggatatgaatgcgattgtcctgatggatttcagctagttgcacagcggcgctgcgaggatattgacgagtgtcaagatccagatacatgtagccaactatgcgtgaatctggagggcggatataagtgccaatgtgaggaggggtttcagcttgatccacatacaaaggcttgtaaggccgtgggctctattgcgtacttgtttttcactaatagacacgaggttcgcaaaatgactttggacagatcggaatacacttccctcatcccaaaccttagaaatgttgtcgccctggatactgaggtggccagtaaccgtatttactggtccgatctgagccagagaatgatatgcagcactcagctggaccgcgcacatggagtgtcttcttacgacacagtgatttctcgagatatacaggcccccgacggcctggcagtggattggattcacagcaacatttattggaccgattctgtccttggaacagtcagcgtggcggacacaaaaggcgtcaagcggaaaacattgtttcgggaaaacggcagtaagcctagagctatcgtagtcgatcccgtccatggtttcatgtactggaccgactgggggacaccagccaaaatcaaaaaaggtggtttaaatggagtggacatttattccctggtaacggagaacattcagtggcccaacggtataactttggatttactttctggacgcctttactgggtggatagtaaactacacagtatcagttcaattgacgtcaacggaggtaatcgtaaaactatcctggaggatgaaaaacgtcttgcccacccattctcactcgctgtcttcgaggacaaggtattctggaccgacataatcaacgaagcaatctttagcgccaaccgtctgactggcagcgatgtgaaccttcttgccgaaaatttattgagccccgaggacatggtactgtttcacaatttgacacagccccgaggagtgaactggtgtgaacgaactaccctgagcaacggaggttgtcagtacttgtgcctgccggctccacaaattaatccccatagtccaaaatttacatgtgcctgtcccgacggaatgctgctagcacgggatatgcgctcgtgtcttaccgaggctgaggcagcagtcgccacccaggaaacctccaccgtgagactgaaagtctctagcaccgcagtgcgcacacaacacaccacaacccgtcccgtgcccgatacatcccggctgccaggggcaacaccaggtctgacaaccgtggaaatagtaaccatgagccaccaagcgctgggggacgtggccggacggggcaacgagaagaagcctagttccgtcagagcactttctatcgtgctgccaattgtcctgctagtgttcctctgcctgggcgtctttctgctgtggaaaaattggagactgaaaaatattaacagcattaactttgacaaccccgtgtaccaaaagacaactgaggacgaagttcatatctgccacaaccaggatggatattcctaccccagtcgccagatggtttctctggaagacgacgtggcc

SEQ ID NO: 11110 - DNA, 2580 bp, Artificial Sequence
  derived and/or modified sequence
atggggccttggggatggaagctgcgctggacagtcgctctgctcctggctgcggcgggtaccgccgtgggggataggtgcgagagaaatgaattccaatgccaggacggaaagtgcatcagctacaaatgggtatgtgatggctcagcagagtgccaggacggaagtgacgaaagtcaagaaacctgtctatcggtgacatgtaagtctggcgactttagctgcggaggccgagtgaatcgatgtattccacagttttggaggtgtgatggccaagtggattgcgacaacggttcagacgagcaggggtgtcctccaaagacctgtagccaggatgaattcagatgccatgacgggaagtgcatctcaaggcagtttgtctgcgacagtgatagggactgcctggatggctccgatgaagcgtcatgtcccgtgttaacttgcggccctgcgtcattccaatgtaattcatcgacctgcattccccagctctgggcctgcgacaatgaccctgattgcgaagacggtagcgacgaatggccccagaggtgtcggggcctgtacgtttttcagggtgattcatctccttgttcagccttcgagttccactgcctgtctggggagtgcatacattcgtcttggcggtgcgacggaggtcccgattgtaaggataaatcagacgaagagaactgtgctgtagctacatgcaggccagatgagttccagtgcagcgacgggaactgcatacacggatctaggcagtgcgatcgggaatatgattgtaaagacatgtctgacgaggtcgggtgtgtgaatgtgacactgtgcgaaggtccgaataagttcaagtgtcactctggggagtgtatcaccctggataaagtctgcaatatggcacgagactgcagagattggagcgacgagcctataaaggagtgcgggaccaatgagtgtctggacaataacggaggatgcagccacgtctgcaacgatctcaagatcgggtacgaatgcgactgtcctgacggtttccagctagttgcgcaaagaagatgtgaggatatagatgaatgtcaggaccccgatacgtgcagtcaactctgtgtgaacctcgaaggcggatataagtgtcaatgcgaggagggcttccagctcgatccccatacaaaagcctgtaaggcggtcgggagcatagcctacctgttcttcactaacagacacgaggtacggaaaatgacattagacagatcagagtacacatctcttattcctaatcttaggaatgtggtggccctggatacagaagtcgcttctaatcggatctattggagtgacctaagtcagcgcatgatctgttccacccagctagatagagcccacggcgtgtcttcatacgacaccgtgataagcagggatatacaagccccagatggactcgcggtcgactggatccacagcaatatctattggacagattcggtgctgggcacagtaagcgtagccgatactaagggggtgaagcgcaagacgctcttcagggaaaatggttccaaaccgagagccatcgtggtagatccagtccacgggtttatgtactggaccgactggggaacaccggcaaagataaagaagggtggccttaatggggtcgacatctacagcctggtgactgaaaacatccaatggcccaacggcataaccctcgacttactgtcaggccgactctattgggtcgattccaagcttcatagtatttcttccattgatgtgaacgggggcaatagaaaaacaattctcgaagatgaaaaacggctcgctcatcctttctccttggcggtgtttgaagacaaggtgttctggactgacataataaacgaggcgattttttccgctaatagactgaccggctcagatgtgaatttgctggcggaaaacctgctgtcgccagaggatatggtccttttccacaacttaacccagccacggggcgtaaactggtgcgagagaacaacattgagcaacggtggctgccagtatctatgcctgcccgctccacagataaacccccacagtccgaagtttacttgtgcatgccctgacggaatgctgcttgcccgtgatatgcgatcgtgcctgaccgaagcagaagccgcagtagctacacaagaaacatcaaccgttcggctgaaggtgtcttcgactgctgttagaacacagcacaccaccacccggccggtcccggatacaagcaggctccccggagccacaccaggactgaccaccgtggaaattgtcaccatgagccatcaagcccttggagatgtggccggccgcgggaacgaaaaaaaaccctctagtgttagagctctgtctatcgttttgcctattgtacttctcgtcttcctgtgcctgggagttttcctgctgtggaagaactggcgcctcaaaaatatcaactcaatcaattttgataaccccgtctatcaaaagacaactgaagatgaggtccatatctgtcacaatcaggatggatattcatacccctctcggcagatggtctcgctggaagatgacgttgcc

SEQ ID NO: 11111 - DNA, 2580 bp, Artificial Sequence
  derived and/or modified sequence
atgggaccttggggctggaaattgcggtggacggtcgctctcttacttgccgccgcaggtaccgcagtcggtgataggtgtgagcgcaacgaattccagtgtcaggacggaaaatgtattagttacaagtgggtgtgcgacggatctgccgagtgtcaggatggaagcgacgagtctcaggaaacctgtctcagcgtaacctgtaaatccggcgactttagttgcggcgggcgggtgaaccgctgcatcccccaattctggaggtgtgacggccaggtggactgcgataatgggagcgatgaacaagggtgtccaccaaagacttgcagccaggacgaattccggtgtcatgatgggaaatgcataagccgccagtttgtctgtgactccgatcgcgactgccttgacggctcggatgaggcctcttgcccggttctgacatgcgggcctgcgtccttccagtgcaatagttcaacctgcattccccagctgtgggcttgtgacaacgatccggattgtgaggatggctccgatgaatggccccagcgatgccgtggactttacgttttccagggggacagcagcccctgcagtgctttcgagtttcactgcttgagcggcgagtgcatccacagctcttggcggtgtgatggaggacctgattgtaaggataagtctgacgaggagaactgcgcagtggctacctgtaggcccgacgagtttcagtgttccgacggaaactgtatccacggtagcaggcagtgcgatcgagaatacgattgcaaagacatgtccgacgaggtggggtgtgtaaatgtgactctctgcgagggaccaaacaagttcaaatgtcatagtggggagtgcattactctggataaagtgtgtaatatggcacgggattgcagagactggagtgatgaacccattaaagagtgcgggactaatgaatgcctggacaacaacggcggctgtagtcacgtttgtaacgacctgaagatcggttacgaatgtgattgcccagacggcttccaactggttgcccagcggcgatgcgaagacatcgacgagtgtcaggatcctgatacatgttcacagctctgtgtaaatctggaagggggttataagtgtcagtgcgaagaagggttccagctggacccccacactaaagcatgcaaagctgtcggctctatcgcctacttgttcttcacaaaccggcatgaggtcaggaaaatgactttggataggtctgagtacaccagtctgatccccaacctcaggaacgttgtagcgttggacacagaagtggctagtaatcgtatctactggagtgacctgtcacagaggatgatatgtagcacccagctggacagggcccacggggtgagctcttacgacaccgttatcagtagagatatacaggccccagatgggcttgctgtagattggatccatagcaatatttactggaccgattcagttttagggacagtgagtgttgctgacacgaaaggagtcaagaggaaaaccctgttccgtgagaatgggagtaaaccgcgagcaattgttgtggacccagttcacggcttcatgtattggaccgattggggtaccccagccaaaatcaaaaaaggtgggctgaacggtgtggatatctatagcctggttactgaaaacatccagtggccaaacggcatcactctggacctgctttctggtcggttgtattgggtagattcgaagctgcacagcattagctccatagatgtgaacggaggcaatcgaaagaccattctcgaagatgaaaaaaggcttgcccatcctttttctctcgctgttttcgaagataaggtgttttggaccgacatcatcaacgaagctatcttttccgctaaccggctaaccggctccgacgtgaatctgctggccgagaatctgctctctcctgaggatatggtgttgtttcacaatctgacccaaccacgtggtgtgaactggtgtgagcgaaccacactctctaatggtgggtgccagtatctatgcctgccggctccccagattaatccccattcacctaaatttacctgcgcttgtcccgatggaatgctgctggcccgggatatgcgatcctgcctcaccgaagccgaagccgcggtggctacacaggagacatccacggtccgcctgaaggtctcaagtactgcagtgcgtactcagcacacgacgacacgccctgtcccggatacttcacggctccccggggccaccccgggcctgaccactgtggaaattgtaacaatgtcacaccaagctctgggcgacgttgctgggaggggaaacgagaagaaaccgtcaagtgttcgcgccctatcgattgttttaccaatagtgttgctggtctttctgtgtctgggtgtgttcctcctatggaaaaactggcggctcaagaatattaattcaatcaattttgataacccagtctaccagaaaactacggaagatgaggtccacatttgccacaaccaagatggctactcatacccttctagacagatggtgtcattggaggacgatgtcgct

SEQ ID NO: 11112 - DNA, 2580 bp, Artificial Sequence
  derived and/or modified sequence
atggggccctggggctggaagttacgctggaccgtggctttgctgttggccgccgccggcacagctgtaggagatcgctgtgaacggaacgagtttcagtgtcaagatgggaaatgtatcagctataagtgggtgtgcgatggcagcgctgaatgtcaagacggcagtgacgagtctcaagagacttgcctgagtgttacctgcaaatctggcgactttagctgcggcggcagagtgaatagatgtataccacaattctggcggtgtgatggccaggtggattgtgacaatggaagcgacgagcaaggatgcccgcccaaaacctgctctcaggacgagtttcgatgtcacgacggtaagtgtatctccaggcaattcgtatgtgactcagaccgtgactgcctcgatggcagtgacgaagcatcatgcccagtattaacctgtgggcccgcatccttccaatgtaattcctcaacttgtattccacagctctgggcctgcgacaacgacccagattgcgaagacggctccgatgagtggccgcagagatgtaggggcctctacgttttccagggcgacagttctccttgcagcgccttcgaatttcactgcttgagtggagagtgtatccactccagctggagatgtgacggcggtccagattgtaaagacaagtcggatgaggagaattgcgcagtagccacatgcagacccgatgaattccaatgttccgacggaaactgcatccacggaagtcggcagtgtgatagagagtacgattgcaaggacatgtctgacgaagtaggatgtgtgaacgtaaccctgtgcgaaggccctaataaattcaagtgccacagtggggagtgtatcactttggataaggtgtgcaatatggctagggactgcagggattggtccgacgagccaatcaaagagtgcggcactaatgagtgtcttgacaacaacggcgggtgtagtcatgtctgcaacgatctcaagatcgggtacgagtgtgactgtccagatgggttccagttggtggctcaacgccgatgcgaagatattgatgagtgtcaggatcctgacacttgttcccagctgtgcgttaatctggaggggggatacaaatgccagtgcgaggaagggttccagctcgatccacatacaaaggcgtgtaaggcagtgggtagcatagcctatctgttttttaccaaccgccatgaggttaggaaaatgacccttgatcgttcggaatataccagccttatcccaaacttgagaaatgtggttgccttggacactgaggtggcctctaaccgcatatactggtccgacctgagtcagcggatgatctgttctacacagctggaccgcgcccatggtgtctcctcatatgataccgtcataagccgcgatattcaagcccctgatggactggcagttgattggatccatagcaacatatactggacagattcggtcctgggcacagttagcgtggcagacaccaagggcgtcaaaagaaagaccctctttcgagaaaacggatcgaaaccgcgagcaatcgtggtggaccccgtccatgggtttatgtactggactgattggggtaccccggccaaaatcaagaaaggcggattgaacggagtcgacatttactctctggttacagagaacattcagtggccaaacggtatcacactggacctgctctcaggccgtctctattgggtcgacagtaaactgcattccatcagctccatcgatgtaaatgggggaaaccgtaagaccattctggaggacgagaagcggttggctcaccccttctccctcgccgttttcgaagacaaggtattttggaccgacattatcaacgaggctatattttctgccaataggctcacaggctcagacgtcaacttgctggcggaaaacctcttgtccccggaagacatggtactgttccacaacttgactcagccccgcggagtcaactggtgcgagcggactactcttagcaacggggggtgccagtacctgtgtcttccggccccccaaattaacccccactcacctaagttcacctgcgcctgtccagatggcatgctgctggcccgagatatgaggtcatgtcttactgaggcagaggccgccgtagctacccaggaaacctcaactgtgagactgaaggtatcctctactgctgtgaggacccagcatacaaccactcgacctgtcccagacacgagcaggctgcccggtgcaacacccgggctgaccacggtggaaattgttactatgagccaccaagccctgggcgatgtggctggccggggcaatgagaagaagccctcttccgttcgggccttgagcatcgtccttcctattgtgctgttggtatttctttgtctcggcgtattcctgctgtggaaaaactggaggttgaagaacatcaactctattaattttgataaccctgtgtatcagaagaccacagaagatgaggttcacatctgccataaccaagatggctactcttatccatcccgacagatggtttccctcgaagacgatgtcgct

SEQ ID NO: 11113 - DNA, 2580 bp, Artificial Sequence
  derived and/or modified sequence
atggggccctggggctggaaactgcgttggactgttgcccttctgctcgccgccgccggcaccgcggtcggtgaccggtgcgaacgaaacgagtttcagtgccaggacggaaagtgtatctcctacaagtgggtctgcgacggctctgcggagtgtcaggacggctctgacgagagccaggagacttgcctctctgttacgtgcaaatcaggcgatttcagttgcggcggtcgagtaaaccggtgcataccacaattctggaggtgtgatggacaggttgactgtgacaacggcagcgacgaacaaggctgcccacccaaaacctgctcccaggatgagtttaggtgtcacgacggaaagtgtatttcccggcaattcgtgtgtgactctgaccgtgattgtctggacggctcagacgaggcttcatgccccgtgctcacgtgcgggcccgccagttttcaatgcaacagcagcacctgtatcccccagctttgggcttgcgataatgaccctgattgtgaggacggctccgatgagtggcctcaacgctgccggggtttgtatgtatttcagggcgactccagtccctgttccgcatttgagttccactgtttgtccggcgagtgtatccattcctcttggagatgcgatggtgggcccgactgcaaggacaaatcagacgaagaaaattgtgccgtggcaacgtgccgcccagatgaatttcaatgttccgatgggaattgcattcacgggtccaggcagtgtgatcgagaatacgactgcaaagatatgtccgatgaggtggggtgcgtgaatgtcacgctctgcgaggggcccaataagttcaagtgtcatagcggagagtgcatcacattggataaggtgtgcaacatggcacgggattgcagggattggtctgacgagcctatcaaggagtgtggcacgaatgaatgtttagacaataacggaggttgcagtcatgtgtgcaacgatttgaagatcggctatgagtgcgactgtcccgatgggttccaactggtggctcagcgtcgttgcgaagatatcgatgagtgtcaggaccctgatacctgcagccaactctgtgtgaacctggaaggcggatataagtgtcagtgtgaagagggtttccagcttgaccctcacaccaaagcatgtaaagccgttggcagcatcgcttacctcttttttactaaccggcatgaggtgaggaagatgaccctcgaccggagcgaatacacctcgctgattcctaacctgaggaacgtagtagctctcgataccgaggtggcctccaaccgcatctattggtcggacctcagtcaacgtatgatttgcagtacccagctggaccgtgctcacggcgtgagctcgtacgataccgtgatcagccgcgacatccaggccccggacggcctggccgtcgattggatccatagcaatatatattggacagacagcgtgctcggtacagtgtctgtggccgacacaaaaggggtgaagcgcaagacactgttccgcgagaacggttccaagccgcgcgctatcgtagtggatccagttcatggcttcatgtactggactgactggggtactcccgctaagatcaaaaaaggcgggctgaacggagtggatatatatagtctggtgacagagaacatccaatggccgaatggaattacattagacctgctgtccgggcgactctattgggtcgatagcaaactccactctatttcttctatcgacgtcaacgggggcaaccgaaagactatactggaagatgagaagcgtttagcacaccctttctctctcgctgtgttcgaggataaggtgttttggactgatatcatcaacgaggccatctttagtgctaacaggctcacgggaagcgacgtcaatttactggcagagaacttgctgagccccgaggatatggtgctgttccacaacctcactcaaccccgcggagtgaattggtgcgagcgcacaaccctaagcaatggcggctgtcaatacctgtgccttccagccccacagataaatccccactcgccaaaatttacctgcgcttgcccagacggaatgcttctagcccgcgacatgcgctcatgcctgacagaagccgaggcggccgtcgcaacccaggagacatcaacagtcagactgaaagtgagctctacggctgtgcgcacacagcataccacaactcgacccgtgcctgatacttcccggcttccaggcgcgacgcctgggctgacgaccgtagagatcgtcaccatgtcccaccaggccttaggagacgtcgcgggaagggggaacgagaagaagccttcgagtgtgagagctctgagcatcgtgctccctatcgtcctcctcgtcttcctgtgtttgggagtgtttctgctgtggaagaactggagattgaaaaacataaactcaatcaattttgacaacccagtgtaccagaagacaacagaggacgaagttcatatctgccataatcaggacggctacagctacccatcgcggcaaatggtttcattggaagacgacgtggcg

SEQ ID NO: 11114 - DNA, 2580 bp, Artificial Sequence
  derived and/or modified sequence
atgggaccatgggggtggaaacttcggtggaccgtggccctgctcctggccgcagcgggtacggcagtgggagatagatgcgaacggaatgagttccagtgtcaggatgggaagtgtatcagttacaagtgggtgtgcgatggatcagccgaatgtcaggacggttccgacgaatcccaagaaacctgcctgagcgtcacttgcaaatctggggacttttcgtgcggagggcgggtgaaccgctgtataccgcaattctggcgctgtgatggtcaggtcgactgcgataacggatccgacgaacaaggctgcccaccaaagacctgctcgcaagatgaattccggtgccacgacggcaagtgcatctcccgccagtttgtgtgtgatagcgatcgggactgtctggacggaagcgacgaagcgagctgtccagttctgacgtgcggcccggccagcttccagtgcaattcgtcgacctgtatcccgcagctctgggcatgcgacaacgatcctgactgcgaagatggctcggacgaatggccgcaaagatgcaggggactgtacgtttttcagggagactcgagcccttgctcggctttcgaattccactgcctctccggtgagtgtatccactcaagttggcgttgcgatggcggcccggattgtaaggataagtcagacgaggaaaattgtgccgtggcgacctgccgccctgacgagttccagtgcagcgatggaaactgcatacacggcagccggcagtgtgaccgcgagtacgattgcaaagacatgtcggacgaggtggggtgcgtcaacgtgaccctttgcgagggacctaacaaattcaagtgtcactcgggagaatgtatcactctggataaggtctgcaatatggctcgcgactgccgggattggtccgatgagcccatcaaggaatgcggaaccaacgaatgcttggataacaatggaggttgctcccacgtgtgcaacgatttgaaaatcgggtacgagtgcgattgccctgacggattccaattggtggctcagcgccggtgcgaagatatcgacgagtgccaggatcctgatacctgttcccagttgtgtgtcaacctcgaaggaggttacaagtgccagtgtgaggagggattccagttggacccccacactaaagcgtgcaaagcagttggctcgatcgcgtacctgttcttcactaatcgacatgaggtgcgcaaaatgaccttggacagatcggaatacacgtcgctcattccgaaccttcgcaacgtagtggccctggacactgaggtggcttccaatcgcatctactggtcagatctgtcgcagaggatgatctgttccactcagctcgatagagcacatggagtgtcgtcgtacgacaccgtgatctcacgcgacatccaagccccggatggattggctgtcgactggatccacagcaacatctactggaccgactccgtgcttggaactgtgtcggtggccgataccaagggtgtcaagagaaaaaccctgttccgcgagaatggaagcaagcctagagcgatcgtggtcgacccggttcacggatttatgtactggaccgattgggggacgccagcaaagatcaagaagggaggactgaacggtgtcgatatctactctctggtcactgagaacatccagtggccaaacggaattaccctggatctcctttccggaagattgtactgggttgattccaagctccattcgatctccagcatcgacgtgaacggcggcaataggaaaactattttggaggatgaaaagcgcctcgcgcatccgtttagcttggccgtctttgaagataaggtgttctggacggacatcatcaacgaagctatcttcagcgcgaatagactgaccggatcggatgtcaacttgctggcggaaaacctcctgagcccagaggatatggtgctctttcacaacctgacccaaccgcggggcgttaactggtgcgagcgcactaccctgtccaatggcggctgtcagtacctgtgtctgccagcaccgcagattaatccacactcacctaaattcacctgcgcctgcccggatggtatgctcttggcccgcgacatgaggtcatgtctgaccgaggcagaggctgcagtcgccactcaggagacttcgacggtgcgcttgaaagtcagcagcactgcggtgagaacccagcacactaccacccgcccagtgcccgacacgtcccgcttgccgggagccaccccaggactcaccaccgtggaaatcgtgaccatgtctcatcaagcgcttggagacgtggctggacggggaaacgagaaaaagccgagctccgtgcgagccctctccattgtcctgccgatcgtgctgctggtgttcctgtgcctgggagtgtttcttctctggaagaactggcggctcaagaatatcaactccatcaatttcgataatcccgtgtaccaaaagactactgaagatgaagtgcacatctgccacaaccaggatggatattcgtatccgagccggcagatggtttcactggaggatgatgtggct

SEQ ID NO: 11115 - DNA, 2580 bp, Artificial Sequence
  derived and/or modified sequence
atgggtccttggggatggaaacttaggtggactgtggcgctgctcctggctgcggcgggtaccgcagtgggtgatcggtgcgagcggaatgagttccagtgccaagacggaaagtgcatttcgtacaagtgggtctgcgacgggtcagccgaatgtcaagatgggtctgatgaatcccaagaaacctgcctttccgtgacgtgtaagagcggtgatttctcatgcgggggacgggtgaatagatgtatacctcagttctggcgttgtgacggacaagtggactgcgataatggctcggatgaacaaggctgccctcctaagacctgctcacaagacgaatttagatgccacgatggaaaatgtatttcccggcaatttgtgtgtgacagcgatcgggactgccttgatggatcggacgaagcatcctgtcccgtgctgacctgtggtccagcatcgtttcagtgtaatagctcaacttgcatccctcagctgtgggcatgcgataacgaccctgactgcgaggatggttcagatgaatggcctcagagatgtcgcggtctgtatgtgtttcagggagattcatcgccatgctccgcgtttgaattccattgcctgtcaggagaatgtattcatagcagctggcgctgtgacggtggaccggactgtaaggataagagcgatgaagaaaactgtgcagtcgcaacttgtagaccagatgagttccaatgttcggatggaaactgtatacatggctcgagacaatgcgatcgagagtacgactgtaaagacatgtcggatgaagtggggtgtgtcaatgtcactctgtgtgaaggacccaataagtttaagtgccatagcggtgaatgtataaccctggacaaggtgtgcaacatggcgcgagattgtagagactggtcggatgagccaattaaggaatgcggaactaacgaatgtctcgacaataatggaggatgttcccacgtctgtaatgatctcaaaatcggatacgaatgtgactgtcctgatggatttcaactcgtggcacaacgaagatgtgaggatattgatgaatgccaagatccagatacttgctcacagctgtgtgtgaatctcgagggagggtacaaatgtcaatgtgaagaaggattccagctcgatccacataccaaggcatgtaaggcagtgggatcgatcgcatacctgtttttcaccaaccggcatgaagtgcggaaaatgactctggataggtccgaatacacttccctgattccaaaccttagaaatgttgtcgcacttgataccgaggtggcctcgaatcgaatctactggtccgatctgtcgcaacgcatgatctgtagcacccaactggacagagcgcatggggtgtcgtcctacgatacggtgattagcagggatatccaagccccggatggattggcagtcgactggatacattcgaacatttactggaccgattcggtccttggaactgtctccgtggccgatactaaaggagtgaagagaaagacccttttccgggaaaacgggtcaaagcccagagccatcgtggtggatcctgtgcacggcttcatgtactggaccgactggggaactccagcaaagattaagaaaggggggcttaacggtgtcgatatctacagcctggttactgagaacattcaatggcctaatgggatcactctggacctgctgtccggtcgactgtactgggtggattccaaactgcattcgatttcgtcgattgacgttaacggcggaaatcgcaaaaccatactggaagatgaaaagcgtctcgcacatcccttctccttggcggtgttcgaggacaaggtcttttggacggatatcataaacgaagcaatctttagcgcaaacagattgactggatcagatgtcaacttgctggcagaaaacctgctttccccggaagatatggtgctttttcacaacctcactcagccccggggtgtgaactggtgtgagagaaccacgctgtccaacggaggctgccagtacttgtgcctgcctgcacctcagataaatccccattcccctaaattcacctgtgcgtgcccagatggaatgcttcttgcaagggatatgcgttcctgtcttaccgaagccgaggctgcagtggccacgcaggaaacttcgaccgtcagactcaaggtgtcatcgactgcagtccgcacccagcataccaccacccgtcccgtcccagacacctcaaggttgccaggcgcaaccccaggcttgactacggtcgagatcgtcaccatgtcacaccaggcactgggagatgtggcaggacgaggtaacgaaaagaaaccatcgtctgtgcgggcactgtcgattgtgctccctatagtgctgcttgtctttctctgtcttggagtgtttctgctttggaaaaactggaggcttaagaacattaactccataaacttcgataacccagtgtaccagaaaacgactgaggacgaagtgcacatttgtcacaatcaagatggatacagctatccatcgcgccaaatggtgtcgcttgaagatgatgtggcg

SEQ ID NO: 11116 - DNA, 2580 bp, Artificial Sequence
  derived and/or modified sequence
atgggaccctgggggtggaaactgcggtggaccgtggctctgctgctggccgctgccggcaccgccgtgggagaccgctgtgagaggaatgagttccagtgccaagacgggaaatgtatttcttataaatgggtgtgtgatggctcagcagagtgccaggacggttccgatgaatcacaggagacctgtctgtctgtgacctgcaagagcggggatttcagctgcggaggccgcgtgaataggtgtattccacagttctggaggtgcgacggccaggttgactgcgataatggctccgacgaacagggctgcccacctaaaacatgcagccaggatgaattccgatgccatgacggaaaatgcatttctcggcagtttgtatgcgactccgatagggactgcttagacggaagcgatgaggccagctgtcccgtgctcacctgcggtcccgcttcattccagtgcaattcctcgacttgtatcccccaactgtgggcttgtgacaatgaccccgactgcgaggacgggagtgacgagtggccacaacgctgtcggggactttacgtgttccagggggattcttccccctgttccgcctttgaattccattgcctatccggagagtgcattcatagttcttggagatgtgatggcggcccggactgtaaggataaatctgatgaagagaattgcgcagttgctacctgcaggccggatgagtttcagtgctccgatgggaactgtatccatggaagccggcagtgcgatagagagtacgactgcaaggacatgagcgatgaggttggttgcgtgaacgtaaccttgtgcgaggggcccaataaatttaaatgtcactcgggcgagtgtattactctcgacaaagtttgcaacatggctagggactgtcgtgattggagcgatgagcccattaaggaatgtgggactaacgaatgcctggacaacaacggaggatgttctcacgtgtgtaatgatctcaagatcggatatgagtgcgattgccctgatgggttccagctggtggcccagcgaagatgcgaggatatcgacgaatgtcaggaccctgacacatgttcccagctctgcgttaaccttgaagggggttacaaatgtcagtgcgaagaaggcttccagctggacccccatactaaggcctgcaaggcagtggggagtattgcatatctttttttcactaaccgccatgaggttcgaaagatgacattggatcgatccgagtacacgagcttgatcccaaacctgcgcaatgttgtagctttggacacggaagtcgccagcaacagaatttactggtcagacttgagccaaagaatgatctgtagcacgcagttagaccgcgctcacggggtgtcgagctacgacaccgtgatatctcgggatatccaagcccccgacggactcgcggtggactggatccacagtaacatctactggactgatagcgtcttgggtacagtctccgttgccgacactaagggcgtgaagcgcaagactctttttcgtgaaaatggatcgaaacctcgagcaatcgtcgtcgatcccgtgcacggattcatgtattggacagactggggtacgcccgcaaagattaaaaagggcggactcaatggggtggacatctactccctggttacagagaatattcagtggcctaatgggataacactcgacttacttagcggcaggctgtattgggtagatagtaagcttcacagcatcagtagtattgatgtgaacggaggtaatcgcaagactattctcgaggatgagaaacggctcgctcacccgttttccctcgcggtgtttgaggataaggtgttttggactgatatcattaacgaggccattttcagcgccaaccgccttactggaagcgacgtgaaccttttagccgagaacctcctcagccccgaggatatggtcctgtttcacaatctgacccagcccaggggagtcaactggtgcgagaggacaacactgtctaacgggggctgccagtacctgtgcttgcccgccccccaaattaacccccactcacctaaatttacttgtgcctgtcctgatggcatgctgttggccagggacatgcggagctgtctgacagaagctgaagctgccgttgctacccaggagacttctacagtgcgcctgaaagtgagtagtaccgctgtcaggacacagcacacaactactagacccgtccccgataccagcaggttgcccggggcaaccccaggattaacaaccgttgagattgtaaccatgtcgcatcaagcactcggtgacgtggccggcagaggtaatgagaagaaacccagcagcgtccgcgccttgagcatcgtcctgcctattgtgctcctcgtctttctatgcctaggagtctttctactgtggaagaattggagactgaaaaacatcaattctatcaatttcgataaccccgtataccagaagaccaccgaagatgaagtccacatttgccataatcaggacgggtactcttatccctccagacagatggtatcactagaggacgatgtggcg

SEQ ID NO: 11117 - DNA, 2580 bp, Artificial Sequence
  derived and/or modified sequence
atgggaccatggggttggaaacttcgttggacagtagctctccttcttgcagctgcaggaactgcagttggagatagatgtgaaagaaatgaattccaatgtcaagatggaaaatgtattagttataaatgggtatgtgatggatctgcagagtgtcaagatggatctgatgaaagtcaagaaacatgtttgagtgtaacatgtaaatcaggtgacttttcttgtggtggaagagttaatagatgtattcctcaattttggagatgtgatggacaagttgactgtgataatggttcagacgaacaaggatgtccaccaaaaacttgttcacaagatgaatttagatgtcatgatggaaaatgtatatcccgtcaattcgtttgtgattcagatagagattgtttagatggtagcgatgaagctagttgtccagttttaacttgtggaccagcatcttttcaatgtaatagctcaacatgcattccacaactttgggcatgtgataacgatccagactgtgaagatggatctgatgaatggccacaaagatgtagaggactttatgtttttcaaggagatagttctccatgtagtgcattcgaattccattgtttgagtggtgaatgtatacattcatcttggaggtgtgatggaggaccagattgtaaagataaaagtgacgaagaaaattgtgctgtagctacatgtagaccagatgaatttcaatgctcagatgggaattgtattcatggatctagacaatgtgatagagaatatgattgtaaagacatgtctgacgaagttggttgtgttaacgtaacattatgcgaaggtccaaataaatttaaatgtcattctggagaatgtatcacactcgataaagtttgtaatatggctagagattgtagagattggtcagatgaaccaattaaggaatgtggaactaacgaatgtcttgataataatggaggttgttcacacgtttgtaatgatcttaagattggatatgaatgtgactgtccagatggttttcaacttgttgcacaacgtagatgtgaagatattgatgaatgtcaagatccagatacatgtagtcaattatgtgttaatttagaaggaggttataaatgtcaatgtgaagagggttttcaattagacccacatacaaaggcatgtaaagcagtgggatctattgcttatctttttttcactaatagacatgaagtcagaaaaatgactttagatagatccgagtatacctctttaataccaaatttaagaaatgttgttgcccttgataccgaagttgcatcaaatcgtatttattggtcagacctttcacaaagaatgatttgttcaacacaacttgatcgtgctcatggagtatcttcttatgatacagtaatttctcgtgacatacaagcaccagatggattagctgtagattggattcatagtaatatttattggacagattcagttttaggaactgtttcagttgcagacactaaaggagttaagagaaagacattattcagagaaaacggttccaaaccacgtgcaattgttgtagatcctgtacatggatttatgtattggacagattggggtactcctgctaaaattaagaaaggaggtttaaacggagtagatatctattcacttgttacagagaatattcaatggccaaatggaataacacttgacttattgagtggacgactttattgggttgacagtaaattgcattcaatttctagcattgatgttaatggaggaaatagaaagacaattttggaagatgaaaaaagacttgctcatccattctcattagcagtttttgaagataaagttttttggacagatataattaacgaagcaattttttcagctaatagacttacaggatcagatgtaaatttattagctgaaaatttacttagtccagaagatatggttttatttcataatcttacgcaaccaagaggggttaattggtgtgaaaggactactctttcaaacggtggttgtcaatatttatgtcttccagctccacaaattaatccacattcaccaaaatttacatgtgcatgtccagatggaatgttacttgcacgagatatgcgtagttgtttaacagaagctgaagctgcagttgcaacacaagaaacttcaacagtaaggttaaaggtaagttcaactgctgttagaacacaacatacgacaacaagacctgttccagatacatcaagattacctggagctacgccaggattaacaactgttgaaattgtcactatgtcacatcaagcccttggagatgttgctggacgtggaaatgaaaaaaaaccttcttctgttagagcacttagtattgttttaccaattgttcttttagtcttcttatgtttaggtgtttttcttttgtggaagaattggagacttaaaaatattaacagtataaattttgacaatccagtatatcaaaaaacaactgaagatgaggttcatatttgtcataatcaagatggatattcatatccttcaagacaaatggtttcattagaagatgatgttgct

SEQ ID NO: 11118 - DNA, 2580 bp, Artificial Sequence
  derived and/or modified sequence
atgggaccgtggggatggaagttgagatggaccgtggcccttttgctggcagccgccggcactgctgtgggagacaggtgcgagcggaacgaatttcagtgtcaagatggcaagtgcatatcatacaaatgggtctgcgacggatcggctgaatgccaagatggctccgacgaatcccaggaaacttgcctgtccgtgacctgcaagtcgggcgacttcagttgcggaggtcgagtgaaccggtgcatcccgcaattctggcgttgcgacggacaggtagattgcgacaacggtagcgatgaacagggttgtccgccaaagacgtgctctcaagatgaattccgctgccacgacggaaaatgcatcagcaggcagttcgtgtgcgactcggaccgcgactgtcttgatggaagcgatgaagccagctgcccggtcctgacttgtggaccagcctcattccagtgcaacagctccacgtgcatcccacaactttgggcttgtgataacgaccctgactgtgaagatggcagcgatgagtggcctcagcgctgtagaggactttacgtctttcagggtgacagcagcccatgctcggccttcgaattccactgcctctcgggggaatgcatccactcctcatggcggtgcgacggagggcccgactgcaaggataaaagcgacgaagaaaactgcgccgttgccacttgcaggccggacgagtttcagtgctcggacggcaactgcatccacggaagccgccagtgcgacagggagtatgattgcaaagacatgtccgacgaggtcggatgcgtcaacgtcactctgtgcgagggaccgaataagttcaaatgtcattccggagaatgcatcactctggacaaagtgtgtaatatggcccgagattgccgcgactggtctgatgaaccgatcaaggaatgcggaactaacgagtgtctggacaataatggtggatgtagccatgtgtgcaatgacctgaagattggatacgaatgtgactgtccggatgggttccagctcgtggcgcagagacggtgcgaagatatcgacgagtgtcaggatccggacacctgctcgcaactctgcgtgaatcttgagggaggctacaagtgccaatgcgaagagggattccaactggacccccataccaaggcgtgtaaagcagtcgggtcgattgcctacctgtttttcacgaatcgccacgaggtgcgcaagatgaccctggatcggtcggagtacacctcgctgatcccgaacctccggaacgtggtggcactcgacaccgaagtcgcatccaatcgcatctactggtcagatctgtcacagcgcatgatctgctccacccaacttgatagagctcacggtgtgtcgtcatacgacaccgtgatcagcagagacattcaagccccggacggcctggcggtggactggatccattcaaatatctactggaccgacagcgtcctgggaaccgtgtcggtcgccgatactaagggcgtcaagcgcaagactctcttccgcgagaatggaagcaaaccccgggccatcgtcgtggatcctgtgcacggattcatgtactggactgattggggaaccccggcgaagatcaagaagggcggcctgaacggcgtggacatctactcactggtgaccgagaacattcaatggcctaacggcattactctggacctgctctcgggacggctgtattgggtggactccaagctccactcgatctcctccatcgacgtgaacggggggaacagaaagactattctggaagatgagaagcggctggctcatcctttctcactcgcggtgttcgaggataaggtgttctggactgacatcatcaatgaggcaattttctccgccaatcgcctgactggttccgacgttaacctgctggcagagaacctgctcagtccggaggacatggtgttgtttcacaacctgacgcaaccacggggtgtgaactggtgcgaacggactaccctgagcaacggaggctgtcagtacctctgcctcccggcaccccaaatcaacccacattcaccaaagtttacttgtgcgtgcccggacggtatgctgctggcgagagacatgagatcctgcctcaccgaagcagaggcagccgtcgctacgcaggaaacctccactgtccggttgaaggtgtcgtcaaccgccgtgcggacccagcatacgaccactcgccctgtcccggatacttcgaggctcccgggggccaccccagggttgaccaccgtcgaaatcgtgactatgtctcaccaggctctgggagatgttgcgggacgcgggaacgagaagaagccatcgtcagtgcgcgcgttgtcgatcgtgctcccaatcgtgctgctggtgttcctctgtttgggagtgttcctcctttggaaaaactggaggctcaaaaatatcaactcgatcaattttgacaaccccgtgtaccagaaaaccaccgaagatgaagttcacatctgccataatcaggacggctactcatacccttccagacagatggtgtccctggaggatgatgtcgcg

SEQ ID NO: 11119 - DNA, 2580 bp, Artificial Sequence
  derived and/or modified sequence
atgggtccctggggatggaagctcagatggacagtggcccttcttttagccgccgcaggaaccgctgtgggtgatcgctgtgagcggaacgaattccaatgccaggacggaaagtgcatctcttataagtgggtttgcgacgggagcgcagagtgtcaggacggatcggatgagtcacaggaaacttgcttgtccgttacttgcaaatccggggattttagttgtggagggagggtgaacagatgtattcctcagttttggcgctgtgacggtcaggtggactgtgacaatgggtcggatgaacaaggctgccccccaaaaacctgcagccaggatgagtttcggtgtcatgatgggaaatgtatctcccggcagttcgtctgtgactcagaccgcgactgccttgacggttcagatgaagccagctgtccagttctgacttgcgggccagcgagcttccagtgtaactcatccacttgcattccacagctatgggcctgtgataacgatcctgactgtgaggatgggagtgatgagtggccccagaggtgccggggactctatgtgtttcagggggattcaagtccctgctcagccttcgagtttcattgcctctcaggagagtgcatccatagttcctggaggtgcgatggaggcccagactgcaaggataagagtgatgaggagaactgtgccgtggcgacatgccgaccagatgagtttcagtgtagtgacggaaattgtatccacggctccaggcaatgtgaccgagagtatgactgcaaagacatgagtgatgaggtcggctgcgtaaatgtcactttgtgcgaggggccgaacaagttcaaatgtcatagcggtgagtgtattactctcgacaaggtgtgcaacatggcaagggattgtcgggactggagcgacgaaccgatcaaagaatgcggcaccaacgagtgtctggacaataatggaggatgtagccatgtctgcaacgatctgaagatcggatatgagtgcgactgcccagacggctttcagcttgtcgcacaaaggcgctgcgaagacattgacgaatgccaagatcccgacacctgtagccagctgtgcgtgaacctggaaggtggatataagtgccagtgcgaggaagggtttcagctggaccctcacaccaaagcatgcaaggccgtcgggtccattgcatatctgtttttcacaaaccgccatgaagttcggaaaatgaccctggacagatccgagtatacctctctgatccctaacctgagaaatgttgtggcattagacaccgaggtggcttccaaccgaatctattggagcgacttgtctcagcgaatgatatgctcaacgcagctggacagagcccacggagtcagtagctatgataccgtcatttccagggatattcaggctccagacggtttggccgttgattggatccacagcaacatatactggactgattctgtcctcggcacagtgtccgtggctgatacaaagggagtcaagcgaaaaacgctatttcgtgagaacggttctaaacccagagccattgtggttgatcccgtccatgggttcatgtactggacagactggggaacccccgccaagattaagaagggtggcttaaacggcgtcgatatctactccttagtcacggagaacatccagtggccgaatgggataactctggatctgctgtctgggagactgtattgggtggactcaaagcttcactctatctcaagcattgatgttaacggtgggaatcgaaagacgatcctggaggatgagaagcgtctggcacaccccttttctctcgccgtttttgaagacaaagtgttctggaccgatattatcaacgaggctatcttcagtgcaaatcggctgaccgggagcgatgtgaacctgctcgccgaaaatcttctttccccagaagacatggttctctttcataatttgacacagccacgcggagtcaactggtgtgagcggactactctgtccaatggcggctgccagtacttgtgcctgccggcaccgcagattaacccgcattcacctaagtttacctgtgcctgtccggatgggatgcttttggctagagatatgagatcctgcctgacggaggcagaggctgcagtggcgacacaagagaccagcactgtgcggctgaaagtgagtagcaccgccgtgcggacccagcatacaaccactcgacccgttcccgacaccagtaggctccccggcgctacacccgggcttaccactgtagaaatcgtgactatgtcgcatcaggccttgggtgatgttgcagggcggggaaacgagaagaagccctcatccgttagagctctatcaatcgtgctgccaatagtcctcctcgtgttcctctgcctgggggtctttctgctgtggaagaactggaggctgaagaacattaacagcatcaattttgacaatccggtttaccagaaaactacagaggacgaagtgcacatttgccataatcaggacggatacagttacccaagcaggcaaatggtcagcttggaggacgatgtggcc

SEQ ID NO: 11120 - DNA, 2580 bp, Artificial Sequence
  derived and/or modified sequence
atggggccctggggctggaaactgagatggaccgtggccctcctgctcgcggcagccggaaccgccgtcggggaccgctgcgagcggaacgaattccagtgtcaagacggaaaatgtatcagctacaaatgggtgtgtgacggctctgctgagtgccaggacggcagcgacgagagccaagagacctgcctctccgtgacctgcaagtcaggggatttttcctgcggaggacgtgtgaaccgctgtatcccccagttctggcgctgcgatggtcaggtggactgcgacaatggatccgacgaacagggctgtccgccaaaaacgtgtagccaggatgagtttcggtgccacgacggtaagtgtatcagccgacagttcgtgtgtgactcagaccgggactgcctcgacgggagcgacgaagcctcctgccccgtattgacttgcggacccgcaagttttcaatgcaatagcagcacctgtatcccccagctctgggcctgcgacaatgatcccgattgcgaagacggaagtgatgagtggccccagcggtgcaggggcctgtacgtttttcagggagactcgtcgccttgtagtgccttcgagttccactgcctgagtggcgagtgcatccattccagttggagatgcgatggaggaccagattgtaaggataagtccgacgaggagaactgtgcggtcgcgacatgtcgcccagacgaattccaatgctccgacggtaattgtatccacggctctcgccaatgtgaccgggaatacgactgtaaagacatgtcagacgaagtgggatgtgtcaatgtgactttatgtgagggccccaataaattcaaatgccactctggagagtgtattaccttggacaaggtgtgcaacatggcaagagattgccgggactggagtgacgaaccaataaaggagtgtggcacaaatgagtgtctggataacaacggtggctgctcacacgtgtgcaacgatctcaaaattgggtatgaatgcgattgcccagatggctttcagctcgtggcacagaggcggtgtgaagacatcgatgagtgtcaggatcctgacacctgttcccaattatgcgtgaacttggagggaggctataagtgccaatgtgaagagggctttcagttggatccccacaccaaggcttgtaaagcggtcggctcgatagcttatttgttttttaccaaccgtcatgaggtaagaaagatgaccctggaccggtcggaatacactagcttgatccctaacctccgcaacgtggtcgcactggatacagaggtggcctctaataggatctattggagcgacttgagccagcgcatgatttgctctacacagttggatcgggcccatggggtgtcctcctacgatacggtgatttctagggacatacaggcgccagacggacttgcagtggattggatccactctaatatctactggaccgatagcgtactgggtaccgtgagcgtggccgataccaagggagtgaaacgtaaaaccctgttccgggaaaatgggtcaaagcctcgagctattgtggttgaccctgtgcatggatttatgtattggactgactggggcactcccgctaaaattaaaaagggtggcctcaatggtgtcgacatttacagcctggtcacagagaatatccagtggcctaatggaataacccttgatctgctaagtgggcggttgtattgggtcgattcgaagttacactcaatttcaagcatcgatgtgaatgggggaaaccggaagacaattctcgaagatgagaaacgactcgcccaccccttctcactggccgtattcgaagacaaagtgttttggaccgatattattaacgaggctattttctctgccaacagactaaccggctctgacgtaaatctgctagcagagaacttgctatctcccgaggatatggtccttttccataatctgacgcagccacgcggcgtgaactggtgcgagagaacaaccctgtccaacgggggctgtcaatacctctgcctcccggcgcctcagatcaatcctcactcaccgaagtttacctgtgcctgccccgatggcatgcttctggcccgggacatgcgtagctgtctcaccgaggccgaagctgccgtggccacccaggaaacctcaacagtacgactgaaggtgtctagtacggctgtcagaacacagcacacaacaacccgcccagtgccggatacttcacggctacccggggccacacctggtttgactacagtcgagattgtaacaatgtcccatcaagccttgggagatgtggcaggtagggggaatgagaagaagccatcctccgtccgggccctgtctatcgtgctgccaatcgtactgttggtgttcctatgccttggagtgtttctcctgtggaagaactggagactcaaaaacatcaattctataaattttgataacccggtgtaccaaaagacaaccgaggacgaggtgcatatctgtcataatcaggacggttactcttatccgagtcgccaaatggtgtctcttgaagacgacgtcgcc

SEQ ID NO: 11121 - DNA, 2580 bp, Artificial Sequence
  derived and/or modified sequence
atgggaccgtggggatggaaattgaggtggaccgtcgcccttctgctcgcggctgctggcacggctgtcggcgaccgctgcgaacgcaatgagtttcaatgccaagacgggaagtgcatctcatacaagtgggtctgcgacggatcagcggaatgccaagatgggtcggacgaatcgcaggaaacctgcctctcagtcacctgtaagtcgggcgatttcagctgcgggggccgggtgaaccgctgcatcccccaattctggcggtgcgacgggcaggttgactgcgacaacggttctgacgaacaaggctgccctcctaagacctgttcccaggatgaattcaggtgccatgatggaaaatgcatctcgcgccaattcgtgtgcgattccgacagagactgtctggatggaagtgacgaggcatcgtgcccagtcctgacttgcgggccggcttccttccagtgcaactcgtcaacttgtatcccgcagttgtgggcctgtgataacgaccccgattgcgaggacggctcggatgaatggcctcagagatgccgtggactgtacgtttttcaaggtgattcttcaccgtgcagcgcttttgagttccattgtctgtcaggcgaatgtatccactcgagttggcgatgcgacggcggacccgactgtaaggataagtcagacgaggagaattgcgccgtggccacttgccgcccggacgagtttcagtgctcagatggaaactgtatccatggatcacgccagtgcgaccgcgaatacgattgtaaggatatgtctgatgaggtcggctgcgtgaatgtgaccctgtgcgaaggtccgaacaagttcaaatgtcacagcggagaatgcattacgctcgataaggtgtgtaacatggcccgggattgtcgcgattggtcggacgagccaattaaggaatgcggtacgaatgagtgcctggacaataacggaggttgttcgcacgtgtgcaatgacctcaagatcggatatgagtgcgattgcccggacggattccagctggtggcacagcgcagatgcgaggacatcgatgaatgtcaggatccagacacttgttcacagctgtgcgtgaacctcgaaggaggctacaaatgtcagtgcgaagagggattccagctcgacccacacaccaaagcctgcaaggcggtggggagcatcgcctacctgttcttcaccaatcgccacgaagtgcgcaaaatgaccctggatcggtccgaatacacgtccctcatccctaatctgcgcaatgtggtggctctggacaccgaggttgcaagcaaccgcatctattggtccgatctgtcgcagcggatgatctgctcgactcagctggaccgcgcgcacggcgtgagttcctacgatactgtaatctcgcgggacatccaagcgcccgacgggctggcggtggattggattcacagcaacatttactggaccgactcggttcttggcactgtgagcgtcgcggacaccaaaggagtcaagcgcaagacgttgtttcgggagaacggaagcaaaccgcgcgccatcgtggtggatccagtgcatgggttcatgtactggactgattggggcaccccggccaagatcaagaaaggtggattgaacggagtggacatatactccctcgttaccgagaatatccaatggccgaatggaattactctggaccttctcagcggacggctgtactgggtcgactcgaaactccattcaattagttccattgatgtgaacggaggaaacagaaaaaccatcctggaagatgagaagagactggcgcatccgttttccctggccgtgttcgaggacaaagtgttctggaccgacatcatcaacgaggcgatcttctcggcgaatcggctgaccggatcggacgtgaaccttctggccgagaaccttctgtccccggaggatatggtgctgtttcacaatctcactcagccacggggggtgaactggtgcgaacggactaccctctccaatggtggatgccagtacctgtgcctgccggctccgcaaatcaatcctcactcacccaagttcacttgcgcctgccctgacggaatgcttttggcgagggacatgagatcgtgcctcactgaagcagaagccgcggtggccacccaggaaacgtccactgtgagactgaaagtgtcgtccactgctgttagaacccagcacactaccactcgccccgtcccagacacttcgagattgccaggtgctaccccgggactcactaccgtcgaaatcgtgaccatgtcgcatcaggctctcggggacgtcgccggacgtggaaatgaaaagaagccttcctcggttagagccctgtcgattgtgctgccgatcgtgctgctcgtattcttgtgcctgggagtgttcctgctctggaagaactggagactgaagaacatcaattcgatcaactttgacaatccagtgtaccagaaaactactgaagatgaagttcacatctgtcataatcaggacggatactcatacccttcgagacaaatggtgagcctcgaggacgacgtcgct

SEQ ID NO: 11122 - DNA, 2580 bp, Artificial Sequence
  derived and/or modified sequence
atgggaccctggggctggaagctgagatggactgttgccctgctcctcgctgcagcgggtacagctgttggggaccggtgtgagcgtaacgagtttcagtgtcaggacggaaaatgcatttcctataaatgggtgtgcgatggaagtgccgaatgccaggatgggtcagatgaatctcaggaaacctgtttgagcgtgacatgcaagagcggcgacttctcatgtgggggaagagtgaaccggtgtatcccccaattttggcgttgtgatggacaggtggactgcgataacggaagcgatgaacaaggctgcccgcctaaaacctgtagccaagatgagttccggtgtcacgacggaaaatgcatctctagacagtttgtatgcgacagcgatcgggactgtctcgatggctcagacgaagcctcttgcccagtgctgacttgcggcccagcatccttccagtgcaacagcagcacttgtattcctcagctgtgggcatgtgacaacgatccagattgcgaggacggaagtgatgagtggccccaaaggtgtcggggactttatgtcttccagggggactcctctccctgcagtgcctttgaattccactgtctctcgggagagtgcatccactcaagttggcgttgtgacggcggccctgattgtaaagataagagcgatgaggagaattgtgctgtagctacttgtcgtcctgatgaatttcagtgttccgacggcaattgtattcatggcagcagacagtgcgacagggaatacgattgcaaggatatgtcagatgaagtaggatgcgtgaatgtgaccttgtgtgaagggcctaacaaatttaagtgccattccggcgaatgtataaccctggacaaagtttgcaacatggccagggattgcagagattggtcagatgaacccattaaggaatgtggcacaaacgagtgcttggataacaatgggggttgttcccacgtttgtaatgacttgaaaatcggatatgagtgcgattgcccagacggatttcagcttgtggcccaacgccggtgtgaagacatcgacgaatgccaggaccccgacacatgctcccaactgtgtgtcaatcttgagggagggtataagtgtcagtgcgaggagggtttccagctggaccctcataccaaggcgtgcaaggccgtcggtagcatagcctatttgttctttaccaacagacatgaggtacggaagatgacactcgacaggtcagagtacaccagccttattcctaaccttagaaacgtggtggctctggacacggaagtcgccagcaatcgaatctactggtcagacttatcccagcgaatgatatgctcgactcagctggatagagctcatggtgtgagctcctacgatacagttatctcccgcgatatccaggctccagacgggctcgccgtcgattggatacattctaacatatactggaccgactccgttctggggacagtttccgtcgctgacaccaagggggtgaaacgcaaaacgctctttcgggagaatggaagtaaaccacgcgcgatcgtcgtggatcctgtgcacggctttatgtattggacagactggggaacccctgccaagattaaaaaaggtggcctcaacggcgttgacatttatagcctggttactgaaaatatccagtggccaaacggcattactctcgatctcctgagcggccgcctctactgggtggactcaaagttacattcaatcagcagcatagatgtgaatggcggtaatagaaagaccattctcgaagatgaaaagcggcttgctcatcctttttcgttggccgtgtttgaggataaggtattctggacagatattatcaacgaggccatcttttccgccaataggctcaccgggtccgatgtgaaccttctagccgaaaacctactttccccagaggacatggtcttatttcacaacctgacccagccccgaggagtgaattggtgcgaaaggacaacactgtccaacgggggctgccaatacctttgtctgcctgccccacagatcaacccacattcccctaaatttacttgcgcctgccccgatggaatgctgcttgctcgcgacatgcggagttgcctgaccgaagctgaagctgcagtcgccacccaggagacctccaccgtgagactgaaggtgtcatctaccgccgtacggacacaacatacaacaactcgtcccgtcccagatacttcccggttgccaggcgctacacccggactgactaccgtggaaatcgtcacaatgagtcaccaggcactgggagatgttgctgggcggggaaacgagaaaaaaccttccagtgttagggcactgtctatagtgcttccgatcgtgcttctggtgttcttgtgcctgggcgtgtttctgctgtggaaaaattggcgcttgaaaaacattaattctattaattttgacaaccctgtgtaccagaaaacaactgaagacgaggttcatatctgccacaaccaggacggctattcttacccttcaagacagatggtatctctggaggacgatgtcgca

SEQ ID NO: 11123 - DNA, 2580 bp, Artificial Sequence
  derived and/or modified sequence
atgggcccatggggatggaaactcaggtggaccgtggctctcttgctggcagccgcggggaccgcagtgggtgacagatgcgaacgaaacgagtttcagtgtcaagacggcaagtgcatcagctacaaatgggtgtgcgacgggtccgctgaatgtcaagatggaagcgacgagtctcaggagacatgtctaagcgtgacctgcaagtctggcgacttttcttgcggtggtcgtgtgaacaggtgcattcctcaattctggcgttgcgacggccaggtcgattgtgacaacggttcagacgagcagggatgcccacccaagacgtgtagccaggatgagttccgttgccatgacggtaaatgcatatcaaggcagtttgtgtgcgatagcgaccgcgattgtcttgacgggtccgatgaagcttcttgcccagtgctgacttgcgggccagccagtttccagtgcaattcgagcacatgcattccacagctttgggcctgtgataatgaccccgactgcgaagacggctctgatgaatggccgcagagatgtagaggactctatgtctttcaaggcgattcgagtccttgtagtgcgttcgaatttcactgcctgtctggagaatgcatccattcatcatggaggtgcgacggcggtccggactgcaaggacaagagcgacgaagaaaattgcgcggtcgcgacatgcaggcccgatgaattccagtgtagcgacggtaactgtattcatgggtcccggcagtgcgaccgtgagtacgattgcaaagatatgtcagacgaagttggatgtgtgaacgtgacactgtgcgaagggcccaacaagtttaaatgccattcgggagagtgcataaccttggacaaagtttgtaacatggcacgagactgccgagattggtcagacgaaccaattaaagagtgtggcacaaacgagtgtctagataacaacggggggtgtagccatgtctgcaacgatctaaagattgggtacgaatgtgactgtcccgacggtttccagttggtagctcagcgacggtgcgaggacatagacgaatgccaagatccagacacttgctcacaactgtgcgtaaatttagaaggaggatataagtgccagtgtgaagaaggtttccagttagacccccacacaaaggcctgcaaggctgtcggctcgattgcctacctcttttttacgaaccgtcatgaggtgcgtaaaatgacattggatcggtcagaatatacttccctcatccctaacctgcgcaatgtcgtcgcgctcgatactgaggttgccagcaacagaatctactggtccgacctgtcacagaggatgatttgctctactcagttggacagagcgcatggagtgtccagttatgacacagtgatctctcgggatattcaggcccctgacggtctggcagtggattggatccattcaaacatctactggaccgattccgttctcggtacagtgtcagttgctgatactaaaggcgttaagaggaaaactttattcagggagaatggatctaaaccccgcgccatcgtcgtggatcctgtacatgggtttatgtactggactgactggggcacacccgcgaaaataaaaaaaggggggctgaacggcgtggacatctattctctggtcacggaaaatatccagtggcccaatggaatcactctggacttactctccggacgactttactgggtggacagcaaactgcatagtatttcaagcattgacgttaatggaggaaacaggaagacgatcctcgaggacgagaaaaggctggcgcatccctttagtcttgctgtatttgaagataaggttttttggaccgacataataaacgaggctatatttagtgcgaacaggctgacagggtccgatgtaaatcttttagctgagaacctgctcagcccagaagacatggtgctctttcacaacttgacccagcctcgaggggtgaactggtgtgagcgaacgactttgagcaacggcggctgccagtacctgtgcttgcctgccccacagatcaaccctcacagccctaaatttacctgcgcatgcccggacggtatgttgctggcccgagacatgaggtcatgcttaacagaagcggaagccgcggttgctactcaggagacctctactgtgagactgaaagtgtcctctaccgcggttcgcacccaacataccaccacccgaccagtgccggatacttcacgactgcctggcgccacacctgggctgactaccgtggagattgtgacgatgtcacaccaggccctgggtgatgtagccggcagaggaaatgagaaaaaaccctcatccgtccgagcactgtccatcgtgcttcctatagttttgctggtgtttctctgcctgggtgtgtttctgctgtggaaaaattggaggctgaaaaacataaattcaattaatttcgacaaccccgtgtaccaaaaaactaccgaagacgaagtgcacatttgccataatcaagacggatacagttatccatctagacagatggttagtttggaggacgatgttgct

SEQ ID NO: 11124 - DNA, 2580 bp, Artificial Sequence
  derived and/or modified sequence
atgggaccctgggggtggaaactcaggtggactgttgccctcctgcttgcagccgccgggactgcagttggcgatcggtgcgagcgcaacgagttccaatgccaagatggtaaatgtatttcgtataagtgggtttgcgacggttctgctgagtgccaggatggatcggatgaatcccaggaaacttgcctgagtgtaacctgcaaatctggtgatttttcctgcggagggagagtgaatagatgcattccccagttttggaggtgtgatggccaggttgactgtgacaatggatcagacgaacagggctgcccgcccaagacgtgctcccaggatgaattccgctgccatgacggtaagtgcatttcacgccagttcgtgtgtgacagtgacagagactgcctcgacggctccgatgaagcgtcctgtccagtcttaacatgtggtccagcatcattccagtgtaattcaagtacttgcataccccaactatgggcttgcgataacgaccccgattgcgaagacggaagtgacgaatggccccagcggtgtagagggttgtacgtgtttcagggtgattcaagcccatgctctgcattcgaattccactgtctgagcggggaatgcatccatagttcatggcgctgcgatggaggccccgattgtaaagataaaagcgatgaggaaaactgcgctgtggccacatgcaggcctgatgagtttcagtgtagtgacggaaattgtatccatggatcacggcagtgcgatagggagtacgactgcaaagatatgtccgatgaggttggctgcgttaacgtgacactgtgtgagggacccaacaagtttaagtgtcacagcggggaatgtattactctggacaaggtgtgcaacatggctcgagactgtagagactggagcgatgaacctatcaaggagtgtgggaccaatgagtgtttggacaacaatggagggtgtagccacgtctgtaatgatctgaaaataggctacgaatgcgactgtccggatgggttccagttagtggctcaacggcgatgtgaggacatcgacgagtgtcaggatcctgacacatgcagccaactctgcgttaacctggagggcggctataagtgccaatgtgaggagggctttcaactcgacccccataccaaagcctgcaaggctgtagggtccatagcctatctgttctttactaatcgacacgaggtgcggaagatgaccctggaccgatcggagtacaccagcctgattcccaatttgaggaacgtcgtagccttggacacggaggtcgcctctaataggatctattggagtgacctgagccagcgaatgatctgcagtacccagctggaccgagcccacggtgtgagttcatacgataccgtgatatcccgggacatccaggccccagatggactggccgtggattggattcactctaacatctactggactgactctgtactgggcaccgtgagcgtagctgatacaaagggtgtaaagagaaagactctgtttagggagaatggcagtaagcctagggctattgtagttgaccccgtgcacggattcatgtattggacggattggggtacccccgccaaaataaaaaagggaggactgaacggggtggacatttatagcttagttacggaaaatattcagtggccaaacgggatcacactggatctgctgtcaggccgtctgtattgggtcgactcaaaactgcactcgatctcctcgatcgatgttaacgggggcaacaggaaaactattctcgaagatgagaaaaggctcgcacatccctttagtcttgccgtgtttgaagataaggtgttctggaccgacatcattaatgaggccatctttagtgcaaaccgtttgactgggagcgacgtgaacttactggcagagaacttgctgtcacccgaggatatggttctgtttcataatttaacgcagcctcgcggagtcaactggtgtgaaagaactaccttatcaaacggcggatgtcagtatctgtgccttcccgcccctcagatcaacccccacagtcccaagttcacatgcgcctgtcccgacggaatgctgttggcccgagatatgaggagctgtcttactgaagcagaagctgctgtggctacccaggagacctcgacagtgaggctgaaagtgtcttcaaccgcagttcgaacacagcacacaactacccgcccagtgcctgacacctctcgcctgcccggagcaacgcccggcctgaccaccgttgaaattgttactatgtcacatcaggccttgggggacgtcgccggacggggaaacgaaaagaagccaagctccgttagggccctatctatagtcttaccaattgtgctactggtgttcctgtgtcttggagtgtttctgctgtggaaaaattggcggctgaagaatattaattctatcaatttcgataacccagtgtatcagaagaccaccgaagacgaagtgcacatctgtcacaatcaagatgggtactcctacccctcgcgacagatggttagcctcgaagatgatgtggct

SEQ ID NO: 11125 - DNA, 2580 bp, Artificial Sequence
  derived and/or modified sequence
atggggccctggggatggaagctgaggtggaccgtggcactgcttctggcggcagcgggaactgcagtgggagacagatgtgagagaaatgaatttcaatgccaagacggcaagtgcatatcgtacaagtgggtgtgtgacggatccgcagaatgccaggacggttcggatgagtcgcaagaaacttgtctttccgttacctgtaagtcaggcgatttttcatgcggaggccgtgtgaaccgatgtatccctcaattttggcgttgcgatgggcaggtggattgtgacaatggttccgacgagcagggttgtccgcccaagacctgctcgcaagacgaatttcgttgtcatgatggaaagtgcatctcccggcaatttgtatgtgactcagatagagactgtctggatggttccgatgaagcgagttgccctgtgctgacctgtggtcctgcatcctttcagtgtaactcatctacctgcataccccaactttgggcctgcgacaacgatcctgattgtgaagatggatcggacgaatggcctcagaggtgtaggggattgtacgtgtttcagggtgacagctccccatgttccgcctttgaattccattgtctttcgggggagtgtatacattcgtcgtggcgctgcgacgggggccctgattgtaaggacaaatcagatgaggagaactgtgcggtggccacttgtcgacctgatgagtttcagtgttcggatggtaactgcatccatggctcgcgacagtgtgatagagaatacgattgcaaggatatgtcggatgaggtgggttgcgtgaacgttaccctttgcgagggacctaacaaattcaagtgtcattcgggagagtgtattacccttgataaagtgtgcaacatggcacgggattgtagagactggtctgatgaacctattaaggaatgcggtaccaatgagtgtcttgacaacaacggaggatgtagccatgtgtgcaacgaccttaagattggttacgaatgtgattgccccgatggttttcagctggtggcccaaagacggtgcgaggacattgacgaatgtcaggaccctgatacttgttcgcaactttgtgtcaatcttgaaggtggatacaagtgtcaatgtgaagaagggttccaactcgacccacatactaaggcatgtaaggcggtcggatccattgcttatcttttctttaccaacagacacgaggtgagaaaaatgacgctcgatcggtcggaatacacctcgctcatccctaatttgcgcaacgttgtggcactggataccgaggttgcaagcaatcgcatttactggtcggatcttagccaaagaatgatttgctcaacccagttggacagggcgcatggagtgagttcatacgatacggttatttcaagagatatccaggcgcctgatgggctcgctgtggactggattcactcgaacatttactggaccgactccgtgcttggaactgtctccgtcgccgacactaagggtgtcaagcggaaaaccctgttcagagagaatggttcgaagcccagagcgatcgttgtggaccccgtccacggattcatgtattggaccgattggggcacgcctgccaagatcaagaagggcgggctcaatggtgtggacatttacagcctcgtcactgaaaacattcaatggcccaacggtataaccctggacctgctttcgggacgcctttactgggtcgactcgaagctgcactccatctcctcgatcgatgtgaacggaggaaataggaaaaccatcttggaggatgaaaagcggctggcacatccattttccctggcggtctttgaagataaggtcttttggactgatatcattaatgaagcaattttctcagccaaccgattgactggttcagatgtgaaccttctcgcagaaaacctcttgtccccagaggatatggtgctctttcataaccttacccaacccaggggagtcaactggtgtgagagaactacccttagcaacggtggttgtcaatacctgtgccttccggccccccaaatcaacccacattccccaaagtttacttgtgcatgtccagacggaatgctgcttgcccgggatatgaggtcatgccttacggaggccgaagccgcagtggccacccaggagacttcaaccgtcaggcttaaagtgtcctcgaccgcagtgcgaacccaacataccaccactcgtcccgtgccagacacttcaaggctcccaggagccaccccggggcttactactgtggagatcgtgactatgagccatcaggcacttggagatgtcgccggaagaggtaatgagaaaaaaccctccagcgtgagagcactgagcattgtgcttccaatcgttctgctggtgtttctgtgtcttggtgtctttcttctgtggaagaattggagactgaaaaacataaacagcattaactttgataacccagtgtaccaaaaaacgactgaggacgaagttcatatctgtcataatcaagatggatactcatacccgtctcgccaaatggtcagccttgaagatgatgtggcc

SEQ ID NO: 11126 - DNA, 2580 bp, Artificial Sequence
  derived and/or modified sequence
atgggaccatggggctggaaacttcgatggaccgtggccttactgcttgcagccgccgggacagctgtgggggataggtgtgaaagaaatgagttccaatgtcaggacgggaaatgcatttcatataaatgggtgtgtgatggctcggctgaatgtcaggacggatcagatgaaagtcaagagacatgcctgtcagtgacatgtaaaagcggagatttctcctgtggcggacgcgtaaatcggtgcattccgcagttctggcgctgcgatgggcaggttgattgtgacaacggttctgatgaacaaggttgtcccccgaaaacgtgctcacaggacgaatttagatgccatgacggcaagtgcatcagcaggcagttcgtttgtgacagcgacagagattgccttgatggaagtgatgaagcgtcatgccctgtattgacgtgcggacctgcatcatttcagtgtaattcatcgacgtgcattccgcagctatgggcctgcgacaatgacccggattgtgaggacggctctgacgagtggccccaaagatgtcgaggtttatacgtctttcaaggcgattcgtcaccatgtagcgcgttcgagtttcattgcttatccggggagtgcatccactcttcatggcggtgtgacggaggccccgactgcaaagacaaaagtgacgaagaaaattgtgctgtcgctacctgtagaccggatgaattccagtgctctgacggtaactgcattcatggctcacgtcagtgcgatcgggaatatgattgcaaagatatgtctgatgaagtaggttgcgttaatgtaacgctttgtgagggcccgaacaaatttaagtgtcattcaggcgaatgtatcacattagataaagtgtgcaatatggcgcgtgattgtagagattggagtgacgaacctattaaagagtgcggaacaaatgaatgcttagataacaatgggggatgcagtcatgtctgtaatgatttgaaaataggatatgagtgtgactgtcccgatggttttcaactggtagcgcaaagaagatgcgaagatatcgatgaatgccaagatccggatacctgtagccagctttgcgtgaatcttgaagggggttataaatgccaatgcgaggaaggatttcagctggatccgcacaccaaagcatgcaaagccgtcggttctatcgcgtatctgttttttacaaatagacatgaggtcagaaaaatgacgctcgatcgttcggagtatacctctctgattccaaatctcagaaatgtggtggcactcgacacagaagtcgcgagcaatcgaatctattggtcagatctctcacaacgcatgatctgttcgacacagttagacagggcgcatggggtttcttcatatgatacggtaatctcgcgcgatatccaagcgccggacgggcttgcggtcgattggattcatagcaatatttactggactgatagtgtcctgggaacagtaagtgttgctgatacaaaaggcgtcaaaagaaagacactctttcgggaaaacggatcgaaacctagagcaattgttgttgatccagttcacggttttatgtattggacagattggggaaccccggccaaaattaagaaaggcggcctgaatggagttgacatctacagtttagtgactgaaaacattcagtggccgaatggaatcactttagatctgctgagcggccgtttatactgggttgattctaagctgcatagtattagctccatagatgtaaacggtggcaaccgcaaaacaattcttgaagatgaaaaacgtttggctcatccgttttcactggcagtttttgaagacaaagtgttctggaccgacattatcaatgaggcaatattttcagctaacagattaacagggagtgatgtaaacctgctggccgagaacctcctatccccggaagatatggtcctttttcataatcttactcaacctcgaggtgttaattggtgcgaacggacgacactctctaatggggggtgccagtacctgtgtctgccggcaccccagattaacccgcattccccgaagtttacatgcgcgtgccctgatggcatgttactggctcgggatatgagatcatgccttacggaagccgaggcagcggtagcaacacaagaaacatcaaccgtgcgtttaaaggtctcgagtacagcggtcagaactcaacatacgacgacacgaccggtgccagatacttcaagactacctggggccacaccgggacttacaacagtggaaattgtcacaatgtctcatcaagctcttggggatgttgcgggaagaggaaatgaaaaaaaaccgagtagtgtccgtgccctttcaatcgttctgccaattgtgctcctggtttttttgtgcctgggagtctttctgctttggaaaaattggcggcttaagaacatcaattcgattaatttcgacaacccggtctaccagaaaacgacagaggatgaggtccatatttgccataatcaggatggctattcttacccgtctcggcagatggtcagtctggaggatgatgtggca

SEQ ID NO: 11127 - DNA, 2580 bp, Artificial Sequence
  derived and/or modified sequence
atgggtccttggggatggaagttgcgctggaccgtggcgcttctccttgccgcggcaggcaccgcggtcggcgacagatgcgagagaaacgaattccagtgtcaggatgggaagtgtatttcatacaaatgggtgtgtgatggttcggccgaatgtcaggacggctcggacgagtcgcaagagacttgcctctcagtcacttgcaaatcgggagactttagctgtggaggacgcgtcaacaggtgtatcccgcagttctggcggtgtgatggccaggtcgattgtgataacggttcggatgaacagggatgtccgccaaagacgtgctcccaagatgagtttagatgtcacgatggaaaatgtataagccgtcagttcgtgtgtgattcggaccgcgattgtctggatggatcggatgaggcatcgtgtcctgtgctcacctgcggtccagcctcgttccagtgtaattcctcaacttgtatcccccaactctgggcttgcgacaacgaccctgattgcgaggatggaagcgatgagtggccgcaacgctgtcgggggctgtacgtgttccaaggcgactcctcgccttgctcggcttttgaatttcattgcctgtcgggagaatgcatccattccagctggcgatgtgatggcgggccagattgtaaggataagtcagatgaggaaaactgtgcagtggctacgtgtagaccagacgagtttcagtgtagcgacggcaattgtatccatggatccaggcaatgcgatagagaatacgattgtaaagacatgtcggacgaggtcggatgtgtgaacgtgactctctgtgaaggccccaataagttcaaatgccattcaggagaatgtatcaccctggacaaggtgtgcaacatggctcgggactgtcgtgactggtcggacgaacctatcaaggaatgcggcactaacgaatgtctcgacaataatggtggatgttcccacgtgtgcaacgacttgaaaatcggatacgaatgtgactgtcctgatggatttcagcttgtggcccaaagacggtgtgaggacatcgacgagtgccaagatccagacacctgtagccaactgtgtgtgaaccttgaaggaggttacaagtgtcaatgcgaggaaggatttcaactggacccgcatactaaggcctgcaaggcagtcggctcgatcgcatatctgtttttcactaatcgtcacgaggttaggaagatgaccctcgaccgctcggagtacacctcacttattccaaacctgagaaatgtggtggcgcttgataccgaagtggcatcgaatagaatttactggtcggatctgagccaacggatgatttgttcgacccaattggaccgtgctcacggagtgtcctcatatgataccgtgattagcagagatatccaagcgcccgatggactggctgtcgattggattcattcaaatatctattggaccgactccgttctgggaaccgtctcggtggcagacacgaagggagtgaagaggaaaactctgtttagggagaatggaagcaaacctcgcgcaattgtggtggaccccgtgcacggctttatgtactggaccgattggggaactccggcaaagattaagaaagggggacttaacggagtggacatatacagcctggtgactgaaaacatccagtggcctaacgggataacccttgatttgctctccggacggctttactgggtggatagcaagctccattctatttccagcattgatgtaaatggcggcaatcgaaagacgatcttggaggatgaaaagcgattggcacaccccttttccctggccgtgtttgaggataaagtgttctggaccgacattatcaacgaagcaattttctcggcaaaccgtcttaccggctcggatgtgaacttgctggccgaaaacctcctgtcacccgaagatatggttctttttcacaaccttactcagccccggggagtgaattggtgcgaacgaacgactctgtcgaacggaggatgtcagtacctgtgtctcccggcaccacagattaacccccatagcccaaagttcacctgcgcttgtcccgatggaatgcttctcgcaagggatatgcgatcatgtctgacggaggccgaagcggcagtcgcgacgcaagaaacttctacggttagactcaaagtgtccagcactgccgtgcggacccagcataccaccactcggcctgtgcctgacacctccagactgccaggtgcaaccccagggttgaccactgtggagattgtgaccatgagccatcaagccctgggagatgtggccggtcgcggaaatgaaaagaagccttcgtcggtgcgcgccctctcaatcgtgcttccaattgtcctgctcgtgttcctgtgccttggcgtgtttctcctttggaagaactggcggcttaagaacatcaattccatcaattttgataatccagtgtatcaaaagactaccgaagatgaagtgcatatttgtcataaccaagatggatactcatacccctccagacaaatggtgtccttggaagatgacgtggca

SEQ ID NO: 11128 - DNA, 2580 bp, Artificial Sequence
  derived and/or modified sequence
atggggccgtggggttggaagctccggtggaccgtcgctctgctgcttgccgcggccggtaccgccgtgggtgacaggtgcgagcgtaatgaattccagtgccaggacggtaaatgcatttcatacaaatgggtatgcgatgggtcggccgaatgtcaagacggcagcgacgaaagccaggagacttgcctctccgttacctgcaagtctggagacttttcatgcggaggacgcgtaaacagatgtattccgcagttttggcgctgcgacggacaggtggactgcgacaacggatcggacgaacagggctgcccgcccaagacttgctcacaggatgaattcagatgccatgacggaaagtgcatctccaggcaattcgtgtgcgactccgaccgggattgcctggatggcagcgatgaggcctcctgccccgtcctcacgtgtggccccgcctccttccaatgcaattcgtcaacttgcattccgcaactttgggcatgcgataatgacccagattgcgaggacggatccgacgagtggccacagcggtgccgcggactgtatgtgtttcaaggtgattccagtccgtgcagcgctttcgaattccattgcttgtcaggagaatgcatacactcgagctggcgatgcgatggcggaccagattgcaaggacaagtcggatgaggagaactgtgcagtcgccacctgcagaccagatgagttccagtgttcagatggaaattgtatccacggctcgcggcagtgcgaccgagaatacgattgtaaggacatgtccgacgaagtgggatgcgtcaatgtgaccctctgtgagggcccgaacaagttcaagtgtcacagtggtgaatgcatcactcttgacaaagtctgtaacatggcccgcgactgccgtgattggtcagatgaacctatcaaagagtgcggcactaacgaatgcctggataacaacggagggtgttcacatgtctgtaacgacctgaaaatcggatacgaatgcgactgcccggacggctttcaactcgttgcgcaaagacgctgcgaggatatcgacgaatgccaggaccccgacacctgctcgcagctctgcgtgaatctggaaggggggtacaaatgccagtgtgaggaaggtttccaattggatcctcacaccaaggcatgtaaagcagtgggaagcatcgcgtaccttttcttcaccaacagacacgaggtgcgcaagatgaccctggataggtcggagtacacttctctcatccctaacctgcggaatgtggtggcgttggacacggaagtcgctagcaaccgcatctattggtcggacctgtcccaacggatgatctgttccactcagctcgaccgggcacacggcgtttcaagctacgacactgtgatcagtcgcgacatccaagcccccgatggactcgctgttgattggattcattccaacatctactggaccgactcggtgcttgggactgtgtcggtggcagataccaagggcgtgaagcgaaagaccctgtttcgcgaaaatggatccaaaccacgcgccatcgtggtcgacccagtccacgggttcatgtactggaccgattggggcaccccggccaagatcaaaaagggaggattgaatggagtggacatctactcccttgtgaccgaaaacatccagtggccgaacggaatcacgcttgacttgctgtcagggaggctgtactgggtcgactcgaaactccactcgatttcctcaattgatgtcaacggcggtaatagaaagacgatactcgaggacgagaagcggctggcgcatccattcagcttggcggtgttcgaagataaggtgttctggaccgacattatcaacgaagccatattcagcgctaaccgactgacgggatcggacgtaaatctgcttgctgaaaacctgctgagcccggaagatatggtcctttttcataacctgacccagccgagaggcgtgaattggtgcgagcgcaccaccctcagcaacggtgggtgtcagtacctgtgtctcccagcaccgcagatcaacccgcactcgcctaagttcacttgcgcctgtccagacggaatgctgctcgccagggatatgcggtcgtgcctgactgaagctgaggcagcggtggcaactcaagaaacgtccactgtgcgcctgaaggtgtcatctaccgcggtgaggactcagcacactaccactcgccctgtccctgataccagccgcctgccaggagctactccgggactcaccactgttgagattgtgactatgagccaccaagccctgggagatgtggcgggacgcggcaacgagaagaagcctagttccgtgcgggcgctgtccatcgtgctgcccatcgtgctcttggtgttcctgtgcctgggagtctttctgctttggaaaaactggagactgaagaacatcaattcgatcaatttcgataatccggtctaccaaaagaccactgaggacgaggtgcatatctgccataatcaggacggatactcatacccgagccggcagatggtttcgctggaagatgatgtcgcc

SEQ ID NO: 11129 - DNA, 2580 bp, Artificial Sequence
  derived and/or modified sequence
atggggccatggggctggaagctgagatggacggtcgcgttgcttctggccgcagcaggtaccgcagtgggcgatcggtgcgagagaaatgaattccaatgccaagacggtaagtgcatttcatacaagtgggtatgcgacggcagcgctgaatgccaagacggctcggatgaaagccaggaaacatgcctttcagtaacatgcaagagtggggatttctcatgtggaggacgggtgaacagatgcatcccgcagttctggcgatgtgacggccaggtcgactgtgataatgggtctgatgaacaaggatgccccccaaagacatgttcccaagacgaatttcgctgccacgacggtaaatgcatcagcaggcagttcgtgtgcgactcagatagagattgtctcgatggcagtgatgaagcatcttgtcctgtactgacctgcggcccggcctcgtttcagtgtaattctagcacatgtatcccgcaactgtgggcctgcgataatgacccagactgcgaggacggttctgacgagtggccacagcgttgtaggggactgtacgtcttccagggggatagctcaccgtgtagtgctttcgagtttcattgcttgtctggggagtgtatccatagttcatggcgttgtgatggcggacccgactgcaaggataaatcagatgaagagaattgtgcagtcgcgacttgcaggccggacgagttccagtgctccgatgggaattgcatccatggctcgcgacagtgtgatcgtgaatatgactgtaaagacatgtcggatgaggttggatgtgtcaacgtgacgctctgcgaggggccgaacaaatttaagtgccactcaggagaatgcataaccctggacaaagtttgcaatatggctcgagattgtcgcgattggtcggacgagcctattaaggagtgtggcacgaacgagtgtctggacaacaacgggggctgtagtcacgtttgcaatgatttgaagatagggtatgagtgcgactgtcctgatggtttccaattggtcgctcagcgccgttgtgaagatattgatgagtgtcaggaccccgacacctgctcgcaactgtgtgtgaacctagagggcgggtataagtgccagtgtgaggaggggtttcaactggatccacatacgaaagcatgcaaggccgttggctcaatcgcttacctgtttttcaccaatagacatgaggttcgcaagatgaccctcgacaggtcagaatacacgtctctgatcccgaacctgaggaacgtggttgccttggatacagaggttgcgtctaacagaatctactggtcagacctgtctcagcggatgatttgctccacacagctcgatcgagctcatggcgtttcttcatatgataccgtgatcagcagggatatccaagcacctgatgggcttgccgtggactggatacactctaatatctattggacagattccgttctaggcactgtttctgtggcagacaccaagggcgtgaaacggaaaaccctgttcagagaaaatggctctaaaccgcgggccattgtggtcgaccccgtgcatggattcatgtactggaccgattggggcactccagccaagattaaaaagggaggcctaaacggtgtcgatatttactccctcgttacagagaatatacagtggccaaatggcatcacccttgacctgctctcaggtaggctatattgggttgacagcaagctgcattctatttcttccatcgatgttaacggaggcaacagaaaaacgatccttgaggatgaaaagcgactggctcacccgttcagcttggctgtgtttgaggacaaggtcttctggactgacattattaacgaagccattttttccgccaaccgccttacgggctctgacgtcaacctgctcgccgaaaaccttctcagccccgaggacatggtgctttttcataatctcactcagccccgcggcgttaactggtgcgaacgcaccaccttgtcaaacggcggctgtcaatatctgtgcctccccgcaccgcagataaaccctcacagcccaaaattcacgtgcgcgtgtccagatggtatgttgctggcgcgagacatgcgttcctgcctgaccgaagctgaggcggccgttgctacacaggagaccagcactgtccggctcaaggtcagttcaacagcggttagaactcaacacacaacaactagacccgtgcctgacacatcccggttaccgggtgcgacaccaggtctaactacggtggagattgtaaccatgagccaccaggccctgggggatgtggccggtagaggcaacgagaaaaagccttccagtgttagagccctgagcattgtgttgccaatcgtgctgctggttttcttgtgcctgggggtcttcctactctggaaaaactggcgcctcaaaaatataaattccattaattttgacaaccctgtgtaccagaagacaacagaagacgaggttcacatctgtcacaatcaggacggatattcatatccctcacgacagatggtatccctggaagatgacgtggcc

SEQ ID NO: 11130 - DNA, 2580 bp, Artificial Sequence
  derived and/or modified sequence
atgggaccgtgggggtggaagctgcggtggaccgtcgccctgcttctcgccgccgcgggaacggccgtgggcgatcgctgcgagcggaatgaattccagtgccaggatggcaaatgcatctcctacaaatgggtgtgcgacggctcggccgaatgtcaagatggatcggacgagtcacaggaaacctgcctgtcagtgacttgtaaatctggcgacttctcatgcggaggacgcgtcaatcgctgtatcccgcagttttggagatgtgacggacaggtggactgcgacaatgggtcggacgagcagggatgcccaccgaaaacttgttcccaagatgagttccggtgccacgacggaaaatgcatttcgcggcagttcgtgtgcgattcggacagagactgcctcgacggatcagacgaagcaagctgcccggtgctgacttgcggaccggcctcattccaatgcaatagcagcacttgcataccacagctctgggcctgcgataacgatccggattgtgaagatggatctgacgagtggcctcagcgctgccgaggactctacgtctttcaaggagactcgtcgccttgctccgcattcgagttccactgcctgtccggagaatgtatccactcgtcttggcgatgcgacggaggcccagattgcaaggataagagcgatgaggaaaactgcgccgtcgctacctgtcgtcctgacgaatttcagtgttccgatggcaattgcatccatggatctcgacagtgtgatagggaatacgattgcaaggacatgtccgatgaagtcggatgtgtgaacgtgactctgtgtgagggcccgaataagtttaagtgccattccggggagtgcatcactctggacaaggtgtgtaacatggcgcgcgactgccgggactggtccgacgaaccgatcaaagaatgtggcaccaatgagtgcctggacaacaacggaggatgcagccatgtgtgcaatgacctgaagattgggtacgaatgcgattgcccggatggattccagctggtggcgcagcgccgctgcgaagatatcgacgagtgtcaagacccggatacttgctcgcagctttgtgtgaatctcgaaggaggatacaagtgccaatgcgaggaggggttccaactcgacccgcacaccaaggcatgcaaggccgtgggttccatcgcctaccttttcttcactaatcggcacgaggtgcgcaaaatgactctggaccgaagcgagtacacctcgttgatcccaaatttgaggaatgtggtggcactcgataccgaggtcgcttcgaaccgaatctactggagcgacctgtcacaacgcatgatctgctcgactcagctggatcgggcgcatggtgtctcctcctacgacactgtgatctcacgagatattcaggcccccgacggactggccgtcgactggatccactcgaacatctactggacggacagcgtcctgggaacggtgtcggtggctgatactaaaggcgtgaagcggaaaactctgttccgggagaacgggtccaagccgagagctattgtggtcgatcccgtccatgggttcatgtattggacggattggggaactccggccaagatcaagaagggaggcctgaacggagtggacatttactccctggtgacggagaatatccagtggccgaacggaatcaccctggacctgctgtcgggacgcctgtactgggtggactcgaagctccatagcatctcgtccatcgatgtgaatggcggaaacagaaagactatcttggaagatgaaaagcgcttggcacatcctttctcgctggccgtgttcgaagataaggttttctggacggatatcattaacgaagccatcttctccgcaaaccgtctgaccggcagcgacgtgaacctgctggcagagaacctgctctcaccggaagatatggtcctcttccataaccttacccagccgagaggggtgaattggtgcgaacggaccactctgtccaatggaggatgccagtacctgtgcctcccggcgcctcaaatcaaccctcactcgccgaagttcacgtgcgcttgcccggacggcatgctcctggccagagatatgcgctcgtgtctgacggaagctgaagctgccgtggccacccaggaaacctcaaccgtcaggttgaaggtcagctcgaccgcagttcgcacgcaacacaccaccacccggccagtccctgacacctcacgattgcctggggccactccaggtttgactaccgtggagatcgtgaccatgtcccaccaggccttgggagacgtcgcagggaggggcaacgagaagaagccttcgtcagtgagagcgctgtccatcgtgctgccgattgtgctgctggtgttcctgtgcctcggtgtgttcctgctgtggaagaattggcgcctcaaaaacatcaactccatcaacttcgacaacccggtgtaccagaaaaccaccgaagatgaggtgcatatctgccacaaccaggacggatactcctacccgtcgagacagatggtgtcgctcgaggacgacgtggct

SEQ ID NO: 11131 - DNA, 2580 bp, Artificial Sequence
  derived and/or modified sequence
atggggccgtggggctggaaactgcggtggactgtggcactgctgctggctgctgctggtaccgccgtcggggacaggtgcgagcgaaacgagtttcagtgccaagacggcaagtgtatatcttataagtgggtctgtgacggatcagctgagtgccaggatgggtcagacgaaagccaggagacttgtctgtctgtaacatgcaaatcaggagacttcagctgcggcggtagagttaatagatgcataccccagttttggaggtgcgacggacaggtggattgtgacaacggtagtgatgagcaaggatgcccgcccaaaacttgctcacaggacgagtttaggtgccacgacggtaagtgtatcagcagacagtttgtttgtgattcagacagggattgtttggatgggtccgacgaggcttcttgcccagttttgacctgcggacctgcctctttccaatgcaactcttctacatgtatacctcagctttgggcatgtgataatgaccccgactgcgaggacggctctgacgagtggcctcagcgctgtaggggcctgtacgtcttccagggcgattccagtccttgcagtgccttcgagttccactgcctcagcggggagtgtatccattcctcctggaggtgcgacggcgggcctgattgtaaagataaaagcgatgaggagaattgcgctgttgccacatgtcgacccgatgaattccagtgcagtgatggaaactgcatccacggctctaggcagtgcgatagggaatacgactgtaaagacatgtccgacgaagtcgggtgcgtcaatgtgacattgtgtgagggccctaacaagttcaaatgccatagtggagagtgtatcactctggataaggtgtgtaatatggcccgagattgtagggactggagcgatgagcccattaaagagtgcggcaccaacgagtgtctggacaacaatggaggatgtagtcatgtgtgcaacgatctgaagatagggtatgagtgcgactgccctgatggcttccagctggtggctcaaaggcgatgcgaggatattgatgagtgccaggatccagacacatgtagccaattgtgtgtcaatctcgagggcggctacaaatgtcagtgtgaggagggatttcagctcgacccccacactaaggcttgtaaggccgtaggatcaatagcctatctgttttttactaacagacatgaggtgcggaagatgaccctggacagatcagaatacacatctttgatacctaatctgagaaatgttgtcgcactggacaccgaggtcgcctcaaacagaatctactggagtgacctctcccaacggatgatctgcagtacacagcttgatcgcgctcatggcgtctctagttacgacacagttataagccgcgacattcaggcgccagacgggctcgccgtggactggatccattccaacatttattggacagattctgttctcggcactgtatctgtggccgataccaaaggtgtgaagcgcaagactctctttcgggaaaacgggagcaagcctagggccatcgtagtggaccctgtgcatgggttcatgtattggacagactggggcacccctgccaagatcaaaaagggaggtctcaacggtgtggatatctattccctggtcacggaaaatatccagtggcctaatggcatcacgctggatctgctctctggcaggctgtattgggtcgatagcaaactgcactccatctcaagcattgacgtaaacgggggaaaccggaagaccatcctcgaggacgaaaagcggctggctcatccattttccctcgctgtgttcgaggataaggtgttctggactgatattatcaatgaggcaatcttcagtgctaatcgactgactggatcagatgtgaacttgttggctgagaatctcctttccccggaggacatggtcctttttcataatttgactcaacccaggggtgtgaactggtgcgagcggactactcttagcaatggcgggtgtcaatatctgtgtcttcctgccccccagatcaatccccactctccaaagtttacatgcgcctgccctgatggaatgctgcttgcgagagatatgcggagctgtctgactgaagcagaggctgctgtggccacgcaggagacctccacggtgaggctgaaggtcagctctaccgcagtccgcacacagcatactactacgcggcctgtccccgacacctcacggctgcctggagccacacccggcctgacaaccgttgagatagtgactatgtcccaccaagcactgggggacgtcgccgggcggggcaatgagaagaaaccatcaagcgtgagggcgctgagtattgttttgcctattgtactgctggtctttctctgcctgggagttttcctgctgtggaaaaattggagactcaaaaacattaacagcatcaactttgacaatccagtctaccaaaaaactactgaggacgaggtccatatctgtcataatcaagatggctacagctacccgagtaggcagatggtgtctctcgaggatgacgtggct

SEQ ID NO: 11132 - DNA, 2580 bp, Artificial Sequence
  derived and/or modified sequence
atgggcccatggggctggaaattgaggtggacagtagcactgttgctagccgccgcaggtaccgccgttggagatcggtgtgaaaggaacgagttccagtgtcaggatgggaagtgtatttcttataagtgggtgtgcgatgggagcgctgaatgccaggacggatccgatgagagtcaggaaacttgtctgagtgtgacatgtaaatcaggggacttctcctgcgggggacgagtgaataggtgtattccacagttctggaggtgtgacggccaggtagactgcgataatggttcagacgagcaggggtgtcctcccaagacgtgcagccaggatgaatttaggtgccacgatgggaaatgtatctcacggcagttcgtttgcgatagcgatagagactgtctggacggctccgacgaggcttcttgtcctgtcctaacatgtgggcccgcaagctttcagtgcaacagctctacttgcattcctcagctgtgggcatgtgataacgacccagactgcgaagatggaagtgacgaatggccacagcgttgccgcggcctgtatgtgtttcagggcgacagtagtccctgttccgcattcgaattccattgcctgtccggcgaatgcatacactcgtcctggcgatgcgacggtggtccagactgtaaggataagagcgatgaagagaactgcgcagtggccacctgccgcccagacgaattccagtgttctgatggaaactgcatccacggaagcaggcagtgcgaccgggagtacgattgcaaagatatgagtgacgaggttgggtgtgtgaacgtcacattgtgtgaggggcccaataagttcaaatgtcacagcggggagtgtataaccttggataaagtatgtaacatggcccgcgattgccgggactggagcgacgagccaataaaagagtgcggcaccaacgaatgtttggataacaacggcggatgctctcatgtttgtaatgatctgaaaattgggtacgaatgtgactgccccgatggatttcagttagtggctcagcggcgttgtgaagacatcgacgaatgccaggatcccgacacctgtagccaactgtgcgtgaaccttgaaggtggttataaatgccagtgcgaggaggggttccagctggatccgcacacaaaagcttgcaaggcagtcggatcaattgcttacttgttcttcacgaatcgccatgaggtaaggaagatgactctagacaggtcagagtacacctccttgatcccaaatcttaggaacgtagttgcactggacacagaagtcgcctctaatcgaatatattggagcgacctctcccaaagaatgatctgctcaacacagctggatcgggcacacggcgtttcttcatatgatacggtcatttcaagggacatccaggcccccgacggcttagccgtagattggatccattctaacatatactggacagacagcgtgctgggcactgtgagcgtagccgacacaaagggggtaaagcgcaagactttgttccgagaaaacggttcaaaaccaagggccattgtggtagatccagtgcacggattcatgtattggactgattggggaactccagctaaaataaaaaaaggaggcctgaacggcgtagacatctattctttggtcactgagaacatccagtggcccaatggtatcaccctggatctgcttagcgggaggctctactgggtcgattctaagctgcattcaatcagctctattgacgtgaacggggggaaccgaaaaacgattcttgaagacgaaaaaagactagcacacccattcagcctggctgtgtttgaggacaaggtgttctggactgacattataaacgaggcaatcttctcagctaatcggctaacaggctctgacgtaaacttgctggccgaaaatctgctgtctccagaggatatggtgctgttccacaacctgactcagccccgcggcgtgaattggtgcgaacggaccacactgtccaatggtgggtgtcagtatctctgcctgccagcgccacagattaaccctcactcccctaagttcacttgcgcgtgccctgacggaatgcttctggccagagatatgagatcatgtctcacagaagctgaagccgcagtggctacccaggaaacgtccaccgtgagattaaaagtctcttccaccgcagtgagaacgcaacatacgaccacacggcccgtaccagacacatctcggctgcctggagcaacccctggactgacaaccgtggaaatcgtgaccatgtcccatcaggccttaggagacgtggcagggagaggcaacgaaaaaaagccaagtagtgtccgcgccctgagcattgttctgcccatcgtcctgctggtcttcctgtgcctgggggtgttccttctttggaaaaattggagactaaaaaatattaatagcattaactttgataaccccgtttatcagaagacgacggaggatgaggttcatatctgccataaccaagacgggtattcgtacccatcccggcagatggtgtcacttgaggacgatgttgcc

SEQ ID NO: 11133 - DNA, 2580 bp, Artificial Sequence
  derived and/or modified sequence
atggggccatggggctggaagctccgttggaccgtagcattacttctcgctgccgctgggacagcagttggggatcggtgcgaacgcaacgaatttcagtgtcaggatggcaagtgcatcagttataaatgggtgtgtgatgggagtgcagagtgccaggatggcagcgatgaatcccaggagacatgcctgagcgttacatgcaagtctggagattttagttgtggcgggagagtcaacaggtgtattccccagttctggcggtgtgacgggcaggttgactgcgacaacggcagcgacgagcaggggtgtccgcctaagacctgttcacaggatgagtttcggtgtcatgacggaaagtgcataagtcgccagtttgtctgtgactctgaccgtgactgcctggacggctctgacgaagccagttgcccagtgctgacctgcggtccagcttccttccagtgtaattcctccacatgtatccctcagctttgggcatgtgacaatgatccagactgtgaagacggaagtgatgaatggccacaacgatgccgcggcttatacgtgtttcaaggagactcatcaccgtgcagcgcttttgagttccattgcctgtctggtgaatgtattcacagctcttggaggtgtgacggcgggcctgattgcaaagataaatcagacgaggaaaactgtgctgtcgctacctgtagacccgatgagtttcaatgttcagatgggaactgcattcacggcagccgccagtgcgatagagagtatgattgcaaggacatgtcagacgaagtggggtgtgtgaacgtgaccctatgcgaagggcctaataagtttaagtgccacagcggagagtgcatcaccctggacaaagtctgtaatatggctagggattgccgcgattggtcagacgagcccataaaggaatgtggtacaaatgagtgtctggacaacaatggtggatgtagccatgtttgtaatgatctgaagattggctacgagtgtgactgccccgatgggttccagctcgtcgcacagagaagatgcgaagatatcgacgaatgccaggatccagatacctgcagccagctctgcgttaaccttgagggaggctacaagtgtcagtgcgaggagggttttcagttagatcctcataccaaagcctgcaaagccgttggctcaattgcatatctgttcttcaccaatcgccatgaagtgagaaagatgaccctagacagaagcgaatatacaagtctaatacccaatctgcgcaatgtggtggctcttgatacagaggtagcatctaacagaatttattggtccgatctgtcacagcgtatgatttgtagtacccagctggatcgagcccatggcgtttccagctacgataccgttattagccgggatatacaggcccccgacggcctggccgttgactggatacactccaatatttattggacagatagtgtgctgggcaccgtcagcgtggctgacactaagggggtgaagaggaaaaccctattcagggagaacggttcaaaacctcgagccattgtggtcgatcctgttcatggctttatgtactggactgattggggcacccccgccaagattaaaaaagggggcttgaacggagtggacatttatagcctagtgaccgagaacatccagtggcccaatggtattactctggatttattatctggtcgattatactgggtcgacagcaagttgcacagtatatcatccattgacgttaatggcggtaatagaaagacaatcctggaagacgagaagaggctggctcatccattctccctcgccgtttttgaggataaagtcttctggactgacataataaacgaggccatatttagtgccaataggctgaccggcagtgacgtgaacctgctcgccgagaatctgctcagccccgaggacatggtgctgttccacaatttaacccagcccaggggggtcaattggtgcgagagaaccacattatccaatggcgggtgtcaatacctgtgcctgccagctccccaaataaacccacatagccctaaattcacctgtgcctgcccagatgggatgctcctcgcccgggacatgcggagctgtctgaccgaggccgaagccgcagtggcaacccaggagacatccacagtcagactgaaagtcagttccactgcagtccgcacccagcacaccaccaccaggccagtgcctgacactagtcggctgcccggagcaactcctgggctgacaactgtggagatcgttacaatgagtcatcaagccctgggggatgtggccgggagaggcaatgaaaaaaagccttcttcagtgcgtgcactgtccatagtgctaccaatagtgttgctggtgttcctatgcctgggcgtgttcctactgtggaagaactggcggctaaaaaatattaattcaatcaactttgacaatccagtgtaccagaaaacaactgaggatgaagttcacatatgtcacaatcaggatggatattcttaccccagcaggcaaatggtttctctggaagatgacgtcgct

SEQ ID NO: 11134 - DNA, 2580 bp, Artificial Sequence
  derived and/or modified sequence
atgggcccttggggatggaagctgcggtggacagtagctctcttattggcagccgctggaaccgcagttggagatcggtgtgagaggaacgaattccagtgccaggacgggaagtgtatctcatacaaatgggtgtgcgacgggagcgctgaatgccaggacggcagcgatgaatcccaggaaacgtgcctgagcgtgacatgcaaatctggggatttctcttgtggtgggcgcgtgaataggtgcatcccgcagttctggaggtgcgatggccaggtcgattgcgataatggttccgatgagcaggggtgccctcccaagacatgttcgcaggatgagttccgctgccacgatggaaagtgtatctctaggcagttcgtctgcgattcagacagggattgcctcgatggctctgacgaagccagctgtccagtgctgacgtgcggaccggccagcttccagtgcaattctagtacctgcattcctcagctttgggcttgcgacaacgatccagactgtgaagatggtagtgatgaatggccccagcgatgccggggcctgtatgtattccaaggggactcgagcccttgcagcgcgttcgagttccactgcctgtctggagaatgtatacactcttcctggcgatgcgatggcggcccagactgtaaagataaatcggatgaagagaactgtgcagtggccacgtgccggccagacgagttccagtgttccgatgggaattgtatacacggctctaggcagtgtgatcgggagtacgactgcaaggatatgagcgatgaggtggggtgcgtgaatgtgactctttgtgagggacccaacaaattcaaatgtcactcgggtgagtgtatcacactggataaagtatgcaatatggctcgcgattgccgcgactggagcgatgaacccattaaagagtgtggcacaaatgagtgtctggataataacggaggatgctcacacgtgtgcaatgacctgaagattggctacgaatgtgattgccctgatggcttccaattggttgctcagaggcggtgcgaggacatagacgaatgccaggaccctgacacttgtagtcagctgtgcgttaacctggagggaggatacaagtgtcagtgcgaagagggctttcagttggaccctcatacaaaggcttgcaaagcggtgggaagcatcgcatatctcttctttacaaaccgccatgaggttcggaagatgaccctagatagatcagagtacactagcctcatccctaacctgaggaatgtggtggctctggacacagaggtagcgagcaatcggatatactggtccgatctgagccagagaatgatatgcagcacccagctggatagggcacacggcgtctcttcctatgacacagtgatcagcagagacattcaagcccctgatggtctggccgttgattggatacattccaatatttattggacggattcggtacttggaaccgtttcagttgctgatacgaaaggcgtgaagaggaaaaccctgttcagggaaaacggctcaaaaccaagagcaatcgtggtggaccccgttcacggatttatgtattggactgattggggtacgcctgctaaaatcaagaaaggcggattgaacggagtggacatctacagcttagttaccgaaaacattcagtggcccaacggcattaccctggatttgctgtccgggagactgtactgggtggattccaaacttcattcgatctcgagtatagacgtgaacggtggcaaccggaaaaccattctggaagacgaaaagaggctcgcccacccatttagtctggcagtgtttgaggacaaagtgttctggaccgacattattaacgaggctatcttttctgctaacagacttacgggatcagacgtgaatttactcgcggagaacctgttaagtccggaagatatggtgctctttcacaatttaacacagccgaggggcgtgaactggtgtgagaggacgaccctgtctaacggcggctgtcaatatctgtgtttacccgccccacaaataaacccacatagccccaagtttacctgcgcttgccccgacgggatgcttttagctcgggacatgagatcctgtctgaccgaagccgaggcagcggtcgcaacccaagagaccagcaccgtccggctgaaggtgtcatctaccgccgtgcgcacccaacataccacaacccgcccagttcccgacacatctcgtctgcccggcgcaactccgggcctgacaacagtggaaatcgtgactatgtcccaccaagcattaggagatgtcgccgggcggggaaatgagaaaaagccttcttccgtccgggctctgagcatcgtgcttcctatagtcctcctagtgttcctgtgtctcggcgtcttcctgctctggaaaaactggaggctgaaaaacatcaacagtattaactttgataatcccgtctatcagaagaccaccgaagatgaagttcacatctgtcacaaccaggacggctactcctaccccagccggcaaatggtatcacttgaggacgacgtggcc

SEQ ID NO: 11135 - DNA, 2580 bp, Artificial Sequence
  derived and/or modified sequence
atggggccctggggctggaaactgcggtggacagtggctttactgctggcggctgccggcacagccgtgggagacaggtgcgaacggaacgaattccaatgccaggacggcaagtgcattagttataaatgggtctgcgacggaagcgccgagtgccaggatggcagcgacgaaagtcaagagacgtgcttgagtgttacctgtaaaagcggggatttctcttgcgggggccgtgtaaacaggtgcataccacaattctggcgttgtgatgggcaagttgactgcgacaatggctctgacgaacaaggctgtcctcctaagacttgtagccaggacgagtttaggtgccacgatggaaaatgcatatctaggcaatttgtctgtgatagtgaccgggattgcctagacggtagtgacgaggcgtcatgccccgtgctcacttgtggccctgcaagtttccagtgtaactcctcaacttgtatacctcagctgtgggcctgcgacaatgacccagactgtgaggatggatcagatgagtggcctcagcggtgtagaggattatacgtgtttcagggggattccagcccatgttcagcctttgagtttcattgcctcagcggtgagtgcattcactcatcatggagatgcgacggcgggcccgactgtaaagacaaaagcgatgaagagaactgtgccgtagccacctgccggccagacgaatttcagtgttccgacgggaactgtatccatggctcccgacagtgcgaccgtgagtatgactgcaaggacatgtctgatgaggtggggtgcgtgaacgttactctctgcgaagggccaaacaagttcaagtgccactctggggagtgcatcaccctggataaagtgtgcaacatggctcgggactgcagggactggtcagatgagccaataaaggaatgcggtaccaatgagtgccttgataataatggcggttgtagccatgtgtgtaacgacctcaaaatcgggtacgaatgcgactgccccgacggctttcagcttgtagctcaacgtcgctgtgaagatatcgacgagtgccaggatccagatacatgttctcagttatgcgtaaatctcgaaggcggttataagtgccagtgtgaggagggcttccagctggatccccacacaaaggcttgtaaggcagtcggctctatcgcatatctgttttttactaacaggcacgaggtcagaaaaatgactctggataggtctgagtacacctccctgatccctaacctccggaacgtcgtagcattggataccgaggttgctagcaacaggatttactggagcgacttgtcccaaaggatgatatgttctacgcaactcgaccgggctcacggagtaagttcttacgatacagtcatttcccgagacatccaggcacctgacggcctcgcagtcgactggattcattcaaatatctactggactgatagtgtgttaggcactgtcagcgtcgcggataccaaaggagtgaagcggaaaactttattccgggaaaacgggtccaaaccccgcgccatcgtggttgaccctgtccatgggtttatgtattggacagactggggtacaccggcgaagatcaagaaaggcggactaaacggcgtagacatctattcattggtcactgagaacatacaatggccaaacggcatcacgctcgacctgctttctggccggttgtactgggtggattcgaagttgcacagtatcagctcaattgatgtgaacggcgggaatcgaaaaaccattctcgaggatgagaaacggctggcacaccccttctctctggctgtgtttgaagataaggtgttctggactgacattatcaacgaggctattttttccgctaatcggctgacagggtctgatgtgaacctgttagccgagaatctgctttctcctgaggatatggtcctgtttcataacctgacccagcctcggggggtgaactggtgtgagaggacgactttgtccaatggcggctgtcagtacctctgcttgccggcgcctcaaatcaaccctcactctcctaaatttacctgcgcctgccccgatgggatgctgctcgctagggacatgagaagctgcttgactgaggccgaggctgcagtggctactcaggaaacaagcacagttcggctaaaagtcagcagcacagccgtgagaactcagcacaccaccacacgacctgttcccgacacaagcaggctgcctggagccactcccgggttaaccacggtggagatcgtgactatgtcacatcaggcactaggggatgtggcgggaaggggcaatgaaaaaaagccctcttcggtccgcgcgctgtcaatagttttaccaatcgtgctgctggtctttctgtgtttaggagtgttccttctctggaaaaattggcggctcaagaacattaattcgatcaatttcgacaatcctgtctatcagaaaacgacagaggacgaagtgcacatctgccataaccaggatgggtatagctacccttcgcgacagatggtcagtctggaggacgacgtagca

SEQ ID NO: 11136 - DNA, 2580 bp, Artificial Sequence
  derived and/or modified sequence
atgggtccgtgggggtggaaacttcgctggacggtggcactgctgttggcagccgccgggacggccgtcggggaccgctgtgagcggaacgagtttcaatgtcaggatgggaaatgtatttcgtacaaatgggtgtgcgacggatcagctgaatgccaagatggttcggatgagagccaagagacttgcctgtcagtgacttgtaagagcggcgacttttcatgcggaggaagagtgaaccgctgtattcctcaattttggcggtgtgatggccaagtggactgtgataacggaagcgatgagcaagggtgtccccccaagacttgttcgcaggacgaatttagatgccatgatggcaaatgcatttcacgtcaatttgtgtgtgattcggacagggattgtctggacggcagcgatgaagcatcgtgccctgtcctgacttgcgggccggcatcgttccaatgtaacagctcaacctgcattcctcagctctgggcctgcgacaacgatcccgattgtgaggatggatcagatgaatggccacaaagatgcaggggtctgtatgtgtttcagggtgatagcagtccatgttccgcatttgaatttcattgtctgtcaggcgagtgcattcactcgagctggcgttgtgatggaggtcctgactgtaaagataaaagcgatgaggaaaactgtgcggtggcaacttgtcgccccgatgaatttcaatgcagtgatggtaattgtattcatggtagccgtcagtgtgatagggagtacgactgcaaggatatgtccgatgaagtgggttgcgtgaatgtgaccctgtgcgagggccctaacaagtttaagtgtcactccggcgagtgtatcactctggacaaggtgtgcaatatggcgcgcgactgtcgggactggagcgacgagcctattaaggaatgcgggactaacgaatgtctggacaataatggaggctgtagccatgtttgtaacgacctcaaaattggatacgagtgtgattgcccggatgggtttcaacttgtcgcacagcggagatgtgaagatatcgacgagtgccaggatccagacacctgctcacaactttgtgtgaatctggaaggtggttacaagtgtcaatgtgaggaaggattccaactggacccacataccaaggcgtgtaaagcagtgggatccattgcatacctctttttcaccaataggcatgaagtgagaaaaatgactttggatcgttctgagtacacttccttgattcctaaccttagaaatgtggtggcactggacacggaagtcgcatctaacagaatttactggtccgatttgtcccaaagaatgatatgctcgacccagcttgatcgtgcccatggagtgagttcgtacgataccgtgatttcccgagatatacaggcccccgatgggctggccgtggattggatccattcgaacatctactggactgactccgtccttgggaccgtttccgtggcagatactaagggagtcaaacgtaagactcttttcagggaaaatggctccaaaccacgcgccatcgtggtggaccccgtccatgggttcatgtactggactgattggggaaccccagcgaagattaagaagggaggtcttaacggagtggatatctattcgctggtgaccgagaatattcagtggcccaatggaatcactctcgacctgctttccggaaggctgtactgggtggattccaagctgcattccatatcctcaatcgacgtcaacggaggtaaccgtaagactatacttgaggacgagaagagacttgcacatccattttcgctggcggtgttcgaggataaagttttttggaccgatatcattaacgaagccatattctcggcgaatagactgaccggttccgacgtgaaccttctggcagagaacctgctctccccagaggacatggtgcttttccataaccttactcagccgcgcggggtcaactggtgtgaacggaccactctttcaaacggaggctgtcagtacctgtgtttgccggcacctcaaatcaatccacattccccaaagtttacgtgtgcctgccccgacggaatgctccttgctagggatatgcgctcttgcttgactgaagcagaggcagcggtggctacccaggaaacttccactgtgaggctgaaggtttcgtccacggccgtccgaacgcaacacaccaccactcgtccggtgcctgatactagcaggctccctggagccacccctgggcttaccaccgtcgaaattgtgactatgtcgcaccaagcactcggcgatgtcgcaggtcgtggcaatgaaaagaagccatcgtcggtcagagccctgtcgatcgtcctgccaatcgtcctgctggtgttcctgtgcctgggtgtctttcttctttggaagaactggcgactcaagaacataaactccatcaatttcgacaaccctgtctaccagaaaaccactgaggatgaagtccacatctgtcacaatcaggacggttacagctacccttcacgtcagatggtatcccttgaggatgatgtggcc

SEQ ID NO: 11137 - DNA, 2580 bp, Artificial Sequence
  derived and/or modified sequence
atgggcccctggggttggaaattgaggtggaccgtggccttgctgctggcggccgcgggcactgctgtgggagatcggtgcgagcgcaatgagttccagtgtcaagacggaaagtgtatcagctacaagtgggtgtgcgacggttccgcagaatgtcaggacggatctgatgaatcacaggaaacgtgcctgtcggttacgtgcaagtcaggagatttctcctgtggcggcagggtgaacagatgcatcccacagttttggcgatgcgatggacaggtcgactgcgacaacggatccgacgagcaaggatgcccacctaagacttgttcgcaggatgaatttagatgccacgacggaaaatgcatttcgcggcagttcgtgtgcgactcagaccgcgattgtttggacggctccgatgaggccagctgcccagtgttgacttgcgggccggcttccttccagtgtaactcgtctacctgtattccgcagctgtgggcgtgcgacaatgatccggattgcgaggacggatcagacgaatggcctcaacggtgtcgcggactctacgttttccagggagattcatccccttgctccgcttttgagtttcactgcctgtcaggagagtgcatccactcttcgtggcgctgtgacggcggtcccgactgtaaggacaagtccgatgaggagaactgcgccgtggcaacttgccggcctgacgagttccagtgctccgacggaaactgcattcacggatcgcggcagtgtgaccgggaatacgattgcaaggacatgagcgatgaagtagggtgcgtgaacgtcactctctgcgaaggccctaataagttcaaatgtcactctggagaatgcatcactctggataaggtgtgcaatatggctcgggattgcagagactggtcggatgaaccgatcaaggagtgcggtaccaatgagtgcctggataacaatggtggatgcagccacgtgtgcaacgatctgaagatcggatacgagtgcgattgccccgatggattccagctggtggcacaacggcggtgcgaggacatcgatgaatgtcaagaccctgacacttgctcccagctgtgcgtgaatctggagggcggatacaagtgtcagtgtgaggaaggattccagctcgacccacataccaaggcgtgtaaggctgtgggctcaattgcgtacctgtttttcacgaaccgccatgaggtccggaagatgactttggatcgcagcgaatatactagcctgatcccgaatctcagaaatgtggtggcccttgatactgaagtggcctcgaaccgcatctattggtccgatctctcgcagcgcatgatatgttccacccagcttgacagggcccatggagtcagcagctacgacaccgtgattagccgggacattcaggcgccagacggactcgctgtcgactggatacactcgaacatctactggaccgattcggtcttgggtacggtcagcgtggcggacactaagggagtgaagcgcaagaccctgtttcgtgaaaacggctccaaaccccgggccatcgtggtggatccagtgcatggcttcatgtactggacggactggggaaccccggccaagattaagaagggcgggctgaacggagtcgacatctactcccttgtcactgagaacatccaatggccgaacggaatcaccctggatttgctgtcgggccggctgtactgggtcgactcaaaactgcactcgatctcctcgatcgacgttaatggggggaatagaaagactatactggaagatgaaaaaaggctggctcaccctttcagcctggcggtctttgaggacaaggttttctggactgacatcatcaacgaagcgatcttctccgcgaaccgcctcaccggatcggatgtgaatttgctcgccgaaaacctgctcagcccggaagatatggtcctgttccacaacctgactcagccgcgcggggtgaattggtgcgagaggaccactctttccaatggcggctgtcagtacctgtgcctgccagcgccgcaaatcaatccgcattctccaaagttcacctgtgcctgtcctgacggaatgctgctggcgagggacatgagatcttgcctgaccgaggcggaagcagcggtggccactcaggaaacttcaactgttcgcctgaaagtctcgtcaaccgccgtgcgtactcagcataccacgactcgcccagtcccggacacttcccgcctgccaggcgcaacgccgggcttgactactgtcgaaattgtcactatgtcccaccaggcactcggagacgtcgcaggccgcgggaacgaaaagaaaccaagcagtgtgcgagcgctgtccatcgtcctgccaatcgtgctcctcgtgtttctctgcctcggtgtgttcctgttgtggaagaactggagactcaagaacatcaactcaatcaattttgataatcccgtgtaccagaaaactaccgaggacgaagtgcacatttgccataatcaggacgggtactcgtacccttccagacagatggtgtcacttgaggacgacgtggcc

SEQ ID NO: 11138 - DNA, 2580 bp, Artificial Sequence
  derived and/or modified sequence
atgggaccttggggctggaaactccggtggactgtggcgcttttgcttgccgctgcagggacggccgtgggagatcgctgtgaacgcaacgagtttcagtgtcaggacggaaaatgcataagttacaaatgggtttgcgacggcagtgccgagtgccaagacgggtctgacgagtcccaggagacatgtctcagtgttacctgtaagtcaggcgatttttcctgcggaggacgcgttaaccgctgtatcccccaattctggcgctgtgacggccaagtggattgcgacaacggctccgatgagcaaggttgtcctcctaaaacctgttctcaggatgagtttcgatgccacgacggtaaatgtatctcacgacagtttgtgtgcgactccgatcgggactgtctggacgggtccgatgaggcttcctgccctgtgttgacgtgtggacctgcctccttccaatgtaatagcagtacctgcataccacagctatgggcctgtgacaatgatcctgattgcgaggacgggagcgacgagtggcctcagcgatgccgtggactctacgtgttccagggcgatagttccccatgtagcgccttcgagtttcactgtctgagcggcgaatgtatccattcaagctggagatgtgatggcggtccagattgtaaggacaaatctgatgaggagaactgtgctgtggctacatgtaggcctgatgagtttcagtgtagtgatgggaactgtattcatgggagccgccagtgtgaccgcgaatatgactgtaaagacatgtctgatgaggtggggtgcgtgaatgtgacattatgcgagggtcccaataagtttaagtgtcatagcggcgaatgtatcaccctggacaaagtttgcaatatggcacgcgattgtcgggattggtccgacgagcctataaaagagtgcggcacgaatgagtgcctggacaataacggtggatgttcgcatgtctgcaatgacctgaagattggatatgagtgtgattgccctgacggattccagctggttgcgcagaggcggtgcgaagacattgacgaatgtcaggaccctgacacttgttctcagttgtgcgtcaatctcgaaggcgggtacaaatgccaatgtgaggaaggctttcagctcgatccacacaccaaagcctgcaaagcggtgggatccatcgcctacttatttttcacgaaccgacacgaggtccgtaaaatgactctggatagaagtgagtacactagtcttatccccaatctcagaaacgttgtggctttggatacagaggtcgcttccaataggatttattggtcagatctttcgcagcgcatgatttgttctactcaacttgacagggctcacggcgttagcagttacgatactgtcattagcagagacatccaggccccagacggcctggccgtggactggatacacagcaacatctactggactgatagcgtgttagggactgtatccgtggcagatactaaaggcgtgaagcgcaaaacgctgttcagagagaatggtagtaaaccacgcgcaatcgtcgtcgatccagttcacggttttatgtactggactgactggggcaccccagccaaaattaagaaaggcgggctcaatggcgtggatatttactctttggtgactgagaacatacagtggcctaatggtatcactctcgacctgcttagtgggaggctgtattgggtcgactccaagctgcactctatctctagcatcgacgtgaatggcggtaacaggaaaaccatcctggaggatgaaaagagactcgcccacccttttagcttggccgtcttcgaagacaaggtcttttggactgatataatcaacgaggctattttcagtgccaatcgtctgaccggctccgacgttaacctgctcgccgaaaaccttctctcccctgaggacatggtgttatttcacaacctaacacagcctagaggagtcaactggtgcgagcgcactaccctgtctaacggcgggtgccagtatttgtgcctgcccgcacctcagatcaaccctcacagtcctaagttcacgtgtgcgtgtccggatgggatgttgctcgcaagggacatgcgctcctgtctgacggaggccgaggccgcggttgcaactcaggagacatccactgtgcgcttaaaagtgtctagtactgcagtcaggacgcaacacacaactacccgccctgtgcctgacacatctaggctgcccggcgctacgccaggcctgaccaccgttgaaatagtgaccatgtcccaccaggccctgggagatgtagcgggtaggggcaatgaaaaaaagccatcttccgtcagagcactgagcatcgtactccccatcgttctgctggtgttcctctgcctgggagtgttccttttgtggaaaaactggagattgaagaatatcaacagcatcaacttcgacaatcctgtgtaccagaagacaaccgaagatgaggtccacatatgccacaatcaggacggttactcatatccatcccgccagatggtgagcttggaagacgacgtcgct

SEQ ID NO: 11139 - DNA, 2580 bp, Artificial Sequence
  derived and/or modified sequence
atggggccctgggggtggaaacttcggtggacagtggctctgctcctagctgccgctggaacagctgtgggagatcgatgcgagcggaatgaattccagtgccaggatggaaaatgtatcagttataaatgggtctgtgacgggagtgccgaatgtcaggatgggtcagacgaaagtcaggaaacatgcctttctgttacttgtaaatctggagattttagttgcggagggagagtaaaccggtgtatacctcagttctggcgctgtgatggacaggtggattgcgataatggatctgatgagcagggatgcccccctaagacatgttctcaggatgaatttcgatgtcacgatggaaaatgtataagtagacaattcgtttgcgattctgatagagattgcctcgatggatccgatgaagccagttgtccagtgctaacttgtggacctgcatccttccagtgtaactctagtacatgcatcccccagttgtgggcttgtgataacgatcccgattgtgaagatggatcggatgaatggccacagcggtgtaggggactctacgtgttccagggggattcttctccttgctctgcatttgaattccactgcctctcaggggaatgtattcattctagttggcggtgtgatggaggaccagactgtaaagataaatccgatgaagagaactgtgccgtggcaacttgtcggccagatgaattccagtgctccgatgggaactgcatccacgggtcccgacagtgtgatagggagtacgattgcaaagatatgtccgatgaagtagggtgcgtaaacgttacgctctgcgaagggcctaacaaattcaaatgtcattccggagaatgcatcacattagataaagtttgtaacatggctagagattgtagggattggtctgatgaacctataaaagaatgcgggacaaacgaatgccttgataataatggaggatgctcccatgtgtgtaatgatttaaaaatagggtacgaatgcgattgtccagatgggttccagctcgtggcacagcggcggtgtgaagatatcgatgaatgtcaggatcctgatacatgttctcaactatgcgtgaacctcgaaggagggtataaatgccaatgcgaggaagggtttcagctagatcctcacacaaaagcctgtaaagctgttgggtccattgcctatctcttcttcacaaatcgacacgaagttaggaaaatgactctcgatcgcagtgaatacacatcactcattcccaaccttagaaacgtagttgcactggatactgaagtagcctctaatcgaatttattggtcagatctttctcagagaatgatctgttcaactcagctcgatcgggctcatggagtttcctcatatgatacagtcatttctcgagacatccaagcccccgatgggctagctgtagactggatccactctaatatatattggactgattccgttctcggaactgtaagtgtggccgacacaaaaggggtaaaacgcaaaacactctttagggagaatgggtctaaaccccgcgcgattgtggtggatccagtgcacggatttatgtattggactgattgggggactcccgctaagattaaaaaaggggggttaaacggggtagatatctatagtcttgtaacagagaatattcagtggcccaacgggatcacacttgatctgctatctgggaggctttattgggtggattctaaactccactccatatcttccatcgatgtcaatgggggaaatcggaagacaatcctagaggatgaaaaacgccttgcccatccattttcactggctgtcttcgaagataaagtgttctggactgatataattaatgaagccatcttttcggctaaccgattgacaggatcagacgtgaacctactcgcagagaacttactatctcctgaggatatggtgcttttccacaacctcactcagccccgtggggtgaattggtgtgaacgaactactctgtcaaacggggggtgccagtacctatgtctgccagctccccaaatcaaccctcattcccctaaattcacttgcgcctgccccgatggaatgcttctggccagagatatgcggtcctgcctgacagaagctgaagcggctgttgctactcaagaaacatctacggtacgattaaaagtgtcttccacagcagtgaggactcagcatactactacacgccccgtgccagatacttctagattacccggagctactcctgggctgactactgtagaaatagtaacaatgtcccatcaggctcttggagacgttgcaggaagggggaacgaaaaaaaaccctctagtgtgagggccctgtcgatcgtgttacctatcgtactgctagtctttctatgtctaggagtgttcttactttggaaaaattggagactcaaaaacattaactcaattaattttgacaacccagtctatcagaaaacaacagaggacgaagtacacatttgtcacaaccaggacgggtattcctatcccagtaggcagatggtgagtctggaggatgatgtggca

SEQ ID NO: 11140 - DNA, 2580 bp, Artificial Sequence
  derived and/or modified sequence
atgggaccatggggatggaaattacggtggacggtcgctctcctcttggctgctgccggtactgcggtgggagaccgttgcgaacggaatgagtttcagtgccaggatggtaagtgcatttcttacaagtgggtatgcgacggatcggctgagtgccaggacgggagtgatgaatcgcaagaaacatgtttatcggtaacttgcaagtcaggagactttagctgtggcgggagagtcaaccgctgcattccccaattctggaggtgcgacggacaggtggactgcgataatggttccgatgagcaaggttgccccccaaaaacgtgctcccaagatgaatttcgttgtcacgatgggaagtgcatcagtcgtcagttcgtgtgtgatagcgaccgcgactgcctcgatggttcggacgaagcctcgtgccctgttttaacttgcgggccggcatcgttccaatgcaactcaagcacatgtattccacagttgtgggcctgcgataatgatcccgactgtgaggacggcagcgatgagtggccacaaagatgccgcgggctgtatgttttccaaggtgattcgagtccgtgctcggccttcgaattccactgcctttccggggaatgcattcatagttcgtggaggtgtgatggcggacccgattgcaaggataagtcagacgaggagaactgcgcggttgctacttgtcgacctgatgagtttcagtgttccgatgggaactgcatccacgggtctaggcaatgtgaccgggagtatgactgtaaggacatgtcagatgaagtcggctgtgtgaacgttacattgtgtgaaggcccgaacaaatttaagtgccattctggtgaatgcatcacattagacaaagtgtgcaatatggcaagagactgcagggattggtctgatgaacccattaaggagtgcggaacgaatgagtgcttggataataatggcggttgtagccacgtctgcaacgacttgaaaatcggttacgagtgtgattgccccgatggtttccagcttgtcgcccaaaggcggtgcgaggatatcgacgaatgtcaggaccctgatacctgctcacaactatgtgtaaatctcgaaggagggtacaagtgccagtgcgaggagggtttccaattggatccgcatacgaaagcgtgtaaggctgtaggtagtattgcgtatttgttcttcacaaaccgacacgaggtacgtaagatgaccctggaccgttcagagtacacgtctttaattccgaatctgcggaatgtcgttgcactcgatactgaagttgcgtctaatcgaatttattggtccgacctgtcccagcgcatgatctgcagcacccagctcgacagggctcatggcgtgagttcgtatgatactgttatttcacgggacattcaggctccagatgggctggcggtcgactggatacactctaacatctactggacagattctgttctaggaactgtgtccgttgctgatacgaagggagtgaagcgcaagacactctttcgggagaatggcagtaaaccacgtgcaattgtcgttgatccggtccacggatttatgtactggaccgattggggcacacccgcaaagatcaaaaaaggcggcttgaacggcgtcgacatatatagcttggtgactgagaatatccagtggcctaacggaattacgctggatttactttctggcagactctattgggtggattcaaagttacatagtatctcctctattgacgttaatggaggcaatcgaaaaactatcctggaggacgagaagcgcctagcccatcctttcagtctagctgtcttcgaagacaaagtcttttggactgatatcattaacgaggcaatattctccgccaatcgtttaaccggttctgacgttaatctcctcgctgagaacctgctctccccagaagacatggtattattccataacctcacccagccacgtggggttaactggtgcgagcgcaccacactatcgaacggaggatgccagtatctctgcttaccggccccgcaaattaatccccacagccccaagttcacgtgcgcatgtcctgatggaatgcttttggcacgagacatgcgaagctgcctaaccgaagcggaagccgcggtggcaacgcaggagacttcaacggttcgtctcaaggtctcctctactgccgtgcgaactcagcacacaactacccggccagtgcctgacacctctcgcctgccgggagccacaccggggttaacaacagtggaaatcgtgaccatgtcccaccaggccctcggcgatgttgcgggtcgtggaaacgagaagaaaccttcgtccgtccgcgcgttgtctatcgttctgcctatcgtcttactagttttcctgtgtctgggcgtcttcctcttgtggaagaattggaggttaaagaacattaactccataaatttcgacaaccctgtctaccaaaagactactgaggacgaagtgcatatttgccacaaccaggacggttacagctacccatccagacaaatggttagcttagaggacgacgttgcc

SEQ ID NO: 11141 - DNA, 2580 bp, Artificial Sequence
  derived and/or modified sequence
atggggccttgggggtggaaattgaggtggacggttgccctgctgctggcagccgcggggacggctgtgggagataggtgcgaaaggaatgagttccaatgtcaagacgggaagtgcatttcatacaagtgggtgtgtgatgggtcagcagaatgtcaagacggcagcgacgagtctcaagagacatgtctgagtgtcacctgtaaatctggagacttttcttgtggagggcgtgttaaccggtgcatcccacagttttggcggtgcgatggccaagtcgattgtgacaacgggtcagatgagcaggggtgtccaccaaaaacgtgctctcaagacgaatttcggtgccacgatggaaagtgcatatcccggcagttcgtgtgcgattctgatagagactgcctggacggctcggatgaagcatcctgccccgtgctgacatgcgggcccgcctcttttcagtgcaatagcagtacatgcatcccccagctttgggcatgcgataatgaccccgactgtgaagacggctccgacgagtggccacagaggtgccgaggcctctatgtgtttcaaggagacagttccccttgtagtgcatttgaatttcattgcctttccggagagtgcatacactcttcctggaggtgtgacggcggtcccgactgcaaagacaaaagcgacgaagagaattgtgccgttgccacatgtcgtcccgacgaattccagtgctcggatggcaattgcatccatgggagcagacaatgcgatagagaatatgattgtaaggacatgtcggatgaggttggctgtgttaatgtgactctttgcgagggacctaataagttcaaatgccatagcggggagtgcatcaccctggacaaagtctgtaacatggccagagattgtcgagattggagcgacgaacccattaaggagtgtggtacaaacgaatgcctggataacaacggcggttgttctcacgtgtgtaacgatctgaagattggatacgagtgtgactgtccagacgggttccagctggtagcccagcgccgctgtgaggacattgatgagtgccaggatccagacacttgcagccagttgtgcgttaatctggagggagggtacaaatgtcagtgcgaagagggcttccagttggatccacacactaaagcttgcaaggccgtgggctcgatagcttatttgttttttactaataggcacgaggttcgaaagatgaccctcgatcggagtgaatacacaagtctaattccaaacctccggaacgtggttgctctggacaccgaagtcgctagcaatagaatctactggagtgatttgagtcaacgaatgatatgctccacccagcttgacagagctcacggtgtctccagctatgataccgttatctcaagggacatacaggcccccgatggactcgcagtggattggattcactctaatatctactggaccgactccgtactaggaacggtgtccgtggcagacaccaagggtgttaagcgcaagacactgttcagggagaacggcagtaaacccagggccatagtcgtggacccagtgcacggatttatgtactggaccgactggggcactccagccaaaattaaaaaggggggcctgaacggtgtggacatctactcccttgttacagaaaacatccagtggccaaacggaattactttagatctgttgagtgggagattatattgggtggatagtaagctgcacagtatcagttctattgatgtgaatggagggaaccggaaaacgatccttgaagatgagaagcggctcgcccaccctttttccttggcagtgttcgaagataaggtgttttggacagatattattaacgaggccatcttttctgccaaccgcctaacggggtcagatgtgaatctacttgctgagaatttgctctcaccagaagatatggtgttgtttcataatctcacccagccacgcggcgtaaattggtgcgagaggacgaccctgtccaatggtggatgccagtacctgtgcctgcccgcgccacagatcaatccccactcacccaagtttacttgtgcatgtccagacgggatgctgctagctcgcgacatgcgatcctgtctgacggaggccgaggctgcggtggccacccaggaaaccagtactgttcggctgaaagtgtcctcgacagcagtgcgtacgcagcacaccaccactcggccagttcccgacacttctaggctccctggcgccacccccggactgaccacggtggaaatagttaccatgtcccaccaggctttgggcgacgtggcgggcaggggcaacgaaaagaaaccttctagcgtacgggccctctccatcgtgttgcccatagtcctcttggtattcctgtgtctcggcgtatttttgctctggaagaattggagactcaaaaacatcaactctatcaattttgataaccccgtgtaccagaagaccactgaagacgaggtacacatttgccataatcaagacgggtattcctacccctccagacagatggtgtccctcgaagatgatgttgcc

SEQ ID NO: 11142 - DNA, 2580 bp, Artificial Sequence
  derived and/or modified sequence
atgggaccgtggggatggaagctgcggtggaccgtggcgctcctcctggcggcagcaggaacggcagtgggtgaccgctgcgagaggaatgagttccaatgtcaggacgggaagtgcatctcctacaagtgggtgtgcgacggatcggccgaatgccaagacggctcagatgaatcgcaagaaacttgcctgtcagtgacctgtaaatcgggcgatttcagctgtggaggcagagtcaatcggtgtatccctcagttctggagatgtgacgggcaagtggactgcgataacggtagcgacgaacagggatgccctcccaagacttgttcccaagatgaattccggtgtcatgacggcaaatgcatttccaggcagtttgtgtgcgactcagatcgggactgcctggacgggtccgatgaggcttcctgcccggtcctcacctgcgggccggctagcttccaatgcaattcatcgacctgcatcccccaactttgggcatgcgacaacgaccccgattgtgaagatggatcagacgaatggccccagaggtgccgaggactgtacgttttccagggcgactctagcccgtgctcagcgttcgaattccactgcctctcgggagagtgcatccatagttcctggaggtgcgacggtggtccggactgtaaagacaaatccgacgaggagaactgcgcagtggctacgtgccggcccgacgaattccagtgctccgatggtaactgcatccacggaagcagacagtgtgaccgcgagtacgactgcaaggatatgtcggatgaagtgggctgcgtcaacgtgactctgtgcgaaggtccgaacaagtttaagtgccactcgggtgagtgcatcaccctcgacaaggtgtgtaatatggccagagattgtcgtgactggtccgacgaacctatcaaagagtgcggaactaatgaatgcctcgacaacaatgggggatgttcccacgtttgcaatgacctgaagatcggttacgagtgtgactgcccagacggcttccaactggttgcgcagcgccgctgcgaggacatcgacgagtgccaggatccagatacctgcagccagctgtgcgtgaacctcgaaggaggatacaagtgccagtgcgaggaaggattccagttggaccctcacaccaaggcgtgcaaggcagtcgggagcatcgcttatttgttcttcaccaatagacatgaggtgaggaagatgaccctggatcgctctgagtatacgtccctcatcccaaacctgcggaatgtcgttgcattggacaccgaagtggcctccaaccgaatctactggagcgacctctcgcagaggatgatctgctcaactcagctggaccgagctcatggagtgtcgtcttacgatactgttatctcccgggatatccaggctccggatggcctcgccgttgactggatccattcgaacatttactggaccgattccgtgctcggaaccgtctcagtggcggatacgaagggcgtgaagcgcaaaaccctgttcagagagaatggatcgaagccaagagcgattgtcgtcgacccagtgcatggctttatgtactggaccgactggggaaccccagcaaaaatcaaaaagggcgggcttaatggcgtcgacatctacagtctggtcactgaaaacattcaatggccgaatggaatcacccttgacctgctttcgggacgactctactgggtggattccaagctgcactccatctcctcgatcgacgtgaacgggggaaaccgcaagacgattctcgaggacgagaagcggcttgctcacccattctcattggctgtattcgaagataaagtgttttggaccgatatcatcaatgaggcgatcttcagcgcgaaccgcctcactggaagcgatgtgaacctcctggcggaaaatctcctgtcgcccgaggatatggtgctctttcataacctcactcaaccacgcggagtgaactggtgtgagcggacgactctgagcaacggaggttgccagtacttgtgcctcccggctccccagattaatcctcactcccctaaattcacgtgtgcttgtccggacgggatgctcctggcacgcgatatgagatcatgcctcaccgaagcggaagccgcggtcgcaacccaggagactagcactgtgcgcctgaaggttagttccactgcagtccgcacccagcacaccaccactcgccctgtcccggacacctcccgccttcccggggcgaccccaggacttactactgttgaaatcgtgacgatgagccaccaggccctgggcgacgtagccgggcgtggcaacgaaaagaaaccgtcctcggtgcgcgccctgtccattgtgttgcctatcgtgctgctggtattcctgtgcctgggcgtgtttctgctctggaagaattggcggctgaagaacattaactcgatcaactttgataacccggtgtaccaaaaaactactgaggatgaagtgcatatatgtcacaaccaagatggctacagctacccatcgagacaaatggtgtcattggaagatgatgtggcc

SEQ ID NO: 11143 - DNA, 2580 bp, Artificial Sequence
  derived and/or modified sequence
atggggccttgggggtggaagctgcggtggactgtcgctctgctgttggcggcggccggcactgctgtgggagatcgttgcgagcgcaacgagttccaatgccaggacggaaaatgcatcagctacaagtgggtctgcgatgggtcagccgaatgccaagacggatccgacgaatcccaagagacttgtcttagcgtcacgtgtaaatccggcgacttctcgtgtggtggccgtgtgaatcgctgcataccccagttctggcggtgtgatggtcaggtggactgtgataacgggtccgatgaacaaggatgtccaccaaaaacgtgctcccaagatgagttccgatgccacgacggaaagtgcatctcgagacaattcgtgtgtgactccgaccgagactgcttggatggctcggatgaagcctcctgccctgtgctcacttgcggccccgcgtctttccagtgcaacagctctacttgtatcccgcagctgtgggcctgtgacaatgacccggactgtgaggacggatcggatgaatggccacagagatgtcgcgggctgtacgtgttccagggggacagctcgccttgctcggccttcgagttccactgcctgagcggagagtgcatccactcctcatggcggtgtgacggaggcccagattgcaaggataagtccgatgaagaaaactgcgccgtggcgacgtgtagacctgacgaatttcaatgctcagatggcaactgcatccacggaagcaggcagtgtgatcgcgaatacgactgcaaagatatgtcagacgaggtgggatgtgtgaacgtgactctgtgcgaaggtcccaacaaattcaagtgccactcgggggagtgcattacgctggataaggtgtgcaatatggcccgggactgcagagactggtctgacgagccaatcaaggaatgcggaaccaacgaatgcctcgacaataacggtggctgctcgcacgtctgcaacgatctgaaaatcggctacgagtgcgattgcccagatggttttcaactcgtggcccaacgcagatgcgaggacatcgacgagtgccaagacccggacacttgctctcaactgtgtgtgaatttggaaggcggatacaagtgccagtgcgaagagggattccagttggatccacacaccaaggcgtgcaaggcggtgggatccattgcctatcttttctttactaacagacatgaagtcaggaagatgactctcgacagaagcgaatacacgtctctgatccccaatctccgcaacgtggtcgcgctggacacggaagtggccagcaatcgcatctactggtcagatctctcgcaacggatgatctgttcgacccagctggatcgcgcccacggagtctcgagctacgacaccgtcatctcgcgggacatccaggcacctgacggactggcagtggattggatccattccaacatttactggactgactctgtcttgggcaccgtgtcggtcgcggacactaaaggagtgaagagaaagaccctgttccgggaaaacggcagcaagcctcgcgcgatcgtggtggaccctgtccacggtttcatgtattggaccgactggggaactccggccaaaatcaaaaagggaggtcttaacggagtggacatttactcgttggtcaccgaaaacatccagtggccgaacgggattaccctggacctgctgtccggtagactttactgggtggatagcaagctccacagcatcagcagcatcgatgtgaacggagggaaccgcaagactattctcgaagatgagaagcggttggcacacccatttagcctcgcggtgttcgaggataaggttttttggacggatatcatcaacgaggcgatcttctccgcaaaccggctgaccggctccgacgtgaatctcctcgccgaaaatctgctctcgccagaggacatggtcctgtttcacaatctgacccaacctagaggggtcaattggtgcgagcgcaccaccctcagcaacggaggatgccagtacctttgtctgccggccccgcagattaatccgcactcgcctaagttcacttgcgcatgccccgatggaatgctgctggccagagatatgcgctcctgtctgactgaagctgaggcggcagtggcaactcaggagacttccaccgtgcgcctcaaagtctcctctaccgcggtgcggacccagcataccactactcgcccggtgccggacacctcccgcttgcctggcgccaccccaggattgactaccgtggaaatcgtgaccatgtcacaccaggctctgggcgatgtggctggtcggggaaacgagaagaaaccctcctccgtgcgggctctgtcgatcgtcctgccgattgtgttgcttgtgttcctgtgtctgggggttttcctcctctggaagaactggcggttgaagaacatcaactcaatcaattttgacaatccggtgtaccagaaaactaccgaagatgaagtgcatatctgtcacaaccaggacggatactcctacccgagcaggcagatggtgtcactcgaggacgatgtcgcg

SEQ ID NO: 11144 - DNA, 2580 bp, Artificial Sequence
  derived and/or modified sequence
atgggtccgtgggggtggaagctccggtggactgtggccctgctgctggcagccgctgggactgctgtcggcgacagatgcgaaagaaacgagttccagtgtcaggacggcaagtgtatctcatacaagtgggtctgcgacggcagcgccgagtgccaggacggatcagacgagtcgcaggagacttgcctgagcgtcacttgtaagtcaggagatttctcgtgcggaggtagagtgaatcggtgcatccctcagttctggcgctgtgatggacaggtggactgtgacaatggatccgacgagcaaggatgcccgccaaaaacgtgctcccaagatgagttcaggtgccatgacggaaaatgcatctcacggcaatttgtctgcgattccgatagggattgcctggatggtagcgacgaggcctcttgccctgtgctgacctgcggaccggcctcttttcagtgcaattcctctacttgcattcctcagctctgggcatgcgacaatgatcccgactgtgaggacggatccgacgaatggccgcagcggtgccggggactgtacgtgttccaaggagactcctcaccctgttccgcgtttgagttccactgcctgtccggagagtgtatccattcctcctggcggtgcgatggaggacccgactgcaaggacaagtcggatgaggaaaattgcgcagttgccacttgtcggccggacgagttccaatgctcagacggcaactgtatccacggatcgaggcaatgtgatcgggagtacgactgcaaagatatgtccgacgaagtgggatgcgtgaacgtgactttgtgcgaaggtccgaataagttcaagtgccactcgggtgaatgcattaccctcgacaaagtgtgcaatatggcacgcgactgtcgcgactggtccgatgaaccgatcaaagaatgcggtacgaatgagtgcctcgacaacaacgggggatgttcacacgtgtgtaacgatctcaagatcggttacgaatgcgactgcccggatggctttcagcttgtggcgcagcggaggtgtgaagatatcgatgagtgccaagacccggatacttgcagccaactgtgcgtgaacctggaaggaggatacaagtgtcagtgcgaagaaggttttcagctcgatccacataccaaagcgtgtaaggctgtcggctcgatcgcctacctgtttttcacgaatagacatgaagtgaggaagatgaccctggaccggtcggaatacacttcgctgattccgaacctgagaaacgtggtggccctggacaccgaagtggcctccaaccggatctactggtcagatctgagccaacggatgatctgttccacccaactggaccgagcccacggcgtctcgtcctacgataccgtcatatcgcgggacattcaggcgccggacggactggcggtggattggatccactccaacatctactggaccgattcagtgctgggaaccgtctcggtcgcggacaccaagggcgtgaagcgcaagaccttgttccgggagaatggatcaaagcctcgagccatcgtggtggaccctgtgcacggcttcatgtactggacggactggggaacccctgcaaagatcaaaaaaggtggtttgaatggagtggacatttactcgcttgtgaccgaaaacatacaatggcccaatggcatcaccctggacttgctgagcggccgcctgtactgggtggactccaagttgcattccatctcatcgattgatgtcaacggaggaaacagaaaaaccatcttggaagatgagaagagactggctcatcccttctccctcgctgtctttgaggataaggttttctggaccgacatcatcaacgaagctatcttctcggccaacaggctgaccgggtcggacgtgaacctgctcgccgaaaatctgctgagcccagaagatatggtcctgttccacaacttgactcagccacgcggcgtgaactggtgcgagaggaccactctgtcaaatggaggctgccaatacctctgtctcccggcgccgcagatcaacccgcactcaccgaaattcacctgcgcctgtcctgatggcatgctgctggcccgggatatgcggtcctgcctgacggaggccgaggctgcggtggccactcaggaaacctccactgttcgcctgaaagtgtccagcaccgcagtgcggacccagcatactacgacccggcctgtgccggatacttcgcgcctgcctggagccaccccgggactgacgactgtcgagatcgtgaccatgtcgcaccaagcgctgggtgatgtggccgggaggggaaacgaaaagaaaccatcctcagtcagagcgctgagcatcgtcctccccatcgtgctgctggtgttcctttgcctcggggtctttctgctgtggaaaaactggcggctgaagaatatcaattccattaacttcgacaacccagtctatcaaaagacgaccgaagatgaagtgcacatctgccacaaccaagacggttattcttacccatcacgacagatggtgtctttggaagatgacgtggcg

SEQ ID NO: 11145 - DNA, 2580 bp, Artificial Sequence
  derived and/or modified sequence
atgggtccgtggggttggaaactacgttggacggtagcgctactattagcggcggcgggtacggcggtaggtgatcgttgtgaacgaaatgaatttcaatgtcaagatggtaaatgtatatcgtataaatgggtttgtgatggttcggcggaatgtcaagatggttcggatgaatcgcaagaaacgtgtctatcggtaacgtgtaaatcgggtgatttttcgtgtggtggtcgtgtaaatcgatgtataccgcaattttggcgatgtgatggtcaagtagattgtgataatggttcggatgaacaaggttgtccgccgaaaacgtgttcgcaagatgaatttcgttgtcatgatggtaaatgtatatcgcgtcaatttgtatgtgattcggatcgtgattgtttagatggttcggatgaagcgtcgtgtccggtactaacgtgtggtccggcgtcgtttcaatgtaattcgtcgacgtgtataccgcaactatgggcgtgtgataatgatccggattgtgaagatggttcggatgaatggccgcaacgttgtcgtggtctatatgtatttcaaggtgattcgtcgccgtgttcggcgtttgaatttcattgtctatcgggtgaatgtatacattcgtcgtggcgttgtgatggtggtccggattgtaaagataaatcggatgaagaaaattgtgcggttgcgacgtgtcgaccggatgaatttcaatgttcggatggtaattgtatacatggttcgcgacaatgtgatcgtgaatatgattgtaaagatatgtcggatgaagttggttgtgtaaatgtaacgctatgtgaaggtccgaataaatttaaatgtcattcgggtgaatgtataacgctagataaagtttgtaatatggcgcgagattgtcgtgattggtcggatgaaccgataaaagaatgtggtacgaatgaatgtttagataataatggtggttgttcgcatgtatgtaatgatctaaaaataggttatgaatgtgattgtccggatggttttcaactagttgcgcaacgacgttgtgaagatatagatgaatgtcaagatccggatacgtgttcgcaattatgtgtaaatttagaaggtggttataaatgtcaatgtgaagaaggttttcaattagatccgcatacgaaagcgtgtaaagcggtaggttcgatagcgtatctattttttacgaatcgacatgaagttcgtaaaatgacgttagatcgatcggaatatacgtcgctaataccgaatctacgtaatgtagtagcgctagatacggaagttgcgtcgaatcgaatatattggtcggatttatcgcaacgtatgatatgttcgacgcaactagatcgagcgcatggtgtatcgtcgtatgatacggtaatatcgcgagatatacaagcgccggatggtctagcggttgattggatacattcgaatatatattggacggattcggtattaggtacggtatcggttgcggatacgaaaggtgtaaaacgtaaaacgctatttcgtgaaaatggttcgaaaccgcgtgcgatagtagtagatccggtacatggttttatgtattggacggattggggtacgccggcgaaaataaaaaaaggtggtttaaatggtgtagatatatattcgctagttacggaaaatatacaatggccgaatggtataacgttagatctattatcgggtcgtttatattgggtagattcgaaactacattcgatatcgtcgatagatgtaaatggtggtaatcgaaaaacgatactagaagatgaaaaacgtttagcgcatccgttttcgctagcggtttttgaagataaagttttttggacggatataataaatgaagcgatattttcggcgaatcgattaacgggttcggatgtaaatttattagcggaaaatctattatcgccggaagatatggttttatttcataatctaacgcaaccgcgtggtgtaaattggtgtgaacgtacgacgttatcgaatggtggttgtcaatatttatgtttaccggcgccgcaaataaatccgcattcgccgaaatttacgtgtgcgtgtccggatggtatgttactagcgcgagatatgcgatcgtgtctaacggaagcggaagcggcggttgcgacgcaagaaacgtcgacggtacgtttaaaagtatcgtcgacggcggtacgtacgcaacatacgacgacgcgaccggtaccggatacgtcgcgtttaccgggtgcgacgccgggtctaacgacggtagaaatagtaacgatgtcgcatcaagcgctaggtgatgttgcgggtcgtggtaatgaaaaaaaaccgtcgtcggtacgagcgctatcgatagtattaccgatagtattactagtatttctatgtctaggtgtttttctactatggaaaaattggcgactaaaaaatataaattcgataaattttgataatccggtatatcaaaaaacgacggaagatgaagtacatatatgtcataatcaagatggttattcgtatccgtcgcgacaaatggtttcgctagaagatgatgtagcg

SEQ ID NO: 11146 - DNA, 2580 bp, Artificial Sequence
  derived and/or modified sequence
atgggcccatggggctggaagctgaggtggaccgtggccctgctccttgccgctgccggaaccgccgtgggtgaccgttgcgagagaaacgagttccaatgccaagacggcaaatgtatttcctacaagtgggtgtgtgatggctctgccgagtgccaggacggctcagatgagagtcaggaaacctgcctgagtgtaacttgtaaatctggtgacttttcatgtggaggcagggtgaacagatgtattccccagttctggcgctgcgatggacaggtcgactgtgataatggcagcgatgagcagggttgcccaccaaaaacttgttcccaagacgaatttcgttgtcacgatggcaagtgcatatcaagacagtttgtctgtgattcagaccgcgattgtctggacggttctgacgaggcaagctgtccagtcctgacatgcggtcctgcttcttttcagtgcaatagctctacatgtattcctcagctctgggcttgtgataacgaccccgattgtgaagacggaagcgacgaatggccacagcgctgccgtggactgtacgttttccaaggtgactcttccccctgctcagctttcgaattccactgtctgtccggcgagtgtatccattcaagctggcgttgtgacggcggacctgactgtaaggataaaagcgacgaggagaattgtgccgtcgcaacttgccgtccagacgaattccagtgctcagatggtaattgtattcatggtagtcgtcaatgcgacagggagtatgactgcaaagacatgtcagacgaagtgggttgcgtgaatgtaaccctctgtgagggacccaacaaatttaagtgtcattctggtgaatgtattacccttgacaaggtctgcaatatggctcgcgattgcagagattggtccgacgagcccatcaaagaatgtggtactaacgagtgtctcgataataatggtggttgctcccacgtttgcaacgacctcaaaatcggatatgagtgcgactgcccagacggcttccaattggtggcacagagacgttgcgaagatatcgacgagtgccaggaccctgacacttgtagtcagctgtgtgtcaacctcgagggcggatacaagtgccaatgtgaggagggtttccaacttgacccacacacaaaggcatgcaaggctgttggcagtatcgcctacctgtttttcaccaatcgccacgaggtgcgtaagatgactctcgatcgttctgaatacactagtcttatccccaacctcaggaacgttgtggccttggatacagaagtagccagcaatcgcatctactggtctgacctgtcacagaggatgatatgctccacccagttggaccgcgcccatggtgtttcctcctacgacactgtcatctctcgtgatatacaggccccagatggacttgccgtggactggatacactctaacatttactggactgattctgtgcttggaaccgtttctgtggccgatactaagggagttaaaagaaaaaccctgtttagggaaaacggcagtaagccacgtgcaattgtggttgatcctgtccacggctttatgtactggaccgattggggcacccctgcaaagattaagaaaggcggtctgaacggcgtagacatctattctttggtgactgaaaacattcagtggcctaatggtattactctggaccttctctccggtaggctctactgggtagacagcaaactgcattccatttcaagcatcgacgtcaacggaggcaacaggaaaaccattctcgaggacgagaagagactcgctcatccattttctcttgctgtgtttgaggacaaagtgttctggaccgatattatcaatgaggccatttttagtgctaacagactgactggtagcgatgtgaacctgcttgctgaaaacttgctctctcctgaggacatggtattgtttcacaatctgacccagccaagaggtgtgaattggtgtgaacgcaccactctgtcaaacggtggatgccagtatctgtgcctgcctgctccacagatcaaccctcactctccaaagtttacatgcgcatgcccagatggtatgctcctcgctagggacatgagatcctgcctcacagaggcagaggctgcagtggcaactcaggaaacttcaaccgtgaggctgaaggtgagctctaccgctgttcgcacacagcacaccacaacacgtcctgtccccgatacttctcgtctcccaggcgccacacctggtttgacaaccgttgaaattgtgactatgtctcaccaggctttgggagatgtagccggccgtggcaatgaaaagaagccctcttccgttcgcgcactgtccatagtgttgcctattgtgctgttggtgtttctctgtcttggtgtgtttctcctgtggaagaattggagactgaagaacattaactcaatcaatttcgataacccagtgtatcaaaagactactgaggacgaagttcacatttgccacaaccaagacggctactcatacccctctcgccagatggtatccctggaagacgacgtggct

SEQ ID NO: 11147 - DNA, 2580 bp, Artificial Sequence
  derived and/or modified sequence
atgggaccctggggctggaaactgcggtggactgttgctttgctgttggcggccgcgggaacggccgtgggcgatagatgcgagcggaatgagttccagtgccaagatggaaaatgcatctcatacaagtgggtgtgcgacggatccgccgaatgtcaagacggctcggacgaatcacaagaaacttgcctgtcagtgacttgtaagtccggggacttctcctgcggtggccgggtgaaccgctgcattccacagttctggcgctgcgatggacaagtggactgcgacaatggctcggatgaacagggatgcccaccaaagacctgttcacaggatgaattccgctgccacgatggaaagtgtatctcaaggcagtttgtctgcgacagcgacagggactgcctggacgggagcgacgaagcatcatgtccggtgcttacttgcggacctgccagcttccaatgcaatagctcgacgtgcatccctcagctgtgggcctgtgacaatgatccggattgcgaagatggctcggacgagtggcctcaaagatgcaggggactgtacgtgttccaaggagactcgtccccttgctcggctttcgagtttcattgccttagcggagaatgcattcattcatcctggaggtgtgacggagggccggactgcaaagacaagtcagacgaggaaaattgtgccgtcgcgacgtgcaggcctgacgaattccagtgctcggacggcaactgtatccacggttcccgacagtgcgatagagaatacgactgtaaggacatgtcagacgaggtgggttgcgtgaacgttactctgtgtgagggtcctaacaagtttaagtgccacagcggcgaatgcatcactcttgacaaagtctgtaacatggcgcgagactgcagagactggtccgacgaaccaatcaaagagtgtggcactaatgaatgtcttgataacaacggtggatgctcccacgtgtgcaacgatctgaaaatcgggtacgagtgtgactgtccggacgggtttcagctcgtggcgcaacggcggtgcgaggatatagacgaatgccaggatcctgacacgtgctcacagctctgtgtgaacctcgagggcggatacaaatgccagtgcgaagagggattccagctggacccgcataccaaggcatgcaaggctgtcggctcgatcgcttatctgttctttactaaccgccacgaggttagaaaaatgactctcgaccgctcagagtacacctcgctgataccgaaccttcgcaacgtggtggctctggacactgaagtggcaagcaatcggatctactggtccgatttgtcgcagagaatgatctgctcaacccagctggacagagctcacggcgtatcatcatacgacaccgtgattagccgcgatatccaggcaccggacggcctcgcagtcgactggatccattcgaacatctactggaccgactctgtcctcggaaccgtgtcggtggccgataccaaaggggtgaaacggaaaacgctgtttcgggaaaacggctcgaaaccgcgggccatcgtcgtcgatccggtgcacggattcatgtactggaccgattgggggaccccggcaaagatcaaaaagggcggacttaatggggtggacatctactccctggtgaccgaaaacattcagtggccgaacggaatcactctggatctgctcagcggtcgcctgtattgggtcgactcgaagctgcactccatatcatcaatcgatgtgaatggaggcaacaggaaaaccatcctcgaagatgaaaagaggttggcccatcctttctcgctggccgtgttcgaggacaaggttttctggaccgatatcattaatgaagctatcttctcggcgaaccgcctgaccggaagcgacgtgaacctgctcgcagaaaacctgctgtccccggaggatatggtgctgttccacaatctcacccaaccgcggggtgtgaactggtgcgaacgcaccactctgtctaatggaggatgtcaatacctgtgtttgccggcgccgcagatcaatccacattcgcccaaattcacctgcgcttgcccggatggaatgctgctggcacgcgatatgagatcctgtctgactgaggctgaagccgcagttgccactcaggaaacttcgacggtccgcctgaaggtatcgtcaactgccgtgagaacccagcatacgaccacgcgcccggtccccgatactagtagactgcctggtgccaccccaggacttactaccgtcgagattgtcacgatgtcccatcaggcgctcggcgacgtggccggacgggggaacgaaaagaaaccgtcgtccgtgcgggctctgtcaattgtgctgccgatcgtcctgttggtgtttctctgcctgggggttttcctcctgtggaagaactggagactgaagaacatcaactcgatcaatttcgataatccagtctaccaaaagaccactgaggatgaggtgcacatctgtcacaatcaggacggatactcatacccgtcgcgccagatggtgtcactggaggacgacgtggca

SEQ ID NO: 11148 - DNA, 2580 bp, Artificial Sequence
  derived and/or modified sequence
atggggccatggggatggaagctgcgttggacagttgccctacttctcgcagcggcgggaacagcagttggagacagatgtgagcgtaatgaattccagtgccaggatggaaaatgcattagttacaaatgggtctgtgatggcagtgctgagtgccaagacggatcggatgaatctcaagagacgtgccttagtgtcacgtgcaagtctggggacttctcctgtggtggaagagttaatagatgtattccacaattttggcgctgcgatggtcaagtggattgtgacaacggatcagatgaacaaggatgtccacccaaaacatgttctcaggatgaattccgttgtcatgacggaaagtgtatctcgcgccagttcgtgtgcgacagtgatcgagattgtctggatggatctgatgaagcgtcttgcccagttctcacttgcggtccagcatcattccagtgtaattcaagtacatgtatcccacagttgtgggcctgtgataacgatccggattgtgaagatggtagcgacgagtggccacaacgttgtcgcggactttacgtatttcagggagatagttcaccgtgtagtgcttttgaatttcattgtctctctggagaatgcattcacagttcatggagatgcgatggaggtccggactgtaaagataagtcagatgaggagaactgtgctgtggccacctgccgtccggacgagttccaatgtagcgacggtaattgcattcacggatcgagacaatgcgatcgagaatacgattgcaaggatatgtcggatgaagtggggtgtgttaatgttacactttgtgaaggaccaaacaagtttaaatgccattcgggggagtgtatcacattggataaggtctgtaatatggcgcgtgattgtcgtgattggtcagacgaaccaataaaggaatgcggaacgaatgagtgtttggataacaacggtggatgctcccacgtttgcaatgatctgaaaataggatacgagtgtgactgtcctgatggttttcaattagtggcacaaagacgttgcgaagatatcgatgagtgccaagatccagatacatgctcgcaactttgtgtaaatttggagggaggatacaaatgtcaatgtgaagaaggattccaacttgatccacatacaaaggcctgtaaggcagttgggagcattgcataccttttcttcacaaaccgccatgaagttcgaaaaatgacactcgacaggagcgagtatacttcgctgataccgaatctaaggaatgtggttgcgctggacacggaagttgcatccaaccgaatttactggagcgacttgtcacaaagaatgatttgctctacacagcttgatagggcccatggagtgtcatcatatgatactgtcatttcaagagatattcaagcccctgacggactcgcagtggattggattcattcgaatatctattggaccgatagcgtgttgggaaccgtctccgtggccgatactaagggtgttaaaaggaagaccctctttagggagaacgggtctaagccgcgagcaattgtcgttgatcctgtacatggatttatgtactggacagactggggaactccagctaaaataaagaaaggaggtctgaatggagttgatatttactctctggtcacagaaaatatccagtggccgaatggtatcaccttggatttattgagtggcagactttactgggtggactcaaagctccactctattagctcgattgacgttaacggagggaataggaagacaattttagaggacgagaaaagactcgctcacccattttccttggctgtgttcgaggataaagtcttctggaccgacatcatcaatgaagcaattttctccgcaaatcgactgacaggaagtgatgtgaatctgctcgctgagaacttgctctccccagaggacatggtactgttccacaatctcactcaaccacgaggagtaaattggtgcgaacgtactaccctatcgaacggaggatgtcaatatttatgtttgcctgcaccacaaattaacccgcattctccgaagtttacatgtgcttgtccagatggaatgctgttggctagagatatgcgatcctgccttacagaggctgaagctgcagttgcgacgcaggagacaagtacggttcgtctcaaggtctcttcgacagccgttagaacgcaacatactactactagaccagtaccggatacttcacgactcccaggagcaacaccaggtctgaccaccgtggaaattgttactatgtcgcatcaggcattaggtgatgtggctggacgaggaaacgaaaagaagccaagttcagtgcgagcactctctatcgtgctcccaatagtgttgcttgttttcctttgcttgggagtttttctcctttggaaaaattggcgactcaaaaatattaatagcatcaactttgataacccagtctatcagaaaacgacggaagatgaagtccacatttgccataaccaggacggatatagttatccaagccgtcagatggtatcacttgaggatgatgttgct

SEQ ID NO: 11149 - DNA, 2580 bp, Artificial Sequence
  derived and/or modified sequence
atgggaccttgggggtggaaactgcgctggactgtggccctccttctggccgctgccggcaccgcagttggcgacagatgtgagcggaacgagttccaatgccaagatggcaagtgcatatcgtacaaatgggtgtgcgatggatcggcagagtgtcaggatggctccgatgagtcgcaagagacttgtctgagcgtgacttgtaagtcgggagatttctcgtgtggaggtcgcgtgaaccgatgtatcccacagttctggagatgcgatggtcaagtcgactgtgacaatgggagcgacgaacaaggttgccctcccaagacctgctcccaggatgaatttcgatgccatgacgggaagtgcataagccggcaatttgtctgcgatagcgatcgggattgtcttgacggcagcgacgaagctagctgtcctgtgttgacctgcggccccgcatcgttccaatgcaattcgtctacctgcattcctcagctgtgggcctgtgataacgatccagattgcgaggacggaagcgacgaatggcctcagcgttgccggggtctgtacgtgttccagggagattcctcgccttgttccgccttcgagttccactgtctttccggcgaatgtatccatagctcgtggaggtgcgatggcggccctgactgtaaggataagtcggacgaagaaaattgtgctgtggcaacctgtcgtcctgatgaatttcagtgttcagacggtaactgcatccacggatcacgccaatgtgatagagaatacgattgcaaggacatgagcgacgaagtcggatgtgttaacgtgaccctctgtgaagggcctaacaagtttaagtgtcattccggtgaatgtattacgctggataaggtgtgcaatatggccagggactgtcgcgactggtccgatgaacctatcaaagaatgcggaactaacgaatgtctggataacaacggaggctgctcgcatgtgtgcaatgatcttaagattggatatgaatgtgactgccctgatggattccagctcgtggcacaacggaggtgtgaagatatcgacgaatgtcaggatccagacacttgctcgcaactgtgcgtgaaccttgaaggaggatacaagtgccagtgcgaggaaggtttccaactggatcctcatactaaagcgtgtaaggcggtcggctccattgcatacctgtttttcactaatagacatgaagtgcgaaaaatgaccctggatcggtcggaatacacctcgttgatccccaaccttaggaacgtcgtggcccttgataccgaggtggcatcaaaccgaatatactggtcggatctgagccaaagaatgatttgctcaactcagcttgatcgagcacatggagtttcctcctacgacaccgtcatttcgcgggacattcaagcaccagacgggcttgcggtggattggatccatagcaacatctactggaccgatagcgtcctgggcaccgtctccgtggcagataccaaaggagtcaagcgtaagactctgtttcgagagaacggaagcaagccgcgagcgattgtggtggatcctgtgcacggctttatgtactggacggattggggtaccccggccaaaatcaagaaggggggcctgaacggagtggatatctatagtcttgtgactgaaaacattcaatggccaaacggaatcactcttgacttgctctcaggacggctctactgggttgactccaagctccactccatttccagcattgacgtgaacggaggaaaccggaaaacgattctggaagatgaaaagcgtctggcacaccctttttcccttgcagtgttcgaggataaagtgttttggacggacattatcaatgaggcgattttctctgcaaacagattgaccggtagcgatgtcaatcttcttgccgagaacctcctttcgcctgaggatatggtcctgttccataacctgacccagcctcgcggcgtgaactggtgtgagagaaccacgctgagcaacggcggatgtcaatacttgtgtctgccagcaccacaaatcaatccccattcaccaaagttcacctgtgcatgccctgatggcatgttgctggcccgggatatgcgctcctgccttaccgaggcagaggccgcagtcgctacccaggaaacgtcaactgtgaggcttaaggtttcgtcgaccgcagtccggactcaacataccaccactcggccagttcccgatacctcgagactgcctggcgccactcctgggttgacgaccgtcgaaattgtgactatgagccaccaagcacttggggatgtcgcaggacgcggtaacgaaaagaaaccatcgtctgtgagagcactgagcattgtgctccctatagtccttctggtgttcctgtgtcttggggtgtttcttctttggaagaactggagacttaagaacatcaactccataaactttgataacccagtctaccagaaaaccacggaggatgaggtgcatatttgccacaaccaggacggttactcatacccttcgcggcagatggtgtcattggaagatgatgtggca

SEQ ID NO: 11150 - DNA, 2580 bp, Artificial Sequence
  derived and/or modified sequence
atggggccttggggatggaagctgaggtggacggtcgcccttctcttggctgccgctgggactgccgttggagatcgttgcgaaagaaacgagttccagtgccaggatggcaagtgtatctcatacaaatgggtttgcgacggcagcgctgagtgtcaggacggttcagacgagagccaggagacttgtctctcggttacgtgtaagtcgggtgatttctcttgtggtggacgggtgaaccgttgcatcccgcaattctggcgttgtgacggccaggtggattgcgataatggctccgatgaacagggctgccccccaaagacttgcagccaagatgagttccgatgccacgatggcaagtgcatttccagacagttcgtctgcgacagcgacagagactgtctcgatggaagcgacgaggcgtcgtgccccgtcttgacctgcggccctgcttcgttccagtgcaattcctccacgtgcatcccccagctgtgggcgtgcgacaatgatcctgattgcgaggacggatcagacgagtggcctcaaaggtgtcgcgggctctatgtgtttcaaggcgatagctcgccatgctccgccttcgagttccactgcctgtccggcgaatgtattcatagctcttggcgttgcgacggtggccccgactgcaaggacaaatccgatgaagagaactgtgccgtcgcgacttgccgtcccgacgagtttcagtgcagcgatggtaactgcattcatggttcacgtcagtgcgatcgagagtacgattgcaaggatatgagcgatgaggtcggttgcgtcaatgtaaccttgtgtgagggtccaaacaagttcaagtgccatagtggagagtgcatcactctggacaaggtgtgcaacatggctcgtgactgcagggattggtcggacgagccaataaaagaatgtggaaccaatgagtgcttggacaataacggcggatgctcccacgtatgcaacgatcttaagatcggctacgagtgcgactgtcccgatggctttcaactagtggcccagaggcgctgcgaagatatcgatgagtgccaggatcccgatacctgttcgcagttgtgtgtcaatctggagggcggctacaagtgtcagtgcgaggagggttttcaacttgacccacacactaaggcgtgcaaagccgtgggatccatcgcttacctcttcttcactaacaggcacgaggtcagaaagatgactctggatcggtccgagtatacttcgctcattcctaatctacgcaacgttgtggccctggacaccgaggtcgcctccaacaggatctactggtcggatctctcccagcgtatgatctgtagcacccagctggatcgcgcgcatggtgtctcgtcgtacgataccgtcatctctcgggacattcaggcacctgatggccttgccgttgactggattcatagcaacatttactggaccgattctgtcctcgggaccgtttccgtggccgataccaagggagtcaagcgaaaaaccctctttcgcgagaatggttccaaacctcgtgctatcgttgtcgatcccgtgcatggcttcatgtattggacggactggggtaccccggccaagatcaaaaagggcggcctcaacggtgtggacatctacagccttgtaactgagaacatccagtggcccaatggaattacgctggatctattgagcggacgcctatactgggtcgattcgaagctgcactctatctctagcatcgacgtcaatggcggcaaccggaaaactatcttggaggacgagaagcgcctggctcatcccttctcgctcgccgtgttcgaggacaaagtgttctggaccgacatcatcaatgaagccatcttctccgctaaccgtctgaccggctccgacgtcaatcttctggccgaaaacctcttgtcccccgaggatatggtgctcttccacaaccttacccagccccgcggagtgaactggtgcgagagaacgacactaagtaacggaggatgccagtatctgtgtctacccgcgccccagattaacccccactcccccaagtttacctgtgcctgccccgatggtatgctgttggcacgcgatatgcgctcctgcctgactgaggccgaggccgctgtggcgacccaggagacgtccactgtacgcctaaaagtgtccagcaccgcggttcgaacccaacacaccacgacccgacccgtgcccgatacaagtcgtttgcctggcgcaacaccagggctgaccacagtggagatagtcaccatgtcccatcaggcactgggagacgtcgccggccggggcaacgagaagaagccctcatccgtccgtgccttgtcaatcgtcctccccattgtgttgctggttttcctctgtctgggggtttttctactttggaagaactggcgcttaaagaacattaactccataaacttcgataaccctgtctaccaaaagaccactgaggatgaggttcacatctgccataaccaagatggctactcttatccatcgcgccagatggtgtctctcgaggacgacgtcgcc

SEQ ID NO: 11151 - DNA, 2580 bp, Artificial Sequence
  derived and/or modified sequence
atgggaccctgggggtggaaacttcgatggactgtggcactgcttctggccgcggcgggaaccgcagtgggagatcgctgcgaaagaaatgagtttcagtgtcaggatggaaaatgcatctcatacaagtgggtgtgtgatggtagcgctgagtgtcaagatggatcagatgaatcgcaggaaacttgtctgtccgtgacctgcaagagcggtgactttagctgtggcgggcgcgtcaatcggtgtataccacaattctggcggtgtgacggccaagtggactgtgataacgggtcagatgagcagggttgtccaccaaagacttgttcacaggatgaatttaggtgccatgacggaaagtgcatttcccgccagtttgtgtgtgattccgatcgagactgtctcgacggatcggatgaagcatcttgccccgtccttacctgcggaccggcatcatttcagtgcaacagctcaacttgtattccgcaactgtgggcttgcgataatgaccccgactgtgaagatggctcagatgaatggccccagcggtgcaggggcctttacgtgtttcagggtgattcttcgccatgctcggcattcgaattccattgcctctccggtgaatgtattcattcatcatggcgatgtgatggaggcccagattgtaaggataagtcggacgaagagaattgtgccgtggcaacgtgtcgaccagatgaatttcaatgctcagatggaaattgcatacacggttcgaggcaatgcgaccgcgaatacgattgtaaagatatgagcgatgaagtcggttgtgtcaacgtgactctttgtgagggtccgaataagttcaaatgccattcgggcgaatgtattactcttgataaagtttgtaacatggcacgtgattgcagagattggagcgatgaacctatcaaggaatgtgggactaacgaatgtctcgataacaatggaggatgctcgcatgtgtgcaacgaccttaagattggatacgaatgcgattgccctgatggatttcaacttgtggcccagcggcgctgtgaggacatcgatgaatgccaggatcctgacacctgttcccagttgtgcgtgaatctggagggaggttacaagtgtcagtgtgaagagggatttcagctggacccacacactaaggcttgcaaagcggttggatccattgcatacctgtttttcactaaccgacatgaagtgcgtaagatgactctcgatcgcagcgagtacactagccttattcctaacctgcggaacgtagtcgccctggatactgaggtggcaagcaacaggatatactggagcgacctgtcgcagcgaatgatttgctcaacccaacttgatagagcgcatggtgtgtcaagctacgatacggtcatttcgcgcgatattcaagcacctgacggtcttgcagtggattggatccattccaacatttactggaccgactccgtgctgggtaccgtctcggtggctgacaccaaaggggtcaagagaaagactctcttccgcgagaacggttccaagccaagagcaattgtcgtcgatccagttcatggatttatgtactggactgattggggcacgccagccaagataaagaagggaggactcaatggtgtggacatttactcgcttgtgacggaaaacatccagtggccaaacggtataactctggatctgctttcaggcagactctactgggtcgattccaagttgcactcaatctcgtcgatcgatgtgaacggaggtaataggaaaaccattctggaggacgaaaagcggctcgcacatccattctccctggcagtctttgaagataaggtgttctggaccgatatcatcaatgaagcaatcttttccgccaaccgactcactggttcggacgtcaaccttctggccgaaaatcttctgtcccccgaggacatggtgctgttccataacctcactcaacctcgcggagtgaattggtgcgagcgcactactctgtcgaacggtggctgtcaatacttgtgcctccctgcaccacaaatcaaccctcattccccgaagttcacctgcgcatgcccagatggaatgttgctggcaagggacatgagatcctgtttgactgaggccgaggcagccgtcgcaactcaagaaacctccactgtcagactcaaagtctcgtctactgcagtccgcacccagcatactaccacccggccggtgcctgacaccagcagactccctggagcaacccccggactgactactgtcgaaatagtgactatgtcacatcaagcacttggggacgtggcaggacgcgggaacgagaaaaaaccctcctctgtccgcgcactctctattgtgcttcctatcgtccttctggttttcctttgcctgggagtgtttcttttgtggaaaaactggagactgaagaacattaactcgatcaactttgataaccctgtctatcaaaagaccaccgaagatgaagttcatatttgccacaaccaagacggatactcgtacccgtccaggcaaatggtgagccttgaggatgatgtggcc

SEQ ID NO: 11152 - DNA, 2580 bp, Artificial Sequence
  derived and/or modified sequence
atgggcccttggggctggaaactgaggtggacagtggcgctgctcctggctgctgccggcaccgccgttggtgacaggtgcgaaaggaatgagttccagtgtcaagatggcaaatgcatcagttataaatgggtctgtgatgggtccgccgaatgtcaggacggcagcgacgagtcgcaggaaacatgtctgagtgtgacctgtaaatcaggagatttcagctgtggcggaagggttaataggtgtatcccacagttttggcgctgcgacggccaggtggattgcgacaacgggagtgacgagcaagggtgtccccccaaaacctgttctcaagacgagttccgatgtcatgacgggaagtgcatctcacgtcagtttgtgtgtgactctgacagagattgcctggatgggagtgatgaggcctcctgtccggtattgacatgtggccccgcgtcattccagtgcaattcttccacctgtattccccagctctgggcctgcgacaacgatccggactgtgaagacggatctgacgaatggcctcagaggtgcagaggactgtacgtttttcagggggattcgagtccatgctcagcattcgagttccactgcctgtcgggtgaatgcatccactccagctggaggtgcgatggggggcctgattgtaaggataaatctgacgaagagaattgtgcggtggcaacctgtaggcccgatgagttccagtgctctgatggcaactgcatacatgggtccagacagtgtgaccgagagtacgattgcaaggatatgtctgatgaagttgggtgtgttaatgtcactctctgcgaggggcccaacaagttcaaatgtcactccggcgaatgcataaccttggataaagtttgcaacatggccagggattgtagggattggtccgatgagccgatcaaggaatgtggaaccaacgagtgcctggataataacggcgggtgctcccacgtatgcaacgatctgaaaatcggctatgagtgcgattgtcctgacggatttcagcttgtagcccagcggcgatgtgaagatatcgacgaatgccaggatccagacacgtgttcccagctgtgtgtgaatctggaggggggttataaatgccagtgtgaggaaggattccagctggatcctcacacaaaggcttgtaaggccgtaggatctatagcttacttgttttttacaaacaggcacgaagttagaaaaatgaccctcgatagatccgaatacacttcccttattccgaatctccggaacgttgttgccctggacactgaagtggcttcaaatcgaatttactggagcgatctcagtcagaggatgatctgcagtacccaacttgacagggcccatggggtgtctagttatgataccgtaatttccagagacatccaggccccagacggtttagcggtggactggattcactcgaatatctactggactgactccgtccttggcaccgtgtccgtggccgataccaagggtgtgaagcgcaaaacccttttcagggaaaatggcagcaagccgcgcgctatcgttgtcgatcctgtacatggattcatgtactggacagactggggtacacccgccaagatcaagaaagggggacttaacggcgtagacatctacagcctcgttaccgagaacattcagtggccgaacggaatcacacttgatctgctgagcggcaggctgtactgggttgattccaaattgcattccatcagtagtattgatgtgaacggaggtaaccgtaaaacaatccttgaagatgaaaagaggctggcgcatcctttttcgttggcagtgtttgaagacaaggtgttctggacagacatcataaatgaagctatcttcagcgccaatagactgacaggtagcgacgtgaacctgctggctgagaacttgctgagcccggaggacatggttctgttccacaatctcactcaacccaggggcgttaactggtgcgaacgaacaaccctgtccaatggtggctgccagtacctctgtttgcctgctccccagatcaacccccatagcccaaagttcacatgcgcttgcccagatggaatgttgctagccagagacatgcgatcgtgcctgacagaggcagaagcggccgtggccacacaggaaacttccactgtgcgacttaaggtgagctccacagccgtacgaacccagcatacgacgactcgccctgtccctgacaccagcaggctgcccggagccacccctggactaactacggtggagatagtaactatgtcacatcaggccctgggcgatgtagctggtcgcgggaacgagaaaaagcccagctctgtgagggccctctcaatcgttttacccattgtgcttttggtgttcttatgtctgggtgtgttcctcttgtggaaaaactggagactgaagaatattaacagtattaattttgataaccccgtttatcaaaagaccaccgaagatgaagtgcacatctgccataatcaggatggctacagttacccgtcacgacagatggtttctctcgaggatgacgttgct

SEQ ID NO: 11153 - DNA, 2580 bp, Artificial Sequence
  derived and/or modified sequence
atggggccgtggggatggaaactccgttggaccgttgctctcttgctggctgcggcaggcacggccgtgggcgaccgttgcgaacgcaatgagttccagtgccaggatggtaagtgcatcagctataaatgggtgtgtgatggctccgccgaatgccaggatggctctgatgaaagccaagagacctgcctcagcgtcacctgcaaatctggtgatttttcgtgcggcggacgagtcaataggtgcataccgcagttctggcggtgcgatggccaagtcgactgtgataacggcagcgatgagcagggctgtcctccaaaaacctgctcccaggacgaattccggtgccacgatggaaaatgcataagtcgccagttcgtgtgtgactcggaccgcgattgcctggatggctccgacgaggcgtcgtgtcccgtgctgacatgtgggcccgcttcctttcaatgtaactcctccacctgtataccccaattgtgggcgtgcgacaacgatcccgactgtgaggatggctcggatgagtggccgcaaaggtgccgaggactgtatgtttttcagggcgattcgtctccgtgctcagcgttcgaattccactgcctgtcgggtgaatgcatccactcaagttggcgctgcgacggggggccagactgcaaggataaatcggatgaggaaaattgcgctgtcgcgacatgtaggcccgatgaattccagtgctccgacggaaattgcatccatggcagtcgccaatgcgatcgggagtacgactgcaaagatatgagtgacgaagtgggatgtgtcaacgttaccctatgtgagggtccgaacaagttcaagtgccacagtggcgagtgcattaccttggacaaggtttgtaacatggcgcgagattgcagagactggagtgacgagcctatcaaggagtgtggaacaaacgagtgcttagacaataacgggggatgctcccacgtgtgtaacgacctgaagatcggatatgagtgcgattgtcctgacggtttccagctcgtggcgcagcggcgatgcgaggatattgacgagtgccaagaccctgatacctgttcacagttatgcgtgaaccttgagggtggatataaatgtcagtgtgaggagggctttcagctcgatccccacacaaaagcgtgcaaggccgtgggttccatcgcttacctgttcttcacgaaccgtcacgaggtgcggaaaatgactcttgatagatcggagtatacttcgcttatccctaacttgcgtaacgtcgtggccctggacacagaagtcgcttcgaaccgcatttactggagtgacctctcccaacgcatgatctgcagcacgcaactggatagggcgcatggcgtgagctcctacgataccgtgatctcgagggatattcaggccccggatggcctcgctgtggattggatccactccaacatatactggaccgactcggttttaggcaccgtcagcgtggccgataccaaaggagtaaagcggaagacgcttttcagggaaaacggaagtaagccccgggccatagtggtggatcccgtccacggatttatgtactggacggattggggaactccggctaagatcaaaaagggcggcctgaatggagtggatatctactccctggtgacagagaatatccagtggcccaatggcataactctggatttgctttcgggccgcttgtattgggtggactccaaattacattctatttctagcatcgacgtgaacggtggcaatcgtaagacgatcctggaagatgaaaaacgtctagcgcacccattttcactcgccgtctttgaagacaaggttttttggactgacatcattaacgaagctattttttccgcgaaccgtctcacgggatccgatgtgaatctgctggcagagaatctgctctcgcccgaggatatggtcctgttccataatctcacccagccaaggggagtaaactggtgcgaacgcacgacgctcagcaatggaggctgccagtacctgtgtctgcccgccccccaaataaatccgcattccccaaagtttacgtgcgcctgccctgatggtatgttgcttgcgcgcgatatgcggtcgtgcctgaccgaggcagaggccgcggtggccacacaggaaacgtccaccgtgcgcttgaaggtgagtagtactgcggtgcgcacccagcacacgacaacccgtccggtcccggacacatctcgcttgccgggcgcaaccccgggactgacaacggtggagatagtcactatgtcacaccaggctctgggcgatgtcgcgggtcgagggaatgagaagaagccaagttctgtccgggctctatccattgtgttgccgatcgtgctgcttgtcttcttgtgccttggtgtctttttgctgtggaagaactggcggttgaagaacatcaactccataaatttcgataacccagtttaccagaaaaccactgaagacgaggttcacatctgtcataatcaagatggctactcgtatccgtctcgccagatggtcagcctggaggatgatgttgca

SEQ ID NO: 11154 - DNA, 2580 bp, Artificial Sequence
  derived and/or modified sequence
atggggccttgggggtggaagctgcgctggactgtggcattgctgctcgctgcagcgggaaccgcggtgggagatcgatgcgaaaggaatgagtttcagtgtcaagatggcaagtgtatttcgtataagtgggtctgtgatggttcggctgagtgccaagatggatcggatgaatcgcaagaaacgtgcctctcagtgacctgcaagagcggggacttttcgtgcgggggaagagtcaacagatgtatcccgcaattttggcgttgcgatggtcaagttgactgtgacaatggctcggacgaacaggggtgtccccctaagacctgctcccaagatgaatttaggtgtcatgatggaaaatgtatcagccgccaattcgtgtgtgacagcgacagagactgtctggatgggtccgatgaggcttcctgccccgtgttgacctgtgggcctgcctcctttcaatgtaatagctccacctgcataccgcagttgtgggcatgcgacaatgaccctgactgtgaagatggttcggatgaatggccccagagatgccgggggctctacgtattccagggagattccagtccatgctcggcatttgaattccactgtctgagcggagaatgtattcattcatcgtggagatgtgatggcggtcccgattgtaaggataagagcgatgaggagaactgtgcagtggcaacctgtcgtccagacgaatttcaatgttcggatgggaactgcattcatggatcgcgacaatgtgatcgtgagtatgactgtaaggatatgtccgatgaagtgggatgcgtgaacgtgactctttgtgaaggtcccaacaaattcaagtgtcattcgggggagtgtattacgctcgacaaggtctgtaatatggccagggactgtagagattggagcgacgaaccgattaaagagtgtggaacgaacgaatgtctcgataacaatggaggatgcagccatgtgtgcaatgaccttaagattgggtacgagtgtgattgtccagacggttttcaactcgtcgcacaacggcgctgcgaggacatcgatgagtgccaggacccagatacctgctcccagctgtgtgtgaacctcgagggtggctacaagtgtcaatgcgaagaggggttccagctggatccacataccaaagcatgtaaagcggtgggttccattgcctacctgttctttactaaccggcacgaagtgcgcaagatgaccctggatcgttctgaatacactagcctcattcccaaccttagaaacgtggtggccttggacacggaagtggcctccaatcgcatctactggtccgatctttcgcaaagaatgatctgctccacccagctggatcgcgcacatggagtgtcatcgtacgacacggtgatttcacgcgatatccaagcaccagatggccttgcggtcgattggattcacagcaacatatactggactgattcagtgctggggaccgtgtcagtggcagatactaagggagtgaagagaaaaactctgtttcgagagaatgggtcaaaaccaagggcgattgtggtggaccctgtgcacggctttatgtactggaccgattggggtacgccagcaaagatcaaaaagggcgggctcaacggtgtggacatttactcgctcgtgactgaaaacattcagtggccaaacggtattactcttgatcttctgagcggacgcctgtactgggtggattccaagttgcactcgatttcatcgattgatgtcaacggcggaaaccgtaagaccatcttggaggatgaaaagagacttgcccacccattttcgcttgcagtgttcgaggataaggtgttctggaccgacatcataaatgaagccatcttcagcgcaaatcgtctcactggctcggacgtcaaccttcttgctgaaaacctcctttcgcctgaggatatggtgttgttccacaacctgacccagccaagaggcgtcaactggtgtgaaaggaccactctctccaacggaggatgtcagtacttgtgcttgcctgcaccacaaatcaatccgcattccccgaaattcacctgtgcgtgtcctgacggtatgctgcttgcacgggacatgaggtcatgcctgactgaagccgaagcagcagtcgcaacccaggaaacgtccacggtgcgcttgaaggtcagcagcaccgcagtgagaacccagcatactactactagacccgtgcctgatacctcgaggcttccaggagccactccaggcttgaccaccgtggaaatcgtgactatgtcccatcaagcccttggcgacgtggcaggtaggggaaatgaaaagaaaccatcgagcgtgcgagcactttccatcgtccttccaattgtgctcctggtgtttctctgccttggtgtgtttctgctgtggaaaaactggagattgaagaacattaactcaattaactttgacaatcccgtgtaccaaaagaccaccgaagatgaagtgcatatctgtcataaccaagatggatactcgtacccgtcccgccagatggtgtccctggaagatgatgtggca

SEQ ID NO: 11155 - DNA, 2580 bp, Artificial Sequence
  derived and/or modified sequence
atgggcccatgggggtggaaactgcggtggactgtggcgctgctcctggcggccgccgggactgcagtgggcgatcggtgcgagcgtaacgaatttcagtgccaagatggcaagtgtatctcatacaagtgggtgtgcgatgggagcgccgaatgtcaagatgggtccgatgaatcccaggaaacttgtctgtccgtgacgtgcaagtcgggagacttcagctgtggaggaagagtgaatcggtgtataccgcagttttggagatgcgatggccaagtcgactgtgataacggatcggatgagcagggatgcccacctaaaacctgttcgcaagatgaatttcgatgtcacgatggaaaatgcatttcgcgacagtttgtgtgcgactccgatcgggactgtcttgatggatccgacgaagcatcatgtccagtgcttacttgcggaccggccagctttcaatgtaatagctccacttgtatccctcaactttgggcatgcgataacgatcctgattgtgaggacggaagcgatgagtggcctcagagatgtagaggactttatgtgtttcaaggagactcctcgccatgtagcgcatttgaattccattgtcttagcggcgaatgtatccattcctcgtggcgatgcgatggcggtccggattgtaaggacaaatctgatgaagagaactgcgctgtggccacttgtcggcctgacgaattccagtgtagcgatggaaactgcattcatggatcacgccagtgtgatcgagaatacgattgcaaagacatgtcagatgaagtcggttgcgtgaatgtgactttgtgtgaaggacccaataagtttaagtgccattccggtgaatgtataacgcttgataaggtgtgtaatatggcaagagactgcagagactggtcggatgaaccaattaaggaatgtgggacgaacgaatgcctcgacaataacgggggctgttctcatgtgtgtaatgatctgaagatcggatacgagtgtgattgccctgatggttttcaactggtcgcccagcggagatgtgaagatatagacgagtgtcaggatccagatacctgttcccaactgtgtgtgaacctggagggtggctataagtgccagtgtgaggagggatttcagctggacccccataccaaggcctgtaaggccgtgggaagcatcgcgtacctcttcttcactaaccgccacgaagttaggaagatgacgcttgaccgcagcgaatatacttccctcattcccaacctgcgcaacgtcgtggcacttgacactgaggtggcatcaaaccgcatatactggagcgatctgtcgcagagaatgatttgttcaactcaactcgatcgcgctcacggtgtgtcaagctatgacaccgtcatttcgcgggatattcaagcacccgacggactggcggtcgattggatccattcaaatatctactggacggactcagtcctggggactgtgtctgtggcagacacgaagggcgtgaagcgcaagactctgtttcgggagaatggttccaagccacgtgccattgtcgtcgatcctgtgcacggattcatgtactggactgactggggcaccccagcgaagataaagaagggtggacttaatggagtcgacatttactcgcttgtcaccgagaacatacagtggccaaatgggataaccctggatcttctttctggtcgtctctactgggtggactcgaagctccattccatttcctcaatcgatgtgaacggtggtaaccgaaagaccattctggaagatgaaaaacgtctggctcatccatttagccttgcagtgtttgaggacaaggtgttttggactgatatcattaacgaggcaattttctcggccaatcgccttacggggtcagatgtgaacctgctggcagaaaacctgctttcgccagaggacatggtgcttttccataatctgacccaacctcgaggtgttaattggtgtgaaaggaccaccctctccaacggaggctgtcaatacctttgtctgcctgcccctcagatcaaccctcattcgcccaagtttacttgcgcatgtccggatggaatgcttctcgctcgggatatgaggtcgtgtttgactgaggcagaagctgcagtggccacccaggaaacgagcactgtcagacttaaggtgagctcgactgcagtccggacccaacatactactacccggccagtgcctgatacctcgcgcctgccgggtgcaaccccagggctcaccaccgtcgagattgtcactatgagccaccaggcgcttggtgatgtggcaggcaggggaaacgagaaaaagccgtcctccgtgcgggcactctccatagtgctgcccatcgtgctgcttgtctttctttgtcttggagtgtttttgctttggaagaactggaggctcaagaacatcaactcgatcaactttgacaacccagtgtaccaaaaaactaccgaagatgaagttcacatttgccacaaccaggatggatactcatacccatccaggcaaatggtttcacttgaggatgatgtggcc

SEQ ID NO: 11156 - DNA, 2580 bp, Artificial Sequence
  derived and/or modified sequence
atgggcccgtggggctggaagctccgctggaccgtggcgctcctgctggccgccgcggggaccgcagtgggggaccgctgcgaacggaacgagttccagtgccaagacggaaaatgtatttcgtacaaatgggtgtgtgacgggtctgctgagtgccaggacggctcagatgagtctcaagaaacctgcctgagcgtcacttgcaagtccggcgatttctcctgcggagggagagtgaaccggtgcatcccccagttttggcgctgtgacggccaggtggactgcgacaacggcagcgatgaacaggggtgcccgccgaaaacctgctcccaggatgagtttcgctgccatgatggtaagtgcatcagcagacaatttgtgtgtgattcggatcgtgactgcctcgacggaagcgacgaggcgtcctgtccagtgctcacttgtggacctgcatccttccagtgtaacagctccacctgcattccgcagctgtgggcctgcgacaacgacccggattgcgaggacggatcagacgaatggccccagcggtgccgcggcctgtacgtctttcagggggactcctcgccttgctccgcgttcgaatttcactgcttgtcaggagaatgcatccactcatcctggagatgcgacggaggtcctgactgcaaggacaaatcagacgaagaaaactgcgccgtggctacctgccgcccagacgaattccagtgctccgacggcaactgtatccacgggtcgcggcagtgcgaccgcgagtacgactgcaaagacatgtcggacgaagtcggctgcgtgaatgtgaccttgtgcgaaggaccgaacaagttcaagtgtcacagtggtgagtgcatcactttggataaggtgtgtaacatggcgcgcgattgcagagactggtccgacgaacctatcaaagaatgtggaaccaacgagtgcctggataacaatggcgggtgttcccatgtgtgtaacgatctgaagatcggttacgagtgcgactgtccggacggctttcagctggtggcgcagcgacgctgcgaagatatcgacgaatgtcaggatccggacacgtgctcccagctctgcgtcaatctggagggaggttacaagtgccaatgcgaagagggatttcagctcgatccgcataccaaggcgtgcaaggccgtgggctcgattgcctacctgtttttcacgaaccgccacgaagtgcggaaaatgaccctggatagatccgagtacacctccttgatccccaaccttagaaacgtcgtcgccctggataccgaagtcgcatcaaatcggatctactggtccgacctgtcgcagaggatgatctgctcaactcaactggaccgcgcgcacggagtttcttcgtacgatactgtcatttcgagagacatccaagcgccagatggactggcagtggattggatccactctaacatctactggaccgactcggtcctgggaactgtgtccgtcgccgacaccaagggtgtcaagcggaaaaccctgttccgcgaaaatggatcgaagccgcgcgcgatcgttgttgacccggtccatggattcatgtactggactgactggggaactccagccaagatcaagaagggaggcctgaatggagtggacatatactcgctggtgaccgaaaacatccagtggcctaatggcattactcttgatctgctgtccgggcgcctctactgggtcgactcgaagctgcattccatctcgtcgatcgatgtcaatggaggtaaccggaaaaccatcctcgaggacgagaagcgcctggcgcacccgttcagcctggcggtattcgaggacaaggtgttctggaccgatatcattaatgaggcaatcttctcggcaaacagacttaccggatccgacgtcaacctgctggcagaaaatcttctttcgccggaagatatggtgctgttccacaacctcactcagccacgcggcgtcaactggtgcgagcgcactactctctccaacggaggatgccagtacctttgcctgccagctcctcaaatcaatccacactcgccgaaattcacctgcgcgtgcccagacggcatgctcctggcccgggatatgagaagctgcctgactgaggccgaagcagcggtggcaacccaggagactagcactgtgagactgaaggtgtcgtcgaccgctgtgaggacccaacatactacgactcgtcctgtgccagatacttcccggctgccgggtgccactccggggctgactactgtcgaaattgtgactatgtcccaccaagccctgggcgatgtggccggacgcgggaacgagaaaaaaccttcctcggtgagagcgctgagcatcgtccttcccatcgtcctgctcgtgtttctgtgtctgggcgtctttctgctgtggaagaactggaggctcaaaaacatcaattccatcaattttgataatccggtgtaccagaaaactaccgaagatgaagtgcacatctgccacaaccaagatgggtactcgtacccgagcagacaaatggtgtccctggaggatgatgtggct

SEQ ID NO: 11157 - DNA, 2580 bp, Artificial Sequence
  derived and/or modified sequence
atggggccatggggctggaaactgaggtggacagtcgcgcttctacttgcagcggctgggacagcagtgggtgataggtgcgagagaaacgagttccagtgtcaggatgggaaatgcatttcgtacaaatgggtgtgcgatggatcagcagagtgtcaagatggatctgatgagagtcaagagacatgtctctccgtcacttgcaaatcaggggactttagctgcggaggacgcgtcaaccggtgcattcctcagttctggcggtgtgacggccaggtggattgcgacaacgggtctgatgaacaaggatgtcccccaaaaacatgttcacaggacgagttcaggtgccacgatggaaagtgtatttctagacaatttgtgtgcgactcagatagggactgtttggacggaagcgatgaagccagctgccccgttctgacatgtggccctgctagctttcaatgcaacagcagcacctgtattccccaactttgggcctgcgataacgacccagactgtgaggatgggagcgatgaatggcctcaaagatgtaggggtttgtatgtattccagggcgactcgagtccgtgctccgctttcgagttccactgccttagcggcgagtgtatccacagctcatggcggtgcgacggtggacccgattgcaaagacaagagcgatgaagaaaactgtgccgttgctacctgccgccccgatgaatttcaatgctccgatggcaattgcatacatgggtccagacagtgtgatagagaatatgactgtaaagacatgtccgatgaggtgggctgcgtgaacgtgactttgtgcgaaggacccaacaagtttaagtgccatagcggtgaatgcatcacactggataaagtctgcaacatggcaagagattgcagggactggtcagatgagcctattaaagagtgtggaacaaacgaatgtctcgacaacaatggaggctgctctcatgtatgtaacgatttgaaaatcggatacgagtgcgattgtcccgacggctttcaacttgtggcccaacgcaggtgcgaggatatagatgaatgtcaggatccggatacctgcagccagctgtgcgtcaacctggaaggggggtataaatgtcagtgtgaagaaggttttcaactcgatcctcacactaaagcatgtaaggctgtcgggagtatcgcttatcttttttttacgaataggcatgaggtgcgtaaaatgacactggacagaagcgagtatactagccttatcccaaatctgcgcaatgtggtggctttggataccgaggtagccagcaaccgcatatactggtctgacctgtctcaaagaatgatatgctcaacccagctggatagagcacatggagtgtcctcctacgacactgtcatctcaagagatatccaggcacccgacggacttgctgtcgattggatacatagcaacatttactggacagattcagtacttggaacagtctctgtcgcggatacaaaaggagttaagcgcaagaccctgttcagggagaacggctcaaaacctcgcgcaattgtggtggatccggtacatgggtttatgtactggactgattggggaactccagctaagatcaagaaaggcggtctcaatggagttgatatctattctctcgtgaccgagaacattcagtggcctaatggcattaccctcgatttgctgagcggacggttgtattgggtggacagcaagcttcacagcatcagctctatcgacgtaaacggcggcaacagaaaaacaattctggaagatgaaaaaaggctggcccacccattttcgttagctgttttcgaggacaaagtcttttggactgatatcatcaacgaagccatctttagcgctaaccggcttacaggtagcgacgtgaatctgctagccgaaaacctgttgtcacctgaggatatggttctgttccataaccttacacaaccgcggggagtcaactggtgcgagcggactaccttatctaacggaggttgtcaatacttgtgcttgccggccccccagataaacccacacagccccaagttcacttgcgcttgccctgatggaatgctgcttgcaagagatatgaggagctgtctgactgaggctgaggctgcagtggctacccaagagacctccacagttcgactcaaagtcagcagcacggccgtgaggacccagcacacgacgaccaggcctgtgcccgacacatcgcggctccctggcgctacgccaggtctgacaaccgtcgagattgtcacaatgagccaccaggcactgggcgatgttgccggcaggggtaatgaaaaaaagccgtccagtgtgagagcactttctatagtgttacccatcgtattgcttgttttcctctgccttggcgtctttctgctctggaagaactggcggctcaaaaacatcaattcaatcaactttgataaccctgtttatcaaaagacaaccgaagacgaggtgcacatctgtcacaaccaggatggatatagctatccatcccgtcaaatggttagcctggaggatgacgtggca

SEQ ID NO: 11158 - DNA, 2580 bp, Artificial Sequence
  derived and/or modified sequence
atgggtccatggggctggaaactgcgctggactgtagcactgctgctggcagccgcgggcacggcggtgggtgatcgatgtgagcgcaacgagttccagtgccaggatggtaaatgcatttcctacaaatgggtgtgtgatggctccgctgagtgccaggacggcagcgatgaaagccaggaaacctgtcttagcgtcacctgtaaaagcggtgacttttcctgtggcggacgggtcaatcgttgtatcccgcaattttggcgctgtgatggccaagtggactgtgataatgggtctgatgaacagggttgtcctccaaagacctgctctcaagacgaatttcgctgccatgatgggaagtgcatcagccgccagtttgtctgcgacagcgatcgcgactgtctggatggttcagacgaagcttcctgcccagtactgacctgtgggcccgcaagttttcaatgcaattccagcacctgtatcccccagttgtgggcgtgcgacaacgacccagactgtgaggacggtagcgatgaatggcctcagcgctgtagaggtctgtacgtgtttcagggcgattcgtcaccatgctccgcgttcgagtttcattgcctgagcggcgaatgtattcatagcagttggcggtgcgacgggggcccggattgtaaagacaagtctgatgaggaaaactgcgcagtggccacatgtcgcccagacgagttccagtgttccgacgggaactgcatccacggcagccgccaatgcgatcgcgaatacgattgcaaggacatgtcggacgaggtcgggtgcgtaaatgtcactctgtgcgagggccctaacaagttcaagtgccactctggcgagtgtattacgttagataaggtctgcaatatggctagggattgtcgtgactggagcgatgaaccgattaaagagtgcggtaccaatgagtgtttagacaacaatggtggttgctcccacgtgtgtaacgatctgaaaatcggttatgaatgcgattgtccagacggtttccagctggttgcccaacgtcgctgcgaagatatcgatgaatgccaggatccagacacctgctcccagctctgcgtgaacttggagggcgggtacaagtgccagtgcgaggaaggcttccagttagatccacacactaaagcttgcaaggccgtcggttctatcgcatacctgttcttcactaatagacacgaagtgcggaaaatgaccctggatcggagcgagtatacgagcctgataccgaatctgcgcaatgtcgtcgccctggacactgaagtcgcgagcaaccgcatctactggagcgatctgtcacagcgcatgatttgttcaacccaacttgatcgcgcccacggggtgtcaagctatgataccgttatctctcgggacattcaggctccggacggtctggcggtcgactggatccacagcaacatttactggacggatagcgtcttgggtacggtgagcgtggccgacacgaagggcgttaagcgtaaaaccttgttccgcgagaacggcagcaagcctcgcgcaatcgttgtcgaccctgtccacggtttcatgtactggactgattgggggacccctgcaaagattaaaaaaggaggcttgaacggcgtggacatctactctctggtcacggagaatatccagtggcctaacggaattactctggacctgctgagcgggcgcctatactgggttgattcaaagctgcacagcattagcagcattgacgttaacgggggcaaccggaaaacgattctggaagacgagaagaggttggcccaccctttttcacttgctgtgttcgaggataaagtgttttggaccgatatcatcaatgaagcaattttcagcgcgaaccgcctgaccgggagcgacgtcaatctgctagccgagaatctgctgagccctgaagatatggtgctgttccacaatctgacccaaccacgcggtgttaactggtgcgaacgcaccactcttagcaacggcggatgccagtacctgtgcctgcctgctccacaaattaacccacactctccgaaatttacctgcgcttgcccggacggtatgctcttggcccgcgacatgcgctcctgcctgactgaggcggaggccgcggtggctacgcaggagacttctactgtccgcctgaaggtcagcagcactgccgtccggactcaacataccacgacccgcccggttcctgatacttcccgattaccgggtgccaccccgggcctgaccactgtggaaatcgtgacgatgtcacaccaagccctgggggatgtcgctggacgcggtaatgaaaagaagccttccagcgttcgcgctctgagcattgtgctcccgatcgtcctgctggtctttctgtgcctcggggtatttctgctgtggaagaactggcggctgaagaatattaacagcatcaactttgacaatcctgtctaccagaaaacaaccgaggatgaggtccatatctgtcacaaccaggatggttacagctatccttcccgccagatggtttcactggaggacgatgtcgct
